United States Patent Application Publication US 2018/0126003 A1 - sequence listing, part 81

SEQ ID NO: 147279 - DNA, 4212 bp, Artificial Sequence
  derived and/or modified sequence
atggctacgcaacagaaagcaagcgatgagagaatatcacagtttgaccataatctgctgcccgaactgtcggctctgctgggcctcgacgctgtgcaactagccaaagagctggaggaagaggagcagaaagagcgtgctaagatgcagaaaggctataatagtcagatgcgatcagaggccaagcggcttaagacctttgtgacttatgaaccctatagttcctggatcccccaggagatggcagccgcaggcttctattttacaggcgtgaaaagtggcatccagtgtttctgctgcagtctcattctgtttggcgcaggattaacgcgactgcccattgaagatcacaagcggttccaccctgactgcggcttcctgctcaacaaggatgtgggaaatatcgcaaagtacgacattagagttaaaaatctgaagagtcgcctgagaggcggaaagatgaggtatcaggaagaagaagcacgcctggcaagcttccgcaactggcctttttacgttcagggcatctctccatgcgtgttgagtgaagccggtttcgtgttcaccggaaagcaggacactgtccagtgtttttcatgtggtggctgtttaggcaattgggaggagggagacgatccgtggaaagaacacgcaaaatggttccccaaatgtgagttcctgagatccaagaagtcctccgaggagattactcaatacatccaatcatacaaaggtttcgtagatatcactggcgagcactttgtgaattcctgggtgcagagagagctgcctatggcgtctgcgtactgcaacgactctattttcgcctatgaggagctcaggctcgacagtttcaaagattggccccgagaatccgctgtgggcgtggcagcactagccaaagccggactgttctatacggggatcaaagacattgtgcaatgtttctcttgcggtggttgtctggagaaatggcaagaaggcgacgaccccctggacgatcacacacgctgctttcctaattgtccgtttcttcaaaacatgaaaagctctgccgaagtgacccctgatctgcagagcagaggggaactttgcgaattgttggaaacaacgagcgagtctaacctcgaggactccatagccgtgggccctatcgtgccagagatggctcagggggaagctcagtggtttcaggaggcgaagaatttgaacgagcagctgagagccgcttataccagcgcctctttccgccacatgtcactgttggacatttcatccgatctggccacagaccacctgttgggatgcgacctgtctatcgccagtaaacacatctctaaacctgtgcaggaacctctcgtgctgccagaggtgtttggaaatctgaattcagtgatgtgtgtcgaaggggaggcaggaagcgggaaaactgtgctgctgaagaaaattgccttcctttgggcctctggatgctgcccactgctcaacaggttccagctggtcttctacctatccctatctagcacacggccagacgaagggctggcatcaatcatttgcgaccagctgctcgagaaggaagggtcggtgaccgagatgtgtgttcgaaacattattcagcagctcaaaaatcaagtgttattccttttagatgactataaagagatctgcagcattccccaagtcattggaaaactcatccagaaaaaccacctgtctcgcacgtgtctgctgatcgctgtgagaaccaacagagcaagagacataaggcgctacttggaaaccatcctggagatcaaagcttttccgttttacaacaccgtttgcatccttcgaaagcttttttcacacaatatgaccaggctccggaaatttatggtctacttcggaaaaaatcagagcctgcagaaaatccagaagactcctctctttgtagctgcaatctgcgctcactggtttcagtatccctttgatccctcattcgatgatgtggccgtcttcaagtcctatatggagcggttatcactccgcaataaagccactgccgagattctgaaggccactgtatcctcatgtggggagctcgccctcaaggggtttttcagctgttgtttcgaatttaacgatgacgacttggccgaggcaggggtggatgaagacgaggatcttaccatgtgcctcatgtccaaattcaccgcacagcgactgcgccctttctaccggttcctgtcccctgcatttcaagaattcttagccggaatgcggctgatcgagttgctggacagtgatagacaagagcaccaggatctcggactgtatcacctgaagcagattaattcacctatgatgactgtctccgcctacaacaattttctcaactatgtgagttcacttccatcgaccaaggccggacccaaaatcgtaagtcatctgcttcatctggtcgataacaaggaaagcctggaaaatatttcagagaacgacgattacctgaaacaccagcctgagatttctctgcagatgcagttgctgcggggattgtggcaaatctgtcctcaggcttactttagtatggtgtccgagcacctgcttgtcctcgccctgaaaacagcttaccaaagcaatacagtggcggcatgttcacccttcgtgctgcaattcctgcagggacggactttgacactgggcgctctcaatctgcagtacttcttcgaccaccccgaaagcctgagccttctgcgctcaattcatttccccatccggggtaacaaaacatcaccgagggcacatttttcggtgttggagacgtgttttgataaatcgcaggtgcctaccatcgaccaggattacgcatccgcgttcgaacccatgaatgaatgggagaggaatctcgcagaaaaagaagacaacgtgaaatcttacatggacatgcagagaagagcgagcccagacttatctaccgggtactggaagttatctcccaaacaatacaaaataccttgcctggaggttgacgtcaacgacattgacgttgtcggccaggacatgctcgaaatactgatgaccgtgtttagtgcatcacagcggatagagctccatctgaaccattcacggggatttattgagtcaataaggccggcactcgagttatctaaggcttccgttaccaaatgtagcatatcaaagctagagctcagcgctgctgagcaggaacttctcctgacacttccttccttggagagcttggaggtgtccggcaccatacagagtcaggaccagatttttcccaaccttgataagttcctttgcttgaaggagttgagtgtggatctggaaggcaacattaatgtcttctccgtgattcctgaggagtttccaaatttccaccacatggaaaaactgctgattcagatctctgccgaatacgatccttctaaactcgtgaagttgatccagaatagcccaaacctgcacgtgtttcacctgaagtgtaactttttctctgattttggttcactgatgaccatgctggtgtcttgtaagaagctgaccgagatcaaattctcagattctttcttccaagctgtcccttttgtcgccagcctacccaacttcattagcctgaagatcctcaatctcgaagggcaacagtttccggacgaggagactagcgaaaaatttgcatacatcctggggagcctatctaatctagaggagctgattctgccaacaggcgatggaatatatagagtggccaaactgataatacagcaatgccagcagctccattgcctaagagtgttatcattcttcaaaactctgaatgatgattctgttgtggagatagcaaaagtggcaatcagtggcggattccagaaacttgagaatctcaaattatctatcaaccataagatcaccgaagaaggctataggaacttttttcaggcactggataacatgcctaatctccaggagctcgacatcagcaggcactttaccgaatgtatcaaggcacaggccacaactgttaaatccttgagccaatgcgtgctgcggctacctcggctgattcggctgaatatgctatcctggctgttggacgctgacgacatagccctgctgaatgtgatgaaagaacgacatccacagtctaaatacctgactattctccaaaaatggattttgccattttctcctattatccaaaagtag

SEQ ID NO: 147280 - protein, 391 aa, Artificial Sequence
  derived and/or modified sequence
MADIDNKEQSELDQDLDDVEEVEEEETGEETKLKARQLTVQMMQNPQILAALQERLDGLVETPTGYIESLPRVVKRRVNALKNLQVKCAQIEAKFYEEVHDLERKYAVLYQPLFDKRFEIINAIYEPTEEECEWKPDEEDEISEELKEKAKIEDEKKDEEKEDPKGIPEFWLTVFKNVDLLSDMVQEHDEPILKHLKDIKVKFSDAGQPMSFVLEFHFEPNEYFTNEVLTKTYRMRSEPDDSDPFSFDGPEIMGCTGCQIDWKKGKNVTLKTIKKKQKHKGRGTVRTVTKTVSNDSFFNFFAPPEVPESGDLDDDAEAILAADFEIGHFLRERIIPRSVLYFTGEAIEDDDDDYDEEGEEADEEGEEEGDEENDPDYDPKKDQNPAECKQQ

SEQ ID NO: 147281 - protein, 264 aa, Artificial Sequence
  derived and/or modified sequence
MADIDNKEQSELDQDLDDVEEVEEEETGEETKLKARQLTVQMMQNPQILAALQERLDGLVETPTGYIESLPRVVKRRVNALKNLQVKCAQIEAKFYEEVHDLERKYAVLYQPLFDKRFEIINAIYEPTEEECEWKPDEEDEISEELKEKAKIEDEKKDEEKEDPKGIPEFWLTVFKNVDLLSDMVQEHDEPILKHLKDIKVKFSDAGQPMSFVLEFHFEPNEYFTNEVLTKTYRMRSEPDDSDPFSFDGPEIMGCTGCQIDWKK

SEQ ID NO: 147282 - protein, 385 aa, Artificial Sequence
  derived and/or modified sequence
KEQSELDQDLDDVEEVEEEETGEETKLKARQLTVQMMQNPQILAALQERLDGLVETPTGYIESLPRVVKRRVNALKNLQVKCAQIEAKFYEEVHDLERKYAVLYQPLFDKRFEIINAIYEPTEEECEWKPDEEDEISEELKEKAKIEDEKKDEEKEDPKGIPEFWLTVFKNVDLLSDMVQEHDEPILKHLKDIKVKFSDAGQPMSFVLEFHFEPNEYFTNEVLTKTYRMRSEPDDSDPFSFDGPEIMGCTGCQIDWKKGKNVTLKTIKKKQKHKGRGTVRTVTKTVSNDSFFNFFAPPEVPESGDLDDDAEAILAADFEIGHFLRERIIPRSVLYFTGEAIEDDDDDYDEEGEEADEEGEEEGDEENDPDYDPKKDQNPAECKQQ

SEQ ID NO: 147283 - DNA, 1176 bp, Artificial Sequence
  derived and/or modified sequence
atggctgatatcgataacaaggagcaaagcgagttggaccaggacctggatgacgtcgaggaggttgaggaggaggagaccggggaagagaccaagctgaaagccaggcagctgactgtgcagatgatgcagaatccccagatcctggccgcacttcaggaaaggctcgatggtttggtggaaacccctacaggttatatcgagtctcttccaagagtggtcaaaaggagggtgaatgcgcttaagaatctgcaggtaaaatgcgcccagatagaggccaagttctacgaggaagtgcacgacctggaaaggaaatacgccgtgctgtaccaacctctgttcgacaaacgttttgaaatcatcaacgctatctatgagccgacagaagaagagtgtgaatggaagcccgacgaagaagatgagatctccgaagaacttaaggaaaaggctaagattgaggacgaaaaaaaagatgaagaaaaggaggaccccaaaggtattcccgaattttggctgacagtctttaagaatgtggacttgctgtcagatatggttcaggagcatgatgagcccattttgaaacacctgaaggacatcaaggtgaaatttagtgacgccggccaaccaatgagtttcgtcctcgaattccattttgagccgaatgagtacttcactaacgaagtgctgaccaagacgtaccgtatgcgctcagaaccagacgacagtgatcccttctctttcgatgggccggagattatgggctgtaccggctgtcaaatcgactggaagaaagggaagaacgtaacgctgaagactatcaagaagaaacagaagcataaagggagaggtaccgtgagaactgtaaccaagacagtgagcaacgattcattttttaactttttcgcgcctcctgaagtgccagaatcaggtgaccttgacgatgatgccgaagctatactggcagctgactttgagatcgggcattttctccgtgaaagaatcattccacgttcagtattgtatttcacaggcgaggctatcgaagatgatgatgatgactacgatgaagagggggaagaggcggacgaagagggagaggaagagggtgatgaggaaaatgaccctgattatgatccaaagaaagatcagaatcccgccgaatgtaagcagcaatag

SEQ ID NO: 147284 - DNA, 1176 bp, Artificial Sequence
  derived and/or modified sequence
atggccgacatcgacaacaaggagcagagcgagctcgatcaggatctcgacgacgtggaagaggtcgaagaagaggagactggagaggaaacaaaactgaaagctaggcaattaaccgtgcagatgatgcaaaacccgcagattctcgctgcactgcaagaacgcctggacggactggtggaaactccgactggatacattgagagccttccacgcgttgtgaagcgtcgcgttaacgcactaaaaaatctgcaggtgaagtgcgcgcagatcgaagcaaaattctatgaagaagtgcacgacttagagcggaagtacgccgtactgtaccaacccctctttgacaagcgattcgaaatcattaacgccatttacgagcccacggaagaagagtgcgagtggaaacctgatgaagaggatgagatctccgaagagttaaaagaaaaagccaagatagaggacgaaaagaaagacgaggagaaggaggatccaaaagggatacctgagttctggttaacggtctttaaaaacgtggatctgctgtctgatatggtgcaagaacacgatgagcccattctaaaacatctgaaggacatcaaggttaaatttagcgacgccggacaaccgatgtcatttgtattggaattccattttgagcccaacgagtatttcacaaatgaagtgcttaccaagacatataggatgagatccgagcccgacgactccgatcccttttcctttgatgggccggaaatcatgggctgcaccggttgtcagatcgactggaaaaaaggaaaaaacgtgacacttaagactatcaagaagaagcagaaacataagggcagggggaccgtcagaacggtgacaaaaacagtcagcaacgatagcttctttaatttctttgcaccccccgaagttcctgaaagcggtgacctggatgatgatgcggaggctatattggcggccgactttgagattggccatttcctacgtgagaggattattcctagaagcgtgctctacttcacaggcgaggcaatcgaagacgatgatgacgactatgacgaggaaggagaagaagccgacgaagagggtgaggaagagggtgatgaagagaatgacccagattatgacccgaagaaggatcagaatcccgccgaatgcaagcaacagtag

SEQ ID NO: 147285 - DNA, 972 bp, Artificial Sequence
  derived and/or modified sequence
atgatgcaaaaccctcagatcctggctgcgcttcaagaacgcctcgacggcctggtagaaacaccgacaggctatatagagagcttgccccgggtcgtgaagcgacgcgttaatgccctgaagaacctgcaggtcaaatgtgcccagatagaagctaagttttacgaggaggttcacgacctagagagaaagtacgccgtgctgtatcaaccactttttgacaaggaggagcttaaggaaaaagcaaaaattgaagacgaaaagaaggatgaagagaaggaagaccctaagggaattccggaattttggctgacagtttttaaaaatgttgacctcctttctgacatggtgcaggaacacgatgaacccatcttgaaacatttgaaagatattaaagtcaaattttccgatgcaggccagcccatgagcttcgtgcttgaattccattttgagccgaacgaatacttcactaacgaggtcctcactaaaacatataggatgcggagtgagccagacgacagcgaccctttctctttcgacggccctgaaattatgggatgcacaggatgccagatcgattggaaaaaaggcaagaatgtcaccctcaagaccatcaagaagaagcagaagcacaaaggaagaggaaccgttaggacagtgactaagacggtgtccaacgatagtttctttaacttcttcgcccccccagaggtgcccgaatctggagacctcgatgatgacgccgaagccatcctagctgccgacttcgagatcggtcacttcctgagagaaagaattattccgcggtctgttctgtactttaccggcgaggccatagaggatgacgacgatgattatgatgaagaaggagaagaggccgacgaggaaggcgaagaggagggcgatgaagagaatgaccccgattacgaccctaagaaagaccagaatcccgctgaatgtaagcagcaatag

SEQ ID NO: 147286 - DNA, 1050 bp, Artificial Sequence
  derived and/or modified sequence
atgatgcagaatccgcaaatcctggccgccctgcaggagcgtctggacgggctcgtcgaaacacccactgggtacatcgaaagcttaccacgtgtggtgaagagaagggtgaatgcccttaaaaacctgcaagtgaaatgcgcccagatcgaggcaaaattctacgaggaggttcatgacttggaaagaaagtatgctgtgctgtatcagcctctgtttgacaaacgtttcgagattattaatgctatctatgaaccgaccgaggaggagtgtgagtggaagcccgacgaggaggacgagatttccgagcttaaagagaaagccaagattgaagacgaaaaaaaggacgaggagaaagaagaccctaaggggatccctgagttttggttgacagtctttaagaatgttgacctgttgagcgacatggtgcaagaacatgacgagccaatcctaaagcatcttaaggatatcaaagtcaagttcagtgatgccgggcagcctatgtccttcgtgttggaattccatttcgaacctaacgagtattttacaaatgaggtgctgacaaagacttaccgtatgcggtcggagccagacgatagcgatcctttctcattcgacgggccggaaatcatggggtgcaccggatgccagattgactggaagaaagggaaaaatgtcaccctcaaaactattaaaaaaaagcagaagcacaagggaaggggaacagtgaggactgtgaccaaaaccgtgtccaatgatagctttttcaatttcttcgccccccctgaggtgcctgagagcggcgatctcgatgacgacgccgaggctatcttggcagcggattttgagataggccatttcttgagagagagaattattcctcggagtgtgctttattttacaggcgaagctatcgaggacgacgatgatgattacgacgaagaaggcgaagaggccgatgaagaaggagaggaagaaggtgacgaggagaacgaccctgattacgatcccaagaaagatcaaaaccctgctgagtgcaagcagcagtag

SEQ ID NO: 147287 - DNA, 1158 bp, Artificial Sequence
  derived and/or modified sequence
aaggagcaaagcgaactagatcaggatttggatgatgtagaggaagtggaggaggaagagacaggagaggaaaccaaactgaaggcacgccagctgaccgttcagatgatgcaaaatccccagattttggcagccctgcaagagagattggacggacttgttgagacccccacgggctatatcgaatccttgccacgggttgtgaagcggcgcgtgaatgctcttaagaacttgcaggtgaagtgcgcgcagatcgaggccaagttttacgaggaagtacacgacctggaaaggaagtacgcagttttatatcagcccttatttgacaagcggtttgaaattattaatgcaatctacgagcctacagaggaggaatgtgagtggaagcccgatgaagaagacgagataagtgaagagctgaaggaaaaagcaaagatcgaggatgaaaagaaagatgaggaaaaggaggatccaaaagggattcctgagttctggttgactgtgtttaaaaatgtggacttgctgtctgacatggttcaggaacacgacgaaccgatcctcaagcacctgaaggatatcaaagttaaattcagcgatgccggtcaaccaatgtcctttgtgctggagttccacttcgagccaaatgagtacttcacgaacgaagtgttgaccaaaacttatcgtatgagatcagagccagacgattccgatcccttttctttcgatggcccggaaattatggggtgtaccggatgccaaattgattggaagaagggtaaaaacgtgacccttaagactattaaaaagaaacagaagcacaagggccgtgggacagtgagaacagtgacgaaaactgtcagtaacgactctttctttaatttttttgcccctccggaggtcccagagtctggagacttggatgacgatgccgaggcgatcttggcggcggattttgagattggacacttcttgcgcgaacgaattatcccccggagtgtgctctacttcacaggggaggcaatcgaggatgacgatgacgactacgacgaggaaggcgaggaggcggacgaagagggtgaggaagaaggagacgaggagaatgaccctgactacgacccaaaaaaggatcagaatcccgccgagtgcaaacagcagtag

SEQ ID NO: 147288 - DNA, 1176 bp, Artificial Sequence
  derived and/or modified sequence
atggctgacatcgacaacaaggagcagagcgagctggaccaggacctggatgatgtggaggaggtggaggaggaggagactggagaggagaccaagctgaaggcccggcagctgactgtgcagatgatgcagaacccccagatcctggccgccctgcaggagcggctggatggcctggtggagacccccaccggctacatcgagagcctgccccgggtggtgaagagaagagtgaatgccctgaagaacctgcaggtgaagtgtgcccagatcgaggccaagttctatgaggaggtgcatgacctggagaggaaatatgctgtgctgtaccagcccctgtttgacaagagatttgagatcatcaatgccatctatgagcccacagaggaggagtgtgagtggaagccagatgaagaagatgagatcagcgaggagctgaaggagaaggccaagattgaagatgagaagaaggatgaggagaaggaggaccccaagggcatccctgagttctggctgactgtgttcaagaatgtggacctgctgagtgacatggtgcaggagcatgatgagcccatcctgaagcacctgaaggacatcaaggtgaagttcagtgatgctggccagcccatgagctttgtgctggagttccactttgagcccaatgagtacttcaccaatgaggtgctgaccaagacctacaggatgaggtctgagccagatgacagcgaccccttctcctttgatggccctgagatcatgggctgcaccggctgccagattgactggaagaagggcaagaatgtgaccctgaagaccatcaagaagaagcagaagcacaagggccggggcaccgtgaggacagtgaccaagacagtgtccaatgacagcttcttcaacttctttgcccctcctgaggtgcctgagagcggggacctggatgatgatgctgaggccatcctggccgctgactttgagatcggccacttcctgcgggagcgcatcatccccaggtctgtgctgtacttcaccggggaggccattgaagatgatgatgatgattatgatgaggagggggaggaggctgatgaggagggggaggaggagggagatgaggagaatgaccctgactatgaccccaagaaggaccagaacccagctgagtgcaagcagcagtag

SEQ ID NO: 147289 - DNA, 972 bp, Artificial Sequence
  derived and/or modified sequence
atgatgcagaacccccagatcctggccgccctgcaggagcggctggatggcctggtggagacccccaccggctacatcgagagcctgccccgggtggtgaagagaagagtgaatgccctgaagaacctgcaggtgaagtgtgcccagatcgaggccaagttctatgaggaggtgcatgacctggagaggaaatatgctgtgctgtaccagcccctgtttgacaaggaggagctgaaggagaaggccaagattgaagatgagaagaaggatgaggagaaggaggaccccaagggcatccctgagttctggctgactgtgttcaagaatgtggacctgctgagtgacatggtgcaggagcatgatgagcccatcctgaagcacctgaaggacatcaaggtgaagttcagtgatgctggccagcccatgagctttgtgctggagttccactttgagcccaatgagtacttcaccaatgaggtgctgaccaagacctacaggatgaggtctgagccagatgacagcgaccccttctcctttgatggccctgagatcatgggctgcaccggctgccagattgactggaagaagggcaagaatgtgaccctgaagaccatcaagaagaagcagaagcacaagggccggggcaccgtgaggacagtgaccaagacagtgtccaatgacagcttcttcaacttctttgcccctcctgaggtgcctgagagcggggacctggatgatgatgctgaggccatcctggccgctgactttgagatcggccacttcctgcgggagcgcatcatccccaggtctgtgctgtacttcaccggggaggccattgaagatgatgatgatgattatgatgaggagggggaggaggctgatgaggagggggaggaggagggagatgaggagaatgaccctgactatgaccccaagaaggaccagaacccagctgagtgcaagcagcagtag

SEQ ID NO: 147290 - DNA, 1050 bp, Artificial Sequence
  derived and/or modified sequence
atgatgcagaacccccagatcctggccgccctgcaggagcggctggatggcctggtggagacccccaccggctacatcgagagcctgccccgggtggtgaagagaagagtgaatgccctgaagaacctgcaggtgaagtgtgcccagatcgaggccaagttctatgaggaggtgcatgacctggagaggaaatatgctgtgctgtaccagcccctgtttgacaagagatttgagatcatcaatgccatctatgagcccacagaggaggagtgtgagtggaagccagatgaggaggatgagatcagcgagctgaaggagaaggccaagattgaagatgagaagaaggatgaggagaaggaggaccccaagggcatccctgagttctggctgactgtgttcaagaatgtggacctgctgagtgacatggtgcaggagcatgatgagcccatcctgaagcacctgaaggacatcaaggtgaagttcagtgatgctggccagcccatgagctttgtgctggagttccactttgagcccaatgagtacttcaccaatgaggtgctgaccaagacctacaggatgaggtctgagccagatgacagcgaccccttctcctttgatggccctgagatcatgggctgcaccggctgccagattgactggaagaagggcaagaatgtgaccctgaagaccatcaagaagaagcagaagcacaagggccggggcaccgtgaggacagtgaccaagacagtgtccaatgacagcttcttcaacttctttgcccctcctgaggtgcctgagagcggggacctggatgatgatgctgaggccatcctggccgctgactttgagatcggccacttcctgcgggagcgcatcatccccaggtctgtgctgtacttcaccggggaggccattgaagatgatgatgatgattatgatgaggagggggaggaggctgatgaggagggggaggaggagggagatgaggagaatgaccctgactatgaccccaagaaggaccagaacccagctgagtgcaagcagcagtag

SEQ ID NO: 147291 - DNA, 1158 bp, Artificial Sequence
  derived and/or modified sequence
aaggagcagagcgagctggaccaggacctggatgatgtggaggaggtggaggaggaggagactggagaggagaccaagctgaaggcccggcagctgactgtgcagatgatgcagaacccccagatcctggccgccctgcaggagcggctggatggcctggtggagacccccaccggctacatcgagagcctgccccgggtggtgaagagaagagtgaatgccctgaagaacctgcaggtgaagtgtgcccagatcgaggccaagttctatgaggaggtgcatgacctggagaggaaatatgctgtgctgtaccagcccctgtttgacaagagatttgagatcatcaatgccatctatgagcccacagaggaggagtgtgagtggaagccagatgaagaagatgagatcagcgaggagctgaaggagaaggccaagattgaagatgagaagaaggatgaggagaaggaggaccccaagggcatccctgagttctggctgactgtgttcaagaatgtggacctgctgagtgacatggtgcaggagcatgatgagcccatcctgaagcacctgaaggacatcaaggtgaagttcagtgatgctggccagcccatgagctttgtgctggagttccactttgagcccaatgagtacttcaccaatgaggtgctgaccaagacctacaggatgaggtctgagccagatgacagcgaccccttctcctttgatggccctgagatcatgggctgcaccggctgccagattgactggaagaagggcaagaatgtgaccctgaagaccatcaagaagaagcagaagcacaagggccggggcaccgtgaggacagtgaccaagacagtgtccaatgacagcttcttcaacttctttgcccctcctgaggtgcctgagagcggggacctggatgatgatgctgaggccatcctggccgctgactttgagatcggccacttcctgcgggagcgcatcatccccaggtctgtgctgtacttcaccggggaggccattgaagatgatgatgatgattatgatgaggagggggaggaggctgatgaggagggggaggaggagggagatgaggagaatgaccctgactatgaccccaagaaggaccagaacccagctgagtgcaagcagcagtag

SEQ ID NO: 147292 - DNA, 1176 bp, Artificial Sequence
  derived and/or modified sequence
atggccgacatcgacaacaaggagcagagcgagctggaccaggaccttgacgacgtggaggaggttgaggaggaggagacgggagaagaaaccaaattaaaagctcgtcagcttacagtgcaaatgatgcaaaacccccaaattctagccgccctgcaggaaagattagatggtctggtcgagactccaaccggctacatcgaatccctacccagggtcgtgaaacggagggttaacgccctgaagaatctccaggtgaaatgcgctcagattgaggccaagttctatgaagaggtacacgatctggagagaaagtatgcagttctttatcagccattattcgataagagatttgagatcattaatgcaatttatgagcccactgaagaagagtgtgaatggaagccagacgaagaggatgagatctctgaggagttgaaagagaaggcgaagattgaggacgaaaaaaaagatgaggagaaggaagacccaaaaggaatacccgagttttggctgacggtattcaaaaacgtggacttactgtctgatatggtgcaagaacatgatgagcccattttaaaacatctcaaggacatcaaggtcaaattttccgacgccggtcagccaatgtcgtttgtgcttgagtttcacttcgaaccaaatgagtatttcacaaacgaggttctaaccaaaacttacaggatgcgatccgaaccagacgactccgaccccttctcttttgatggtccagaaattatgggatgcactggatgccagatagattggaagaagggtaagaacgtgacgttgaagacgattaagaaaaaacaaaaacacaagggccggggcacagtgcgcaccgtcaccaagaccgtgtccaacgacagcttctttaacttctttgccccccccgaggtgccagagagtggcgacttggacgacgacgcggaagctatcttggctgccgacttcgagatcggacactttttgcgtgagcgaatcatcccccggtctgtcctgtactttactggggaggccattgaggacgatgatgatgattatgacgaggaaggagaggaggctgacgaagagggggaagaggagggggacgaagaaaacgatccggattatgatcccaaaaaggatcagaatcccgccgaatgtaaacaacagtag

SEQ ID NO: 147293 - DNA, 1176 bp, Artificial Sequence
  derived and/or modified sequence
atggccgacatcgacaacaaggagcagagcgagctggaccaggacctggatgatgttgaggaagtggaggaagaggagactggcgaggaaacaaaactgaaggcccgccaactcacagtgcagatgatgcaaaatccacagattctggccgctctgcaggagcggttagacgggctcgtagagacacctacaggatacattgagtctctgcctagggtggtgaagagaagggttaacgcgttaaaaaacttgcaagtaaagtgcgcccaaattgaagccaaattttacgaagaggtgcatgaccttgaacggaagtacgcagtgctgtaccagcccctgtttgataaacgctttgagattatcaatgctatctacgagcccaccgaggaggagtgtgagtggaaacctgatgaggaagacgagatttccgaagagcttaaagaaaaagccaaaatagaagacgagaagaaagacgaagagaaggaggaccccaaaggcatacctgagttttggttgaccgtctttaaaaatgtcgacttactgagtgacatggtacaggaacatgatgaacccatactgaagcacctgaaggatataaaggttaagttttcagacgccggacagcccatgtcattcgtgcttgagttccacttcgagcctaacgaatatttcacaaacgaggtcctgaccaagacgtaccgtatgcggtccgagccggacgacagcgacccctttagcttcgatggtcctgagatcatggggtgtaccgggtgtcagatcgattggaagaagggtaaaaacgtgacattgaagacgattaagaagaagcaaaagcacaagggcagaggtacagtaagaaccgtgacaaaaactgtgtctaatgacagcttctttaacttcttcgcaccgcctgaagtccctgaaagcggagacctggacgatgacgctgaagcaatactcgctgccgattttgagataggccatttcttgcgtgaaaggatcataccccgtagtgtgctgtatttcaccggcgaggcaatagaagatgatgatgacgactatgatgaggagggggaggaagcagatgaagaaggagaagaggaaggggacgaggagaacgacccagattatgacccaaagaaggaccagaatcctgctgagtgtaagcagcagtag

SEQ ID NO: 147294 - DNA, 972 bp, Artificial Sequence
  derived and/or modified sequence
atgatgcagaacccccagatcctggccgccctgcaggagcggctggacggtttggtcgagacacccacgggctatattgaatctctgccccgagtggtcaagagacgggtgaacgcactaaaaaacttacaagtgaaatgtgcacaaattgaagccaagttctatgaggaagttcatgacttggagagaaagtacgctgtgctgtatcagcctctgttcgacaaggaagagttgaaagagaaggccaaaatcgaagatgagaagaaggacgaggagaaggaagaccctaagggcattcctgagttctggctcactgtgttcaagaatgtagacttactgagcgacatggttcaggagcacgacgagcctattctcaagcatctgaaggatattaaagttaagttcagcgatgctggacagccaatgtcctttgttctcgagttccattttgaacctaatgaatactttacaaatgaagtcctgaccaaaacttatagaatgagatcagaacccgatgattctgaccctttctctttcgacggtccagagataatgggctgcactgggtgtcaaattgactggaagaaggggaagaacgtcacattgaagaccatcaagaagaagcagaaacacaagggaagaggcaccgtgaggaccgttacgaagacagtttccaacgatagtttttttaacttctttgcgcctccagaggtgccagagagcggagatctggatgacgatgccgaggccatactggcagccgactttgaaatcgggcattttctgagggaaaggattatccctcggtccgtgctttacttcaccggtgaagcaatcgaggatgatgacgatgactatgatgaggagggtgaagaagccgacgaagaaggggaggaggagggggacgaggagaacgaccctgactatgacccaaaaaaagatcagaaccccgcggagtgtaaacagcagtag

SEQ ID NO: 147295 - DNA, 1050 bp, Artificial Sequence
  derived and/or modified sequence
atgatgcagaacccccagatcctggccgccctgcaggagcggctggacggactggttgaaacgcccacaggctacatagaaagtttacccagagtggtcaagcggagggtaaatgccctcaaaaacctacaggtgaagtgtgcacagatcgaggccaagttttacgaagaagttcacgatctggagcgcaagtatgccgtcctctaccagcccctgttcgacaagagatttgaaatcatcaacgcaatatacgagccgaccgaagaggagtgcgagtggaaacctgacgaagaagacgaaatcagtgaactgaaagaaaaggcaaagatcgaggacgagaagaaggatgaggagaaggaagatccgaagggcattccagagttttggctgactgtgtttaaaaacgtcgatctgttaagcgatatggtgcaggagcatgacgagcctatccttaagcatcttaaagatatcaaagtgaaattttccgacgcaggacagccaatgtcctttgtcctcgaatttcatttcgagccaaatgagtattttaccaatgaggtcttaactaagacatacaggatgaggtccgaacccgacgatagcgacccttttagtttcgatggccccgaaatcatgggctgcacaggttgccagatcgattggaaaaaaggcaagaatgtcacattaaaaaccatcaagaagaagcagaaacacaagggccgcgggaccgttaggactgttacgaaaaccgtgtccaacgattcattttttaatttctttgccccaccagaagtacccgaatctggcgatctcgatgatgacgccgaggctatattggccgctgatttcgaaataggccactttctgcgggaacgcatcatcccaaggtccgtgctctactttactggggaagccattgaggacgacgacgatgattatgacgaggagggggaggaagccgatgaagaaggtgaagaggaaggcgatgaggaaaacgatcccgattacgaccctaagaaagaccaaaatccagccgagtgtaaacagcagtag

SEQ ID NO: 147296 - DNA, 1158 bp, Artificial Sequence
  derived and/or modified sequence
aaggagcagagcgagctggaccaggacctggacgacgtggaggaggtggaggaagaggagacaggagaagagacaaaactgaaggcccgccagctcactgtgcagatgatgcaaaatcctcaaatccttgctgcgctgcaggaacgcctggacggtttggtggaaacacctacaggatacattgagagtctgcccagagtagtaaaaaggagggtaaatgccctgaagaacctgcaggtcaaatgcgcccaaatcgaagcaaagttctatgaggaggtccatgacctggagcgtaagtatgcggttctgtatcaacccctctttgacaagcggttcgagatcattaacgccatttatgagcccaccgaggaggaatgtgaatggaagcctgatgaggaagacgaaatttctgaggaacttaaagagaaggcaaaaatagaagacgagaaaaaagacgaagagaaggaggatcccaagggaattcctgaattttggttgacggtgttcaagaacgtggatctcctaagtgatatggtgcaggagcatgatgagccaatattgaagcacctgaaggacatcaaggtcaagttctcagatgccggccagcccatgtcgtttgttctggagttccactttgagcctaacgaatacttcacaaacgaagttttaaccaaaacatatcgaatgcgatcggaacccgatgacagcgacccgttttccttcgacggacctgaaattatgggatgtaccggctgccaaattgattggaagaagggtaagaatgtgactttaaaaacgatcaagaaaaagcagaagcataaaggcagggggaccgtaaggaccgtcactaagacagtctccaacgactctttctttaactttttcgccccccctgaagtgccggagtcaggtgatttggatgacgacgctgaagctatcctcgccgctgactttgaaattgggcatttcctgcgggagagaattatcccccggtctgttctgtactttactggggaagccattgaggatgacgacgacgactatgacgaggaaggggaagaggccgacgaagagggagaggaagagggagatgaggagaacgatcccgactacgatcccaaaaaagatcagaatccagcggaatgtaagcagcaatag

SEQ ID NO: 147297 - DNA, 2031 bp, Artificial Sequence
  derived and/or modified sequence
cttttttagcgccatctgctcgcggcgccgcctcctgctcctcccgctgctgctgccgctgccgccctgagtcactgcctgcgcagctccggccgcctggctccccatactagtcgccgcaaagaacagtctgaacttgatcaagatttggatgatgttgaagaagtagaagaagaggaaactggtgaagaaacaaaactcaaagcacgtcagctaactgttcagatgatgcaaaatcctcagattcttgcagcccttcaagaaagacttgatggtctggtagaaacaccaacaggatacattgaaagcctgcctagggtagttaaaagacgagtgaatgctctcaaaaacctgcaagttaaatgtgcacagatagaagccaaattctatgaggaagttcacgatcttgaaaggaagtatgctgttctctatcagcctctatttgataaggaggaattgaaagaaaaggccaagattgaagatgagaaaaaagatgaagaaaaagaagaccccaaaggaattcctgaattttggttaactgtttttaagaatgttgacttgctcagtgatatggttcaggaacacgatgaacctattctgaagcacttgaaagatattaaagtgaagttctcagatgctggccagcctatgagttttgtcttagaatttcactttgaacccaatgaatattttacaaatgaagtgctgacaaagacatacaggatgaggtcagaaccagatgattctgatcccttttcttttgatggaccagaaattatgggttgtacagggtgccagatagattggaaaaaaggaaagaatgtcactttgaaaactattaagaagaagcagaaacacaagggacgtgggacagttcgtactgtgactaaaacagtttccaatgactctttctttaacttttttgcccctcctgaagttcctgagagtggagatctggatgatgatgctgaagctatccttgctgcagacttcgaaattggtcactttttacgtgagcgtataatcccaagatcagtgttatattttactggagaagctattgaagatgatgatgatgattatgatgaagaaggtgaagaagcggatgaggaaggggaagaagaaggagatgaggaaaatgatccagactatgacccaaagaaggatcaaaacccagcagagtgcaagcagcagtgaagcaggatgtatgtggccttgaggataacctgcactgtaatagcctaaacacaactcttatttacttacagccttatgtttttgtattttcttggtagactaggtaatttttttttaaaggacaggaaactgatattttaaagaccaatttgttctacctagcattttaactagtttttctgccagctatgttgaatgcacaaattctgtcacgcatgttcattcattgctacataatttggttcttctggaatatttttatgtagctcttggagtacagctatgaaaattaacaactgttaaaggaaataccttttttttttttttgtaattttttccttgaagaaccaaagtattttttcagctggttgttgaatagggttaagtccgcttggattagctgtgcctttcattactttgttacagaaatgcagtgacttatactaagacaatttattgtttaaaaaaaaaattggcaagacaactatatggttaagaatttccagtatgaccacacccaataactgttattagagtgttaatggattattgtgttttaggtgacatagttaactgtaaagtaacctgactcagtatagttactggtaccacagtgaggtgaataaaacgggattttcagaagttagcctgaatttaactgtatttttaaatttaacctccattaactaagcatcttttctttgtggtagggtctaccttctgcttccctggaaaggatgaatttacatcatttgacaagcctattttcaagttatttgttgtttgtttgcttgtttttgtttttgcagctaaaataaaaatttcaaatacaat

SEQ ID NO: 147298 - DNA, 1675 bp, Artificial Sequence
  derived and/or modified sequence
ctacgtgctgacgctaattgtatatgagcgcgagcggcgggctcttgggtcttttttagcgccatctgctcgcggcgccgcctcctgctcctcccgctgctgctgccgctgccgccctgagtcactgcctgcgcagctccggccgcctggctccccatactagtcgccgatatttggagttcttacaacatggcagacattgacaacacgtcagctaactgttcagatgatgcaaaatcctcagattcttgcagcccttcaagaaagacttgatggtctggtagaaacaccaacaggatacattgaaagcctgcctagggtagttaaaagacgagtgaatgctctcaaaaacctgcaagttaaatgtgcacagatagaagccaaattctatgaggaagttcacgatcttgaaaggaagtatgctgttctctatcagcctctatttgataagcgatttgaaattattaatgcaatttatgaacctacggaagaagaatgtgaatggaaaccagatgaagaagatgagatttcggaattgaaagaaaaggccaagattgaagatgagaaaaaagatgaagaaaaagaagaccccaaaggaattcctgaattttggttaactgtttttaagaatgttgacttgctcagtgatatggttcaggaacacgatgaacctattctgaagcacttgaaagatattaaagtgaagttctcagatgctggccagcctatgagttttgtcttagaatttcactttgaacccaatgaatattttacaaatgaagtgctgacaaagacatacaggatgaggtcagaaccagatgattctgatcccttttcttttgatggaccagaaattatgggttgtacagggtgccagatagattggaaaaaaggaaagaatgtcactttgaaaactattaagaagaagcagaaacacaagggacgtgggacagttcgtactgtgactaaaacagtttccaatgactctttctttaacttttttgcccctcctgaagttcctgagagtggagatctggatgatgatgctgaagctatccttgctgcagacttcgaaattggtcactttttacgtgagcgtataatcccaagatcagtgttatattttactggagaagctattgaagatgatgatgatgattatgatgaagaaggtgaagaagcggatgaggaaggggaagaagaaggagatgaggaaaatgatccagactatgacccaaagaaggatcaaaacccagcagagtgcaagcagcagtgaagcaggatgtatgtggccttgaggataacctgcactgtaatagcctaaacacaactcttatttacttacagccttatgtttttgtattttcttggtagactaggtaatttttttttaaaggacaggaaactgatattttaaagaccaatttgttctacctagcattttaactagtttttctgccagctatgttgaatgcacaaattctgtcacgcatgttcattcattgctacataatttggttcttctggaatatttttatgtagctcttggagtacagctatgaaaattaacaactgttaaaggaaataccttttttttttttttgtaattttttccttgaagaaccaaagtattttttcagctggttgttgaatagggttaagtccgcttggatta

SEQ ID NO: 147299 - DNA, 1981 bp, Artificial Sequence
  derived and/or modified sequence
aaagaacagtctgaacttgatcaagatttggatgatgttgaagaagtagaagaagaggaaactggtgaagaaacaaaactcaaagcacgtcagctaactgttcagatgatgcaaaatcctcagattcttgcagcccttcaagaaagacttgatggtctggtagaaacaccaacaggatacattgaaagcctgcctagggtagttaaaagacgagtgaatgctctcaaaaacctgcaagttaaatgtgcacagatagaagccaaattctatgaggaagttcacgatcttgaaaggaagtatgctgttctctatcagcctctatttgataagcgatttgaaattattaatgcaatttatgaacctacggaagaagaatgtgaatggaaaccagatgaagaagatgagatttcggaggaattgaaagaaaaggccaagattgaagatgagaaaaaagatgaagaaaaagaagaccccaaaggaattcctgaattttggttaactgtttttaagaatgttgacttgctcagtgatatggttcaggaacacgatgaacctattctgaagcacttgaaagatattaaagtgaagttctcagatgctggccagcctatgagttttgtcttagaatttcactttgaacccaatgaatattttacaaatgaagtgctgacaaagacatacaggatgaggtcagaaccagatgattctgatcccttttcttttgatggaccagaaattatgggttgtacagggtgccagatagattggaaaaaaggaaagaatgtcactttgaaaactattaagaagaagcagaaacacaagggacgtgggacagttcgtactgtgactaaaacagtttccaatgactctttctttaacttttttgcccctcctgaagttcctgagagtggagatctggatgatgatgctgaagctatccttgctgcagacttcgaaattggtcactttttacgtgagcgtataatcccaagatcagtgttatattttactggagaagctattgaagatgatgatgatgattatgatgaagaaggtgaagaagcggatgaggaaggggaagaagaaggagatgaggaaaatgatccagactatgacccaaagaaggatcaaaacccagcagagtgcaagcagcagtgaagcaggatggtctaccttctgcttccctggaaaggatgaatttacatcatttgacaagcctattttcaagttatttgttgtttgtttgcttgtttttgtttttgcagctaaaataaaaatttcaaatacaattttagttcttacaagataatgtcttaattttgtaccaattcaggtagaagtagaggcctaccttgaattaagggttatactcagtttttaacacattgttgaagaaaaggtaccagctttggaacgagatgctatactaataagcaagtgtaaaaaaaaaaaaaaaagaggaagaaaatcttaagtgattgatgctgttttcttttaaaaaaaaaaaaaaaaattcattttctttgggttagagctagagagaaggccccaagcttctatggtttcttctaattcttattgcttaaagtatgagtatgtcacttacccgtgcttctgtttactgtgtaattaaaatgggtagtactgtttacctaactacctcatggatgtgttaaggcatattgagttaaatctcatataatgtttctcaatcttgttaaaagctcaaaattttgggcctatttgtaatgccagtgtgacactaagcattttgttcacaccacgctttgataactaaactggaaaacaaaggtgttaagtacctctgttctggatctgggcagtcagcactctttttagatctttgtgtggctcctatttttatagaagtggagggatgcactatttcacaaggtccaagatttgttttcagatatttttgatgactgtattgtaaatactacagggatagcactatagt

SEQ ID NO: 147300 - DNA, 1176 bp, Artificial Sequence
  derived and/or modified sequence
atggccgacattgataacaaggaacagagcgaactggaccaggacttagacgacgtcgaggaagttgaagaggaagagactggcgaggagacaaaattaaaggctcgccagctgaccgtacagatgatgcagaatccacagattctcgcagccctgcaggagagattagacggattagtggagacgccaacaggatatatagagagtttgcctcgggtggttaaaagaagagtgaacgctcttaagaacctccaagttaagtgtgctcagatcgaagccaaattctacgaggaagtgcacgatctggaaagaaagtatgcagtcctgtaccaaccactcttcgacaagcggttcgaaattatcaacgctatctatgagcccactgaagaggaatgcgagtggaagcccgacgaagaagacgagattagtgaagaacttaaggagaaagctaaaatcgaggacgaaaaaaaggacgaagaaaaagaggaccctaagggcattcccgagttctggctaacagtgttcaagaacgttgacttgttgagcgatatggtccaagagcacgacgagcctatcttgaaacacctcaaagatatcaaagtgaaattttccgatgccggtcaaccaatgagttttgtgttagagtttcacttcgaaccaaacgagtatttcaccaatgaagtactgacaaagacatacagaatgaggtcagagccagatgactcagatccgtttagctttgacggccctgagattatgggctgcacaggttgccagatagattggaaaaaaggaaagaatgtgactctgaagacgattaagaagaagcagaaacacaaggggagaggtactgtgcggaccgttacaaaaacagtgagcaatgattcattcttcaatttcttcgcccctcctgaggtccctgaaagcggcgatcttgacgacgatgctgaagcgattttggccgcagactttgagatcgggcacttcctccgcgagcgcatcatacccagatccgttctctatttcacgggggaggcgattgaggatgacgacgacgattacgatgaagaaggcgaagaagcagacgaggagggtgaggaagagggggacgaagaaaatgatcctgactacgacccaaaaaaagaccagaacccagcggagtgcaaacagcaatag

SEQ ID NO: 147301 - DNA, 1176 bp, Artificial Sequence
  derived and/or modified sequence
atggccgatattgataataaagagcaatctgaattggatcaggacctggatgatgtggaagaagtcgaggaggaagaaacaggcgaggagacaaagctcaaagctcgccagttaactgtgcagatgatgcaaaatccccagatcctggctgctctgcaggagcgccttgacggcctggtcgaaacgcccaccggatacattgagagccttccgcgtgtggtgaaaaggcgggtcaatgcattgaagaacctgcaggtgaagtgtgctcagatagaggcgaaattctatgaggaagtccacgatctcgagcgaaagtacgcggtgttataccagcccctcttcgataaacggtttgaaattattaacgctatttacgagcctaccgaggaagaatgcgagtggaaacctgatgaggaggatgagatttctgaggagcttaaggaaaaagctaagatcgaggacgagaagaaagatgaggaaaaagaagaccccaagggtattcccgaattctggctgacagttttcaaaaatgtggatttactgagtgacatggttcaggaacacgacgaacccattctgaaacacctcaaagacatcaaggtgaagttctcagatgctgggcaacctatgagcttcgtactggagtttcacttcgagcccaacgagtacttcaccaacgaagttctcactaaaacctatcggatgcgaagtgagccggatgactcagatccttttagtttcgacggcccagaaattatgggctgtaccggatgccagatcgactggaaaaaaggtaaaaatgtcacactgaagactattaagaagaaacagaaacataaggggcgtggtactgttagaaccgttactaagacagtgtcaaacgacagcttcttcaatttcttcgccccacccgaggtgccagagtctggcgacctcgacgatgacgcagaggctatcttggccgcagactttgaaattggacatttccttagagaaaggattattcccaggtccgtgctttacttcaccggggaagccattgaggacgatgacgatgactacgacgaagaaggcgaagaagcagacgaggaaggcgaggaggagggagacgaggagaacgaccctgattacgaccctaagaaggaccaaaatcccgcagagtgtaaacagcagtag

SEQ ID NO: 147302 - DNA, 972 bp, Artificial Sequence
  derived and/or modified sequence
atgatgcagaacccacagattctggctgctttacaagagcggctggacggcttggtagaaactccgacgggatatatagagtcccttccacgagttgtgaagaggcgtgttaacgcacttaaaaatctacaggtaaaatgcgcccaaattgaggcaaaattctatgaggaagtgcatgatctcgaaagaaaatacgccgtcctctaccagcccctgttcgataaggaagagttgaaggaaaaggccaagattgaggacgagaagaaggacgaggagaaagaggaccccaagggcatcccagagttctggcttaccgttttcaaaaatgttgatctcctctctgacatggttcaggaacacgacgaacccatactgaaacacctgaaagatattaaagtgaagttttcagatgctggacagccaatgtcgtttgtgctggagttccattttgaacccaatgaatactttactaatgaggtcttgaccaaaacctaccgtatgagatccgagccagacgactcagaccctttctctttcgacgggccagagattatgggctgcaccggctgtcaaatcgattggaaaaaaggaaaaaatgtcacactcaagactattaagaaaaagcagaaacataagggtaggggtactgtacgcacagtgactaagacagtgtcaaatgactccttttttaactttttcgcacctccggaggtgcccgagagcggggaccttgacgatgacgccgaagcaatcctggctgccgattttgaaataggacattttctacgggagcgcatcatcccacgctccgtgttgtacttcaccggggaggctatcgaggacgacgatgatgactatgacgaggagggcgaagaagccgacgaagagggagaggaggaaggcgacgaggagaacgaccccgactatgacccaaagaaggaccagaatcctgcagaatgtaagcagcagtag

SEQ ID NO: 147303 - DNA, 1050 bp, Artificial Sequence
  derived and/or modified sequence
atgatgcagaatccccagatactggctgctctgcaggagaggctggatgggctggtggaaacacctaccggatacatcgagagtctccccagagttgtgaaaagacgggtaaacgcgctgaaaaaccttcaggtcaagtgtgctcagatcgaggccaaattttacgaagaggtacatgatttagagaggaaatacgccgttctgtaccagcctttgtttgacaagcgcttcgagatcataaatgccatctatgaacctacggaagaggagtgcgagtggaagccagatgaggaggatgaaatctccgagttgaaagagaaggctaaaattgaggacgaaaaaaaggacgaggagaaggaggatcccaaaggaataccagagttctggctaactgtgttcaagaatgtggacttactgtcggacatggttcaagagcacgacgaaccaatcctgaaacatctgaaggatattaaggtgaagttttccgatgctgggcagccaatgtcttttgtgttggagtttcacttcgagcccaacgaatactttactaacgaagtgttgaccaaaacctacaggatgagatctgaaccagacgacagtgatccctttagcttcgatgggcctgagattatggggtgtacagggtgtcagatcgactggaagaaaggtaaaaacgtcaccttaaagacaatcaaaaaaaaacaaaaacacaagggccgtggaacagttcgtacagtgacaaaaactgtctccaacgatagttttttcaatttctttgcaccacccgaagtcccggagagtggagatctagatgacgacgccgaagctatcctggcagcagattttgagatcggtcactttctgcgggagcgtataatcccacggtccgttctgtacttcacaggtgaggctattgaagatgacgatgatgactacgacgaggagggagaggaggcggacgaagagggcgaagaggagggggatgaagagaatgacccagattacgatcccaagaaggatcagaatcctgccgagtgcaaacaacagtag

SEQ ID NO: 147304 - DNA, 1158 bp, Artificial Sequence
  derived and/or modified sequence
aaggaacagtccgagctggaccaggaccttgatgacgtggaagaagtggaggaggaggagaccggggaggagacgaagctcaaggctagacagctcactgtgcagatgatgcaaaacccgcagattctggccgcacttcaggagaggctggatggcttagtggagactcctaccggctacatcgaatccctcccaagggtggttaaaaggcgcgtgaatgccttgaagaaccttcaggtgaagtgtgcccagatcgaggcaaagttctacgaagaggtgcacgatctggaacgcaaatacgcagtgttgtatcagcctctgttcgataagaggtttgagataattaacgcgatttacgaacctaccgaggaggagtgcgaatggaaacctgatgaagaagacgagatttctgaggaattgaaggagaaggccaaaattgaggatgaaaaaaaagacgaagagaaggaggatccaaaaggcattcccgaattttggttgactgtctttaagaatgtggatctcctctctgacatggttcaggaacatgacgaacctattctcaaacacttgaaagacataaaggttaagttttctgatgcagggcagcctatgagcttcgtgctagagtttcactttgaaccgaacgaatacttcacaaatgaggtgttaacgaagacctaccgtatgcgctccgaaccagatgactctgaccccttttccttcgatggccctgagattatgggctgtacgggttgtcaaattgactggaagaagggcaagaacgttaccttaaagaccatcaagaagaagcaaaagcacaagggccgaggcactgtcagaacagtgaccaaaacagtgtcaaatgattcgttctttaatttctttgctcctccagaagtccctgaatctggtgacctcgatgacgacgcagaagctatcctggcagccgatttcgaaatcggccactttttaagagaacgcatcatcccacgttccgtgttatattttaccggggaggcaattgaggacgacgacgacgactatgacgaggaaggagaggaggccgacgaggaaggcgaagaggagggagatgaggaaaacgaccccgactatgatcctaaaaaagatcagaatcccgcagagtgtaagcagcagtag

SEQ ID NO: 147305 - DNA, 1176 bp, Artificial Sequence
  derived and/or modified sequence
atggccgacatcgacaacaaggagcagagcgagctggaccaggacctggacgacgtggaggaggtggaggaggaggagaccggcgaggagaccaagctgaaggccagacagctgaccgtgcagatgatgcagaacccccagatcctggccgccctgcaggagagactggacggcctggtggagacccccaccggctacatcgagagcctgcccagagtggtgaagagaagagtgaacgccctgaagaacctgcaggtgaagtgcgcccagatcgaggccaagttctacgaggaggtgcacgacctggagagaaagtacgccgtgctgtaccagcccctgttcgacaagagattcgagatcatcaacgccatctacgagcccaccgaggaggagtgcgagtggaagcccgacgaggaggacgagatcagcgaggagctgaaggagaaggccaagatcgaggacgagaagaaggacgaggagaaggaggaccccaagggcatccccgagttctggctgaccgtgttcaagaacgtggacctgctgagcgacatggtgcaggagcacgacgagcccatcctgaagcacctgaaggacatcaaggtgaagttcagcgacgccggccagcccatgagcttcgtgctggagttccacttcgagcccaacgagtacttcaccaacgaggtgctgaccaagacctacagaatgagaagcgagcccgacgacagcgaccccttcagcttcgacggccccgagatcatgggctgcaccggctgccagatcgactggaagaagggcaagaacgtgaccctgaagaccatcaagaagaagcagaagcacaagggcagaggcaccgtgagaaccgtgaccaagaccgtgagcaacgacagcttcttcaacttcttcgccccccccgaggtgcccgagagcggcgacctggacgacgacgccgaggccatcctggccgccgacttcgagatcggccacttcctgagagagagaatcatccccagaagcgtgctgtacttcaccggcgaggccatcgaggacgacgacgacgactacgacgaggagggcgaggaggccgacgaggagggcgaggaggagggcgacgaggagaacgaccccgactacgaccccaagaaggaccagaaccccgccgagtgcaagcagcagtag

SEQ ID NO: 147306 - DNA, 972 bp, Artificial Sequence
  derived and/or modified sequence
atgatgcagaacccccagatcctggccgccctgcaggagagactggacggcctggtggagacccccaccggctacatcgagagcctgcccagagtggtgaagagaagagtgaacgccctgaagaacctgcaggtgaagtgcgcccagatcgaggccaagttctacgaggaggtgcacgacctggagagaaagtacgccgtgctgtaccagcccctgttcgacaaggaggagctgaaggagaaggccaagatcgaggacgagaagaaggacgaggagaaggaggaccccaagggcatccccgagttctggctgaccgtgttcaagaacgtggacctgctgagcgacatggtgcaggagcacgacgagcccatcctgaagcacctgaaggacatcaaggtgaagttcagcgacgccggccagcccatgagcttcgtgctggagttccacttcgagcccaacgagtacttcaccaacgaggtgctgaccaagacctacagaatgagaagcgagcccgacgacagcgaccccttcagcttcgacggccccgagatcatgggctgcaccggctgccagatcgactggaagaagggcaagaacgtgaccctgaagaccatcaagaagaagcagaagcacaagggcagaggcaccgtgagaaccgtgaccaagaccgtgagcaacgacagcttcttcaacttcttcgccccccccgaggtgcccgagagcggcgacctggacgacgacgccgaggccatcctggccgccgacttcgagatcggccacttcctgagagagagaatcatccccagaagcgtgctgtacttcaccggcgaggccatcgaggacgacgacgacgactacgacgaggagggcgaggaggccgacgaggagggcgaggaggagggcgacgaggagaacgaccccgactacgaccccaagaaggaccagaaccccgccgagtgcaagcagcagtag

SEQ ID NO: 147307 - DNA, 1050 bp, Artificial Sequence
  derived and/or modified sequence
atgatgcagaacccccagatcctggccgccctgcaggagagactggacggcctggtggagacccccaccggctacatcgagagcctgcccagagtggtgaagagaagagtgaacgccctgaagaacctgcaggtgaagtgcgcccagatcgaggccaagttctacgaggaggtgcacgacctggagagaaagtacgccgtgctgtaccagcccctgttcgacaagagattcgagatcatcaacgccatctacgagcccaccgaggaggagtgcgagtggaagcccgacgaggaggacgagatcagcgagctgaaggagaaggccaagatcgaggacgagaagaaggacgaggagaaggaggaccccaagggcatccccgagttctggctgaccgtgttcaagaacgtggacctgctgagcgacatggtgcaggagcacgacgagcccatcctgaagcacctgaaggacatcaaggtgaagttcagcgacgccggccagcccatgagcttcgtgctggagttccacttcgagcccaacgagtacttcaccaacgaggtgctgaccaagacctacagaatgagaagcgagcccgacgacagcgaccccttcagcttcgacggccccgagatcatgggctgcaccggctgccagatcgactggaagaagggcaagaacgtgaccctgaagaccatcaagaagaagcagaagcacaagggcagaggcaccgtgagaaccgtgaccaagaccgtgagcaacgacagcttcttcaacttcttcgccccccccgaggtgcccgagagcggcgacctggacgacgacgccgaggccatcctggccgccgacttcgagatcggccacttcctgagagagagaatcatccccagaagcgtgctgtacttcaccggcgaggccatcgaggacgacgacgacgactacgacgaggagggcgaggaggccgacgaggagggcgaggaggagggcgacgaggagaacgaccccgactacgaccccaagaaggaccagaaccccgccgagtgcaagcagcagtag

SEQ ID NO: 147308 - DNA, 1158 bp, Artificial Sequence
  derived and/or modified sequence
aaggagcagagcgagctggaccaggacctggacgacgtggaggaggtggaggaggaggagaccggcgaggagaccaagctgaaggccagacagctgaccgtgcagatgatgcagaacccccagatcctggccgccctgcaggagagactggacggcctggtggagacccccaccggctacatcgagagcctgcccagagtggtgaagagaagagtgaacgccctgaagaacctgcaggtgaagtgcgcccagatcgaggccaagttctacgaggaggtgcacgacctggagagaaagtacgccgtgctgtaccagcccctgttcgacaagagattcgagatcatcaacgccatctacgagcccaccgaggaggagtgcgagtggaagcccgacgaggaggacgagatcagcgaggagctgaaggagaaggccaagatcgaggacgagaagaaggacgaggagaaggaggaccccaagggcatccccgagttctggctgaccgtgttcaagaacgtggacctgctgagcgacatggtgcaggagcacgacgagcccatcctgaagcacctgaaggacatcaaggtgaagttcagcgacgccggccagcccatgagcttcgtgctggagttccacttcgagcccaacgagtacttcaccaacgaggtgctgaccaagacctacagaatgagaagcgagcccgacgacagcgaccccttcagcttcgacggccccgagatcatgggctgcaccggctgccagatcgactggaagaagggcaagaacgtgaccctgaagaccatcaagaagaagcagaagcacaagggcagaggcaccgtgagaaccgtgaccaagaccgtgagcaacgacagcttcttcaacttcttcgccccccccgaggtgcccgagagcggcgacctggacgacgacgccgaggccatcctggccgccgacttcgagatcggccacttcctgagagagagaatcatccccagaagcgtgctgtacttcaccggcgaggccatcgaggacgacgacgacgactacgacgaggagggcgaggaggccgacgaggagggcgaggaggagggcgacgaggagaacgaccccgactacgaccccaagaaggaccagaaccccgccgagtgcaagcagcagtag

SEQ ID NO: 147309 - protein, 506 aa, Artificial Sequence
  derived and/or modified sequence
MAEADFKMVSEPVAHGVAEEEMASSTSDSGEESDSSSSSSSTSDSSSSSSTSGSSSGSGSSSSSSGSTSSRSRLYRKKRVPEPSRRARRAPLGTNFVDRLPQAVRNRVQALRNIQDECDKVDTLFLKAIHDLERKYAELNKPLYDRRFQIINAEYEPTEEECEWNSEDEEFSSDEEVQDNTPSEMPPLEGEEEENPKENPEVKAEEKEVPKEIPEVKDEEKEVPKEIPEVKAEEKADSKDCMEATPEVKEDPKEVPQVKADDKEQPKATEAKARAAVRETHKRVPEERLQDSVDLKRARKGKPKREDPKGIPDYWLIVLKNVDKLGPMIQKYDEPILKFLSDVSLKFSKPGQPVSYTFEFHFLPNPYFRNEVLVKTYIIKAKPDHNDPFFSWGWEIEDCKGCKIDWRRGKDVTVTTTQSRTTATGEIEIQPRVVPNASFFNFFSPPEIPMIGKLEPREDAILDEDFEIGQILHDNVILKSIYYYTGEVNGTYYQFGKHYGNKKYRK

SEQ ID NO: 147310 - protein, 499 aa, Artificial Sequence
  derived and/or modified sequence
MVSEPVAHGVAEEEMASSTSDSGEESDSSSSSSSTSDSSSSSSTSGSSSGSGSSSSSSGSTSSRSRLYRKKRVPEPSRRARRAPLGTNFVDRLPQAVRNRVQALRNIQDECDKVDTLFLKAIHDLERKYAELNKPLYDRRFQIINAEYEPTEEECEWNSEDEEFSSDEEVQDNTPSEMPPLEGEEEENPKENPEVKAEEKEVPKEIPEVKDEEKEVPKEIPEVKAEEKADSKDCMEATPEVKEDPKEVPQVKADDKEQPKATEAKARAAVRETHKRVPEERLQDSVDLKRARKGKPKREDPKGIPDYWLIVLKNVDKLGPMIQKYDEPILKFLSDVSLKFSKPGQPVSYTFEFHFLPNPYFRNEVLVKTYIIKAKPDHNDPFFSWGWEIEDCKGCKIDWRRGKDVTVTTTQSRTTATGEIEIQPRVVPNASFFNFFSPPEIPMIGKLEPREDAILDEDFEIGQILHDNVILKSIYYYTGEVNGTYYQFGKHYGNKKYRK

SEQ ID NO: 147311 - DNA, 1521 bp, Artificial Sequence
  derived and/or modified sequence
atggccgaagcagacttcaagatggtcagtgagcccgtcgcgcatggggtggcggaggaggaaatggccagcagtactagcgacagcggcgaggagtctgactcttcaagctcttccagttccacttctgactcatcgagttcatcttctacatccggtagctcctcgggaagcggtagctcttcctctagctccggcagtacttcaagccgttcccgcctgtataggaagaagcgagttcccgagccctcccgcagagcgcggcgtgcccccctagggaccaacttcgtggatcggctgccccaggccgtcagaaaccgtgttcaggctctcaggaacattcaggacgagtgcgacaaggtggataccctgttcctgaaggccatccatgatttggagcgcaaatatgccgagctaaacaaacccctctatgataggaggtttcaaattatcaatgcagagtacgaacctaccgaggaggaatgtgagtggaattccgaagacgaagagttcagcagtgacgaggaggtgcaggacaataccccaagcgagatgcccccattggaaggggaagaggaggaaaaccctaaggaaaatcctgaggtgaaagccgaggagaaagaggtcccaaaggaaattcctgaggttaaagatgaagagaaagaggtgcccaaagagataccagaggtgaaagcagaagaaaaggcagattctaaagattgcatggaggccaccccagaggtcaaggaggacccaaaggaggtgccccaagtgaaagctgatgacaaagaacagccaaaagccacagaagcaaaagcccgagccgccgttcgcgaaacacataagagggtccccgaggagcgcctgcaggacagcgtcgacctgaagcgggcgagaaaaggtaagcccaagcgggaggacccgaagggcatccccgactactggctgattgtcttgaaaaacgtagataagctcggacctatgatccagaagtacgacgagcccatcctgaaattcctgagcgacgtgtctctgaagttctccaaacccgggcaaccggtatcatatacattcgaatttcactttctacctaacccctattttcgcaatgaagtcctggttaagacgtacattattaaagctaagcccgatcataatgatccctttttcagctggggctgggagattgaggattgtaagggttgcaagatagactggcgaagaggcaaagatgtgacggtcaccactacacagtctcgcaccactgctaccggggaaatcgaaattcaaccaagagtggtgcccaacgcatcatttttcaacttcttctctcctcctgagatacctatgataggcaagctggagcccagagaagacgccatacttgatgaagatttcgagatcggccaaatcttgcacgacaatgtgatcttaaaatccatctactactacactggcgaagtgaacggaacctattatcagtttggcaagcattacggaaacaagaaataccgcaaatag

SEQ ID NO: 147312 - DNA, 1500 bp, Artificial Sequence
  derived and/or modified sequence
atggtgtccgagcctgtagcacacggggtagctgaggaagagatggcctccagtacatcagactcaggcgaggaaagcgacagttccagttcgtcctcttccacctcagactcctcctcctcctcatcgacaagcggttcttcatccggtagcggttccagcagctcatcgtctggaagtacaagcagccgttctagactttatcgcaagaaacgcgtgcccgaaccctcacgacgcgcccgacgcgcccctctaggaacaaattttgttgatcggctgccccaggcggtgaggaacagggtacaagccctgaggaatattcaagacgaatgcgacaaagtagacacgctgtttctgaaggctatccatgatcttgaaagaaagtatgccgaactcaataagccactgtacgacagacgatttcagatcatcaatgctgaatacgagccaacggaggaggagtgtgaatggaacagcgaagatgaggagttctccagcgacgaagaggttcaagacaataccccttctgagatgccgcccctcgagggagaggaagaggaaaaccccaaagaaaatcccgaggtgaaggccgaggagaaggaagtgccgaaggaaataccagaagtaaaagacgaggagaaggaggtgcccaaagaaattccagaagtaaaggcagaagagaaggcggactccaaagattgcatggaggctacccccgaagtcaaggaagatccaaaagaagtgccccaggtgaaggcggatgacaaagagcagcctaaagccacagaggccaaagctcgtgccgcggtgagggagacccataagcgcgtgcctgaggagagattgcaggactccgtggacctgaaaagggccaggaaaggcaaaccaaaacgggaggatcctaagggaattcctgattactggctaatagtcctgaagaatgtcgataaactgggccccatgatacagaaatacgatgaaccaatcctgaagtttttgtccgacgtatccctgaagttttccaagcctggccagcctgtgtcgtacacctttgaattccattttttgcccaatccatattttagaaatgaggtgctggtgaagacttacatcatcaaagccaaacctgatcacaacgatcccttctttagctggggctgggaaattgaggattgcaaaggctgcaaaattgattggcgcagaggaaaggatgtgacagtcactacaacccagtcccggacaactgctacaggggaaatcgaaattcagcctagggtcgtgcccaacgcctcattcttcaacttcttcagcccaccagagatccccatgatcggaaaactggaaccaagagaagacgccattctagatgaggatttcgaaatcgggcaaatccttcatgacaacgtgatcctaaaaagtatatactattacactggggaagttaacggaacatattaccaattcgggaagcattacgggaataagaaatatcggaagtag

SEQ ID NO: 147313 - DNA, 1521 bp, Artificial Sequence
  derived and/or modified sequence
atggccgaggccgacttcaagatggtgtctgagcctgtggcccatggagtggccgaggaggagatggccagcagcaccagtgacagcggggaggagagtgacagcagcagcagcagcagcagcaccagtgacagcagcagcagcagcagcaccagcggcagcagcagcggcagcggcagcagcagcagcagcagcggcagcaccagcagccgcagccggctgtacaggaagaagagggtgcctgagcccagcagaagagcccggcgggcccccctgggcaccaactttgtggaccggctgccccaggccgtgaggaacagagtgcaggccctgaggaacatccaggatgaatgtgacaaggtggacaccctcttcctgaaggccatccatgacctggagaggaaatatgcagagctgaacaagcccctgtatgaccggcgcttccagatcatcaatgcagaatatgagcccacagaggaggagtgtgagtggaacagtgaagatgaggagttcagcagtgatgaggaggtgcaggacaacaccccatctgagatgccacccctggagggggaggaggaggagaaccccaaggagaaccctgaggtgaaggccgaggagaaggaggtgcccaaggagatccctgaggtgaaggatgaggagaaggaggtgcccaaggagatccctgaggtgaaggccgaggagaaggctgacagcaaggactgcatggaggccaccccagaggtgaaggaggaccccaaggaggtgccccaggtgaaggcagatgacaaggagcagcccaaggccacagaggccaaggcccgggctgctgtgcgggagacccacaagagggtgcctgaggagcggctgcaggacagcgtggacctgaagagggccaggaagggcaagcccaagcgggaggaccccaagggcatcccagactactggctgattgtgctgaagaatgtggacaagctgggccccatgatccagaagtatgatgagcccatcctgaagttcctgagtgatgtgtccctgaagttcagcaagccaggccagcctgtgtcctacacctttgagttccacttcctgcccaacccctacttcagaaatgaggtgctggtgaagacctacatcatcaaggccaagccagaccacaatgaccccttcttctcctggggctgggagattgaggactgcaagggctgcaagattgactggaggcggggcaaggatgtgacagtgaccaccacccagagcaggaccacagccaccggggagattgagatccagccccgggtggtgcccaatgccagcttcttcaacttcttcagccccccagagatccccatgattggcaagctggagccccgggaggatgccatcctggatgaggactttgagatcggccagatcctgcatgacaacgtcatcctgaagagcatctactactacacaggagaggtgaatggcacctactaccagtttgggaagcactacggcaacaagaagtacaggaagtag

SEQ ID NO: 147314 - DNA, 1500 bp, Artificial Sequence
  derived and/or modified sequence
atggtgtctgagcctgtggcccacggcgtggccgaggaggagatggccagcagcaccagtgacagcggggaggagagtgacagcagcagcagcagcagcagcaccagtgacagcagcagcagcagcagcaccagcggcagcagcagcggcagcggcagcagcagcagcagcagcggcagcaccagcagccgcagccggctgtacaggaagaagagggtgcctgagcccagccggcgggcccggcgggcccccctgggcaccaactttgtggaccggctgccccaggccgtgaggaacagagtgcaggccctgaggaacatccaggatgaatgtgacaaggtggacaccctcttcctgaaggccatccatgacctggagaggaaatatgcagagctgaacaagcccctgtatgaccggcgcttccagatcatcaatgcagaatatgagcccacagaggaggagtgtgagtggaacagtgaagatgaggagttcagcagtgatgaggaggtgcaggacaacacccccagcgagatgccacccctggagggggaggaggaggagaaccccaaggaaaatcctgaggtgaaggccgaggagaaggaggtgcccaaggagatccctgaggtgaaggatgaggagaaggaggtgcccaaggagatccctgaggtgaaggccgaggagaaggctgacagcaaggactgcatggaggccaccccagaggtgaaggaggaccccaaggaggtgccccaggtgaaggcagatgacaaggagcagcccaaggccacagaggccaaggcccgggctgctgtgcgggagacccacaagagggtgcctgaggagcggctgcaggacagcgtggacctgaagagggccaggaagggcaagcccaagcgggaggaccccaagggcatcccagactactggctgattgtgctgaagaatgtggacaagctgggccccatgatccagaagtatgatgagcccatcctgaagttcctgagtgatgtgtccctgaagttcagcaagccaggccagcctgtgtcctacacctttgagttccacttcctgcccaacccctacttcagaaatgaggtgctggtgaagacctacatcatcaaggccaagccagaccacaatgaccccttcttctcctggggctgggagattgaggactgcaagggctgcaagattgactggaggcggggcaaggatgtgacagtgaccaccacccagagcaggaccacagccactggagaaattgagatccagccccgggtggtgcccaatgccagcttcttcaacttcttcagccccccagagatccccatgattggcaagctggagcccagagaagatgccatcctggatgaagattttgaaattggccagatcctgcatgacaacgtcatcctgaagagcatctactactacaccggggaggtgaatggcacctactaccagtttgggaagcactacggcaacaagaagtacaggaagtag

SEQ ID NO: 147315 - DNA, 1521 bp, Artificial Sequence
  derived and/or modified sequence
atggccgaggccgacttcaagatggtgagcgagcccgtggcccacggcgtggctgaggaggagatggcaagctctacatccgattcaggcgaagaaagtgacagctctagtagttcaagcagtacttccgattcctcgtcttcaagttcgacttccggatctagttcaggttctgggtcttcatcatcatcttcgggcagcaccagttcccggagcagactatataggaaaaagcgggtgcctgagccttcgagacgggccaggcgggctccccttggaaccaattttgttgataggctgccacaggccgtaagaaaccgggttcaggctctgcggaatatccaggacgagtgtgataaggtagacactctgtttcttaaggccatacacgatctggagagaaaatacgctgagctcaataagcccctttacgaccggagatttcagatcatcaacgcagaatatgagcctacagaagaagaatgcgagtggaacagcgaggatgaagagtttagttccgacgaggaagtgcaggataatactccatcggaaatgccgcctctcgagggcgaagaagaggagaatcccaaagagaatcccgaggtgaaggcagaagaaaaagaagtccctaaagagatccctgaggtcaaggatgaagagaaggaggtccctaaagaaattcctgaggtgaaggccgaagagaaggcggatagcaaagattgtatggaggccaccccagaggtaaaggaagatcccaaggaggttccacaggttaaggccgacgacaaggaacagccgaaagcaacggaggctaaagcacgggctgccgtgagagagacccacaaaagggtccctgaggagcggctgcaggacagcgttgacttgaagagggcccgaaaagggaagcccaagcgcgaagatccgaaaggaattccagattactggctgattgtcctgaagaatgttgataaacttggcccgatgatacaaaaatacgatgagcctattctgaaattcctctcagatgtttcgctgaaatttagcaagcctgggcagccggtttcctacacttttgaatttcactttctgcctaacccctattttagaaatgaagttctcgttaaaacatacatcattaaggcaaagcctgaccacaacgatcccttcttctcctggggttgggaaattgaagattgtaagggatgcaaaattgactggagacggggtaaggatgtgacagtcacaaccacccaatcccgcacgacggctaccggcgaaatcgagattcagcctcgcgtggtgccaaatgcctctttctttaatttcttctccccaccggagatccctatgatcggaaaacttgaaccccgagaagacgcaatcctggatgaggatttcgaaatcgggcaaatacttcacgataatgtgatcttaaagtctatctattactataccggggaggtgaatgggacttactaccagttcggtaaacactacggcaataagaaataccgcaagtag

SEQ ID NO: 147316 - DNA, 1500 bp, Artificial Sequence
  derived and/or modified sequence
atggtgagcgagcccgtggcccacggcgtggccgaggaggagatggcctcctctacaagcgatagcggggaggagagtgactcaagctcgagctctagctccacgtccgactcctcttcaagttcctccacctctggttcctcttctggatccggaagtagctcgtcttccagcggatccacatcttctagaagtagactgtaccggaaaaagagagtaccagagccaagtcgccgggcacgacgcgcgccactcggcactaacttcgtggacagactgcctcaggcggtgcgcaatcgcgtccaagccctgcgcaacatacaggacgagtgtgataaggtcgacaccctattcctgaaggctatccacgatttggaacgaaaatacgctgagttaaataaaccactatatgataggaggtttcagattatcaacgccgagtacgaacccacagaagaggagtgcgagtggaattccgaggacgaagaattctcatctgatgaggaggtgcaggataatactccgtccgagatgccgcccctggaaggcgaagaagaggaaaaccctaaggagaatcctgaggtgaaagcagaggagaaggaagtgcccaaggagattcctgaggtgaaagacgaagagaaagaagtcccaaaggagattccagaggtaaaagccgaggagaaagcagatagcaaggactgtatggaagctacacccgaagtgaaggaggaccctaaagaggtccctcaagtgaaggccgacgacaaggaacagcccaaggctactgaagcgaaggcccgggccgctgtgagagaaacgcataagagggtgcccgaagagcggctgcaagactcagtcgacctcaaacgggctcgcaaaggtaagccaaagcgggaggaccccaaagggattcccgactattggttgattgtcctgaagaacgtggacaaattgggtcccatgatccagaagtatgacgagccaattctgaaatttctgagcgacgtaagtctgaagttcagcaaacctggccagcccgtctcctatacattcgagtttcacttcctgcctaatccttacttccggaacgaagtgctggtgaagacatatataatcaaggccaagccagaccacaacgatccattcttttcgtgggggtgggagatcgaggattgcaagggatgcaaaattgattggagacgcggaaaggatgtgacagtgaccactactcagagcagaacaacagctaccggcgagattgaaattcagcctcgagttgtgccaaacgccagctttttcaactttttctcccccccagagatccccatgattggcaaactggagcctcgagaggacgcaatacttgacgaggattttgagatcggccagattctgcacgataacgtcatccttaagagtatctactactacacaggtgaggtcaatggaacttattaccagtttgggaagcactacggcaataaaaaatacagaaagtag

SEQ ID NO: 147317 - DNA, 2639 bp, Artificial Sequence
  derived and/or modified sequence
attcggctgcggtacatctcggcactctagctgcagccgggagaggccttgccgccaccgctgtcgcccaagcctccactgccgctgccacctcagcgccggcctctgcatccccagctccagctccgctctgcgccgctgctgccatcgccgctgccacctccgcagcccgggcctccgccgccgccactcaagcatccgtgagtcattttctgcccatctctggtcgcgcggtctccctggtagagtttgtaggcttgcaagatggcagaagcagattttaaaatggtctcggaacctgtcgcccatggggttgccgaagaggagatggctagctcgactagtgattctggggaagaatctgacagcagtagctctagcagcagcactagtgacagcagcagcagcagcagcactagtggcagcagcagcggcagcggcagcagcagcagcagcagcggcagcactagcagccgcagccgcttgtatagaaagaagagggtacctgagccttccagaagggcgcggcgggccccgttgggaacaaatttcgtggataggctgcctcaggcagttagaaatcgtgtgcaagcgcttagaaacattcaagatgaatgtgacaaggtagataccctgttcttaaaagcaattcatgatcttgaaagaaaatatgctgaactcaacaagcctctgtatgataggcggtttcaaatcatcaatgcagaatacgagcctacagaagaagaatgtgaatggaattcagaggatgaggagttcagcagtgatgaggaggtgcaggataacacccctagtgaaatgcctcccttagagggtgaggaagaagaaaaccctaaagaaaacccagaggtgaaagctgaagagaaggaagttcctaaagaaattcctgaggtgaaggatgaagaaaaggaagttcctaaagaaattcctgaggtaaaggctgaagaaaaagcagattctaaagactgtatggaggcaacccctgaagtaaaagaagatcctaaagaagtcccccaggtaaaggcagatgataaagaacagcctaaagcaacagaggctaaggcaagggctgcagtaagagagactcataaaagagttcctgaggaaaggcttcaggacagtgtagatcttaaaagagctaggaagggaaagcctaaaagagaagaccctaaaggcattcctgactattggctgattgttttaaagaatgttgacaagctcgggcctatgattcagaagtatgatgagcccattctgaagttcttgtcggatgttagcctgaagttctcaaaacctggccagcctgtaagttacacctttgaatttcattttctacccaacccatacttcagaaatgaggtgctggtgaagacatatataataaaggcaaaaccagatcacaatgatcccttcttttcttggggatgggaaattgaagattgcaaaggctgcaagatagactggagaagaggaaaagatgttactgtgacaactacccagagtcgcacaactgctactggagaaattgaaatccagccaagagtggttcctaatgcatcattcttcaacttctttagtcctcctgagattcctatgattgggaagctggaaccacgagaagatgctatcctggatgaggactttgaaattgggcagattttacatgataatgtcatcctgaaatcaatctattactatactggagaagtcaatggtacctactatcaatttggcaaacattatggaaacaagaaatacagaaaataagtcaatctgaaagatttttcaagaatcttaaaatctcaagaagtgaagcagattcatacagccttgaaaaaagtaaaaccctgacctgtaacctgaacactattattccttatagtcaagtttttgtggtttcttggtagtctatattttaaaaatagtcctaaaaagtgtctaagtgccagtttattctatctaggctgttgtagtataatattcttcaaaatatgtaagctgttgtcaattatctaaagcatgttagtttggtgctacacagtgttgatttttgtgatgtcctttggtcatgtttctgttagactgtagctgtgaaactgtcagaattgttaactgaaacaaatatttgcttgaaaaaaaaagttcatgaagtaccaatgcaagtgttttatttttttcttttttccagcccataagactaagggtttaaatctgcttgcactagctgtgccttcattagtttgctatagaaatccagtacttatagtaaataaaacagtgtattttgaagtttgactgcttgaaaaagattagcatacatctaatgtgaaaagaccacatttgattcaactgagaccttgtgtatgtgacatatagtggcctataaatttaatcataatgatgttattgtttaccactgaggtgttaatataacatagtatttttgaaaaagtttcttcatcttatattgtgtaattgtaaactaaagataccgtgttttctttgtattgtgttctaccttccctttcactgaaaatgatcacttcatttgatactgtttttcatgttcttgtattgcaacctaaaataaataaatattaaagtgtgttatactataaaaa

SEQ ID NO: 147318 - DNA, 2555 bp, Artificial Sequence
  derived and/or modified sequence
attcggctgcggtacatctcggcactctagctgcagccgggagaggccttgccgccaccgctgtcgcccaagcctccactgccgctgccacctcagcgccggcctctgcatccccagctccagctccgctctgcgccgctgctgccatcgccgctgccacctccgcagcccgggcctccgccgccgccactcaagcagattttaaaatggtctcggaacctgtcgcccatggggttgccgaagaggagatggctagctcgactagtgattctggggaagaatctgacagcagtagctctagcagcagcactagtgacagcagcagcagcagcagcactagtggcagcagcagcggcagcggcagcagcagcagcagcagcggcagcactagcagccgcagccgcttgtatagaaagaagagggtacctgagccttccagaagggcgcggcgggccccgttgggaacaaatttcgtggataggctgcctcaggcagttagaaatcgtgtgcaagcgcttagaaacattcaagatgaatgtgacaaggtagataccctgttcttaaaagcaattcatgatcttgaaagaaaatatgctgaactcaacaagcctctgtatgataggcggtttcaaatcatcaatgcagaatacgagcctacagaagaagaatgtgaatggaattcagaggatgaggagttcagcagtgatgaggaggtgcaggataacacccctagtgaaatgcctcccttagagggtgaggaagaagaaaaccctaaagaaaacccagaggtgaaagctgaagagaaggaagttcctaaagaaattcctgaggtgaaggatgaagaaaaggaagttcctaaagaaattcctgaggtaaaggctgaagaaaaagcagattctaaagactgtatggaggcaacccctgaagtaaaagaagatcctaaagaagtcccccaggtaaaggcagatgataaagaacagcctaaagcaacagaggctaaggcaagggctgcagtaagagagactcataaaagagttcctgaggaaaggcttcaggacagtgtagatcttaaaagagctaggaagggaaagcctaaaagagaagaccctaaaggcattcctgactattggctgattgttttaaagaatgttgacaagctcgggcctatgattcagaagtatgatgagcccattctgaagttcttgtcggatgttagcctgaagttctcaaaacctggccagcctgtaagttacacctttgaatttcattttctacccaacccatacttcagaaatgaggtgctggtgaagacatatataataaaggcaaaaccagatcacaatgatcccttcttttcttggggatgggaaattgaagattgcaaaggctgcaagatagactggagaagaggaaaagatgttactgtgacaactacccagagtcgcacaactgctactggagaaattgaaatccagccaagagtggttcctaatgcatcattcttcaacttctttagtcctcctgagattcctatgattgggaagctggaaccacgagaagatgctatcctggatgaggactttgaaattgggcagattttacatgataatgtcatcctgaaatcaatctattactatactggagaagtcaatggtacctactatcaatttggcaaacattatggaaacaagaaatacagaaaataagtcaatctgaaagatttttcaagaatcttaaaatctcaagaagtgaagcagattcatacagccttgaaaaaagtaaaaccctgacctgtaacctgaacactattattccttatagtcaagtttttgtggtttcttggtagtctatattttaaaaatagtcctaaaaagtgtctaagtgccagtttattctatctaggctgttgtagtataatattcttcaaaatatgtaagctgttgtcaattatctaaagcatgttagtttggtgctacacagtgttgatttttgtgatgtcctttggtcatgtttctgttagactgtagctgtgaaactgtcagaattgttaactgaaacaaatatttgcttgaaaaaaaaagttcatgaagtaccaatgcaagtgttttatttttttcttttttccagcccataagactaagggtttaaatctgcttgcactagctgtgccttcattagtttgctatagaaatccagtacttatagtaaataaaacagtgtattttgaagtttgactgcttgaaaaagattagcatacatctaatgtgaaaagaccacatttgattcaactgagaccttgtgtatgtgacatatagtggcctataaatttaatcataatgatgttattgtttaccactgaggtgttaatataacatagtatttttgaaaaagtttcttcatcttatattgtgtaattgtaaactaaagataccgtgttttctttgtattgtgttctaccttccctttcactgaaaatgatcacttcatttgatactgtttttcatgttcttgtattgcaacctaaaataaataaatattaaagtgtgttatactat

SEQ ID NO: 147319 - DNA, 1521 bp, Artificial Sequence
  derived and/or modified sequence
atggcagaagctgacttcaagatggtgtctgagccggtggcccacggagtggcagaggaagagatggcatctagcacatcagacagcggagaagaatctgattccagctcctccagcagctccacatcagactcctccagcagtagttcgacctccggctcctctagcggctccggcagcagctctagcagcagcgggtccactagctcccggtcgcggctctaccgcaaaaaacgcgtgccagagccttccagacgagccagacgcgcacctctgggcaccaactttgtggaccgactcccacaagctgtaagaaatagggttcaggccctccgcaatattcaggacgagtgtgacaaggttgacaccctattcctgaaagcaattcatgatctggaaagaaagtacgccgaactgaataagcctctgtatgaccgcaggttccaaatcatcaatgcagagtatgaacccacagaggaggaatgtgagtggaactctgaggatgaagaattcagttccgacgaagaagtgcaggacaatactcccagcgagatgcctcctctggagggagaagaagaggaaaatccaaaggaaaaccccgaggtcaaggccgaggaaaaggaggtacctaaagaaattccagaagtgaaagacgaggaaaaagaggttcctaaggaaattcctgaggtgaaagccgaagagaaggcggacagcaaggactgtatggaggcaactcctgaggtcaaagaggaccccaaggaagttcctcaggtaaaggctgacgataaggaacagcctaaagcaactgaggctaaagctcgagccgcagtacgcgaaacacataagcgggtacccgaagagaggttgcaagatagcgtggatcttaagagagctcgtaaaggaaagcccaaaagggaagacccgaaaggcatcccggattactggctgatcgtgttaaaaaacgttgataaactcggaccaatgatccagaaatatgacgaaccaattctgaagttcctatccgacgtgagtttaaagttcagtaagccgggacagccggtctcctacaccttcgagttccactttctgcccaatccctacttccgcaacgaggtccttgtgaagacatacatcatcaaagcaaaacccgatcataacgatccatttttttcctggggatgggagattgaagactgtaaagggtgtaaaatcgattggcgacgcggtaaggacgtcacagtgactaccacccagagccggaccacagctaccggggaaatcgagatccagcccagagtcgtgcctaatgcaagcttctttaatttcttctcccctccagagatccctatgattggcaagcttgagccacgagaggatgctatcctggatgaagattttgaaattggacagatacttcatgacaacgtaattctgaaaagtatctattattatactggagaggttaatggcacatattaccaattcggcaagcattacggaaacaagaagtatagaaagtag

SEQ ID NO: 147320 - DNA, 1500 bp, Artificial Sequence
  derived and/or modified sequence
atggttagtgaaccagtcgctcacggagtggctgaagaggaaatggcttcaagtaccagtgactctggtgaagagagcgatagctcctccagttcttccagcacgagcgattcgtcctctagttcgagtacctccggttcatcttcaggctccggatcatcttccagctcctcaggttcaacaagtagtcgttccaggctgtacagaaaaaagcgggtgcctgagccatcaaggcgagccaggcgggctcccctggggaccaatttcgtggacagactgcctcaggcagtccgcaacagagtgcaggcattgcgaaacatccaggacgagtgtgataaggtcgatacgcttttccttaaagccatccatgacttggagcggaaatatgctgaacttaacaaaccgttatatgaccggaggttccaaataatcaacgcggaatacgaaccaacggaagaagagtgcgaatggaactctgaggatgaagaattcagcagtgacgaggaggtgcaggacaacacgccatctgaaatgccacccttggaaggagaggaagaagagaatcccaaggaaaacccagaagtgaaggcagaggaaaaggaggtgcccaaggagatcccggaagtcaaggatgaagaaaaagaggtgccaaaggagattcctgaggtgaaggctgaagagaaagctgattcgaaggactgcatggaagccaccccagaggtgaaagaggatcccaaggaggtcccccaggtcaaagcagatgataaggagcagccaaaagccacggaggcaaaagctagagcagcggttagggaaacccacaaaagagtccccgaggaacgactgcaagattcagtcgatctcaaaagggcaagaaaggggaagccgaagcgcgaagacccaaaagggatccctgactattggcttatcgtgcttaagaacgtggataaactggggcctatgatccagaaatatgacgaacctattctaaagtttctgagcgatgtttccctgaagttttctaaaccaggccagccagtgtcctatactttcgaatttcacttcctgccgaatccatactttcgaaacgaagtgctggttaaaacctatatcataaaagcgaagcctgatcacaacgacccgtttttctcttgggggtgggaaattgaggactgcaagggctgcaagatcgactggagaaggggtaaagacgtgaccgtcactaccacccagagtcggacgacagccactggggagattgaaatccagcctcgggtggtgcctaatgccagcttcttcaacttcttttccccccctgaaattcctatgattggtaagctggagcctcgtgaagatgcaattcttgacgaagactttgagattggccaaattctacacgacaacgtgatactgaagagcatttactactatacaggcgaagtgaacggaacgtattaccagtttggaaaacactacggtaacaagaagtatcggaaatag

SEQ ID NO: 147321 - DNA, 1521 bp, Artificial Sequence
  derived and/or modified sequence
atggccgaggccgacttcaagatggtgagcgagcccgtggcccacggcgtggccgaggaggagatggccagcagcaccagcgacagcggcgaggagagcgacagcagcagcagcagcagcagcaccagcgacagcagcagcagcagcagcaccagcggcagcagcagcggcagcggcagcagcagcagcagcagcggcagcaccagcagcagaagcagactgtacagaaagaagagagtgcccgagcccagcagaagagccagaagagcccccctgggcaccaacttcgtggacagactgccccaggccgtgagaaacagagtgcaggccctgagaaacatccaggacgagtgcgacaaggtggacaccctgttcctgaaggccatccacgacctggagagaaagtacgccgagctgaacaagcccctgtacgacagaagattccagatcatcaacgccgagtacgagcccaccgaggaggagtgcgagtggaacagcgaggacgaggagttcagcagcgacgaggaggtgcaggacaacacccccagcgagatgccccccctggagggcgaggaggaggagaaccccaaggagaaccccgaggtgaaggccgaggagaaggaggtgcccaaggagatccccgaggtgaaggacgaggagaaggaggtgcccaaggagatccccgaggtgaaggccgaggagaaggccgacagcaaggactgcatggaggccacccccgaggtgaaggaggaccccaaggaggtgccccaggtgaaggccgacgacaaggagcagcccaaggccaccgaggccaaggccagagccgccgtgagagagacccacaagagagtgcccgaggagagactgcaggacagcgtggacctgaagagagccagaaagggcaagcccaagagagaggaccccaagggcatccccgactactggctgatcgtgctgaagaacgtggacaagctgggccccatgatccagaagtacgacgagcccatcctgaagttcctgagcgacgtgagcctgaagttcagcaagcccggccagcccgtgagctacaccttcgagttccacttcctgcccaacccctacttcagaaacgaggtgctggtgaagacctacatcatcaaggccaagcccgaccacaacgaccccttcttcagctggggctgggagatcgaggactgcaagggctgcaagatcgactggagaagaggcaaggacgtgaccgtgaccaccacccagagcagaaccaccgccaccggcgagatcgagatccagcccagagtggtgcccaacgccagcttcttcaacttcttcagcccccccgagatccccatgatcggcaagctggagcccagagaggacgccatcctggacgaggacttcgagatcggccagatcctgcacgacaacgtgatcctgaagagcatctactactacaccggcgaggtgaacggcacctactaccagttcggcaagcactacggcaacaagaagtacagaaagtag

SEQ ID NO: 147322 - DNA, 1500 bp, Artificial Sequence
  derived and/or modified sequence
atggtgagcgagcccgtggcccacggcgtggccgaggaggagatggccagcagcaccagcgacagcggcgaggagagcgacagcagcagcagcagcagcagcaccagcgacagcagcagcagcagcagcaccagcggcagcagcagcggcagcggcagcagcagcagcagcagcggcagcaccagcagcagaagcagactgtacagaaagaagagagtgcccgagcccagcagaagagccagaagagcccccctgggcaccaacttcgtggacagactgccccaggccgtgagaaacagagtgcaggccctgagaaacatccaggacgagtgcgacaaggtggacaccctgttcctgaaggccatccacgacctggagagaaagtacgccgagctgaacaagcccctgtacgacagaagattccagatcatcaacgccgagtacgagcccaccgaggaggagtgcgagtggaacagcgaggacgaggagttcagcagcgacgaggaggtgcaggacaacacccccagcgagatgccccccctggagggcgaggaggaggagaaccccaaggagaaccccgaggtgaaggccgaggagaaggaggtgcccaaggagatccccgaggtgaaggacgaggagaaggaggtgcccaaggagatccccgaggtgaaggccgaggagaaggccgacagcaaggactgcatggaggccacccccgaggtgaaggaggaccccaaggaggtgccccaggtgaaggccgacgacaaggagcagcccaaggccaccgaggccaaggccagagccgccgtgagagagacccacaagagagtgcccgaggagagactgcaggacagcgtggacctgaagagagccagaaagggcaagcccaagagagaggaccccaagggcatccccgactactggctgatcgtgctgaagaacgtggacaagctgggccccatgatccagaagtacgacgagcccatcctgaagttcctgagcgacgtgagcctgaagttcagcaagcccggccagcccgtgagctacaccttcgagttccacttcctgcccaacccctacttcagaaacgaggtgctggtgaagacctacatcatcaaggccaagcccgaccacaacgaccccttcttcagctggggctgggagatcgaggactgcaagggctgcaagatcgactggagaagaggcaaggacgtgaccgtgaccaccacccagagcagaaccaccgccaccggcgagatcgagatccagcccagagtggtgcccaacgccagcttcttcaacttcttcagcccccccgagatccccatgatcggcaagctggagcccagagaggacgccatcctggacgaggacttcgagatcggccagatcctgcacgacaacgtgatcctgaagagcatctactactacaccggcgaggtgaacggcacctactaccagttcggcaagcactacggcaacaagaagtacagaaagtag

SEQ ID NO: 147323 - protein, 548 aa, Artificial Sequence
  derived and/or modified sequence
MVLAELYVSDREGSDATGDGTKEKPFKTGLKALMTVGKEPFPTIYVDSQKENERWNVISKSQLKNIKKMWHREQMKSESREKKEAEDSLRREKNLEEAKKITIKNDPSLPEPKCVKIGALEGYRGQRVKVFGWVHRLRRQGKNLMFLVLRDGTGYLQCVLADELCQCYNGVLLSTESSVAVYGMLNLTPKGKQAPGGHELSCDFWELIGLAPAGGADNLINEESDVDVQLNNRHMMIRGENMSKILKARSMVTRCFRDHFFDRGYYEVTPPTLVQTQVEGGATLFKLDYFGEEAFLTQSSQLYLETCLPALGDVFCIAQSYRAEQSRTRRHLAEYTHVEAECPFLTFDDLLNRLEDLVCDVVDRILKSPAGSIVHELNPNFQPPKRPFKRMNYSDAIVWLKEHDVKKEDGTFYEFGEDIPEAPERLMTDTINEPILLCRFPVEIKSFYMQRCPEDSRLTESVDVLMPNVGEIVGGSMRIFDSEEILAGYKREGIDPTPYYWYTDQRKYGTCPHGGYGLGLERFLTWILNRYHIRDVCLYPRFVQRCTP

SEQ ID NO: 147324 - protein, 254 aa, Artificial Sequence
  derived and/or modified sequence
MTVGKEPFPTIYVDSQKENERWNVISKSQLKNIKKMWHREQMKSESREKKEAEDSLRREKNLEEAKKITIKNDPSLPEPKCVKIGALEGYRGQRVKVFGWVHRLRRQGKNLMFLVLRDGTGYLQCVLADELCQCYNGVLLSTESSVAVYGMLNLTPKGKQAPGGHELSCDFWELIGLAPAGGADNLINEESDVDVQLNNRHMMIRGENMSKILKARSMVTRCFRDHFFDRGYYEVSMHSSAFAKNMFFAVLKLE

SEQ ID NO: 147325 - protein, 299 aa, Artificial Sequence
  derived and/or modified sequence
MCEDWCFRDHFFDRGYYEVTPPTLVQTQVEGGATLFKLDYFGEEAFLTQSSQLYLETCLPALGDVFCIAQSYRAEQSRTRRHLAEYTHVEAECPFLTFDDLLNRLEDLVCDVVDRILKSPAGSIVHELNPNFQPPKRPFKRMNYSDAIVWLKEHDVKKEDGTFYEFGEDIPEAPERLMTDTINEPILLCRFPVEIKSFYMQRCPEDSRLTESVDVLMPNVGEIVGGSMRIFDSEEILAGYKREGIDPTPYYWYTDQRKYGTCPHGGYGLGLERFLTWILNRYHIRDVCLYPRFVQRCTP

SEQ ID NO: 147326 - protein, 174 aa, Artificial Sequence
  derived and/or modified sequence
MVLAELYVSDREGSDATGDGTKEKPFKTGLKALMTVGKEPFPTIYVDSQKENERWNVISKSQLKNIKKMWHREQMKSESREKKEAEDSLRREKNLEEAKKITIKNDPSLPEPKCVKIGALEGYRGQRVKVFGWVHRLRRQVSVLQWSSLVHGEQCCSVWNAKSYPKGQAGSRWP

SEQ ID NO: 147327 - DNA, 1647 bp, Artificial Sequence
  derived and/or modified sequence
atggtgttagcagagttatatgtgtccgatcgcgaggggtctgatgcaaccggtgacgggaccaaggagaagccattcaagaccggcctaaaggctttgatgactgtggggaaagagcccttccctacaatctatgtggactctcagaaggaaaacgaacggtggaatgttataagcaaaagtcaactaaagaatatcaagaaaatgtggcacagagaacagatgaagtcagagagcagagaaaaaaaggaggcggaagacagtttaagacgggagaagaacttggaggaggcaaagaaaatcaccatcaagaacgatcccagccttccggaacccaaatgtgttaaaataggagctcttgagggctatagaggacagcgcgtaaaggtttttggttgggtccaccgactcagacggcagggtaagaaccttatgttcctggtcctgagggatggcacaggctatctgcagtgcgtactggctgatgagctgtgtcagtgttacaacggagtgttgctgtccactgagagcagcgtcgccgtctacggaatgcttaacttaactcccaagggaaagcaggctcccggcgggcatgagctgagttgcgatttttgggaactcatcggccttgcgccggccggaggagcggacaaccttataaatgaggagtctgacgtggatgtgcagcttaataaccgccatatgatgattagaggagaaaacatgtcaaaaatcctgaaggccaggtctatggtaacgaggtgtttccgtgatcatttcttcgaccgtgggtactacgaggttacacctccaacccttgtgcagacacaggtggagggcggtgccacactgtttaaacttgactactttggcgaagaggcattcttgacacagtcatctcagctgtatctggaaacctgtctgccggcactcggagatgtgttctgcattgcccaatcttacagagccgagcagtctcgaacacggcggcatcttgccgagtacacacacgtggaagctgaatgtccattcttaactttcgatgatttactaaacaggctggaggatctagtgtgcgacgtcgtcgacaggattctcaagtcaccagcagggtccatcgtacatgagctgaatcccaactttcagccacccaaaaggccttttaaaagaatgaattactccgacgccattgtttggttgaaagaacatgacgtgaaaaaggaagacggaaccttctacgaatttggagaagatattcctgaagctccagaaaggctgatgaccgatacaattaacgagcccattctcctctgccggtttcccgtggaaatcaaatctttttatatgcaacgctgccctgaagacagcaggctaacagagtcagtggacgtcctcatgcccaatgtgggggagatcgtggggggcagtatgaggatttttgatagtgaggagattctggccggatacaaacgagaaggcattgatccgactccctactactggtataccgaccagaggaagtacggaacctgcccgcacgggggctacggattgggactcgaaagatttctgacctggatcttgaatcggtatcatattagagacgtttgtctgtatcccagatttgtacaacgctgcaccccctag

SEQ ID NO: 147328 - DNA, 525 bp, Artificial Sequence
  derived and/or modified sequence
atggtgctcgcagagctgtacgtgtcagaccgggaagggtctgatgcgacaggcgacggtacaaaggaaaagcctttcaagactggcctgaaggccctgatgaccgtgggcaaggagccctttccaaccatttatgtggacagccagaaggagaacgagaggtggaatgtgatctcaaaaagccagctgaagaatatcaaaaaaatgtggcaccgcgagcagatgaaaagcgagagccgcgaaaagaaggaggccgaagattccctccggcgggaaaagaacctggaggaggccaagaagatcaccattaagaacgatccttcgcttcccgagccaaaatgcgtcaaaataggcgcattagaggggtaccggggacagagagttaaggtgtttgggtgggttcaccgtcttagacgtcaggtgtccgtgctgcagtggagttctctggtgcacggcgaacagtgctgcagcgtgtggaatgccaaatcatacccaaaggggcaagccgggtccaggtggccctag

SEQ ID NO: 147329 - DNA, 1647 bp, Artificial Sequence
  derived and/or modified sequence
atggtgctggccgagctgtatgtgtctgaccgggagggcagtgatgccactggagatggcaccaaggagaagcccttcaagacaggcctgaaggccctgatgacagtgggcaaggagcccttccccaccatctacgtggacagccagaaggaaaatgaacgctggaatgtcatcagcaagagccagctgaagaacatcaagaagatgtggcaccgggagcagatgaagtctgagagccgggagaagaaggaggccgaggacagcctgcggcgggagaagaacctggaggaggccaagaagatcaccatcaagaatgaccccagcctgcctgagcccaagtgtgtgaagattggagccctggagggctaccggggccagagggtgaaggtgtttggctgggtgcaccggctgcggcggcagggcaagaacctgatgttcctggtgctgagagatggcaccggctacctgcagtgtgtgctggctgatgagctgtgccagtgctacaatggagtgctgctgagcacagagagctctgtggccgtgtatggcatgctgaacctgacccccaagggcaagcaggcccctgggggccacgagctgagctgtgacttctgggagctgattggcctggccccagctggaggagctgacaacctgatcaatgaggagagtgatgtggatgtgcagctgaacaacagacacatgatgatccggggggagaacatgagcaagatcctgaaggcccgctccatggtgacccgctgcttccgggaccacttctttgaccggggctactatgaggtgaccccacccaccctggtgcagacccaggtggagggcggggccaccctcttcaagctggactactttggagaggaggccttcctgacccagagcagccagctgtacctggagacctgcctgcctgccctgggagatgtgttctgcatcgcccagagctacagagctgagcagagcaggaccaggaggcacctggccgagtacacccacgtggaggctgaatgtcccttcctgacctttgatgacctgctgaaccggctggaggacctggtgtgtgatgtggtggaccgcatcctgaagagccctgctggcagcatcgtgcatgagctgaaccccaacttccagccccccaagaggcccttcaagaggatgaactacagtgatgccatcgtgtggctgaaggagcatgatgtgaagaaggaggatggcaccttctatgaatttggagaggacatccctgaggcccctgagcggctgatgacagacaccatcaatgagcccatcctgctgtgccgcttccctgtggagatcaagagcttctacatgcagcgctgcccagaggacagccggctgacagaatctgtggatgtgctgatgcccaacgtgggggagatcgtgggcggctccatgaggatctttgacagcgaggagatcctggccggctacaagcgggagggcatcgaccccaccccctactactggtacacagaccagaggaaatatggcacctgcccccatggaggctacggcctgggcctggagcgcttcctgacctggatcctgaaccgctaccacatcagagatgtgtgcctgtaccccaggtttgtgcagcgctgcaccccctag

SEQ ID NO: 147330 - DNA, 525 bp, Artificial Sequence
  derived and/or modified sequence
atggtgctggccgagctgtatgtgtctgaccgggagggcagtgatgccactggagatggcaccaaggagaagcccttcaagacaggcctgaaggccctgatgacagtgggcaaggagcccttccccaccatctacgtggacagccagaaggaaaatgaacgctggaatgtcatcagcaagagccagctgaagaacatcaagaagatgtggcaccgggagcagatgaagtctgagagccgggagaagaaggaggccgaggacagcctgcggcgggagaagaacctggaggaggccaagaagatcaccatcaagaatgaccccagcctgcctgagcccaagtgtgtgaagattggagccctggagggctaccggggccagagggtgaaggtgtttggctgggtgcaccggctgcggcggcaggtgtctgtgctgcagtggagcagcctggtgcatggagagcagtgctgcagcgtgtggaatgccaagagctaccccaagggccaggccggcagccgctggccctag

SEQ ID NO: 147331 - DNA, 1647 bp, Artificial Sequence
  derived and/or modified sequence
atggtgctggccgagctgtacgtgagcgaccgggagggcagcgacgccacaggggatgggactaaggagaagccattcaaaacgggcctgaaagctctcatgactgttgggaaagagcccttcccaactatctacgttgattcacagaaggaaaacgagaggtggaacgttatatcaaaaagccaactcaaaaatattaagaagatgtggcatcgcgagcagatgaagtctgagagcagggaaaagaaagaggccgaagacagcctgagacgggaaaaaaacctggaagaggcaaagaagatcacgattaagaatgacccctcactacccgaaccaaagtgcgtcaaaatcggagcacttgaaggctacagagggcagagagtgaaggtattcgggtgggtccacagactccgcagacagggcaagaacctgatgtttcttgttcttcgggacgggacgggttatctgcagtgtgtcctggccgacgagctctgccaatgttacaatggggtcctgctaagcactgagtctagtgtagctgtgtacgggatgctgaacctaacgcccaaggggaagcaggcacctgggggacatgaactgagctgcgacttctgggaattgattggattggcccctgcaggtggtgcggataacctgatcaacgaggaatccgatgtcgatgtgcagctgaacaatcggcacatgatgatccgaggggagaatatgtctaaaatcctcaaggcccgctccatggtgaccaggtgttttcgcgaccatttcttcgatcgtggttattacgaggtcaccccccctaccttggtacagacccaagtcgaaggcggagccactctcttcaagctcgattatttcggcgaagaagccttcttgactcagagctctcaactgtacctggaaacctgtttgcccgcccttggcgatgtcttttgtatcgcccagtcctaccgcgcagagcagagccgtacccgaagacacttggcagagtacacacacgtcgaagcagagtgcccattcttgacctttgacgatctgctcaacagactcgaagatttggtttgcgacgtggtggataggatcctgaaatccccagcaggcagcattgtgcatgaattgaaccccaatttccagccacccaagcggccatttaaacgcatgaattactcagacgcgattgtctggctgaaagaacacgatgtgaaaaaggaggatggaaccttctatgagttcggtgaagacattcctgaggccccggaacgacttatgacagacacgattaacgaacctattctcctttgccgattcccagtggaaatcaaaagcttctacatgcaacgttgccctgaggatagccgtctgacagaatcagttgacgtgctgatgcccaacgtaggggaaatcgttggaggttcaatgaggattttcgatagtgaggagatccttgctggatacaaacgcgaaggtatcgatccaaccccttactactggtacaccgaccaacggaagtacggaacatgccctcatggtggatacggtctggggctggagcgatttctgacttggatcctcaacagataccatatacgcgacgtctgtctgtatcctcggtttgtgcaaaggtgtaccccgtag

SEQ ID NO: 147332 - DNA, 525 bp, Artificial Sequence
  derived and/or modified sequence
atggtgctggccgagctgtacgtgagcgaccgggagggcagcgacgctaccggagacggaactaaagaaaaaccttttaagaccggcttaaaagctttaatgaccgtggggaaggagccgttcccaacgatctacgtggatagccagaaagagaacgaacgctggaatgttattagcaagtcccagctaaagaatattaagaagatgtggcatcgcgagcagatgaaatccgagtcacgagaaaaaaaggaggctgaggattcactgcgcagagaaaagaacctcgaggaagctaaaaagataaccatcaagaatgatccgagtctccccgagcctaagtgcgtcaagattggggccctggaagggtacaggggccaaagggtcaaagtctttgggtgggtgcaccgcctccggcggcaagtcagcgtcctacaatggtctagcctagtgcacggtgaacaatgctgttccgtttggaacgcgaagagctatcccaaggggcaggctggatcaagatggccctag

SEQ ID NO: 147333 - DNA, 1647 bp, Artificial Sequence
  derived and/or modified sequence
atggttctcgcagagttatatgtatctgaccgagagggatctgacgccactggcgatggcaccaaagaaaaacccttcaagacgggcctgaaggctctcatgaccgtcggcaaggaacccttccccaccatatacgtcgactctcagaaggagaacgagcgatggaatgtcattagtaaatcccaattgaagaatattaagaaaatgtggcaccgggagcagatgaaatcagaatctcgggaaaagaaagaagccgaggattccctcaggcgggagaaaaatctggaggaggcaaaaaaaatcaccatcaaaaatgatccttccctacctgaaccaaagtgcgtgaaaattggggctcttgaagggtacagaggacagcgagtcaaagtgtttggttgggtgcatcggctgcggaggcagggcaagaacttgatgttcctcgttttgagagatggtaccggatacctgcagtgtgtattagcagacgagctgtgccagtgttataatggggtgctgcttagcacagagtcgtctgtcgcagtatatgggatgctcaatcttactccgaagggaaaacaagctccagggggacacgagctcagttgcgacttttgggaactgatcggactggccccagccggaggggctgataaccttatcaacgaagagtctgatgtggatgtgcagctgaacaaccggcacatgatgatcaggggagagaatatgtcaaaaatcctgaaggcaagatctatggtgacaagatgttttcgggatcacttctttgacagaggctattacgaggtaacccctcctaccctggtgcaaacacaagtcgaaggtggtgcaaccctatttaagttagactactttggagaggaagctttcctgacgcagtcttctcagctgtatctggagacatgtctgcccgctctcggcgacgtgttttgtattgcgcagtcatatcgcgcagagcagagcagaaccagaagacatttggccgagtatacccacgtggaggcagaatgcccatttcttacattcgatgacctgttgaataggctggaagaccttgtgtgcgatgtggtagaccgcattctcaagagcccagcaggctccatcgtgcatgaactcaatcccaacttccagccccctaagcggccttttaagagaatgaactattcagacgctattgtgtggctgaaggaacacgacgtcaagaaggaggacggtacattttacgagttcggagaggacattcccgaagccccagagaggttaatgaccgatactataaatgagccgatcttgctgtgtcgctttccggtagaaattaagtctttctatatgcagcggtgcccagaggattctcgcttgacagagagcgtggacgtgctaatgcccaatgtgggcgaaattgtcgggggaagcatgcggatcttcgattctgaggaaatcctcgccggttataagagggagggaatcgacccaactccctactattggtacacagaccaacgcaagtatgggacttgtcctcatggcggatacggactgggcttggaacgctttttgacatggatcctcaacagatatcacatcagagacgtgtgtctttatccccgattcgtgcaaagatgcacgccatag

SEQ ID NO: 147334 - DNA, 525 bp, Artificial Sequence
  derived and/or modified sequence
atggtgttggccgaactgtatgtgtcggacagggaaggctctgacgccaccggcgacggcacgaaggagaagccatttaaaaccggcctcaaggcccttatgaccgtgggcaaagagccgttccccacaatctatgtggatagtcagaaggaaaacgaaagatggaatgtgatctccaaatcacaattaaagaacataaagaaaatgtggcacagagagcaaatgaagagtgagtccagagagaagaaggaggctgaggattcactgaggcgtgagaaaaatctggaggaggcaaagaaaatcaccataaagaacgatccgtctctaccagaacccaagtgcgtgaaaattggcgctctggaaggttatcgtgggcagagggtaaaagtcttcggttgggtacatagactcagacggcaagtaagtgtgctgcagtggagctcgctagtgcatggcgagcagtgctgctcggtctggaatgccaagtcctatcccaagggccaagccggaagccgatggccttag

SEQ ID NO: 147335 - DNA, 2863 bp, Artificial Sequence
  derived and/or modified sequence
atccggaagttgcctctgccctcaccaaagatggcggccccggcgccgctcgcccacctctcgtaaccaatggaaccgcggcgctcggccgattctcgcaggcgccctcagatctacgctctctgatgcaacgccggaatcgcggaaaccgccggtgcacgttggagtcataagacggcgtcggtgttgcagtctgtgtccttggaggtgaccagggccactgcaggcatggtgctagcagagctgtacgtctctgaccgagagggaagcgatgccacgggagatggaaccaaggagaaaccatttaaaacaggtctaaaggctttgatgacagtagggaaagaaccatttcctaccatttacgtagattcacaaaaagaaaatgagaggtggaatgttatttctaaatcacagttgaagaacattaaaaagatgtggcatagggaacaaatgaagagtgaatcccgggaaaagaaagaggcagaagatagtttacgaagagaaaagaacctggaagaagcaaagaagattaccattaaaaatgatccaagtctcccagagccaaaatgtgtgaagattggtgcgttagaaggatatagaggccaaagagtaaaggtgtttggctgggtccacaggctgcgcaggcaaggaaagaatttaatgtttctggtgttgcgagatggtacaggttatcttcagtgtgtcttggcggatgagttgtgtcagtgctacaatggagttctcttgtccacggagagcagtgttgcagtgtatggaatgctaaatcttaccccaaagggcaagcaggctccaggtggccatgagctgagttgtgacttctgggaactaattgggttggcccctgctggaggagctgacaacctgatcaatgaggagtctgacgttgatgtccagctcaacaacagacacatgatgatccgaggagaaaacatgtccaaaatcctaaaagcacgatccatggtcaccaggtgctttagagatcacttctttgatagggggtactatgaagttactcctccaacattagtgcaaacacaagtagaaggtggtgccacactcttcaagcttgactattttggggaagaggcatttttgactcaatcctctcagttgtacttggagacctgcctcccagccctgggagatgttttttgtattgctcagtcataccgggcagagcagtccagaacacgaaggcacctggctgagtacactcacgtggaagctgagtgtcctttcctgacttttgacgacctcctgaaccggttggaggacttggtttgtgatgtggtagatcgaatattgaagtcacctgcagggagcatagtgcatgagctcaacccgaactttcagccccccaaacggcctttcaaacggatgaactattcagatgctatcgtttggctaaaagaacatgatgtaaagaaagaagatggaactttctatgaatttggagaagatatcccagaagctcctgagagactgatgacagacaccattaatgaaccaatcttgctgtgtcgatttcctgtggagatcaagtccttctacatgcagcgatgtcctgaggattcccgtcttactgaatctgtcgacgtgttgatgcccaatgttggtgagattgtgggaggctcaatgcgtatctttgatagtgaagaaatactggcaggttataaaagggaagggattgaccccactccctattactggtatacggatcagagaaaatacggtacatgtccccatggaggatatggcttgggcttggaacgattcttaacgtggattctgaataggtatcacatccgagacgtgtgcttataccctcgatttgtccagcgttgcacgccataaccattttctccagaagcgtggaggaaagattatgaaaggaacaggctctttaaaaaagaaaacaaaaagccagaatcttcctttttttgtttcattggggtttctctttctgtttttctttctactaccataaaaactatctcaaatcacctgaacatcaagtgatattaaggttgtcatcttaagaaaaaatatccatttttttcttaagttcgggaaacaaagttcggggaaaatacctggcatgaaactgtagttagggatacatttcagcattttactcactttatccaagttattcattttattcaagttatatgtatgtataattcaacaattttagattatggtgtaagatactccagtaacttatctttctgtccttttaagtgtaccttgaattctttgatttattttattgcatcaatgaattaaaacaaaaatcttgggggaagaaattggcaatatcgtataaaaatctgctcatattagaacacagtataattcagcagtaaacactagaatcaaatgaatagccttttgtatcagttattaatcttttctaactctgcttagctgctaataatcctgaggcatagaaattgaagaatttgtaaaaatagaattgccttaaaggatttgaagtaagaacataattttggggagagttttttagtgattcacagtatccctcttagcattaatttaaggtaaagaggcagattgattttccctctttcctggtaattcctaagtaattaagaataaataagttccaaaagaaattgtagctggaatcttaataacaattgtgagtggctgtttgagttgcccccaccatgtccttagatctaatctgtgctaccttattaactcacagcaggcttactgaatggcttcatttcagatttagttgatttctccaccaaatgcatgtcatgtattctcaataggctgtattcccagcagtcaataaatgaacacccgt

SEQ ID NO: 147336 - DNA, 1647 bp, Artificial Sequence
  derived and/or modified sequence
atggtgctggccgagctgtacgtgagcgacagagagggcagcgacgccaccggcgacggcaccaaggagaagcccttcaagaccggcctgaaggccctgatgaccgtgggcaaggagcccttccccaccatctacgtggacagccagaaggagaacgagagatggaacgtgatcagcaagagccagctgaagaacatcaagaagatgtggcacagagagcagatgaagagcgagagcagagagaagaaggaggccgaggacagcctgagaagagagaagaacctggaggaggccaagaagatcaccatcaagaacgaccccagcctgcccgagcccaagtgcgtgaagatcggcgccctggagggctacagaggccagagagtgaaggtgttcggctgggtgcacagactgagaagacagggcaagaacctgatgttcctggtgctgagagacggcaccggctacctgcagtgcgtgctggccgacgagctgtgccagtgctacaacggcgtgctgctgagcaccgagagcagcgtggccgtgtacggcatgctgaacctgacccccaagggcaagcaggcccccggcggccacgagctgagctgcgacttctgggagctgatcggcctggcccccgccggcggcgccgacaacctgatcaacgaggagagcgacgtggacgtgcagctgaacaacagacacatgatgatcagaggcgagaacatgagcaagatcctgaaggccagaagcatggtgaccagatgcttcagagaccacttcttcgacagaggctactacgaggtgaccccccccaccctggtgcagacccaggtggagggcggcgccaccctgttcaagctggactacttcggcgaggaggccttcctgacccagagcagccagctgtacctggagacctgcctgcccgccctgggcgacgtgttctgcatcgcccagagctacagagccgagcagagcagaaccagaagacacctggccgagtacacccacgtggaggccgagtgccccttcctgaccttcgacgacctgctgaacagactggaggacctggtgtgcgacgtggtggacagaatcctgaagagccccgccggcagcatcgtgcacgagctgaaccccaacttccagccccccaagagacccttcaagagaatgaactacagcgacgccatcgtgtggctgaaggagcacgacgtgaagaaggaggacggcaccttctacgagttcggcgaggacatccccgaggcccccgagagactgatgaccgacaccatcaacgagcccatcctgctgtgcagattccccgtggagatcaagagcttctacatgcagagatgccccgaggacagcagactgaccgagagcgtggacgtgctgatgcccaacgtgggcgagatcgtgggcggcagcatgagaatcttcgacagcgaggagatcctggccggctacaagagagagggcatcgaccccaccccctactactggtacaccgaccagagaaagtacggcacctgcccccacggcggctacggcctgggcctggagagattcctgacctggatcctgaacagataccacatcagagacgtgtgcctgtaccccagattcgtgcagagatgcaccccctag

SEQ ID NO: 147337 - DNA, 525 bp, Artificial Sequence
  derived and/or modified sequence
atggtgctggccgagctgtacgtgagcgacagagagggcagcgacgccaccggcgacggcaccaaggagaagcccttcaagaccggcctgaaggccctgatgaccgtgggcaaggagcccttccccaccatctacgtggacagccagaaggagaacgagagatggaacgtgatcagcaagagccagctgaagaacatcaagaagatgtggcacagagagcagatgaagagcgagagcagagagaagaaggaggccgaggacagcctgagaagagagaagaacctggaggaggccaagaagatcaccatcaagaacgaccccagcctgcccgagcccaagtgcgtgaagatcggcgccctggagggctacagaggccagagagtgaaggtgttcggctgggtgcacagactgagaagacaggtgagcgtgctgcagtggagcagcctggtgcacggcgagcagtgctgcagcgtgtggaacgccaagagctaccccaagggccaggccggcagcagatggccctag

SEQ ID NO: 147338 - protein, 695 aa, Artificial Sequence
  derived and/or modified sequence
MSLLLSFYLLGLLVSSGQDRFAMLANNNLQILNINKSDEGIYRCEGRVEARGEIDFRDIIVIVNVPPAISMPQKSFNATAERGEEMTFSCRASGSPEPAISWFRNGKLIEENEKYILKGSNTELTVRNIINSDGGPYVCRATNKAGEDEKQAFLQVFVQPHIIQLKNETTYENGQVTLVCDAEGEPIPEITWKRAVDGFTFTEGDKSLDGRIEVKGQHGSSSLHIKDVKLSDSGRYDCEAASRIGGHQKSMYLDIEYAPKFISNQTIYYSWEGNPINISCDVKSNPPASIHWRRDKLVLPAKNTTNLKTYSTGRKMILEIAPTSDNDFGRYNCTATNHIGTRFQEYILALADVPSSPYGVKIIELSQTTAKVSFNKPDSHGGVPIHHYQVDVKEVASEIWKIVRSHGVQTMVVLNNLEPNTTYEIRVAAVNGKGQGDYSKIEIFQTLPVREPSPPSIHGQPSSGKSFKLSITKQDDGGAPILEYIVKYRSKDKEDQWLEKKVQGNKDHIILEHLQWTMGYEVQITAANRLGYSEPTVYEFSMPPKPNIIKDTLFNGLGLGAVIGLGVAALLLILVVTDVSCFFIRQCGLLMCITRRMCGKKSGSSGKSKELEEGKAAYLKDGSKEPIVEMRTEDERVTNHEDGSPVNEPNETTPLTEPEKLPLKEEDGKEALNPETIEIKVSNDIIQSKEDDSKA

SEQ ID NO: 147339 - protein, 837 aa, Artificial Sequence
  derived and/or modified sequence
MSLLLSFYLLGLLVSSGQALLQVTISLSKVELSVGESKFFTCTAIGEPESIDWYNPQGEKIISTQRVVVQKEGVRSRLTIYNANIEDAGIYRCQATDAKGQTQEATVVLEIYQKLTFREVVSPQEFKQGEDAEVVCRVSSSPAPAVSWLYHNEEVTTISDNRFAMLANNNLQILNINKSDEGIYRCEGRVEARGEIDFRDIIVIVNVPPAISMPQKSFNATAERGEEMTFSCRASGSPEPAISWFRNGKLIEENEKYILKGSNTELTVRNIINSDGGPYVCRATNKAGEDEKQAFLQVFVQPHIIQLKNETTYENGQVTLVCDAEGEPIPEITWKRAVDGFTFTEGDKSLDGRIEVKGQHGSSSLHIKDVKLSDSGRYDCEAASRIGGHQKSMYLDIEYAPKFISNQTIYYSWEGNPINISCDVKSNPPASIHWRRDKLVLPAKNTTNLKTYSTGRKMILEIAPTSDNDFGRYNCTATNHIGTRFQEYILALADVPSSPYGVKIIELSQTTAKVSFNKPDSHGGVPIHHYQVDVKEVASEIWKIVRSHGVQTMVVLNNLEPNTTYEIRVAAVNGKGQGDYSKIEIFQTLPVREPSPPSIHGQPSSGKSFKLSITKQDDGGAPILEYIVKYRSKDKEDQWLEKKVQGNKDHIILEHLQWTMGYEVQITAANRLGYSEPTVYEFSMPPKPNIIKDTLFNGLGLGAVIGLGVAALLLILVVTDVSCFFIRQCGLLMCITRRMCGKKSGSSGKSKELEEGKAAYLKDGSKEPIVEMRTEDERVTNHEDGSPVNEPNETTPLTEPEKLPLKEEDGKEALNPETIEIKVSNDIIQSKEDDSKA

SEQ ID NO: 147340 - DNA, 2514 bp, Artificial Sequence
  derived and/or modified sequence
atgagtttgctactctcattttatttgctggggctgctcgtgtcttctggccaggctttgctgcaagtgaccatctcccttagcaaggtggagctgagcgttggtgaaagcaagttctttacctgcacagcaatcggtgagccagaatctattgactggtataacccccaaggggagaagatcatatcaacccagcgagtcgtcgtgcagaaagaaggagttagatcaaggttgaccatttataacgctaatatagaggacgctgggatctatcgctgccaggcaaccgacgctaaaggacagactcaagaggcaaccgttgtgttggaaatttaccagaagctcacattccgggaggtggtgtcacctcaggaatttaagcagggagaggacgctgaggtagtctgtagagtgtccagtagtccagcgcctgccgtgagttggttgtaccataatgaagaggtcacgacaatttccgataatagatttgccatgctggcaaacaacaacttgcaaattcttaatattaacaagtcggacgaagggatctacagatgtgagggtcgggtggaagccagaggagaaatcgatttcagggatattatcgtgattgtcaatgtgccacccgcaatttcaatgccccagaagagcttcaacgcaactgcggagagaggggaagagatgactttctcctgccgagccagtggttcaccggaacctgcgattagttggttccggaacggcaagctcatcgaagagaatgagaagtacatcctcaaggggtccaacaccgagctgacagtcaggaatataatcaattcagatgggggcccctatgtctgtagggccaccaacaaggcaggcgaagatgaaaagcaggcgttccttcaagtgtttgtccagccgcacattatccagctgaaaaacgagacaacttacgaaaatgggcaagtgacgttggtctgtgacgctgaaggcgagccaatccctgagatcacttggaaaagagcggtggacgggtttacattcaccgaaggcgataagtcactggacggccgcattgaggttaaaggacagcacggctctagctcgctgcacataaaagacgtgaaactgtccgattcaggacgctacgattgcgaggcagcctcaagaatagggggacaccagaagtctatgtatctggacattgagtacgccccaaaattcattagcaaccaaactatttactacagctgggagggtaatcctatcaacatctcctgcgacgtgaagtctaatccccctgcctcgattcattggcgccgagataagctggtgcttcccgccaagaataccacaaatcttaaaacttattccaccggccggaaaatgatcctcgagatcgctccgacatcagacaacgacttcggtcggtataactgtactgctactaatcatattgggactcggttccaggagtatatactcgcgctcgctgatgtacctagcagcccttatggggtgaagatcatcgagctctcccagactacagcgaaggtttctttcaataaacctgactcccatggcggggttcccatccatcactatcaggtggatgttaaggaggtggcttccgaaatctggaaaatcgttcgaagtcatggtgtgcagaccatggttgttctgaacaatctggaacccaacacaacatacgagatccgagtcgcagccgtgaatggcaaagggcagggggattattccaagatcgaaatttttcagacattacccgttcgcgagccttctcctcccagtatacatggccagccctcaagtgggaaaagctttaaactctcaattactaagcaggatgacggaggggctccgattttagaatacatcgtgaaatacagaagcaaggacaaggaagatcaatggcttgaaaagaaggtgcagggcaataaagaccatatcattttggagcacctgcaatggaccatggggtatgaagttcaaattactgctgccaatcgcctgggctactccgaaccaactgtctacgaattcagtatgcctccaaagcctaatatcatcaaggacactctttttaacggactgggtctgggagctgttattggattgggcgtggccgcactgcttttgatcctggtggtgacagatgtgagctgtttcttcattagacagtgcggactcctgatgtgcatcacccgccggatgtgcggcaaaaaaagcggctctagtggaaaatccaaggaactcgaagaaggcaaagccgcttacttgaaggatgggtctaaagaacccattgtagaaatgcgcacagaagacgagcgggttaccaaccacgaggacggtagccccgtgaacgaacctaatgaaaccactcctctcaccgagcccgaaaaacttccactgaaggaggaagatggcaaagaggcactcaacccagagactattgaaatcaaggtctcaaatgatatcatccaatcaaaagaggacgactcaaaagcctag

SEQ ID NO: 147341 - DNA, 2514 bp, Artificial Sequence
  derived and/or modified sequence
atgagcctgctgctgtccttctacctgctgggcctgctggtgagcagcggccaggccctgctgcaggtgaccatcagcctgagcaaggtggagctgtctgtgggggagagcaagttcttcacctgcacagccatcggggagcctgagagcattgactggtacaacccccagggcgagaagatcatcagcacccagagggtggtggtgcagaaggagggcgtgcgcagccggctgaccatctacaatgccaacattgaagatgctggcatctaccgctgccaggccacagatgccaagggccagacccaggaggccaccgtggtgctggagatctaccagaagctgaccttccgggaggtggtgagcccccaggagttcaagcagggagaagatgctgaggtggtgtgccgggtgagcagcagccctgccccagctgtgtcctggctgtaccacaatgaggaggtgaccaccatcagtgacaacagatttgccatgctggccaacaacaacctgcagatcctgaacatcaacaagagtgatgagggcatctaccgctgtgagggccgggtggaggcccggggggagattgacttccgggacatcatcgtcatcgtgaatgtgcccccagccatctccatgccccagaagagcttcaatgccacagctgagcggggggaggagatgaccttcagctgccgggccagcggcagccctgagcccgccatctcctggttcagaaatggcaagctgattgaagaaaatgagaagtacatcctgaagggcagcaacacagagctgactgtgaggaacatcatcaacagtgatggcggcccctacgtgtgccgggccaccaacaaggctggagaagatgagaagcaggccttcctgcaggtgtttgtgcagccccacatcatccagctgaagaatgagaccacctatgaaaatggccaggtgaccctggtgtgtgatgctgagggggagcccatccctgagatcacctggaagagagctgtggatggcttcaccttcacagaaggagacaagagcctggatggccgcatcgaggtgaagggccagcacggcagcagcagcctgcacatcaaggatgtgaagctgagtgacagcggccgctatgactgtgaggccgccagccgcatcggcggccaccagaagtccatgtacctggacattgaatatgcccccaagttcatcagcaaccagaccatctactacagctgggagggcaaccccatcaacatcagctgtgatgtgaagagcaaccccccagccagcatccactggaggcgggacaagctggtgctgcctgccaagaacaccaccaacctgaagacctacagcacaggcaggaagatgatcctggagatcgcccccaccagtgacaatgactttggccgctacaactgcacagccaccaaccacatcggcacccgcttccaggagtacatcctggccctggctgatgtgcccagcagcccctacggcgtgaagatcatcgagctgagccagaccacagccaaggtgtccttcaacaagccagacagccacggcggcgtgcccatccaccactaccaggtggatgtgaaggaggtggccagcgagatctggaagatcgtgcgcagccacggcgtgcagaccatggtggtgctgaacaacctggagcccaacaccacctatgagatccgggtggccgctgtgaatggcaagggccagggcgactacagcaagattgagatcttccagaccctgcctgtgcgggagcccagcccccccagcatccacggccagcccagcagcggcaagagcttcaagctgagcatcaccaagcaggatgatggaggagcccccatcctggagtacatcgtgaagtaccgcagcaaggacaaggaggaccagtggctggagaagaaggtgcagggcaacaaggaccacatcatcctggagcacctgcagtggaccatgggctatgaggtgcagatcacagctgccaaccggctgggctacagcgagcccaccgtgtatgagttctccatgccacccaagcccaacatcatcaaggacaccctcttcaacggcctgggcctgggcgctgtgattggcctgggcgtggccgccctgctgctgatcctggtggtgacagatgtgtcctgcttcttcatccggcagtgtggcctgctgatgtgcatcaccaggaggatgtgtgggaagaagagcggcagcagcggcaagagcaaggagctggaggagggcaaggccgcctacctgaaggatggcagcaaggagcccatcgtggagatgaggacagaagatgagcgggtgaccaaccatgaagatggcagccctgtgaatgagcccaatgagaccacccccctgacagagcctgagaagctgcccctgaaggaggaggatggcaaggaggccctgaaccctgagaccatcgagatcaaggtgtccaatgacatcatccagagcaaggaggatgacagcaaggcctag

SEQ ID NO: 147342 - DNA, 2514 bp, Artificial Sequence
  derived and/or modified sequence
atgagcctgctgctgagcttctacctgctgggcctgctggtgagcagcggccaggccctactgcaggtgacgatttccttgagtaaggtggagttgagtgtcggggagtctaagttctttacgtgtaccgctataggagagccagagagcattgactggtataatccacaaggagagaagattatcagtacccagcgcgtggtcgtccagaaggaaggggtgagaagccggctcacgatctacaatgccaacatcgaagatgcggggatatacaggtgtcaggccaccgacgctaagggtcaaactcaagaagccacagtggttctggagatctaccagaagctgaccttccgcgaggtagtgtcacctcaggagtttaagcaaggggaggacgccgaggtcgtgtgccgggtgagttcttccccagccccagcagtttcttggctttaccataacgaagaagttaccactatcagcgacaatcggttcgcgatgctagccaacaataatctacaaattttgaacatcaacaaatctgatgaaggaatctaccgctgcgagggcagagttgaagcccgaggcgagattgacttcagagatattatcgtgatcgtgaatgtgccgccggccatctctatgccccaaaaatctttcaacgctactgccgagaggggagaagagatgacgtttagttgcagagcttctggtagccctgagcccgcaataagctggtttcgcaatggcaaactgatcgaggagaacgaaaagtacatcctgaagggttctaatacagaacttactgtgcgcaatattattaattctgatggcggcccctatgtctgcagggccacgaataaggccggcgaggatgaaaaacaggcttttctgcaggtattcgtccagcctcatataatccagttgaagaacgagacaacctatgaaaacggacaggtgacactggtctgcgacgccgagggtgagcctataccagaaatcacttggaagcgggctgtggatggttttacattcactgaaggtgataaatccctggatggcaggatcgaagttaagggccaacatgggtcttcatcattgcatatcaaggatgtaaagctgtcagattccggaagatacgattgtgaagccgcctctcgtatcggtggacaccaaaaatcaatgtacctagacattgagtatgcacctaagtttatttctaatcagacaatctactacagctgggaaggcaatcccattaacatctcttgtgacgtcaagagcaatcccccggccagcatccactggagaagagacaagttagttctgccggccaaaaatactaccaacttgaagacctactcaaccggtcggaagatgatacttgagatcgcccctacatctgataacgactttggtcggtacaactgcaccgccaccaatcacatcggtactcggttccaagagtatattctcgctttagctgacgtcccgtcctcaccttacggtgtgaaaatcattgagttaagccaaacaacagccaaggtatcctttaataagccagattcccacggcggcgttcccatccatcactatcaggtggatgtgaaagaagtggcttccgagatatggaagatagtccggagccacggcgtacagaccatggtcgtgctgaacaaccttgagcccaacacaacttacgagatccgcgttgcagcggtcaatgggaaaggacagggcgattacagcaaaatcgagattttccagacactacccgtgagggagcctagccccccgtctatccatggacagccatcatctggaaagagctttaaactgagcatcactaaacaggatgacggaggggctcctatcctcgagtatatagtcaagtatcggtccaaggacaaagaagatcaatggcttgagaagaaggtgcagggaaacaaagatcacataatattagaacacctgcaatggaccatgggctacgaagttcagatcacagcagccaataggctaggctactcagaacctactgtctacgagttctccatgcctccaaagcctaacattatcaaagacacattgtttaatggcctcggactcggggctgtaattggcttaggcgtagccgccttactcctgattcttgtagtgacggacgtctcctgtttttttatacgacagtgtggcttgttaatgtgcattacccggagaatgtgtggaaagaaatctggcagttctggaaagagtaaagaactagaggagggtaaggccgcatatctgaaagatggctcaaaggagcctattgttgaaatgagaactgaggacgagcgcgttaccaatcacgaagatggcagcccggtgaatgaacccaatgaaacgacccctctgaccgagcccgaaaagctgcccttgaaagaagaagacggcaaggaagctctgaacccagaaacgattgagatcaaggtatccaacgatatcatacaaagcaaagaagacgattcaaaagcctag

SEQ ID NO: 147343 - DNA, 8135 bp, Artificial Sequence
  derived and/or modified sequence
gctgccgccgcggcggccgctgctgctgctgcttctgccgccgctgccgccgccgctgcctggatatagtgcggcaagagcggagcttgcagtcactttgcgaggaggagcgcgcgggctgcgggcggctggggcaccgcgggagcggcggcggcggctctagcagaggcggccggggcagcgaaaggttctctctccagggctggacttaataactttgaaactgtccaccggtgtcacgtcctgaacatgagcctcctcctctccttctacctgctggggttgcttgtcagtagcgggcaagctcttcttcaagtgacaatttcacttagcaaagtagagcttagtgttggagaatctaaattcttcacatgtacagcgattggtgaacctgaaagtatagattggtataatcctcaaggagagaagataatttcaacacagagggtagtagtgcaaaaggaaggtgttaggtcacggttaaccatctacaatgcaaatatagaagatgcagggatatatcgttgtcaagcaacagatgccaaaggacaaacacaagaagctacagtagttttggaaatttaccaaaaactcactttcagagaagtggtatctccacaagaattcaaacaaggagaagatgcagaagtggtttgccgagttagcagttcacctgcacctgctgtcagctggttgtatcataatgaggaagtcaccactatttccgacaatcggttcgctatgttagcaaacaataacctgcagattctcaacatcaataaaagtgatgaaggtatatacagatgtgaaggaagagtggaggccaggggagaaattgacttccgtgatatcattgttattgttaatgtgccgccagcaatctcaatgcctcagaaatcttttaatgccacagcagagagaggagaagaaatgacattttcctgcagggcctcaggctctccagaacccgccatctcctggttcaggaatggcaagctcattgaagaaaatgagaagtacatattgaaagggagcaatacagaactcactgtcaggaacataatcaatagtgatggtggtccttatgtctgcagggccacaaataaggcaggagaagatgaaaagcaagctttcctccaagtctttgtacagcctcacataatacagcttaaaaatgaaactacatatgagaatggtcaagtcacactcgtatgtgatgcggaaggggagcctattccagaaatcacttggaaaagagctgtggatggcttcacgttcactgaaggcgataagagcctggacggccgtatcgaagtcaaagggcagcatggaagctcatcactgcatattaaagatgtgaagttgtcagattcagggagatatgactgtgaagctgcaagcagaattggagggcatcaaaagagcatgtaccttgatattgaatatgcccccaagtttatatcaaaccaaacaatttattactcttgggaaggaaatcctatcaatataagttgtgatgtgaaatcgaatccaccagcatcaattcactggagaagagataaattagtcttacctgctaaaaacacgaccaatttaaagacttatagtacaggaagaaagatgatattagagattgcacctacatctgacaatgactttggacgctataattgcacagccactaatcatataggaacaagatttcaagaatatattcttgctttggctgacgtgccatccagtccctatggagtgaagatcatagagctgtcgcagaccacggccaaggtttccttcaacaaaccggactcccatggaggtgtacctattcatcactatcaggtggatgtcaaagaagtagcgtcagaaatctggaaaattgtacgctcccatggagttcaaacaatggttgttttgaacaacctggaaccaaatacaacttatgaaatcagggttgcagctgtaaatggaaagggacaaggagactacagtaaaatagaaatcttccaaacattaccagttcgtgaaccaagtcctccatccatacatggacagccaagcagtggaaagagctttaaactcagcatcaccaaacaggacgatggaggggcccctattttggaatacattgtgaaatatagaagtaaagataaggaagaccaatggctagagaaaaaagtgcaaggaaataaagaccacatcattttggagcatctccagtggaccatggggtatgaagttcagattacagctgccaatagattgggatattctgaaccgacagtttatgaattcagcatgccaccaaagcccaacattattaaagacacgctgtttaatggtcttgggcttggagcagtaattggcctgggagttgctgcactgctgctaattcttgtggtaacagacgtcagctgcttctttattcggcaatgtgggttgctgatgtgcatcactaggagaatgtgtggaaagaaaagtggctccagtggcaaaagtaaagaactcgaagaaggaaaagctgcatacctgaaagatggatcaaaagaaccaatagtggagatgagaacagaggatgaaagagttactaatcacgaagatgggagcccagtaaatgagccaaatgaaaccacaccactgacagaacctgaaaaattgcctttaaaggaagaagatgggaaagaagctctaaatccagaaactatagaaattaaagtttctaacgacatcattcaatcaaaagaagacgacagcaaagcataacaacaatattacaggggcttgaacaacactacgaagagtatttggattgcgtgaccctatgaccaaaactattccattgaccttaatttcttgggaaacttctagcttggaatagcttgtacacatatacatatgatcaaatactcctgcccatgatccattcccttttgttattgttgttgttgttgctgttgttgttaattttgttaagaatttcaatatcaagactgactggcaccaacactttggtattcaatttgattctatgactgaagtactggaatttattatgtggctaaagtgctctatttattaagaactatatttaataccaccaacaaatataggggttaaggaaaaaaaacgtgagctacatgtgtaagaaggccctgcatgtgtatgagtcctattctgggcaaatagattcttaaagtggctttcaacttcaagatgaaggagcttaataatggttactcattttatcaggggaatttcagggaacgtaggcgtcaaagagccagttatctttagcagatattaaaaattgaaaactttggagaactcatttcaagttatgattcagtgcattttcaacattgatttttgatagactgaagtgccagatcaaaattgttacccatttgaaagaatattagttgtatataaaattagattagaaagactttctaaatctctatctctttatatatgtcctattcattcacaatggattatacaaaaaaaagtgtattgcaagtgaaataatattgatttctgccctcagcttcaaataaagtaaattgaaatgggaacaatatcaatatggtgtcttgatatatttataaatatgtgattatcatttatttttaaaataatttatcaaaaaacaagtctttagtgttcaaatacttcaaatcatatcctcagatatatttttagcccatggttttatataatctttaagaactaattttaccactgttataggttcaccattaaatataattggctaataaaaattttaaggttgactaaattaagaagaaattatttaacattttaatgtgccataaaagagtaaatgataaataattaaatgccactatgtgttctattccggatgttctagctagaagtcattttaagattttgataaacaactttggttgaagaaattccttaagtattcaacacaaactttctaatatcttttgttagggttataccagaataaaatgcttctttacttccaagctatgcaagctcccagaggtaatagagtgacacatgatttaacttatatgtaaggtttaaaaaagtatttatcattataaacatacataccatttgggagcaggtttattaaccttgagagccaaaggtttccttaggccctgtaacattcagaacctttggtgtttcaggtggtattatagctcaaatagtgacaggacagggaatgcgttccaaaggaatattggagcaattttaacattgcagaaacctgctctgggtgtgtctctctgtagagataacctgatgattattaaatgtaaaattaaggcaactcatgaatatttttatttacaaagtgcttgaaactcagccaaggagagaaaactaagtacttttatataattcatcacttttctggctacagcaggacagaatatgaccatcttcgtttgaaggcaccaaatcgtcgcagtgtctttgccataagttgcagggttaaatgcgggaatctctccttgcgttcctgtctggcgtattctgaagaaaagaacagaattcttgtgcctacctaagaatttgagtagtgtctaaacaaacaaagcagttaggtcattttaactgacttgattatccaactggtctttgacagatttgactgttcatatttagtttatgtttgtctgatcatccagtttgctttattttgctgtgttttattttgttgtttgttttgttttgtaccagtgtactaaaactagtcaaaatacttgaattagtttgtttgtgcaaagtgtacaagcttagtaaagtgtccatgaagcaatagccatgaatgctaattatttctaaatagggccacatggttttaaactaatgatggtgaaagaaatacgatgactgagaaagtcatttcgcatgtttactattgttatattcgtgctttacttcaagagtgcagaaatcataataaataacaaactatttttgtgttttctcaatgtgacatttctgtttctctcatttattcggattttccttgtaaagaaattgacatatatttcatatatatatacacatatatatatatacacatatatatacatatatatatatgatgttaaatttcctgccactcatgtggagtaatgatctgaaattaacagataatctgaagctaattatattcagactatttcaagtgcactgtttcagttgcccgggtggtccttacctcttgtccttgaaatccatgccatgctgaagcaaggcaatactgtgataaagtattttttttaatatttcaatggaatgctccaaatgatttataaaaatttcaaaataaaagatggcttgtagtaaattgtaaaatatgagtagaactgaaataacctgtttcattcttattctagattaaacaaacatatacatataaccatataaatgttatttttattgtctgagagtactcttaaatattagtataaagtgtcaaaagaattgactgaatataagtactgttaaaataatttgaaccctatgatattttaaaccaagaggcaaagatatcacctaaaacttggtatttcttgataggttaggtgcaattaggcagtgacaatctgtattcaacaacatataagaggaaagagtaatatcagaattttgacacaaattaatgtgtcaacatattttacaatgattgtcaaaggaatttaagaattgtatttttaaagatttatttattatttttgtgggctaagacattgccattctattgatactaatgtctaacattaatgtttcttgttttcttttatttttaatattaataactataaaagcatttttcaaaggctatttgatccagcacacttcatatggatcttagtctttgaattaaatatttatataaatagattttattaatcaaattatttatttgtgtgccaacaattaattgtaactttatgatcatatctttgtttatgcttcttattttaaataattaagatgtatctgtgccttttaattagcatgacagtctgctttattaaaagaaaaaaactacaattaacatcattactagtatattttgcttagatttgagatactcaaatgatgctgtcttatttacagtcagtaattaagttcaattcaaactattttaccttgaatataaaatctaaatataataaactatactgtataatttactttaattcatgtcaaaacaattctttttatacacacacatgaaatattcttaatctgttctgtattgtttttctaaacaataaatacattctagatattgttgaaattaaattttgccagttgtaagacaaagacaacagataacttttgaaaatcaagcaaattactatggtgtttcttgggtcttcattattccatttatatatattttttatttcgaataataaatcaacctttatttttggcaataagattatcactgacgaaaatatgtacagttcaagaagtagaaataatattttccattagttaatttaggaaatattggaatagcatattataattatttatgaggttcccaatgttgtttttcacagaaaataaggtaaacattcaacttaaatcccccatgaagttttttcatgctcatactcataatcattatcacataatgtgcttattcaacaaactttgtatctggatatatttttaacaataagtttgttagcattatttatttatctttagagagaaaatatttgcatctgtttatttaccctttgaagcattaatacttagtcactcacattgaaattgcatatggatgtatcaacataggctaaaattaaattatggatgtcgcagaaatgaaatacttcatcttagaaggtaaaattttcaagaaagtattttattcatggacttaataatgtcttaagatgaaacaattttatgtccaaatgagaaatttataaaaagacccacatatagtagttgctgaacaaacataattttcttccagctcccatccttcctttttgaaaaattgaatttacccatgtagatgcagctatttacaattatacaagaatgcgaatagattaattatatcttctcatataaaggcaaagaattttatattatatataatgctaaatatttatttgataacacaatattcttagaaaaatagtttattactttaggattttatctataacataaatatattatttgttattacctctttaaattttcattttatacaatttttgagattctggccacacaacattcagaattattgctcatgtaaatttaaatattgctacttattttttttcttttctgaaatgaaaacatgaatcttttggcatctgtttttagcctcccatggaagacagtaagcaaaaccatcactgttggagaatttcaaatcacaacccgacataggagagtagagaaacaaagaaatgagtggatctagaaaggcaaactgaattgctatatttggaatagctaagaaggacctgactttgagaagtgctagaccagggactaggaacgttgcttagataaaaattatggccgattacactgatgcgaaggagaaaacagtgtaacacagaggagaaagttaacagagatagaatctatgatttaattttgcaaatagtttttttagagaacaacatgcatactataaaagaaatgatactattaagaacaaacctacttgttccaactcttaaagaaatattcatggtttagcatttgcctctaaaccctgttagaaatatgtgaagttagaaataaaggtttttttaaaaaaaaagcttttttggtatgtgaactgtatgctgtgctcagtatgtactgaaacatactatcttttattttctttaatttatatattccattcaaattctatattcttaagttagctaccacaacgttttcttattgtttcaatatggtatgtcccaatgaaatgctgtatatatatgtctaaactgtaaaaattatactgcaaatgttgaagttttgtatttatgagagacattgaaagtatggcttacagtatatcaaacttgtcacacttcaccatttgtatattaatagtaaagatacttttactttaa

SEQ ID NO: 147344 - DNA, 2514 bp, Artificial Sequence
  derived and/or modified sequence
atgagcctgctactgagcttctatctcctaggacttctagtgagctctggccaggctctgttgcaggtgacgatctctctgagcaaggtagaactgagtgttggcgagagcaaatttttcacatgtaccgccattggcgaacccgagtcaatcgattggtacaatcctcagggcgagaagattatcagtacccagagggtggtggtgcagaaagaaggtgtccggagcaggttgacaatatacaacgccaacatcgaagatgccggtatttatcggtgtcaggccacagacgcaaaggggcagactcaggaggcaacagtcgtgctggaaatctatcagaagttaacttttagggaggtggtgtctccgcaggagttcaagcagggagaggacgccgaggtggtttgtagagtgtcatcttctcctgcccctgctgtgtcttggctgtaccataatgaagaagtgactacaatctcagacaatcgcttcgcaatgctcgcgaacaacaacctgcagatcctgaatatcaataaaagcgatgaaggtatttaccgttgcgaggggcgtgtggaggcccgtggcgaaatcgatttccgagatatcatcgtcatcgtcaatgtcccccctgccatcagtatgccccagaagtcctttaatgcaaccgctgaacgaggcgaggaaatgactttttcttgccgggcaagtggatcccccgaaccagctatctcatggtttcggaacggcaaactaatcgaggagaacgagaaatatattctcaaaggaagcaacaccgagctaacagtgagaaatattataaactccgacgggggaccatacgtttgtcgcgcaactaataaggcaggtgaggacgaaaagcaagcattcctacaggtttttgtgcaaccccatatcatccagctgaagaacgaaactacgtatgaaaacgggcaggtcaccctggtatgcgatgccgagggcgagccaatccctgaaataacttggaagcgggcagtggacgggtttacattcactgagggcgacaagtccctggatggacggattgaagtgaagggacagcatggctcaagctcactgcacatcaaggacgtaaagcttagcgactccgggcgttacgactgtgaggccgcaagtcggatcggtggacaccagaaaagcatgtatcttgatatagagtacgcccctaaattcatttccaatcagacgatctactacagctgggaaggaaatcctatcaatattagctgcgatgtaaaatcaaatccaccggcatctatccactggcggagagacaagctcgtgctcccggctaaaaacacaaccaacttgaaaacttattccacaggcaggaagatgatcttggagatagccccaacgtcagataatgattttggccgatataattgtaccgcgacgaatcacatcggcacccgcttccaggaatatattctggctctggccgacgtgccaagcagtccgtatggcgtgaagatcattgagttatcacagacaacagccaaagtttccttcaataaacctgactctcacggcggagttcctattcaccattatcaagtcgacgttaaagaagtggccagtgaaatttggaaaattgtgcggagccatggcgtgcaaacaatggtggtcctaaataatctagagcctaacacgacttacgagatccgagttgctgcggtcaacgggaagggccagggcgactatagcaagattgaaattttccagaccctgcctgtgagagagccgtctcccccatccatccatggccaacctagctctgggaaaagtttcaagctgtctatcacaaagcaggatgacggcggagcacctattctggagtatatcgtgaaataccggagcaaagacaaagaggatcaatggctcgaaaagaaagtccagggaaataaggatcacataattttggaacatctgcagtggacgatgggctacgaagtacagatcacagctgctaataggcttgggtatagcgagcccacggtatacgaattctccatgccacccaagcccaatatcatcaaggacacactgttcaatggccttggtctgggggcagtgatcggcctgggggtggccgctttgctgcttattctcgtggtcaccgatgtaagctgtttcttcattcgccagtgcgggctactcatgtgcatcactaggagaatgtgcgggaagaagtcagggtcttctggcaagagcaaagagctggaggaggggaaggcggcatacctcaaggatggaagcaaggaacccattgtggaaatgcggacagaagacgagagagttaccaaccatgaagatggaagcccagtaaacgagcccaacgagaccacccctctcacggagcccgaaaagttaccgctcaaggaagaggatggcaaagaggcactgaatccagagacgattgaaattaaggtcagtaatgacatcatccagtctaaggaagacgatagcaaagcctag

SEQ ID NO: 147345 - DNA, 2514 bp, Artificial Sequence
  derived and/or modified sequence
atgagcctgctgctgagcttctacctgctgggcctgctggtgagcagcggccaggccctgctgcaggtgaccatcagcctgagcaaggtggagctgagcgtgggcgagagcaagttcttcacctgcaccgccatcggcgagcccgagagcatcgactggtacaacccccagggcgagaagatcatcagcacccagagagtggtggtgcagaaggagggcgtgagaagcagactgaccatctacaacgccaacatcgaggacgccggcatctacagatgccaggccaccgacgccaagggccagacccaggaggccaccgtggtgctggagatctaccagaagctgaccttcagagaggtggtgagcccccaggagttcaagcagggcgaggacgccgaggtggtgtgcagagtgagcagcagccccgcccccgccgtgagctggctgtaccacaacgaggaggtgaccaccatcagcgacaacagattcgccatgctggccaacaacaacctgcagatcctgaacatcaacaagagcgacgagggcatctacagatgcgagggcagagtggaggccagaggcgagatcgacttcagagacatcatcgtgatcgtgaacgtgccccccgccatcagcatgccccagaagagcttcaacgccaccgccgagagaggcgaggagatgaccttcagctgcagagccagcggcagccccgagcccgccatcagctggttcagaaacggcaagctgatcgaggagaacgagaagtacatcctgaagggcagcaacaccgagctgaccgtgagaaacatcatcaacagcgacggcggcccctacgtgtgcagagccaccaacaaggccggcgaggacgagaagcaggccttcctgcaggtgttcgtgcagccccacatcatccagctgaagaacgagaccacctacgagaacggccaggtgaccctggtgtgcgacgccgagggcgagcccatccccgagatcacctggaagagagccgtggacggcttcaccttcaccgagggcgacaagagcctggacggcagaatcgaggtgaagggccagcacggcagcagcagcctgcacatcaaggacgtgaagctgagcgacagcggcagatacgactgcgaggccgccagcagaatcggcggccaccagaagagcatgtacctggacatcgagtacgcccccaagttcatcagcaaccagaccatctactacagctgggagggcaaccccatcaacatcagctgcgacgtgaagagcaacccccccgccagcatccactggagaagagacaagctggtgctgcccgccaagaacaccaccaacctgaagacctacagcaccggcagaaagatgatcctggagatcgcccccaccagcgacaacgacttcggcagatacaactgcaccgccaccaaccacatcggcaccagattccaggagtacatcctggccctggccgacgtgcccagcagcccctacggcgtgaagatcatcgagctgagccagaccaccgccaaggtgagcttcaacaagcccgacagccacggcggcgtgcccatccaccactaccaggtggacgtgaaggaggtggccagcgagatctggaagatcgtgagaagccacggcgtgcagaccatggtggtgctgaacaacctggagcccaacaccacctacgagatcagagtggccgccgtgaacggcaagggccagggcgactacagcaagatcgagatcttccagaccctgcccgtgagagagcccagcccccccagcatccacggccagcccagcagcggcaagagcttcaagctgagcatcaccaagcaggacgacggcggcgcccccatcctggagtacatcgtgaagtacagaagcaaggacaaggaggaccagtggctggagaagaaggtgcagggcaacaaggaccacatcatcctggagcacctgcagtggaccatgggctacgaggtgcagatcaccgccgccaacagactgggctacagcgagcccaccgtgtacgagttcagcatgccccccaagcccaacatcatcaaggacaccctgttcaacggcctgggcctgggcgccgtgatcggcctgggcgtggccgccctgctgctgatcctggtggtgaccgacgtgagctgcttcttcatcagacagtgcggcctgctgatgtgcatcaccagaagaatgtgcggcaagaagagcggcagcagcggcaagagcaaggagctggaggagggcaaggccgcctacctgaaggacggcagcaaggagcccatcgtggagatgagaaccgaggacgagagagtgaccaaccacgaggacggcagccccgtgaacgagcccaacgagaccacccccctgaccgagcccgagaagctgcccctgaaggaggaggacggcaaggaggccctgaaccccgagaccatcgagatcaaggtgagcaacgacatcatccagagcaaggaggacgacagcaaggcctag

SEQ ID NO: 147346 - protein, 70 aa, Artificial Sequence
  derived and/or modified sequence
MWFEILPGLSVMGVCLLIPGLATAYIHRFTNGGKEKRVAHFGYHWSLMERDRRISGVDRYYVSKGLENID

SEQ ID NO: 147347 - DNA, 213 bp, Artificial Sequence
  derived and/or modified sequence
atgtggttcgagattctgcccggcctttccgtgatgggagtgtgccttcttatcccaggactggcgaccgcttatatccaccgtttcacaaacggtgggaaagaaaaacgcgtcgcacactttggctatcactggtctctgatggagagagatcgccgaatcagcggcgttgataggtactatgtgagcaaaggactcgaaaacatagactag

SEQ ID NO: 147348 - DNA, 213 bp, Artificial Sequence
  derived and/or modified sequence
atgtggtttgagatcctgcccggcctgtctgtgatgggcgtgtgcctgctgatccctggcctggccacagcctacatccaccgcttcaccaatggaggcaaggagaagagggtggcccacttcggctaccactggagcctgatggagcgggaccggcgcatctctggagtggaccgctactacgtgtccaagggcctggagaacattgattag

SEQ ID NO: 147349 - DNA, 766 bp, Artificial Sequence
  derived and/or modified sequence
tttctccgggctctgggtcgcaggccgggcgctttctgcgtccagcagcccctttccgcccaggctttttgaaaaggaaggtgcacacctgatccaccgcctttcctggagaaagctgctctgccattttagagtcctgagctccgaaacagccgtggctgcctgggttgcacttggcccctgcacgtcactccacgttgcgcgctccgccgggagtcgaagcaaaagacactgacggaagaggactgcgagagcccgagcgcccgtctctcttgtgccctagcagattccgtcgcttcttccggagccgtacgtggcaccgccccgctcgcgggcggccgcggggcttgctgggaagagaggcgaagccaggtcacctttcaaggacccagaagtagggttttggcctaggtaacggggcagagatgtggttcgagattctccccggactctccgtcatgggcgtgtgcttgttgattccaggactggctactgcgtacatccacaggttcactaacgggggcaaggaaaaaagggttgctcattttgggtatcactggagtctgatggaaagagataggcgcatctctggagttgatcgttactatgtgtcaaagggtttggagaacattgattaaggaagcattttcctgattgatgaaaaaaataactcagttatggccatctacccctgctagaaggttacagtgtattatgtagcatgcaatgtgttatgtagtgcttaataaaaataaaatgaaaaaaa

SEQ ID NO: 147350 - DNA, 213 bp, Artificial Sequence
  derived and/or modified sequence
atgtggttcgagatcctgcccggcctgagcgtgatgggcgtgtgcttactcatcccgggcctggcgacagcctacattcacaggttcacaaatggaggtaaggaaaaacgtgtagctcactttggctatcactggtctctcatggagcgggatcgccgcatcagcggtgttgataggtactatgtgtcaaagggcctggagaatatagactag

SEQ ID NO: 147351 - DNA, 213 bp, Artificial Sequence
  derived and/or modified sequence
atgtggttcgagatcctccccggattatccgtcatgggtgtctgcctgctgatccccggtctcgctactgcctacattcaccgattcacaaatggaggaaaggagaagcgggttgcccactttgggtaccactggtcactgatggagcgtgacaggagaatctcgggcgtggaccggtattatgtttcaaaaggactggagaatatcgactag

SEQ ID NO: 147352 - DNA, 213 bp, Artificial Sequence
  derived and/or modified sequence
atgtggttcgagatcctgcccggcctgagcgtgatgggcgtgtgcctgctgatccccggcctggccaccgcctacatccacagattcaccaacggcggcaaggagaagagagtggcccacttcggctaccactggagcctgatggagagagacagaagaatcagcggcgtggacagatactacgtgagcaagggcctggagaacatcgactag

SEQ ID NO: 147353 - protein, 6669 aa, Artificial Sequence
  derived and/or modified sequence
MADDEDYEEVVEYYTEEVVYEEVPGETITKIYETTTTRTSDYEQSETSKPALAQPALAQPASAKPVERRKVIRKKVDPSKFMTPYIAHSQKMQDLFSPNKYKEKFEKTKGQPYASTTDTPELRRIKKVQDQLSEVKYRMDGDVAKTICHVDEKAKDIEHAKKVSQQVSKVLYKQNWEDTKDKYLLPPDAPELVQAVKNTAMFSKKLYTEDWEADKSLFYPYNDSPELRRVAQAQKALSDVAYKKGLAEQQAQFTPLADPPDIEFAKKVTNQVSKQKYKEDYENKIKGKWSETPCFEVANARMNADNISTRKYQEDFENMKDQIYFMQTETPEYKMNKKAGVAASKVKYKEDYEKNKGKADYNVLPASENPQLRQLKAAGDALSDKLYKENYEKTKAKSINYCETPKFKLDTVLQNFSSDKKYKDSYLKDILGHYVGSFEDPYHSHCMKVTAQNSDKNYKAEYEEDRGKGFFPQTITQEYEAIKKLDQCKDHTYKVHPDKTKFTQVTDSPVLLQAQVNSKQLSDLNYKAKHESEKFKCHIPPDTPAFIQHKVNAYNLSDNLYKQDWEKSKAKKFDIKVDAIPLLAAKANTKNTSDVMYKKDYEKNKGKMIGVLSINDDPKMLHSLKVAKNQSDRLYKENYEKTKAKSMNYCETPKYQLDTQLKNFSEARYKDLYVKDVLGHYVGSMEDPYHTHCMKVAAQNSDKSYKAEYEEDKGKCYFPQTITQEYEAIKKLDQCKDHTYKVHPDKTKFTAVTDSPVLLQAQLNTKQLSDLNYKAKHEGEKFKCHIPADAPQFIQHRVNAYNLSDNVYKQDWEKSKAKKFDIKVDAIPLLAAKANTKNTSDVMYKKDYEKSKGKMIGALSINDDPKMLHSLKTAKNQSDREYRKDYEKSKTIYTAPLDMLQVTQAKKSQAIASDVDYKHILHSYSYPPDSINVDLAKKAYALQSDVEYKADYNSWMKGCGWVPFGSLEMEKAKRASDILNEKKYRQHPDTLKFTSIEDAPITVQSKINQAQRSDIAYKAKGEEIIHKYNLPPDLPQFIQAKVNAYNISENMYKADLKDLSKKGYDLRTDAIPIRAAKAARQAASDVQYKKDYEKAKGKMVGFQSLQDDPKLVHYMNVAKIQSDREYKKDYEKTKSKYNTPHDMFNVVAAKKAQDVVSNVNYKHSLHHYTYLPDAMDLELSKNMMQIQSDNVYKEDYNNWMKGIGWIPIGSLDVEKVKKAGDALNEKKYRQHPDTLKFTSIVDSPVMVQAKQNTKQVSDILYKAKGEDVKHKYTMSPDLPQFLQAKCNAYNISDVCYKRDWYDLIAKGNNVLGDAIPITAAKASRNIASDYKYKEAYEKSKGKHVGFRSLQDDPKLVHYMNVAKLQSDREYKKNYENTKTSYHTPGDMVSITAAKMAQDVATNVNYKQPLHHYTYLPDAMSLEHTRNVNQIQSDNVYKDEYNSFLKGIGWIPIGSLEVEKVKKAGDALNERKYRQHPDTVKFTSVPDSMGMVLAQHNTKQLSDLNYKVEGEKLKHKYTIDPELPQFIQAKVNALNMSDAHYKADWKKTIAKGYDLRPDAIPIVAAKSSRNIASDCKYKEAYEKAKGKQVGFLSLQDDPKLVHYMNVAKIQSDREYKKGYEASKTKYHTPLDMVSVTAAKKSQEVATNANYRQSYHHYTLLPDALNVEHSRNAMQIQSDNLYKSDFTNWMKGIGWVPIESLEVEKAKKAGEILSEKKYRQHPEKLKFTYAMDTMEQALNKSNKLNMDKRLYTEKWNKDKTTIHVMPDTPDILLSRVNQITMSDKLYKAGWEEEKKKGYDLRPDAIAIKAARASRDIASDYKYKKAYEQAKGKHIGFRSLEDDPKLVHFMQVAKMQSDREYKKGYEKSKTSFHTPVDMLSVVAAKKSQEVATNANYRNVIHTYNMLPDAMSFELAKNMMQIQSDNQYKADYADFMKGIGWLPLGSLEAEKNKKAMEIISEKKYRQHPDTLKYSTLMDSMNMVLAQNNAKIMNEHLYKQAWEADKTKVHIMPDIPQIILAKANAINMSDKLYKLSLEESKKKGYDLRPDAIPIKAAKASRDIASDYKYKYNYEKGKGKMVGFRSLEDDPKLVHSMQVAKMQSDREYKKNYENTKTSYHTPADMLSVTAAKDAQANITNTNYKHLIHKYILLPDAMNIELTRNMNRIQSDNEYKQDYNEWYKGLGWSPAGSLEVEKAKKATEYASDQKYRQHPSNFQFKKLTDSMDMVLAKQNAHTMNKHLYTIDWNKDKTKIHVMPDTPDILQAKQNQTLYSQKLYKLGWEEALKKGYDLPVDAISVQLAKASRDIASDYKYKQGYRKQLGHHVGFRSLQDDPKLVLSMNVAKMQSEREYKKDFEKWKTKFSSPVDMLGVVLAKKCQELVSDVDYKNYLHQWTCLPDQNDVVQAKKVYELQSENLYKSDLEWLRGIGWSPLGSLEAEKNKRASEIISEKKYRQPPDRNKFTSIPDAMDIVLAKTNAKNRSDRLYREAWDKDKTQIHIMPDTPDIVLAKANLINTSDKLYRMGYEELKRKGYDLPVDAIPIKAAKASREIASEYKYKEGFRKQLGHHIGARNIEDDPKMMWSMHVAKIQSDREYKKDFEKWKTKFSSPVDMLGVVLAKKCQTLVSDVDYKNYLHQWTCLPDQSDVIHARQAYDLQSDNLYKSDLQWLKGIGWMTSGSLEDEKNKRATQILSDHVYRQHPDQFKFSSLMDSIPMVLAKNNAITMNHRLYTEAWDKDKTTVHIMPDTPEVLLAKQNKVNYSEKLYKLGLEEAKRKGYDMRVDAIPIKAAKASRDIASEFKYKEGYRKQLGHHIGARAIRDDPKMMWSMHVAKIQSDREYKKDFEKWKTKFSSPVDMLGVVLAKKCQTLVSDVDYKNYLHQWTCLPDQSDVIHARQAYDLQSDNMYKSDLQWMRGIGWVSIGSLDVEKCKRATEILSDKIYRQPPDRFKFTSVTDSLEQVLAKNNAITMNKRLYTEAWDKDKTQIHIMPDTPEIMLARQNKINYSETLYKLANEEAKKKGYDLRSDAIPIVAAKASRDVISDYKYKDGYRKQLGHHIGARNIEDDPKMMWSMHVAKIQSDREYKKDFEKWKTKFSSPVDMLGVVLAKKCQTLVSDVDYKNYLHEWTCLPDQNDVIHARQAYDLQSDNIYKSDLQWLRGIGWVPIGSMDVVKCKRAAEILSDNIYRQPPDKLKFTSVTDSLEQVLAKNNALNMNKRLYTEAWDKDKTQVHIMPDTPEIMLARQNKINYSESLYRQAMEEAKKEGYDLRSDAIPIVAAKASRDIASDYKYKEAYRKQLGHHIGARAVHDDPKIMWSLHIAKVQSDREYKKDFEKYKTRYSSPVDMLGIVLAKKCQTLVSDVDYKHPLHEWICLPDQNDIIHARKAYDLQSDNLYKSDLEWMKGIGWVPIDSLEVVRAKRAGELLSDTIYRQRPETLKFTSITDTPEQVLAKNNALNMNKRLYTEAWDNDKKTIHVMPDTPEIMLAKLNRINYSDKLYKLALEESKKEGYDLRLDAIPIQAAKASRDIASDYKYKEGYRKQLGHHIGARNIKDDPKMMWSIHVAKIQSDREYKKEFEKWKTKFSSPVDMLGVVLAKKCQILVSDIDYKHPLHEWTCLPDQNDVIQARKAYDLQSDAIYKSDLEWLRGIGWVPIGSVEVEKVKRAGEILSDRKYRQPADQLKFTCITDTPEIVLAKNNALTMSKHLYTEAWDADKTSIHVMPDTPDILLAKSNSANISQKLYTKGWDESKMKDYDLRADAISIKSAKASRDIASDYKYKEAYEKQKGHHIGAQSIEDDPKIMCAIHAGKIQSEREYKKEFQKWKTKFSSPVDMLSILLAKKCQTLVTDIDYRNYLHEWTCMPDQNDIIQAKKAYDLQSDALYKADLEWLRGIGWMPQGSPEVLRVKNAQNIFCDSVYRTPVVNLKYTSIVDTPEVVLAKSNAENISIPKYREVWDKDKTSIHIMPDTPEINLARANALNVSNKLYREGWDEMKAGCDVRLDAIPIQAAKASREIASDYKYKLDHEKQKGHYVGTLTARDDNKIRWALIADKLQNEREYRLDWAKWKAKIQSPVDMLSILHSKNSQALVSDMDYRNYLHQWTCMPDQNDVIQAKKAYELQSDNVYKADLEWLRGIGWMPNDSVSVNHAKHAADIFSEKKYRTKIETLNFTPVDDRVDYVTAKQSGEILDDIKYRKDWNATKSKYTLTETPLLHTAQEAARILDQYLYKEGWERQKATGYILPPDAVPFVHAHHCNDVQSELKYKAEHVKQKGHYVGVPTMRDDPKLVWFEHAGQIQNERLYKEDYHKTKAKINIPADMVSVLAAKQGQTLVSDIDYRNYLHQWMCHPDQNDVIQARKAYDLQSDNVYRADLEWLRGIGWIPLDSVDHVRVTKNQEMMSQIKYKKNALENYPNFRSVVDPPEIVLAKINSVNQSDVKYKETFNKAKGKYTFSPDTPHISHSKDMGKLYSTILYKGAWEGTKAYGYTLDERYIPIVGAKHADLVNSELKYKETYEKQKGHYLAGKVIGEFPGVVHCLDFQKMRSALNYRKHYEDTKANVHIPNDMMNHVLAKRCQYILSDLEYRHYFHQWTSLLEEPNVIRVRNAQEILSDNVYKDDLNWLKGIGCYVWDTPQILHAKKSYDLQSQLQYTAAGKENLQNYNLVTDTPLYVTAVQSGINASEVKYKENYHQIKDKYTTVLETVDYDRTRNLKNLYSSNLYKEAWDRVKATSYILPSSTLSLTHAKNQKHLASHIKYREEYEKFKALYTLPRSVDDDPNTARCLRVGKLNIDRLYRSVYEKNKMKIHIVPDMVEMVTAKDSQKKVSEIDYRLRLHEWICHPDLQVNDHVRKVTDQISDIVYKDDLNWLKGIGCYVWDTPEILHAKHAYDLRDDIKYKAHMLKTRNDYKLVTDTPVYVQAVKSGKQLSDAVYHYDYVHSVRGKVAPTTKTVDLDRALHAYKLQSSNLYKTSLRTLPTGYRLPGDTPHFKHIKDTRYMSSYFKYKEAYEHTKAYGYTLGPKDVPFVHVRRVNNVTSERLYRELYHKLKDKIHTTPDTPEIRQVKKTQEAVSELIYKSDFFKMQGHMISLPYTPQVIHCRYVGDITSDIKYKEDLQVLKGFGCFLYDTPDMVRSRHLRKLWSNYLYTDKARKMRDKYKVVLDTPEYRKVQELKTHLSELVYRAAGKKQKSIFTSVPDTPDLLRAKRGQKLQSQYLYVELATKERPHHHAGNQTTALKHAKDVKDMVSEKKYKIQYEKMKDKYTPVPDTPILIRAKRAYWNASDLRYKETFQKTKGKYHTVKDALDIVYHRKVTDDISKIKYKENYMSQLGIWRSIPDRPEHFHHRAVTDTVSDVKYKEDLTWLKGIGCYAYDTPDFTLAEKNKTLYSKYKYKEVFERTKSDFKYVADSPINRHFKYATQLMNEKKYRADYEQRKDKYHLVVDEPRHLLAKTAGDQISQIKYRKNYEKSKDKFTSIVDTPEHLRTTKVNKQISDILYKLEYNKAKPRGYTTIHDTPMLLHVRKVKDEVSDLKYKEVYQRNKSNCTIEPDAVHIKAAKDAYKVNTNLDYKKQYEANKAHWKWTPDRPDFLQAAKSSLQQSDFEYKLDREFLKGCKLSVTDDKNTVLALRNTLIESDLKYKEKHVKERGTCHAVPDTPQILLAKTVSNLVSENKYKDHVKKHLAQGSYTTLPETRDTVHVKEVTKHVSDTNYKKKFVKEKGKSNYSIMLEPPEVKHAMEVAKKQSDVAYRKDAKENLHYTTVADRPDIKKATQAAKQASEVEYRAKHRKEGSHGLSMLGRPDIEMAKKAAKLSSQVKYRENFDKEKGKTPKYNPKDSQLYKVMKDANNLASEVKYKADLKKLHKPVTDMKESLIMNHVLNTSQLASSYQYKKKYEKSKGHYHTIPDNLEQLHLKEATELQSIVKYKEKYEKERGKPMLDFETPTYITAKESQQMQSGKEYRKDYEESIKGRNLTGLEVTPALLHVKYATKIASEKEYRKDLEESIRGKGLTEMEDTPDMLRAKNATQILNEKEYKRDLELEVKGRGLNAMANETPDFMRARNATDIASQIKYKQSAEMEKANFTSVVDTPEIIHAQQVKNLSSQKKYKEDAEKSMSYYETVLDTPEIQRVRENQKNFSLLQYQCDLKNSKGKITVVQDTPEILRVKENQKNFSSVLYKEDVSPGTAIGKTPEMMRVKQTQDHISSVKYKEAIGQGTPIPDLPEVKRVKETQKHISSVMYKENLGTGIPTTVTPEIERVKRNQENFSSVLYKENLGKGIPTPITPEMERVKRNQENFSSVLYKENMGKGTPLAVTPEMERVKHNQENISSVLYKENVGKATATPVTPEMQRVKRNQENISSVLYKENLGKATPTPFTPEMERVKRNQENFSSVLYKENMRKATPTPVTPEMERAKRNQENISSVLYSDSFRKQIQGKAAYVLDTPEMRRVRETQRHISTVKYHEDFEKHKGCFTPVVTDPITERVKKNMQDFSDINYRGIQRKVVEMEQKRNDQDQETITGLRVWRTNPGSVFDYDPAEDNIQSRSLHMINVQAQRRSREQSRSASALSISGGEEKSEHSEAPDHHLSTYSDGGVFAVSTAYKHAKTTELPQQRSSSVATQQTTVSSIPSHPSTAGKIFRAMYDYMAADADEVSFKDGDAIINVQAIDEGWMYGTVQRTGRTGMLPANYVEAI

SEQ ID NO: 147354 - protein, 6669 aa, Artificial Sequence
  derived and/or modified sequence
MADDEDYEEVVEYYTEEVVYEEVPGETITKIYETTTTRTSDYEQSETSKPALAQPALAQPASAKPVERRKVIRKKVDPSKFMTPYIAHSQKMQDLFSPNKYKEKFEKTKGQPYASTTDTPELRRIKKVQDQLSEVKYRMDGDVAKTICHVDEKAKDIEHAKKVSQQVSKVLYKQNWEDTKDKYLLPPDAPELVQAVKNTAMFSKKLYTEDWEADKSLFYPYNDSPELRRVAQAQKALSDVAYKKGLAEQQAQFTPLADPPDIEFAKKVTNQVSKQKYKEDYENKIKGKWSETPCFEVANARMNADNISTRKYQEDFENMKDQIYFMQTETPEYKMNKKAGVAASKVKYKEDYEKNKGKADYNVLPASENPQLRQLKAAGDALSDKLYKENYEKTKAKSINYCETPKFKLDTVLQNFSSDKKYKDSYLKDILGHYVGSFEDPYHSHCMKVTAQNSDKNYKAEYEEDRGKGFFPQTITQEYEAIKKLDQCKDHTYKVHPDKTKFTQVTDSPVLLQAQVNSKQLSDLNYKAKHESEKFKCHIPPDTPAFIQHKVNAYNLSDNLYKQDWEKSKAKKFDIKVDAIPLLAAKANTKNTSDVMYKKDYEKNKGKMIGVLSINDDPKMLHSLKVAKNQSDRLYKENYEKTKAKSMNYCETPKYQLDTQLKNFSEARYKDLYVKDVLGHYVGSMEDPYHTHCMKVAAQNSDKSYKAEYEEDKGKCYFPQTITQEYEAIKKLDQCKDHTYKVHPDKTKFTAVTDSPVLLQAQLNTKQLSDLNYKAKHEGEKFKCHIPADAPQFIQHRVNAYNLSDNVYKQDWEKSKAKKFDIKVDAIPLLAAKANTKNTSDVMYKKDYEKSKGKMIGALSINDDPKMLHSLKTAKNQSDREYRKDYEKSKTIYTAPLDMLQVTQAKKSQAIASDVDYKHILHSYSYPPDSINVDLAKKAYALQSDVEYKADYNSWMKGCGWVPFGSLEMEKAKRASDILNEKKYRQHPDTLKFTSIEDAPITVQSKINQAQRSDIAYKAKGEEIIHKYNLPPDLPQFIQAKVNAYNISENMYKADLKDLSKKGYDLRTDAIPIRAAKAARQAASDVQYKKDYEKAKGKMVGFQSLQDDPKLVHYMNVAKIQSDREYKKDYEKTKSKYNTPHDMFNVVAAKKAQDVVSNVNYKHSLHHYTYLPDAMDLELSKNMMQIQSDNVYKEDYNNWMKGIGWIPIGSLDVEKVKKAGDALNEKKYRQHPDTLKFTSIVDSPVMVQAKQNTKQVSDILYKAKGEDVKHKYTMSPDLPQFLQAKCNAYNISDVCYKRDWYDLIAKGNNVLGDAIPITAAKASRNIASDYKYKEAYEKSKGKHVGFRSLQDDPKLVHYMNVAKLQSDREYKKNYENTKTSYHTPGDMVSITAAKMAQDVATNVNYKQPLHHYTYLPDAMSLEHTRNVNQIQSDNVYKDEYNSFLKGIGWIPIGSLEVEKVKKAGDALNERKYRQHPDTVKFTSVPDSMGMVLAQHNTKQLSDLNYKVEGEKLKHKYTIDPELPQFIQAKVNALNMSDAHYKADWKKTIAKGYDLRPDAIPIVAAKSSRNIASDCKYKEAYEKAKGKQVGFLSLQDDPKLVHYMNVAKIQSDREYKKGYEASKTKYHTPLDMVSVTAAKKSQEVATNANYRQSYHHYTLLPDALNVEHSRNAMQIQSDNLYKSDFTNWMKGIGWVPIESLEVEKAKKAGEILSEKKYRQHPEKLKFTYAMDTMEQALNKSNKLNMDKRLYTEKWNKDKTTIHVMPDTPDILLSRVNQITMSDKLYKAGWEEEKKKGYDLRPDAIAIKAARASRDIASDYKYKKAYEQAKGKHIGFRSLEDDPKLVHFMQVAKMQSDREYKKGYEKSKTSFHTPVDMLSVVAAKKSQEVATNANYRNVIHTYNMLPDAMSFELAKNMMQIQSDNQYKADYADFMKGIGWLPLGSLEAEKNKKAMEIISEKKYRQHPDTLKYSTLMDSMNMVLAQNNAKIMNEHLYKQAWEADKTKVHIMPDIPQIILAKANAINMSDKLYKLSLEESKKKGYDLRPDAIPIKAAKASRDIASDYKYKYNYEKGKGKMVGFRSLEDDPKLVHSMQVAKMQSDREYKKNYENTKTSYHTPADMLSVTAAKDAQANITNTNYKHLIHKYILLPDAMNIELTRNMNRIQSDNEYKQDYNEWYKGLGWSPAGSLEVEKAKKATEYASDQKYRQHPSNFQFKKLTDSMDMVLAKQNAHTMNKHLYTIDWNKDKTKIHVMPDTPDILQAKQNQTLYSQKLYKLGWEEALKKGYDLPVDAISVQLAKASRDIASDYKYKQGYRKQLGHHVGFRSLQDDPKLVLSMNVAKMQSEREYKKDFEKWKTKFSSPVDMLGVVLAKKCQELVSDVDYKNYLHQWTCLPDQNDVVQAKKVYELQSENLYKSDLEWLRGIGWSPLGSLEAEKNKRASEIISEKKYRQPPDRNKFTSIPDAMDIVLAKTNAKNRSDRLYREAWDKDKTQIHIMPDTPDIVLAKANLINTSDKLYRMGYEELKRKGYDLPVDAIPIKAAKASREIASEYKYKEGFRKQLGHHIGARNIEDDPKMMWSMHVAKIQSDREYKKDFEKWKTKFSSPVDMLGVVLAKKCQTLVSDVDYKNYLHQWTCLPDQSDVIHARQAYDLQSDNLYKSDLQWLKGIGWMTSGSLEDEKNKRATQILSDHVYRQHPDQFKFSSLMDSIPMVLAKNNAITMNHRLYTEAWDKDKTTVHIMPDTPEVLLAKQNKVNYSEKLYKLGLEEAKRKGYDMRVDAIPIKAAKASRDIASEFKYKEGYRKQLGHHIGARAIRDDPKMMWSMHVAKIQSDREYKKDFEKWKTKFSSPVDMLGVVLAKKCQTLVSDVDYKNYLHQWTCLPDQSDVIHARQAYDLQSDNMYKSDLQWMRGIGWVSIGSLDVEKCKRATEILSDKIYRQPPDRFKFTSVTDSLEQVLAKNNALNMNKRLYTEAWDKDKTQIHIMPDTPEIMLARQNKINYSETLYKLANEEAKKKGYDLRSDAIPIVAAKASRDVISDYKYKDGYRKQLGHHIGARNIEDDPKMMWSMHVAKIQSDREYKKDFEKWKTKFSSPVDMLGVVLAKKCQTLVSDVDYKNYLHEWTCLPDQNDVIHARQAYDLQSDNIYKSDLQWLRGIGWVPIGSMDVVKCKRAAEILSDNIYRQPPDKLKFTSVTDSLEQVLAKNNALNMNKRLYTEAWDKDKTQVHIMPDTPEIMLARQNKINYSESLYRQAMEEAKKEGYDLRSDAIPIVAAKASRDIASDYKYKEAYRKQLGHHIGARAVHDDPKIMWSLHIAKVQSDREYKKDFEKYKTRYSSPVDMLGIVLAKKCQTLVSDVDYKHPLHEWICLPDQNDIIHARKAYDLQSDNLYKSDLEWMKGIGWVPIDSLEVVRAKRAGELLSDTIYRQRPETLKFTSITDTPEQVLAKNNALNMNKRLYTEAWDNDKKTIHVMPDTPEIMLAKLNRINYSDKLYKLALEESKKEGYDLRLDAIPIQAAKASRDIASDYKYKEGYRKQLGHHIGARNIKDDPKMMWSIHVAKIQSDREYKKEFEKWKTKFSSPVDMLGVVLAKKCQILVSDIDYKHPLHEWTCLPDQNDVIQARKAYDLQSDAIYKSDLEWLRGIGWVPIGSVEVEKVKRAGEILSDRKYRQPADQLKFTCITDTPEIVLAKNNALTMSKHLYTEAWDADKTSIHVMPDTPDILLAKSNSANISQKLYTKGWDESKMKDYDLRADAISIKSAKASRDIASDYKYKEAYEKQKGHHIGAQSIEDDPKIMCAIHAGKIQSEREYKKEFQKWKTKFSSPVDMLSILLAKKCQTLVTDIDYRNYLHEWTCMPDQNDIIQAKKAYDLQSDALYKADLEWLRGIGWMPQGSPEVLRVKNAQNIFCDSVYRTPVVNLKYTSIVDTPEVVLAKSNAENISIPKYREVWDKDKTSIHIMPDTPEINLARANALNVSNKLYREGWDEMKAGCDVRLDAIPIQAAKASREIASDYKYKLDHEKQKGHYVGTLTARDDNKIRWALIADKLQNEREYRLDWAKWKAKIQSPVDMLSILHSKNSQALVSDMDYRNYLHQWTCMPDQNDVIQAKKAYELQSDNVYKADLEWLRGIGWMPNDSVSVNHAKHAADIFSEKKYRTKIETLNFTPVDDRVDYVTAKQSGEILDDIKYRKDWNATKSKYTLTETPLLHTAQEAARILDQYLYKEGWERQKATGYILPPDAVPFVHAHHCNDVQSELKYKAEHVKQKGHYVGVPTMRDDPKLVWFEHAGQIQNERLYKEDYHKTKAKINIPADMVSVLAAKQGQTLVSDIDYRNYLHQWMCHPDQNDVIQARKAYDLQSDNVYRADLEWLRGIGWIPLDSVDHVRVTKNQEMMSQIKYKKNALENYPNFRSVVDPPEIVLAKINSVNQSDVKYKETFNKAKGKYTFSPDTPHISHSKDMGKLYSTILYKGAWEGTKAYGYTLDERYIPIVGAKHADLVNSELKYKETYEKQKGHYLAGKVIGEFPGVVHCLDFQKMRSALNYRKHYEDTKANVHIPNDMMNHVLAKRCQYILSDLEYRHYFHQWTSLLEEPNVIRVRNAQEILSDNVYKDDLNWLKGIGCYVWDTPQILHAKKSYDLQSQLQYTAAGKENLQNYNLVTDTPLYVTAVQSGINASEVKYKENYHQIKDKYTTVLETVDYDRTRNLKNLYSSNLYKEAWDRVKATSYILPSSTLSLTHAKNQKHLASHIKYREEYEKFKALYTLPRSVDDDPNTARCLRVGKLNIDRLYRSVYEKNKMKIHIVPDMVEMVTAKDSQKKVSEIDYRLRLHEWICHPDLQVNDHVRKVTDQISDIVYKDDLNWLKGIGCYVWDTPEILHAKHAYDLRDDIKYKAHMLKTRNDYKLVTDTPVYVQAVKSGKQLSDAVYHYDYVHSVRGKVAPTTKTVDLDRALHAYKLQSSNLYKTSLRTLPTGYRLPGDTPHFKHIKDTRYMSSYFKYKEAYEHTKAYGYTLGPKDVPFVHVRRVNNVTSERLYRELYHKLKDKIHTTPDTPEIRQVKKTQEAVSELIYKSDFFKMQGHMISLPYTPQVIHCRYVGDITSDIKYKEDLQVLKGFGCFLYDTPDMVRSRHLRKLWSNYLYTDKARKMRDKYKVVLDTPEYRKVQELKTHLSELVYRAAGKKQKSIFTSVPDTPDLLRAKRGQKLQSQYLYVELATKERPHHHAGNQTTALKHAKDVKDMVSEKKYKIQYEKMKDKYTPVPDTPILIRAKRAYWNASDLRYKETFQKTKGKYHTVKDALDIVYHRKVTDDISKIKYKENYMSQLGIWRSIPDRPEHFHHRAVTDTVSDVKYKEDLTWLKGIGCYAYDTPDFTLAEKNKTLYSKYKYKEVFERTKSDFKYVADSPINRHFKYATQLMNEKKYRADYEQRKDKYHLVVDEPRHLLAKTAGDQISQIKYRKNYEKSKDKFTSIVDTPEHLRTTKVNKQISDILYKLEYNKAKPRGYTTIHDTPMLLHVRKVKDEVSDLKYKEVYQRNKSNCTIEPDAVHIKAAKDAYKVNTNLDYKKQYEANKAHWKWTPDRPDFLQAAKSSLQQSDFEYKLDREFLKGCKLSVTDDKNTVLALRNTLIESDLKYKEKHVKERGTCHAVPDTPQILLAKTVSNLVSENKYKDHVKKHLAQGSYTTLPETRDTVHVKEVTKHVSDTNYKKKFVKEKGKSNYSIMLEPPEVKHAMEVAKKQSDVAYRKDAKENLHYTTVADRPDIKKATQAAKQASEVEYRAKHRKEGSHGLSMLGRPDIEMAKKAAKLSSQVKYRENFDKEKGKTPKYNPKDSQLYKVMKDANNLASEVKYKADLKKLHKPVTDMKESLIMNHVLNTSQLASSYQYKKKYEKSKGHYHTIPDNLEQLHLKEATELQSIVKYKEKYEKERGKPMLDFETPTYITAKESQQMQSGKEYRKDYEESIKGRNLTGLEVTPALLHVKYATKIASEKEYRKDLEESIRGKGLTEMEDTPDMLRAKNATQILNEKEYKRDLELEVKGRGLNAMANETPDFMRARNATDIASQIKYKQSAEMEKANFTSVVDTPEIIHAQQVKNLSSQKKYKEDAEKSMSYYETVLDTPEIQRVRENQKNFSLLQYQCDLKNSKGKITVVQDTPEILRVKENQKNFSSVLYKEDVSPGTAIGKTPEMMRVKQTQDHISSVKYKEAIGQGTPIPDLPEVKRVKETQKHISSVMYKENLGTGIPTTVTPEIERVKRNQENFSSVLYKENLGKGIPTPITPEMERVKRNQENFSSVLYKENMGKGTPLAVTPEMERVKHNQENISSVLYKENVGKATATPVTPEMQRVKRNQENISSVLYKENLGKATPTPFTPEMERVKRNQENFSSVLYKENMRKATPTPVTPEMERAKRNQENISSVLYSDSFRKQIQGKAAYVLDTPEMRRVRETQRHISTVKYHEDFEKHKGCFTPVVTDPITERVKKNMQDFSDINYRGIQRKVVEMEQKRNDQDQETITGLRVWRTNPGSVFDYDPAEDNIQSRSLHMINVQAQRRSREQSRSASALSISGGEEKSEHSEAPDHHLSTYSDGGVFAVSTAYKHAKTTELPQQRSSSVATQQTTVSSIPSHPSTAGKIFRAMYDYMAADADEVSFKDGDAIINVQAIDEGWMYGTVQRTGRTGMLPANYVEAI

SEQ ID NO: 147355 - DNA, 20644 bp, Artificial Sequence
  derived and/or modified sequence
aggcatcacgctggcttttgcctggggttctcaggaggggagagttgggagaggctttgctgctgaggaaatttatttggtagattgaaggtttgaacgagagctacagaaacgaaagaaaaagtctgtataagccaatggtgttcgggaagaaaataaccccattgccttgagtttgtaggtgccactactactctggaaaaatggcagatgacgaagactatgaggaggtggtggagtactacacagaagaagtggtttacgaagaggtgccgggagagacaataacaaaaatttatgagactacgacaacaaggacatctgactatgagcaatcagaaacttccaaaccagctctggcacagccagcactggcacagccagcatcagcaaagccggtggagaggaggaaggtcatccggaagaaagtggatccttcaaagttcatgaccccctacattgcacacagtcagaaaatgcaggatctttttagcccaaataaatacaaggagaagtttgagaaaacaaaaggacagccatacgccagcacaacagatactccagaacttcgcagaatcaaaaaagtacaagatcaactcagtgaggttaagtatcgaatggatggtgatgttgctaagactatatgtcacgtagatgaaaaagcaaaggatattgaacatgcaaagaaagtgtcgcagcaagtcagtaaggttttatacaagcagaactgggaagacaccaaggataagtacctgcttcctcctgatgcccctgaacttgtccaggccgttaagaacaccgccatgttcagcaagaaactgtacactgaagactgggaagcagacaaaagtttgttttacccctataatgatagcccggaactgaggagagttgcccaggcccagaaagctctcagtgatgttgcctacaaaaaaggtctcgctgaacagcaagctcaattcacgcctctggctgatcctccagatatagaatttgccaagaaagtaaccaatcaagtgagcaagcaaaaatacaaagaagactatgaaaataaaatcaaaggcaaatggagtgagacaccttgctttgaagttgcaaatgccagaatgaatgctgataacattagcacaaggaaataccaggaagattttgaaaacatgaaagaccagatctacttcatgcagaccgaaacaccagagtataaaatgaataaaaaagctggtgtggcagctagcaaggtaaaatacaaagaagactatgaaaagaataaaggaaaagcagattataatgtgcttcctgcttcagagaacccacagcttaggcagctgaaggcagcaggagatgccctaagtgacaaactatacaaggaaaactatgaaaagacaaaagcaaagagcataaattactgcgagacccccaaattcaagctcgatactgttctgcagaacttcagtagtgataaaaaatataaagattcctacttaaaagatattttgggacattatgtaggcagcttcgaggatccataccattcacactgcatgaaagtcacagctcaaaacagtgataaaaactacaaagcagaatacgaagaagacagaggcaaaggcttcttccctcagaccataactcaagaatatgaagcaattaagaaactagatcagtgtaaagaccacacctacaaagtccatccagataagacaaaattcacccaagttacagactctcctgttctgctacaagcccaagtcaattccaaacaactgagtgacttaaattacaaagcaaaacatgaaagtgaaaagttcaagtgccatatcccccctgatactcctgcttttatccagcacaaagtcaatgcctataacttgagtgataatctttataagcaagactgggagaagagcaaagccaaaaagtttgacattaaagtggatgccattcccctgctggcagccaaagccaacaccaagaacaccagcgatgtgatgtacaagaaagactatgaaaaaaacaaagggaaaatgattggagtcctcagcattaatgacgatcccaagatgctgcactccttgaaggtggccaaaaaccagagtgatagattatacaaggaaaactatgagaagacaaaggcaaagagtatgaattactgtgagaccccaaaatatcaacttgatactcagctgaagaacttcagtgaggctagatataaagacttatatgtaaaggatgttttgggacattatgtaggcagcatggaggacccatatcacacacactgcatgaaagttgcagctcaaaacagtgataaaagttacaaagcagaatatgaagaagataaaggaaaatgctatttccctcagacaataacacaagaatatgaagcaatcaagaagctggaccagtgtaaagatcatacctacaaagttcatccagataagaccaaattcacggcagtcactgattctcctgtactgttgcaagcccagctcaacacgaaacagcttagtgatctgaattacaaagcaaaacatgaaggtgagaagttcaagtgccatataccagcagatgctccacagtttatccaacacagagtcaatgcctataatctgagtgataatgtttataagcaagactgggagaagagcaaagccaagaagtttgacattaaagtggacgccattcccctgttggcagccaaagccaacaccaagaacaccagcgatgtgatgtacaagaaagactatgaaaagagcaaagggaaaatgattggagccctcagcattaatgacgatccaaagatgctgcactccttgaagacagccaaaaaccagagtgatcgcgaatatcgaaaagattatgaaaagtcaaaaactatctacacggcacctcttgatatgctccaagtcactcaagctaagaaatctcaggcaattgccagcgacgttgattataagcacatcttacacagttacagctacccccctgatagcatcaatgtggaccttgccaagaaggcatatgcgctgcagagcgatgttgaatacaaagctgactacaatagctggatgaaaggttgtggctgggtgccttttgggtccttagaaatggaaaaggcaaagcgagcttcagacatcctcaatgagaaaaaatatcgccaacatccagacaccctcaagtttacctcgattgaagatgctccaattacagtacagtctaaaattaaccaggcccagaggagtgatatcgcttacaaagccaaaggagaggaaattattcacaaatacaacctgccaccagacctgccccagttcatccaggctaaagttaatgcctacaatatcagtgagaatatgtacaaagcagacttgaaagacttgagcaagaagggatatgacctgagaactgatgcgattcccatcagagctgccaaagctgccaggcaggcggcgagtgacgttcagtacaaaaaagactatgaaaaggctaaagggaaaatggttggcttccaaagtcttcaagatgaccctaaactggttcattatatgaacgtggccaagatacaatcagatcgggagtataaaaaagactatgagaagacaaagtccaaatacaacacgccccatgatatgttcaatgtcgtggcggctaagaaagcccaggatgtggtcagcaatgtcaactataagcattctctccatcattacacctacttgcctgacgccatggacctggagctgtctaagaacatgatgcagatacagagtgataacgtctacaaggaagactacaacaactggatgaaaggcattggctggattcctattggcagtctcgacgtcgaaaaagttaaaaaggccggtgatgctctgaatgaaaagaagtacaggcaacatccagacaccctcaaatttaccagcattgtggactccccagttatggtccaggcaaaacagaacacgaagcaagtcagtgatatcttatacaaggctaaaggagaagatgtgaaacataaatacaccatgagtcctgatcttcctcagtttctccaggccaagtgcaatgcttacaatataagtgacgtctgttataaacgggattggcatgacttaatagccaagggcaacaatgtgctgggcgatgctattcccatcactgcagccaaggcatcgagaaacattgccagtgattataaatacaaggaagcttatgagaagtcaaagggaaagcatgtgggtttcagaagcctccaggatgatcccaagctggtccactatatgaatgtggcaaagctgcagtctgatcgtgaatacaagaagaactatgagaacaccaaaaccagctaccatacccctggggacatggttagcatcacagctgcaaagatggcccaggatgtcgctaccaatgtcaactacaaacagccattgcatcattacacatacctacctgacgccatgagtcttgagcatacgaggaatgtcaatcaaattcagagtgataatgtgtataaagacgagtataacagcttcttgaagggcatcggatggatccctattggttccctggaggtggagaaggtcaagaaagcaggcgatgcattaaatgagaggaagtatcgacagcacccagataccgtcaagttcacaagtgtgcctgattccatgggcatggtgttggctcagcataacacaaagcagctaagtgatttgaactacaaggtagagggagagaaactgaagcacaagtatactattgaccctgaattgcctcagtttattcaagccaaagtcaacgccctcaacatgagtgatgctcattataaagcagattggaagaaaaccattgccaagggctatgatttgagaccagatgccatcccaattgttgctgcaaaaagttcaaggaatattgctagtgattgcaaatataaggaggcctacgagaaagccaaaggcaagcaagttggatttctcagtcttcaggatgatcctaaactggttcactacatgaatgtggccaaaatccagtctgatcgtgagtacaaaaagggctatgaagccagcaagaccaagtaccacacacctctggatatggtcagtgtgacagctgcaaagaaatctcaggaggttgccaccaacgccaactacagacagtcataccaccactacactctcctgcccgatgccttgaatgtggagcactccaggaatgccatgcagattcagagtgataatctgtacaaatctgacttcaccaattggatgaaagggatcggctgggtgcccatagagtccctggaggtggagaaggcaaagaaagcaggagagattcttagtgagaagaagtatcgccagcaccccgagaagctgaagttcacttacgccatggacacaatggaacaggcacttaacaagagtaacaaactgaacatggacaagaggctctacactgaaaaatggaacaaggacaagaccaccattcatgtcatgcctgacacaccggatattttactctccagagtaaaccaaatcaccatgagtgataaactgtacaaagctggctgggaagaggaaaagaagaaaggatatgacctgaggcctgatgccattgcaataaaggctgcaagagcctctagagacattgccagtgattacaaatacaagaaagcctatgaacaagccaaagggaaacacattggcttccggagcctggaagatgaccccaagctggtgcacttcatgcaagtggccaagatgcagtcagaccgggaatacaagaagggatatgagaaatccaagacctccttccacaccccggtggacatgctcagtgtggtggcagccaagaagtctcaggaagtggccaccaatgccaactacaggaacgtgatccatacctacaacatgcttcctgatgccatgagctttgaattggccaaaaatatgatgcagattcaaagtgataatcagtacaaggctgactatgctgacttcatgaagggcattggatggctccctctgggctccctggaagcagagaaaaacaagaaagccatggagattattagtgaaaagaagtaccgccagcacccagacactttgaagtattccacactcatggactcgatgaacatggttttggcccagaataatgcaaaaattatgaacgaacatctctacaaacaagcatgggaggctgacaaaaccaaagtccacatcatgcctgatatcccccagattattttggcaaaggcaaatgcaattaatatgagtgataaactctacaaactttccttggaagagtctaaaaagaaaggctatgatctcagacctgatgcaattcctatcaaagctgccaaggcttccagagatattgcaagtgattataaatacaagtacaattatgaaaaagggaaggggaaaatggttggtttccgcagtctcgaggatgatcccaaattagtccattccatgcaagtggctaagatgcaatctgatcgggagtacaagaaaaactatgagaacacaaagaccagctaccacacccctgccgacatgctcagtgtcacggctgcaaaggatgcccaagccaacatcaccaacactaactacaagcacctgattcacaagtacatcctccttccagatgcaatgaacattgagctgaccaggaatatgaatcgcatacagagtgataatgaatataagcaagattacaatgaatggtacaaagggcttggctggagtccagcaggttctctggaagtggagaaggccaagaaagcaactgaatatgccagtgatcagaaataccgccagcacccgagcaacttccagtttaagaagctgactgattccatggacatggtgcttgccaagcagaatgcacataccatgaacaagcatttatacaccattgattggaataaagataagaccaagattcatgtgatgcctgatacaccagatattttacaagccaagcagaatcaaacactgtatagtcagaaactctataaacttggatgggaagaagctttgaagaaaggctatgatctcccagttgatgcaatttctgtacagctagctaaagcttcaagagacattgctagtgattataaatacaaacaaggctaccgaaagcaacttggccaccatgttggattccggagtctgcaagatgacccaaaacttgtgttgtccatgaatgtagccaaaatgcagagtgaaagagaatacaagaaggactttgagaagtggaaaactaagttctccagcccagtggacatgttgggagtggtactggccaagaagtgtcaggagttggttagtgacgtggactacaagaactacctgcatcagtggacatgtctgcctgatcagaacgatgttgtgcaagctaagaaagtttatgaactgcaaagtgagaatctatataaatctgaccttgagtggctgagaggcataggatggagtcccttgggttctttagaggcagaaaagaacaagcgggcttcggaaatcatcagtgagaagaaatatcgtcagcctccagacagaaacaagttcaccagcattcctgatgccatggatatagttctggcaaagacaaatgccaaaaataggagtgatagactttatagagaagcttgggacaaagacaagactcagatccacatcatgcctgatacacctgacattgttctggctaaagcaaacttaatcaacacaagtgataaactctaccgaatgggttatgaggagctgaagagaaaaggttacgatcttcctgttgatgccataccaatcaaagcagcaaaagcctcccgggaaattgccagtgaatacaagtacaaggaaggctttcgcaagcagctcggccaccacattggtgcccggaacattgaagatgaccccaagatgatgtggtccatgcatgtggccaagatccagagtgacagggagtacaagaaggactttgagaagtggaagaccaagttcagcagcccagtggacatgctgggggtggtgttggccaagaagtgccagaccttagtcagcgacgtggactacaagaactacctgcaccagtggacatgcctgcccgaccagagcgatgtcatccatgctcggcaggcctatgacctccagagcgataatttgtacaagtcagaccttcagtggctaaaaggcattggctggatgactagtggttctctcgaggatgagaaaaataaacgagccacccagattttgagtgaccatgtttaccgtcagcacccagatcaatttaagttttccagccttatggattccataccaatggttttggcaaaaaacaatgctattaccatgaatcatcgcctctatacagaagcttgggataaagataaaaccactgtccacattatgccagatacccctgaagttttattagctaaacaaaacaaagtaaattacagtgagaaattgtataagcttggcctagaagaagccaagaggaaaggttatgacatgcgggtagatgccattcctatcaaggcagccaaggcctccagagatattgcaagtgaattcaagtacaaagaaggctatcgtaagcagctcggccaccacattggtgcccgagctatacgtgatgaccccaagatgatgtggtccatgcacgtggccaagatccagagtgacagggagtacaagaaggactttgagaagtggaagaccaagttcagcagcccagtggacatgctgggggtggtgctggccaagaagtgccagaccttagtcagcgatgtggactacaagaactacctgcaccagtggacatgcctgcccgaccagagcgacgtcatccatgctcggcaggcctatgacctccagagcgataatatgtacaagtctgatctccagtggatgagaggcattggctgggtgtccattggctctttggatgtggaaaaatgcaaaagggcaactgaaattttgagtgataaaatctatcgccagcctccagacagattcaaatttaccagtgtgactgactctctggaacaagtgctggccaagaacaatgctctcaacatgaataagcgtttatacacagaggcctgggacaaagacaagactcaaattcacataatgcctgatacaccagagattatgttggcaaggcagaacaaaatcaactacagtgagactctatacaaacttgccaatgaagaagcaaaaaagaaaggctacgacttgcgaagtgacgccatccccatcgtggctgccaaggcctccagggacgttatcagtgattacaaatacaaagatggttaccgcaagcagctcggccaccacattggagcccggaacattgaagatgaccccaagatgatgtggtccatgcatgtggccaagatccagagtgacagggagtataagaaggactttgagaagtggaagaccaagttcagcagcccagtggacatgctgggagtggtgttagccaagaagtgccagaccttagtcagcgatgtggactacaagaactacctgcacgagtggacgtgcctgcccgaccagaatgatgtcatccatgctcggcaggcctatgacctccagagcgataacatttacaaatctgatctccagtggctgagaggcattggctgggtccccattgggtctatggatgtggtcaagtgcaagagagctgctgaaatactgagtgataacatctaccgccagcctccggacaagctgaaatttaccagtgtgactgactctctagagcaggtgctggccaagaacaatgctctcaatatgaacaagcgcttatacacagaagcctgggacaaagacaagacccaagtccatattatgcctgatacacctgaaatcatgttggcaagacaaaataaaataaattatagtgagagcctctatcgtcaggccatggaagaagccaagaaagaaggctatgacttgagaagtgatgccattcccattgtggctgccaaggcctctcgggatattgccagtgattacaaatacaaagaagcatatcgtaaacagttgggtcaccacattggcgcccgagcagtacacgatgaccccaagataatgtggtccctccacattgccaaagtgcagagtgaccgtgagtacaagaaagattttgagaaatacaagacaaggtacagcagcccagtggacatgcttggtatcgttttggccaagaagtgtcagaccttggtcagcgatgtggactataaacatcctctgcatgaatggatctgcctgcccgaccagaatgacatcattcatgcacggaaagcctatgacctccagagtgacaatttgtataagtcagaccttgaatggatgaaaggcattggctgggttccgattgattccttggaagttgttagggccaagagagctggagaattacttagtgatactatctaccgtcagcgtccagaaacgctgaaatttaccagtataacggacactccggagcaggtgctggcaaaaaacaatgctttaaacatgaataagcgcttatatactgaagcctgggacaatgacaagaaaactattcatgtcatgcctgatacaccagaaatcatgttagccaaactcaaccgaataaactacagtgataaactctataaacttgctttggaagagtccaagaaggaaggctatgacttgcgtctggatgccattccaatccaagcagccaaggcttcaagagatattgctagtgattacaagtacaaggaaggctaccgcaaacagcttggccaccatattggggcccggaacattaaggatgacccgaagatgatgtggtccatccatgtggccaagatccagagtgacagggagtacaagaaggagtttgagaagtggaagaccaagttcagcagcccagtggacatgctgggggtggtgctggccaagaagtgtcagatccttgtaagcgacatagactacaagcatcccctgcatgaatggacctgcctgcctgatcagaatgacgtcattcaggctcggaaggcctatgacctgcagagtgatgctatttacaaatctgatcttgagtggctgagaggcataggatgggttcccattggctctgtagaggtcgagaaagtgaagagagctggagaaatcctgagtgacaggaagtatcgccagcctgcagaccagctcaaattcacatgcattaccgacactccggaaattgtcctagcaaagaataatgccctgacaatgagcaagcatttatacacagaagcttgggatgctgacaaaacctccatccacgtgatgccagacaccccagatatcctgctggccaagagtaattctgccaatatcagccaaaaactttacaccaagggatgggatgaatcaaagatgaaggactatgatctgagagcagatgctatttccatcaaaagtgccaaggcctccagggacatcgccagtgactacaaatacaaggaagcctatgagaaacagaaaggccaccacattggagcccagagcattgaagatgatcccaagattatgtgtgccatacatgcaggaaaaattcaaagtgaaagggagtacaagaaggaattccaaaagtggaaaaccaagttctctagcccagtggacatgttaagcatcttgctggccaagaaatgtcagactttggtcactgacattgattatcgcaattacctgcatgaatggacatgcatgccggatcaaaacgacattatccaagcaaaaaaggcctatgacctgcagagtgatgccctctacaaggctgacttggagtggttgcgtggcattggctggatgccccaagggtctcctgaagtgttgagagtcaaaaacgcccagaatatcttttgtgacagtgtctatcggacgcctgtggtgaaccttaagtacacaagcattgttgacacacctgaagtggtccttgctaaatcaaatgctgaaaatattagtattccaaagtacagagaggtttgggacaaggataaaacttcaatacacataatgccagatactccagaaattaatctcgctagagcaaatgctcttaatgtgagcaataaactttaccgtgagggctgggatgaaatgaaggcgggctgtgatgtccggctggatgccatccccatccaggctgccaaggcctccagggagattgccagtgactataaatataagcttgaccatgagaagcagaagggacactacgtgggcaccctcacagccagggatgacaacaagatccgctgggccctcatagctgacaagctccagaatgaacgagagtaccggctggactgggccaaatggaaggccaagatccagagccctgtggacatgctttccatcctgcactctaaaaattcccaggctctggtcagtgacatggattaccgcaattacctgcaccagtggacctgcatgcccgaccagaacgatgtgattcaggccaagaaggcctacgaactgcagagcgataatgtttacaaggctgacttggaatggttgcgtggaattgggtggatgccaaatgactccgtgtccgtcaatcatgccaaacatgccgcggacatcttcagtgagaaaaaatatcgcacaaaaatagaaactctcaactttacgcctgtggatgacagagttgattatgtgacagcgaaacaaagtggcgagatcctcgatgatattaaataccggaaagactggaatgccaccaaatcaaagtacaccctcacagaaacccccctgctgcacactgcccaggaggctgctaggatactggaccagtatctctacaaggaaggctgggagagacaaaaagccacaggttacattttgcctccagatgctgtgccatttgttcatgcccatcactgcaatgacgttcagagtgagctgaaatacaaagctgaacatgtgaagcaaaaaggtcattatgttggtgtcccgacgatgagagatgatcctaagctggtttggtttgagcatgcaggccagattcagaatgagagactatacaaagaggactatcacaaaacaaaggccaaaatcaatatacctgctgatatggtgtcagtcttggccgccaagcaggggcagacccttgtcagtgatattgattatcgtaattacttgcaccaatggatgtgtcatcctgaccagaacgatgttattcaggcaagaaaggcctatgacctacagagtgataatgtctacagagctgacctggagtggctccgaggcattggctggatcccactggattctgtggaccatgtaagggttactaagaaccaggaaatgatgagtcagatcaaatataagaaaaatgcccttgaaaactatcctaactttagaagtgtggtggatcctccagagattgttttagccaagattaattctgtcaatcaaagtgatgtaaaatataaagaaacatttaataaagcaaagggcaaatatacgttttcaccagatacaccacatatctcccactccaaagacatgggaaaactctacagtactatactgtataaaggggcgtgggagggcaccaaggcctatggctacaccctggatgagcgctacattcccattgttggagccaagcatgctgatctggtgaacagtgagcttaaatacaaagagacatatgagaagcagaaaggtcactacctggctggaaaagtgatcggtgaattccctggtgtggttcactgtctggatttccaaaagatgaggagtgcgttgaactacagaaaacattatgaggataccaaagcaaatgttcatatccccaatgacatgatgaatcacgtgctggctaaaaggtgccagtacatcctcagtgacctggagtatcgacactatttccaccagtggacgtctcttctggaagaacccaatgttatacgcgtccgaaacgcccaggagatcttgagtgataatgtgtataaagatgacctgaattggttgaaaggcattggttgctacgtttgggatacaccccaaatcctccatgccaagaaatcatacgaccttcagagtcagctacaatatacagcagcaggtaaagaaaatctacaaaactataatctggtcacagacacgcccctctatgtgactgctgttcagagtggcattaatgccagtgaggtaaaatataaagaaaattatcatcagattaaggacaaatacacaacagttctagaaacagtggattatgacagaaccagaaacctgaagaatctttacagcagtaacctgtacaaggaggcctgggatagagtgaaagccaccagctacatcctgccttccagcaccttgtccctgacacacgccaagaaccagaagcatctggccagccatatcaaatatcgggaagaatatgaaaagttcaaagctctttatacgttaccaagaagtgttgacgatgatccgaacacagcacggtgcctccgagttggcaagcttaacatcgatcgcctgtacagatcagtttatgaaaagaacaagatgaaaatccacatcgtgcccgacatggtagagatggttactgccaaggattcccagaagaaagtcagtgagattgattaccgcctgcgcctccacgaatggatttgccaccccgacttgcaagtcaatgatcacgtcaggaaagtcacagatcagatcagcgatattgtatacaaggatgacctcaactggctgaaaggcattggttgctacgtctgggacactcctgaaatcctccatgccaagcatgcttatgatctacgtgatgatatcaagtataaagctcacatgttgaaaacaaggaatgactacaagcttgtcacagatacaccagtctacgtgcaggctgtcaaaagtgggaaacagctaagtgacgctgtctaccactatgactatgtgcacagtgtcagaggcaaagtggctccaactaccaaaaccgtggatctggaccgggcccttcatgcatacaagctccagagttcgaatctatacaaaaccagcctgcgcaccctgcccactggatatagacttccaggtgacactcctcacttcaaacacatcaaggacacccgttacatgagcagttatttcaagtacaaagaagcctatgaacacaccaaggcatatgggtatacacttggccccaaagatgttccatttgtccacgtccggagagtcaacaatgttaccagcgagagactgtatcgggaattgtaccacaaactgaaagacaagatccatacaactcccgatacccctgagatccgccaagtcaagaagacacaagaggctgtcagtgagttgatctacaaatcagacttcttcaagatgcagggccacatgatctctctgccatacacaccccaagtgatccattgccgctatgtgggagacatcaccagtgatattaaatacaaagaggacttgcaggtcctgaagggatttggctgcttcctgtatgacactcctgacatggtccgctcccggcacctgcggaagctctggtctaattacctatacactgataaggcaaggaagatgcgagacaaatacaaagtggtgcttgacactccagaatacagaaaagtgcaagaactgaagacacatctgagtgagctggtctacagagctgcaggcaagaagcagaagtcaatctttacttcagttcctgatactcctgatcttttaagagccaagcgagggcagaagcttcagagtcagtatctgtatgttgaacttgccaccaaagagagaccccatcatcacgctggaaaccagaccacagccttgaagcatgctaaagacgtgaaggacatggtcagtgagaaaaagtacaagattcaatatgaaaagatgaaagacaagtacactccggttccagatacgccaatcctcatcagagccaagagggcttactggaatgccagtgatctacgctacaaagaaacatttcaaaagaccaaagggaaataccacacggtgaaagatgccctagacattgtctatcatcgcaaagtcacagatgacatcagtaaaataaaatacaaggagaactacatgagccagttgggtatctggaggtccattcctgatcgtccagagcatttccaccaccgagcagtcactgacacagtcagtgatgtaaaatataaagaagacttgacttggcttaaaggcattggttgctatgcctatgatacccctgatttcactctggctgaaaagaacaagactctctacagcaagtataagtataaagaagtatttgaaaggacaaagtcagatttcaagtatgttgccgactctccgatcaataggcatttcaagtatgcaactcaattgatgaatgagaaaaaatacagagctgattatgagcagcggaaagataaataccacctggtagtcgatgagcctagacatctgctggctaagaccgcaggcgaccagatcagtcagatcaaatacaggaaaaactatgaaaaatcaaaggacaaatttacctcaattgtggatactccagaacacctgcgtactacaaaagtcaacaaacaaatcagcgatatcctttataaattggaatacaacaaggccaaacccagaggctacaccacaatccacgacacacccatgttgctgcatgtccgcaaggttaaagatgaagtcagtgatctgaaatacaaagaagtataccaaagaaataaatccaactgcaccattgagccagatgctgttcatatcaaagcagccaaggacgcctacaaagtcaacaccaatctggactataagaaacagtacgaagccaacaaagcccactggaagtggactcctgaccgaccggacttcctccaggctgccaagtcatccctgcagcaaagcgattttgaatataagctggaccgggagttcctcaagggttgcaagctttctgtcactgatgacaaaaacacggtgctcgccctcaggaatactttaatagaaagtgatctgaaatacaaagagaaacatgtcaaggaaagaggaacctgccatgccgtacctgacacgcctcagatcctgctggcgaagactgtcagcaacctggtgtctgagaacaagtacaaggaccatgtcaagaagcacttggcacagggctcatacacaacactaccagagacccgggacactgttcacgtcaaggaagtgaccaagcatgtcagtgatacaaattacaaaaagaagtttgtcaaggagaaaggaaaatccaactactccatcatgctggagccaccagaggtgaaacatgctatggaagtggccaagaagcaaagtgatgtcgcttacagaaaagatgccaaagagaacctgcattacaccacagtggctgatcgaccagacatcaagaaggccacacaggcagccaaacaggccagtgaggtggagtacagagccaagcaccgcaaggaaggcagccatggcttaagcatgctcggtcgcccagacatagaaatggccaagaaggcagccaagctgagcagccaggttaaataccgagaaaatttcgataaagaaaagggcaagacaccaaaatacaatccaaaagacagccagctctacaaagtcatgaaagatgctaataatcttgcaagtgaggttaaatacaaggctgacctgaagaaacttcacaaacccgtgactgacatgaaggagtctctgatcatgaatcatgtcctgaatacaagccaacttgccagttcttaccagtacaagaagaagtatgagaagagtaaaggccactaccacaccatacccgataatctggagcagcttcacctaaaagaggccacagaattacagagtatagtgaaatacaaagaaaagtatgaaaaggaacgaggaaaacccatgctggactttgaaacaccaacgtacatcactgccaaagagtctcagcagatgcagagtgggaaagaatataggaaagattatgaagagtccattaaaggcagaaacctgactggcctggaggtcacgccagctttgttacatgtcaaatatgcaactaaaatagcaagcgagaaagagtacaggaaagatctagaggaaagcatccgtgggaagggcctcactgaaatggaagatacacctgacatgctaagagcaaagaatgccactcaaatcctcaatgagaaagaatataagcgagacctggaactggaagtcaaaggaagaggcctgaatgccatggccaatgaaactccggattttatgagggccaggaatgctactgatattgccagtcagattaagtataagcaatcagcagaaatggagaaagccaatttcacttctgtggttgatactccagagatcattcatgcccaacaagtcaagaatctttcaagccagaaaaagtacaaggaagatgctgagaagtccatgtcgtattatgagactgttttggacaccccagagatacagagagtccgggagaaccaaaagaacttcagccttctccaataccagtgtgaccttaaaaacagtaaaggaaaaattacagttgttcaagacacgccagaaatactgcgtgtaaaagaaaatcagaagaatttcagctcggttttatataaagaggatgtctcaccaggaacggctatcggaaagacacctgagatgatgagagtgaaacaaacacaggaccacattagctcggtgaagtataaggaagcaataggacaaggaactccaatccctgacctgcctgaagtgaaacgtgtgaaggagacgcagaagcacattagctcggttatgtacaaagaaaacttgggaacaggcattccaaccactgtgactccagagattgagagagtcaaacgcaatcaagagaactttagctcggttttgtacaaagaaaatttggggaaaggaatcccaacacctatcactccagagatggagagagtcaaacgcaatcaagagaactttagctcggtgttatacaaagaaaacatgggcaagggaactcctttagctgtcactcccgagatggagcgagtcaaacacaatcaagaaaatattagctcggttttgtacaaagaaaatgtggggaaagccaccgcaacccctgtcactcctgagatgcagagagtcaaacgcaatcaagaaaacattagctcggtgttatacaaagagaacctggggaaagcaacccccacaccctttactcctgagatggaaagagtgaaacgcaatcaagaaaactttagctcggtattgtacaaagagaacatgagaaaagcaactccgacacctgttactccagagatggagagagctaagcgcaaccaagaaaacattagctcggttctttattctgatagtttccggaaacaaatacaaggcaaagctgcctatgtattggatacccccgagatgagacgggtgagggagacccaacggcacatctcaacggtgaaatatcatgaagactttgagaaacacaagggttgcttcacaccagtggtgacagatcctatcactgaacgagtaaagaagaacatgcaggacttcagtgacattaactaccgaggtattcagaggaaagtggtagaaatggaacaaaaacggaatgaccaagatcaggagactattacaggtttacgtgtctggcgtactaatcctggttcggtttttgactatgatccagcagaagacaacatccagtcccgaagcttacacatgattaatgtccaagctcagcgccggagccgggagcagtcacgatctgccagtgcactaagcatcagtgggggtgaggagaagtctgagcattcagaagcaccagaccaccacctttcgacttacagcgacgggggtgtctttgcagtctcaacagcttacaaacatgcaaaaaccacagagctcccacaacaacgatcatcttcagttgctacccaacagacaacggtatcttccatcccatctcatccatctactgctggaaaaatcttccgtgccatgtatgactatatggctgctgatgcagatgaggtgtccttcaaggatggagatgccatcataaatgttcaagcaattgatgaaggctggatgtatggcactgtgcagaggactggcaggaccggaatgctcccagccaactacgttgaagctatttaggcatttcaaagcatcacacttgtctgcaggacttacagatcctgcagtcaatgtttcggtttagactctccactgttacctaagttctcaagctgcctatggtttttctgtgtcaatgtgatttatggtagtaccatcctttctcctttgggttttaaaataagttgcagaacagacactttaaaagcttctgcaatattatttctgtgcctagagtctttctccattataaacatgttttaacattatttcttttctaaaacagggattttgaatatgccaaacacattaaaggaaaaatagcagagatgttcaccttttccttgctgattgctaatgcttattatttctaattcagttctgaagttataaacttataatcaatacaaaccagcaactaataaaacctctaattctgcaaaaaaaaaaaa

SEQ ID NO: 147356 - DNA, 3876 bp, Artificial Sequence
  derived and/or modified sequence
atgccagttacaataaataattttaattataatgatcctattgataataataatattattatgatggaacctccatttgcgagaggtatggggagatattataaagcttttaaaatcacagatcgtatttggataataccggaaagatatacttttggatataaacctgaggattttaataaaagttccggtatttttaatagagatgtttgtgaatattatgatccagattacttaaatactaatgataaaaagaatatatttttacaaacaatgatcaagttatttaatagaatcaaatcaaaaccattgggtgaaaagttattagagatgattataaatggtataccttatcttggagatagacgtgttccactcgaagagtttaacacaaacattgctagtgtaactgttaataaattaatcagtaatccaggagaagtggagcgaaaaaaaggtattttcgcaaatttgataatatttggacctgggccagttttaaatgaaaatgagactatagatataggtatacaaaatcattttgcatcaagggaaggcttcgggggtataatgcaaatgaagttttgcccagaatatgtaagcgtatttaataatgttcaagaaaacaaaggcgcaagtatatttaatagacgtggatatttttcagatccagccttaatattaatgcatgaacttatacatgttttacatggattatatggcattaaagtaaatgatttaccaatcgtaccaaatgaaaaaaaattttttatgcaatctacagatgctatacaggcagaagaactatatacttttgggggacaagatcccagcatcataagtccttctacggataaaagtatctatgataaagttttgcaaaattttagagggatagttgatagacttaacaaggttttagtttgcatatcagatcctaacattaatattaatatatataaaaataaatttaaagataaatataaattcgttgaagattctgagggaaaatatagtatagatgtagaaagtttcgataaattatataaaagcttaatgtttggttttacagaaactaatatagcagaaaattataaaataaaaactagagcttcttattttagtgattccttaccaccagtaaaaataaaaaatttattagataatgaaatctatactatagaggaagggtttaatatatctgataaaaatatggaaaaagaatatagaggtcagaataaagctataaataaacaagcttatgaagaaatcagcaaggagcatttggctgtatataagatacaaatgtgtaaaagtgttaaagctccaggaatatgtattgatgttgataatgaggatttgttctttatagctgataaaaatagtttttcagatgatttatctaaaaacgaaagaatagcatataatacacagaataattatatagaaaatgatttctctataaatgaattaattttagatactgatttaataagtaaaatagaattaccaagtgaaaatacagaatcacttactgattttaatgtatatgttccagtatataaaaaacaacccgctataaaaaaaatttttacagatgaaaataccatctttcaatatttatactctcagacatttcctctagatataagagatataagtttaacatcttcatttgatgatgcattattattttctaacaaagtttattcatttttttctatggattatattaaaactgctaataaagtggtagaagcaggattatttgcaggttgggtgaaacagatagtagatgattttgtaatcgaagctaataaaagcagtactatggataaaattgcagatatatctctaattgttccttatataggattagctttaaatgtaggaaatgaaacagctaaaggaaattttgaaaatgcttttgagattgcaggagccagtattctactagaatttataccagaacttttaatacctgtagttggagcttttttattagaatcatatattgacaataaaaataaaattattgaaacaataaatagtgctttaactaaaagagatgaaaaatggattgatatgtacggattaatagtagcgcaatggctctcaacagttaatactcaattttatacaataaaagagggaatgtataaggctttaaattatcaagcacaagcattggaagaaataataaaatacaaatataatatatattctgagaaagaaaggtcaaatattaacatcgattttaatgatgtaaattctaaacttaatgagggtattaaccaagctatagataatataaataattttataaatgaatgttctgtatcatatttaatgaaaaaaatgattccattagctgtagaaaaattactagacttcgataatactctcagaaaaaatttattaaattatatagatgaaaataaattatatttgattggaagtgcagaatatgaaaaatcaaaagtagataaatacttgaaaaccagtataccatttgatctttcaacgtatactaataatacaatactaatagaaatatttaataaatataatagcgatattttaaataatattatcttaaatttaagatatagggataataagttaatagatttatcaggatatggggcaaaggtagaggtatatgatggggtcaagcttaatgataaaaatcaatttaaattaactagttcagcaaatagtaagattagagtgattcaaaatcagaatatcatatttaatagtatgttccttgattttagcgttagtttttggataagaatacctaaatataagaatgatggtatacaaaattatattcataatgaatatacaataattaattgtatgaaaaataattctggatggaaaatatctattaggggtaatatgataatatggactttaattgatataaatggaaaaatcaaatcagtattttttgaatatagcataaaagaagatatatcagagtatataaatagatggttttttgtaactattactaataattcggataacgctaaaatttatattaatggtaagctagaatcacatatagatattagagatataagagaagttattgctaatgatgaaataatatttaaattagatggtaatatagatagaacacagttcatttggatgaaatatttcagtatttttaatacggaattaagtcaatcaaatattgaagaaatatataaaattcaatcatatagcgaatatttaaaagatttttggggaaatcctttaatgtacaataaagaatattatatgtttaatgcggggaataaaaattcatatattaaactaaagaaagattcatctgtaggtgaaattttaacacgtagcaaatataatcaaaattccaaatatataaattatagagatttatatattggagaaaaatttattataagaagaaagtcaaattctcaatctataaatgatgatatagttagaaaagaagattatatatatctagatttttttaatttaaatcaagagtggagagtatatatgtataaatattttaagaaagaggaagaaaaattgtttttagctcctataagtgattctgatgagttttacaatactatacaaataaaagaatatgatgaacagccaacatatagttgtcagttgctttttaaaaaagatgaagaaagtactgatgagataggattgattggtattcatcgtttctacgaatctggaattgtatttaaagagtataaagattatttttgtataagtaaatggtacttaaaagaggtaaaaaggaaaccatataattcaaaattgggatgtaattggcagtttattcctaaagatgaagggtggactgaataa

SEQ ID NO: 147357 - DNA, 20010 bp, Artificial Sequence
  derived and/or modified sequence
atggccgacgacgaggattacgaggaagtcgtggaatactacactgaagaagtcgtgtacgaagaggtcccgggagagacaattaccaaaatctacgagactactactacccggaccagtgactatgagcagagtgagacaagcaaacccgctctggcgcagcctgctctggcccagccagctagcgccaaacctgtcgagcgcaggaaagtgatacgcaaaaaagtcgacccttcaaagtttatgaccccttatattgctcacagccagaaaatgcaggatctctttagccctaacaagtataaagaaaaatttgagaagactaagggtcaaccctatgcctcaaccactgatacacctgagctgagacggatcaagaaggttcaggaccagttaagcgaggtgaagtacaggatggatggcgacgtcgccaaaacaatttgtcacgtggacgagaaagcaaaggatattgaacacgcgaagaaagtgagccaacaagtgtctaaggtgctgtataaacaaaactgggaggataccaaagataagtacttgcttcctccagacgccccagagctagtgcaggctgttaagaacaccgccatgtttagcaagaagttatatactgaggactgggaagccgacaaaagcctgttctacccgtacaacgactcacccgaactgcgacgggtggcccaggcacaaaaggctcttagcgacgttgcctataagaagggcctggccgaacagcaagcgcagttcacaccactggccgaccccccggacatagaattcgcgaagaaagtcactaaccaggtgagcaaacagaagtataaagaagattacgagaataagatcaagggaaagtggagcgagaccccttgcttcgaggtggcaaatgcaaggatgaatgctgataacatcagtacgcgcaaataccaagaggactttgagaacatgaaggaccagatttattttatgcagacggagaccccagaatataaaatgaacaagaaggctggcgtggcggcctctaaggtgaagtataaggaagactatgagaagaataaggggaaggcagattacaatgtgctccctgcctctgagaatccacagctgcgccagctgaaagcagccggcgatgccctgtcagataagttgtataaggaaaattacgaaaagacgaaagccaaatctattaattactgcgagactcccaaatttaaactggacaccgtgttgcagaacttcagctccgataaaaaatacaaagacagctatttaaaggatatcctcgggcactacgtcggctcctttgaagatccttaccattcccactgcatgaaagtgacagctcagaactcagataagaactacaaggccgaatacgaagaggatcgcgggaagggcttcttcccccagacgataacacaagagtatgaagctataaagaagctcgatcagtgtaaagaccatacttataaggtccaccccgacaaaaccaaatttacgcaggtgactgattcacctgttttgctgcaagctcaggtgaattcgaagcaattgtccgatctgaattacaaggccaagcacgaatccgaaaagttcaagtgccacattccccccgacacccctgccttcattcaacacaaagtgaacgcatacaacctcagcgacaacctgtataagcaggattgggaaaagtcaaaagccaagaagttcgatataaaggtcgacgccatacccctgctcgccgcgaaagctaacacaaagaatacctctgatgtaatgtataagaaggattacgaaaaaaacaagggaaaaatgataggtgtgctgtccatcaatgatgaccctaaaatgctgcacagcctgaaagtagctaagaatcagtctgacaggctgtacaaagagaattacgaaaagactaaggccaaaagtatgaattattgcgaaacccctaaatatcagctggatactcagctcaagaatttttctgaggccagatataaggacttatacgtgaaggatgtgttgggtcactacgtcggttcgatggaagacccctaccatactcattgtatgaaagttgccgcccagaacagtgataagtcttacaaggccgaatatgaagaggacaaaggtaagtgctacttcccccagacaattacccaagagtatgaggcaattaaaaagctggaccagtgcaaagaccacacttacaaggttcaccctgataaaacaaaatttacagcggttaccgattcacccgtgttactccaagcacagctaaatacaaaacagctgagcgacttaaattacaaggccaaacatgagggcgaaaaatttaagtgccatatacctgcagacgccccacagtttatccaacacagggtgaatgcatacaatctgtccgacaatgtgtacaaacaggactgggaaaaatctaaggcgaaaaagttcgatatcaaggtggatgctatcccactgctcgcagcaaaggccaatacaaagaacactagcgacgttatgtacaagaaggactacgaaaaaagcaaaggaaaaatgatcggcgccttgtcaattaacgatgatcctaagatgttacattcactcaaaactgccaagaatcagagcgaccgcgagtatcgcaaggactatgaaaaatccaaaacaatttacactgcaccactggacatgctacaggtcacccaggccaagaaaagtcaggcaattgcaagcgatgtcgactacaaacatatattgcattcttatagctatccgcccgacagtattaatgtggacctggccaagaaggcatatgccctgcagtctgacgttgagtacaaagcggactataacagctggatgaaaggctgtggctgggtgcccttcggaagtctggaaatggagaaggctaagcgcgcttccgacattctgaatgagaaaaaatatagacaacatccagacaccttaaagttcactagcattgaagatgcccctatcactgttcagagcaagattaatcaagcccaaagatcagatattgcctacaaggctaagggggaagagattattcacaagtacaacctgccacccgatcttccacagtttatccaagcaaaggtcaatgcatataatatatctgaaaatatgtataaggcagacctgaaagatttatctaaaaagggttacgacctcaggactgacgcaattccgattagggcagcaaaggctgctcggcaggctgcaagcgacgtacagtataaaaaggattatgagaaagctaaggggaagatggttggattccagtcactacaggatgatcccaaactcgtccattatatgaacgtggctaagatccaaagcgaccgtgagtataagaaagattacgaaaagaccaagtctaaatacaatacaccacacgatatgtttaacgtcgtcgcagcaaaaaaagctcaggacgtagtgagcaacgtcaactataagcattctctgcatcattatacctacttgcctgatgccatggacctggagctgagcaagaatatgatgcagatacagtctgacaacgtgtacaaagaggattataataactggatgaaagggatcggttggattcccattgggtctctggacgttgaaaaggtgaagaaggccggagacgcgctcaatgaaaaaaaataccgacagcatccagatacactcaagttcacttctattgtggattcacccgtgatggtgcaggccaagcagaacacgaaacaggtttccgatattctgtataaggctaagggggaagacgtgaagcacaaatacactatgtccccagacctgccacagtttctgcaagccaaatgtaatgcatacaatatctcagacgtgtgttacaaacgcgactggtacgacctgattgctaagggaaacaacgtacttggtgacgccattccaatcactgccgccaaggcgtctcgaaatatcgccagcgattacaaatataaggaagcctatgaaaagagtaagggcaagcacgttggctttcggagtctacaggatgatccaaagctcgtgcactacatgaatgtggctaaactccagagtgatcgagagtataaaaagaactacgagaatacaaaaacatcctaccatacccctggcgacatggtcagcattacagcggccaagatggctcaagacgtagcaaccaacgtcaattacaagcagcctttgcaccattacacgtaccttccagacgcaatgtccttagaacacactagaaatgtgaaccagatacagagcgacaatgtatataaggacgaatacaactcatttctcaagggcattggatggattccaatagggtccctggaagtggagaaggtaaagaaggcaggtgacgccttgaatgagaggaagtacagacagcacccggatactgtaaaattcaccagtgttccagatagcatggggatggtactggcccagcacaacaccaagcaactttccgacttaaactacaaggtggagggtgaaaaactgaaacataagtatactattgatccggaattgcctcagtttatacaggcaaaagtgaatgcactaaacatgagcgatgcacattataaagcagattggaaaaagaccatagccaaaggctatgatcttaggcccgatgctattcccattgtggccgccaaaagctctaggaacatcgcctcagactgcaagtataaagaggcttacgaaaaggccaagggtaagcaggtcggattcctatctttacaggacgaccccaagctcgtccactatatgaacgtggccaaaatccagtcagatcgtgagtacaaaaagggttacgaggcaagcaagactaaatatcacacgccactagatatggtctccgtcactgctgcaaaaaagtctcaggaagtcgcaacaaacgccaattaccgccagtcataccatcactatactttactgcccgatgccttaaatgtcgaacattcgaggaatgcaatgcagattcagagcgataatttgtacaagtccgactttaccaactggatgaaggggatcggttgggtgccgattgaaagtttagaagtggaaaaggctaagaaggccggggagatcctgtccgaaaagaagtacagacagcaccccgagaagctgaagttcacatacgcaatggacacaatggagcaggctcttaataagtccaataagcttaacatggacaaacgcttgtatacggaaaagtggaataaggataagacgaccatccacgtgatgcccgatacacctgacatccttctatctcgggtcaaccaaatcacaatgtccgataagttgtacaaagccgggtgggaagaggagaaaaagaagggctatgatctgagacctgacgctatcgccatcaaggccgccagggccagtcgcgacatagcttcagattacaaatacaaaaaggcctatgagcaggctaaaggaaagcacattgggtttagaagcctcgaggacgaccccaaattggtgcattttatgcaggtggccaaaatgcagtccgatagagaatacaagaaaggatatgagaagagcaaaacttcgtttcacacacctgtggacatgctgtcggttgtggccgctaaaaagtcccaggaagttgccactaatgctaactatagaaatgttatacatacctataacatgctccccgatgcgatgtccttcgagctcgcaaagaacatgatgcagattcagagcgacaaccagtataaagccgattacgcagatttcatgaaaggtatcggctggttgccactgggttcccttgaagctgaaaagaataagaaagctatggagatcattagcgagaagaagtacagacaacatccggataccttgaagtactcgacgctcatggacagcatgaacatggtgcttgcgcaaaataatgccaagatcatgaatgagcacctgtacaagcaggcgtgggaggccgacaagaccaaagtgcacatcatgccagacataccacagatcattctagctaaagctaatgcgataaacatgtccgataagttatacaagctgagtctggaagaaagcaagaagaagggctacgatctgcggcctgatgccatacccattaaggctgctaaagcttccagagacattgcctccgattataagtacaaatacaattatgaaaagggaaaggggaagatggttggctttcgatcgcttgaagatgatcctaagcttgtccattccatgcaggtggctaagatgcagtcggatcgggaatataagaaaaattacgaaaatacaaagacctcttaccacaccccagctgacatgctgtcagttacagcagcaaaagatgctcaagccaacataactaacacaaactacaagcacctgatccacaaatatattttgttgccagatgctatgaatatcgagctgaccagaaatatgaaccgtattcagagcgacaacgaatataagcaggattacaacgagtggtataaggggttaggatggagcccagccgggtccctggaggtggagaaggcgaagaaggcaactgaatacgcctccgatcagaagtatagacagcacccttcaaatttccagtttaaaaagctgacagactcaatggatatggttctagccaagcagaacgctcacacaatgaataaacacctatatacaatcgactggaacaaggataagacgaaaatccacgtgatgccagatacaccagatatcctgcaggcgaagcaaaaccagacactttacagccaaaagctttacaagttaggatgggaggaagcactgaagaagggatacgaccttcccgtggatgccatttccgttcaactggctaaagccagccgggacatcgccagcgactataagtataagcagggataccggaagcagctgggccaccatgtgggttttcggagcctgcaggatgacccaaagttggtactgagcatgaatgtcgcaaagatgcaatcagagagggagtacaaaaaggactttgagaagtggaaaaccaagttttcttctccagtggacatgcttggcgtcgtgttagctaaaaagtgtcaggagttggtgtctgatgtggattacaaaaattacctgcaccagtggacatgcttaccagaccaaaatgatgtggtccaggccaagaaggtatacgagctgcaatctgaaaatctttacaagtccgacctggagtggcttcgggggattggctggagcccacttggctccctggaggccgagaagaacaagcgcgcctctgagattatttctgaaaaaaaatacaggcaaccacctgacagaaacaaatttacttcaattccagacgccatggacattgttctggctaagaccaatgcaaagaacaggtcggatagactctatcgagaggcctgggacaaggacaagactcagattcacataatgcctgacacacctgacatcgtacttgctaaagccaatcttataaacacctccgacaaactgtaccgcatgggctacgaggaattaaagagaaaaggctacgatctgcctgtggacgctatcccaattaaagccgcaaaagcatccagagaaatcgcgtccgagtacaagtacaaggaaggctttcgcaagcagctcggtcaccatatcggtgcgaggaacatagaagacgacccaaaaatgatgtggtcgatgcacgtggctaagatccagtccgatcgggaatacaagaaagactttgagaagtggaaaactaagttctcttcacctgtggacatgctcggcgtagttctcgcgaagaaatgccagactctcgtgagtgacgttgactacaagaactacctacaccagtggacctgcctcccagaccaaagcgatgtcatccatgcccgacaggcatatgacctgcaatccgataatctgtacaaatctgatcttcagtggctgaaaggaataggctggatgacatcaggctctctggaggatgaaaagaataagagggcaacccagatcctgagcgatcacgtgtatagacagcaccccgatcagttcaaattctcctcactgatggactcgattcccatggtcctcgccaagaacaacgcaattaccatgaaccaccgcctatataccgaggcttgggacaaagacaagaccacggttcatatcatgccagacaccccagaggtgctgctcgcaaagcagaataaagtcaactactctgagaaactctacaagcttggccttgaagaggccaaacgcaaaggctacgatatgagggtggatgctataccaatcaaggcggcaaaggcatctcgggatatagcttctgagttcaagtacaaggaaggctacagaaaacagttaggccatcatatcggagccagagccatccgggatgatcccaagatgatgtggagcatgcatgtcgcaaaaattcagagcgacagggagtacaaaaaggattttgagaagtggaagacaaaattcagcagcccggtggacatgttaggggtcgtgctggcaaaaaaatgccaaacactggtcagcgacgtggactacaagaattatctgcaccagtggacttgtctgcccgaccagagcgacgtgatacatgcacggcaggcgtatgatctacagagtgacaacatgtataaaagcgacctacagtggatgagagggattgggtgggtcagtatcgggtctctggatgtcgagaagtgcaagcgggctaccgagattctgtcagacaaaatttatcggcagcccccagaccggtttaaattcactagcgtgacagacagcttagaacaggtattggccaagaacaatgccatcaccatgaataaacggctgtacaccgaggcctgggacaaagataagacacagatccatattatgcctgacacacctgaaattatgctggcccggcaaaataaaatcaactattcagagaccctttataagctggcaaatgaggaggcgaagaagaagggttacgacctcagatcggatgctataccaatagtggcggcaaaggcgagccgcgacgtcatttcagactataagtataaagacgggtatcggaaacagttaggtcatcacatcggagccagaaacatcgaagacgatcccaaaatgatgtggagcatgcacgtcgcgaaaattcagagtgatagagaatacaaaaaagacttcgagaagtggaaaactaaattctcctcacccgtcgatatgctgggggtcgtattggccaaaaagtgccagacactcgtgtcagatgtcgattacaaaaattacttgcacgagtggacatgcctgccagaccagaatgatgtgatccatgctagacaggcctacgacttacagagtgacaatatctataagtcagatctgcagtggctgcggggaatcggttgggttccaatcggaagcatggatgtcgtcaagtgcaaacgggctgccgagatcctctctgacaatatatatcgacagccacccgataaactgaagtttacatcggtaaccgatagtctcgagcaggtgctcgcaaagaataacgcacttaacatgaacaagagattgtacactgaagcctgggacaaagataaaacccaggttcacattatgccagatacccccgagattatgctggcccgtcagaataagattaattattctgaatccctgtaccgacaggctatggaggaagctaagaaggagggctatgatctgaggtcggatgcaataccgattgtggccgccaaggcctcccgcgacatcgcctccgattacaaatataaggaggcatacagaaaacagctcggtcaccacatcggggcgcgagccgtgcatgatgaccccaaaattatgtggagcctccacatcgcaaaagtccagagtgatagggagtataagaaggatttcgagaagtataagacacgctattcttcccctgtggatatgctcggtatcgtgctggcaaagaagtgtcagaccttagtgtctgacgttgattacaaacatccattgcatgagtggatctgcttgccagatcagaatgatatcattcacgcacggaaagcctacgatctacagtccgataatctttacaagagcgatctggaatggatgaagggaataggatgggtccctatcgacagcctggaggttgttcgagcaaagagagccggcgagcttttgagcgataccatataccggcagcggccagagacgcttaagttcacctccattactgataccccagagcaggtcttagccaagaataacgcactgaacatgaacaaacggctgtacacggaagcctgggacaatgacaaaaagaccatccatgtcatgccagatacgcccgaaattatgctggcgaaactaaaccggattaattatagcgataagctgtacaagctggccctggaagagtctaagaaggaagggtatgacctgcgcttggatgccattcctatccaggcagctaaagcaagcagggatattgcatccgattacaaatacaaggagggctataggaagcagctaggacaccatattggggctcgcaatatcaaggatgatccaaaaatgatgtggagcattcacgttgcaaaaatccagtctgaccgggagtacaagaaggaattcgaaaagtggaagactaagttcagctccccagtcgatatgttgggcgtggtgcttgctaaaaagtgtcagatccttgtcagcgacatcgactataagcatcctctgcacgagtggacctgtctcccggatcaaaacgatgtcattcaggcccgcaaggcctatgatctgcagtctgatgctatatacaagtccgatctcgagtggctcagaggcattgggtgggtaccaattgggtccgtcgaagtcgagaaggtgaagcgagcaggtgaaatattgtccgataggaagtacagacaacccgctgaccaactgaaatttacctgcattactgacacccctgaaatcgtactcgccaaaaacaatgctctgaccatgtctaaacacctgtacaccgaggcgtgggacgcggacaaaacttcgatccacgtgatgcctgacactcccgatatacttctcgctaagagcaactcagcaaatatatctcaaaaactctacaccaaaggttgggacgagagtaagatgaaagattatgatctcagggccgatgccatcagcataaagtctgcaaaagcctctcgagacattgcttctgattataagtacaaagaggcctatgagaagcaaaagggacaccacattggcgcccaatccatagaagatgatcctaagattatgtgcgcaatccacgccggcaaaatacagtctgagcgggagtacaaaaaagaattccaaaaatggaagactaaattctcaagcccagtcgatatgctgtccatcctcctggctaagaagtgccagacactggtgactgatattgactatagaaattacctgcatgaatggacgtgtatgccagatcaaaacgacatcatccaagccaaaaaagcctacgaccttcaatccgacgccctgtataaggctgatctggaatggctgcgcggcattggctggatgccccaggggagcccggaggttttacgggtgaagaacgcacagaatattttctgcgactcagtctatcgcacgcccgttgtgaacctgaagtatacctccatagtcgataccccagaggtggtgcttgcaaagagtaatgccgaaaatatctcaatacctaaatacagagaggtatgggacaaagacaaaacaagcatacacattatgccagatactccagagatcaacctggcccgcgctaatgcactcaatgtttccaacaagctgtatcgcgagggctgggatgagatgaaggcaggctgcgatgtaagactagacgccatcccgatccaggccgccaaggccagccgggagattgctagtgactacaagtacaagcttgaccacgaaaagcagaaagggcactatgttggtaccctcaccgcccgcgatgacaataaaatccggtgggccctcatagcagataagttgcaaaatgagcgagaatatcgccttgactgggctaaatggaaagctaagattcaatctcctgtagacatgctgtctatcctccatagcaagaatagtcaagccctcgtctcagacatggattatagaaactatctccatcaatggacatgtatgccagaccagaatgacgttattcaagccaagaaggcttacgagcttcagtccgacaacgtatataaggccgacctagagtggctccgagggattggttggatgcccaacgattcagtcagcgttaatcacgccaaacatgcggcagatatcttctccgaaaaaaagtatcgtacgaaaatagagactttgaacttcacacccgtggacgaccgcgtcgattatgtgactgccaaacagtccggagagatcctcgacgatatcaagtaccggaaagattggaacgccacaaaatcgaaatacacactgaccgagacacctctgttgcatacagctcaagaggccgcgagaattctggatcagtacctttataaggagggctgggagagacaaaaagctacaggctacatactccctcctgatgcagtgccatttgttcacgctcaccactgcaacgatgttcagtcagaactcaagtataaggctgaacacgtgaagcagaagggtcattatgtaggggtcccaacaatgcgtgatgacccaaaactggtttggtttgagcacgccgggcagatccagaatgagcggttatataaggaagactaccacaaaaccaaggcaaaaatcaacatcccagccgacatggtatcggtcttagctgctaaacagggtcagaccctggtttccgatatagattatagaaattacctccaccagtggatgtgccacccagaccaaaacgacgtgatccaggctcgcaaggcatatgacctacagagcgacaatgtgtatcgagcagatcttgaatggttacgggggattgggtggatccccctggactccgtcgatcacgttagagtcaccaaaaaccaggaaatgatgtcccaaatcaaatacaaaaagaacgctctggagaactacccgaatttcagatccgtggtcgatccaccagaaatcgtattagccaaaatcaattccgtgaatcaatctgacgtgaagtacaaagagacattcaacaaggccaagggcaaatatactttctcacctgatacacctcacatttctcattctaaggacatgggcaaactctacagcactattctttacaaaggtgcttgggaagggacgaaggcctatgggtatacccttgatgagcggtatattcctattgtgggtgctaagcatgccgatcttgttaattccgaactcaaatacaaggagacctatgaaaaacagaaaggccactatctcgctggaaaggtcattggggagtttcctggggttgtgcattgcctagactttcagaaaatgcgatctgccctgaattacaggaaacactatgaagacaccaaggctaacgtgcatattcctaatgacatgatgaaccacgtcttggctaaaagatgtcagtatatactgtctgatcttgaatatcggcattattttcaccagtggacctctctcctggaggagccgaacgtgattcgcgtgcgcaatgcccaggaaattctgtctgataatgtttacaaagatgatctgaattggctcaagggaatcggctgctatgtgtgggatacaccccaaatcctgcatgctaaaaagtcctatgacttacagtctcagcttcagtatactgcagccggtaaggagaacctgcagaattacaacctggtgaccgatacgccattgtacgtgacagccgtgcagagtggcatcaacgcttcagaggtcaagtataaagaaaactatcatcagataaaggacaagtataccacagtacttgaaacagtggattatgaccggactcgcaacttgaagaatctctactcttcaaacctgtacaaggaggcttgggaccgtgtcaaagccacttcctatatcctaccttctagcacactgtccctgacccacgccaagaaccagaagcaccttgcctctcacataaaatacagggaggagtatgaaaagttcaaggccctctatacgttgcctcgctcagtggatgacgacccgaacacggccagatgtctccgggtcgggaaactgaacatagatcggttatacagaagcgtgtatgaaaaaaacaaaatgaagatacatattgtgcctgatatggtggagatggtgactgcaaaggattcacagaagaaggtgtctgagatagactatagactgcggcttcatgaatggatctgtcacccagaccttcaggtgaatgatcacgtacgaaaagtaacagaccaaatatcggacatagtgtataaggacgatctgaactggctgaaggggataggttgctacgtgtgggacacgcccgagatcttgcacgctaaacacgcctatgatctgagagatgacataaagtacaaagcgcacatgctcaaaacacggaatgattataaactcgtgaccgataccccagtatacgtccaagctgtcaaatcgggtaaacaactgtcagatgcagtgtaccactacgactacgtgcactctgtgagggggaaggtggccccgactacaaagacagtggacctcgaccgagcactgcatgcctacaaactgcagtccagtaacctttacaagacatcactcagaacacttcctacaggttatagactccctggagataccccacacttcaagcacatcaaggacacccgttacatgtcctcctactttaagtataaagaggcatatgaacacaccaaggcttatgggtacacccttggcccgaaggacgtgccctttgttcacgtgcggagagtgaacaatgtaacatcggaaagactgtacagagagctgtaccacaaactcaaggacaagattcatactacccctgacacacccgaaattcgacaggtcaaaaaaacccaggaagctgtgtcagagctaatctacaaatcggacttttttaagatgcaagggcacatgatctcattgccgtacacccctcaagttattcactgcaggtatgttggtgatatcacaagcgacatcaagtacaaggaagacctgcaggtcctcaagggctttgggtgcttcctgtatgatacaccagacatggttcggtccagacacctcagaaagctgtggagcaactatctgtacactgacaaagctcggaagatgcgggataagtacaaggtggtcttagacacccccgaatatcggaaagtgcaggagctaaagactcacttgagcgaactggtatatcgggccgcagggaaaaaacaaaaatccatatttaccagcgttcctgatacgccggatctgttgagggcgaagagaggacagaagctgcagagccagtacctgtatgttgaactcgccactaaagaaaggccccaccaccacgcgggtaatcagactacagccctgaagcacgctaaggatgtgaaggatatggtgtcagaaaaaaagtataaaatacagtacgaaaaaatgaaagataaatacacccccgtgcccgatacgcctattctcattcgggccaaacgagcctattggaacgcctcagatctccgatacaaggagacgttccagaagaccaagggaaagtaccacactgtgaaggatgcactggatatcgtgtaccatcgcaaggttaccgatgacatctccaaaatcaagtacaaagaaaactatatgtctcagttgggtatttggaggtcaataccagatcggcccgagcacttccatcacagagctgtgactgatacagtctctgacgtgaagtacaaagaggacctgacttggctgaagggcatcgggtgctacgcctatgacacccccgattttaccctcgccgagaagaacaaaactttatacagtaaatacaagtacaaagaggtgttcgaacgaaccaagtctgactttaagtatgtcgccgacagtcccatcaacagacatttcaagtatgctacacaactgatgaacgagaagaagtaccgagcagattacgagcagcgaaaagacaagtaccaccttgtggtggacgaacctcggcacctgttggccaagactgcgggagatcagatctcccagataaagtacaggaagaattacgaaaagtctaaagacaaatttacttctattgtggatacaccagagcacttaaggaccactaaggttaacaagcagatctccgacatcctttataagctcgaatacaacaaagctaagccaaggggctatactacaatccacgatactcctatgttgctacacgtgagaaaggtcaaagatgaagtgtctgacttaaagtacaaggaggtctaccagcgaaataaatcaaactgtaccattgagccagatgcagtgcacataaaggcagccaaagacgcatacaaagtgaatacaaatctggactacaagaagcagtatgaggccaacaaggctcattggaaatggactcccgatcggcccgattttttgcaagccgctaaatcatcactgcagcaatctgacttcgagtacaaactggaccgggaatttctgaaaggatgcaaactgtccgttacggatgacaagaataccgttttggctttgcgcaatactctgatcgaatctgatctcaagtacaaggagaagcatgtaaaggagagaggaacatgccacgcagtcccagacacaccccagatcctgttagctaagactgttagcaatctggtgtctgagaataagtacaaggaccacgtgaaaaaacatctggcgcaagggagctataccactttacccgagacacgggacactgttcatgtgaaagaggttactaagcatgtgtcagacacgaattataaaaaaaaattcgttaaagagaaaggaaaaagtaattactccataatgctcgagcccccagaggtcaaacacgcaatggaagttgcaaaaaagcagtcagacgtggcttaccggaaggatgccaaggagaacttacattacacaacggtggcagaccgtccagatataaaaaaagctacacaggcggccaagcaggcgtcagaggtggaataccgagctaaacatcggaaggaagggagtcacggtctgagcatgttgggcagaccagacatagagatggcaaagaaagctgcaaaactctcgagtcaggtgaagtatcgcgaaaatttcgacaaagagaaaggcaaaacgccgaagtacaatcctaaagatagccagctgtataaggtaatgaaagatgcaaataacctcgctagtgaggtcaagtataaagctgacctaaagaagctgcataagccagtgacggatatgaaagaatcactcatcatgaaccacgtgctaaacacttctcagctggcttcaagctaccagtataaaaagaaatacgaaaaaagtaaggggcactatcacaccatcccagataatctagaacagttacacttgaaagaggctaccgaactgcagagtatagtgaagtacaaagaaaagtacgaaaaggagaggggaaaacccatgctcgactttgagacccccacttacataacagccaaggaatctcagcagatgcaaagcggtaaggaataccgcaaggattatgaagaaagtattaaaggtagaaacctgactggactggaagtaacacccgctctgctacacgtcaaatatgctactaagatcgctagtgagaaggagtaccgcaaagacctggaggaatcaattaggggaaaaggcttgacagagatggaggatactccagatatgcttcgcgctaaaaacgcaacacagatcctcaatgaaaaggaatacaagcgggatctcgaactcgaggttaaaggtaggggactgaatgcaatggcgaatgagacgcccgacttcatgagagctcgaaatgctacagacattgccagccagatcaaatataagcagtccgctgagatggagaaggcgaactttactagtgttgtcgacacccccgaaatcattcacgcccagcaggtgaagaacctgtccagccaaaagaaatacaaggaggatgcagagaaaagtatgtcttactatgagacagtactggacacccctgagatccagagagtgagagagaatcaaaaaaacttttcgctgctgcagtaccagtgtgacctcaaaaactctaaggggaagattaccgtcgtgcaggatactcccgagattctgcgcgtaaaagaaaaccagaaaaacttcagctcagtgctgtacaaggaagacgtgtccccgggaacagcgattgggaagactccagagatgatgcgcgtgaagcagacgcaagatcacatttcgagcgtaaaatacaaggaggcaataggacagggtactccaatccctgacctcccagaagttaaacgcgtgaaggagacacagaagcacatctcgtctgtgatgtacaaggagaacctgggcacgggaattcctaccacggtgaccccggaaattgagcgggtcaagaggaaccaggagaatttttcatccgtcctttataaagagaacctggggaagggtataccaactcccatcacccccgagatggagcgcgtgaaacggaatcaggagaacttttccagcgtactctataaggagaacatgggaaaagggaccccgttagccgtgactccagaaatggaaagagtgaagcacaatcaagagaacatttcctctgtcttatataaggagaatgtggggaaagctaccgcaacgccagtgacgccagagatgcagcgcgttaaacgcaaccaggagaatattagtagcgtgctgtataaagagaatcttggaaaagcgacacccactccattcactcccgaaatggaacgggtcaagaggaatcaggagaacttcagctctgtgctttataaagagaacatgcgcaaagctactccaacaccagttaccccagaaatggagagggctaagagaaatcaagagaacatctcgagcgtcctgtacagcgactcttttcgaaaacagattcagggcaaggcagcatatgtattggatacacctgaaatgcgtcgggtgagagagactcagcgccacatcagcactgttaaatatcacgaagatttcgagaagcataagggttgctttactcccgtcgtcactgatccgattacggaaagggtaaaaaagaatatgcaggacttcagtgacatcaattaccgggggattcagaggaaagtggtggaaatggagcagaaaaggaacgatcaagatcaagagaccatcaccggtcttagggtgtggcgaaccaaccccggcagcgtcttcgactatgatcccgccgaagacaacattcagtcacggtcgctccacatgataaacgttcaggcgcagcggaggtctagagagcagagccgttccgcctcggccttgtctattagcgggggggaggagaaatcagagcactccgaggctccggaccatcacctgtcgacgtatagtgacggaggcgtattcgccgtcagtacagcttacaagcacgctaaaaccacggagctgcctcagcagaggtcttcatctgttgcaacgcaacaaaccacagtgtccagcatcccatcacatcctagcactgcgggaaagattttccgcgccatgtacgactatatggccgcggatgccgacgaagttagcttcaaagatggagacgccatcatcaatgtccaggcaattgacgaaggttggatgtacggcacagtgcaacgaaccggccgcactggcatgctacctgccaattatgtggaagcgatttag

SEQ ID NO: 147358 - DNA, 20010 bp, Artificial Sequence
  derived and/or modified sequence
atggccgacgatgaagactacgaggaggtggttgagtactataccgaggaggtggtttatgaagaagtgcccggcgagaccataacgaagatatatgaaaccacgaccactcgaaccagcgactacgaacagtcagaaactagtaagcctgccctagcacagccagctctggcacagcccgcgtccgccaagcctgtagagagacgcaaagtcattcgtaagaaagtcgatccgagtaaattcatgacaccgtacattgcccattcacaaaaaatgcaagatctgttttcaccaaacaaatacaaggaaaaatttgaaaagactaaaggccagccttacgcttccaccacagatacaccagaattgagacgtattaaaaaggtgcaggatcagctgtccgaagttaaatatcgcatggacggagatgtggccaagactatttgtcatgtcgatgaaaaagccaaagacattgaacatgccaagaaagtttcccaacaggtaagtaaggtgctttataaacagaactgggaagatacaaaagacaagtacctgctcccccctgatgcacccgagctggtccaggccgtgaaaaataccgcaatgttcagtaagaagctttatacagaagactgggaggccgacaaatcccttttttatccatataacgatagtccggagctacggagagtggcacaagcccagaaggcgctgagtgatgtcgcgtataaaaaaggcttagcggaacaacaagctcagttcacacctctcgctgaccctccagacatagaatttgccaagaaggttacaaaccaggtttctaagcagaaatacaaagaggactatgagaataagatcaagggcaagtggtctgagactccctgctttgaagtagctaatgccaggatgaatgcagacaacattagcactagaaagtaccaggaagacttcgagaatatgaaagaccagatttacttcatgcagactgaaacaccagaatacaagatgaataagaaggccggcgttgccgccagcaaggtgaagtacaaggaggattatgaaaaaaataaaggaaaggccgactacaacgtgttacccgcaagcgagaatccacagctacgccagctcaaagctgcaggcgatgcactctccgataaactttataaagaaaactacgagaaaaccaaggccaagtctataaactactgcgaaacaccaaaattcaagcttgacacagtgttgcagaatttcagcagtgacaaaaaatataaagatagttacctaaaagatattctgggccattatgtggggtctttcgaagacccctatcacagccattgcatgaaggtcactgcccaaaattctgataagaattataaagcagaatatgaagaggacaggggcaagggcttttttccacagacaattacccaagagtacgaagcgatcaaaaaactggatcagtgtaaggatcacacctataaagtgcatccagataagaccaaatttacccaggtgactgacagccccgtgttgctgcaggcccaagtgaactccaaacaactctctgatctgaattacaaggccaaacacgaatccgaaaagttcaagtgccacatcccaccagacacacccgcattcattcagcacaaggtcaacgcctacaatttgagcgacaatttgtataaacaggactgggagaagagcaaggccaaaaaatttgatatcaaagtcgacgcaatcccacttttggccgccaaggccaacacaaagaacacaagtgatgtcatgtacaagaaagattacgaaaaaaacaagggaaaaatgataggagtgttgtccatcaacgatgatccaaagatgctccattcactcaaagtcgctaaaaatcagagcgacagactgtacaaagagaactacgagaaaactaaggccaaatccatgaactactgtgaaaccccaaagtatcagctggatacacagctgaaaaacttctccgaggctcgatacaaagatctctatgtgaaggatgtgttaggtcattacgtgggctctatggaagatccgtaccacacccattgcatgaaggtggctgcccaaaacagcgacaagtcgtacaaagctgagtacgaggaggacaagggcaagtgttattttccccagacaatcactcaggagtatgaggcaatcaagaagttggaccagtgcaaggaccacacatacaaggttcaccctgacaagaccaaatttactgctgttaccgatagccctgtcctgctccaggcccagctgaataccaagcaattgagcgacctcaactacaaggcgaagcatgaaggcgaaaagtttaagtgtcatatccccgccgatgctccccaattcatccagcatagagttaacgcttataatctcagcgataatgtatacaaacaagactgggagaagagcaaagcaaagaaattcgacataaaggtggatgctatcccattgctggccgctaaagcaaacaccaagaatacaagtgatgtcatgtataaaaaagattacgaaaaaagcaagggcaagatgataggcgccctctctatcaacgacgatcccaagatgctccactctctcaagaccgcaaagaaccagtctgatcgagagtaccgcaaagactacgaaaaaagcaaaaccatttacactgctcccttggatatgctacaggtgacccaagccaaaaagtcacaggccattgcttccgacgtggactacaaacacatcctgcattcttactcctaccctcccgattccattaatgtcgatctggcgaagaaggcttatgctttgcagtctgatgtggaatataaagccgactacaatagttggatgaagggctgtgggtgggtgccttttggttcgctcgagatggagaaagcgaagcgcgcttcggatatcttaaatgagaaaaaatatagacagcaccccgacaccctcaaatttacatccattgaagacgcaccaataactgtgcagagcaagatcaaccaggcccaaagaagcgacatcgcatacaaagcaaagggcgaggagatcatccacaagtacaatttgccgccggatctgcctcaattcatccaagccaaggtgaacgcctacaacatctcggagaacatgtacaaggccgatcttaaagacctctctaagaaagggtatgatctgcggactgacgctatccccattcgagccgcgaaggctgccagacaagccgcgagcgatgtccagtacaagaaggattacgagaaagccaaaggaaaaatggtgggcttccagagccttcaggacgacccaaaactcgtacattacatgaacgttgctaagatccagagtgatagggaatacaagaaagactatgaaaagactaagagcaagtacaacaccccacacgatatgttcaatgttgtggccgctaagaaggcacaggacgtggtgagtaacgttaactacaaacattcccttcatcattacacgtatctgccagatgccatggacctggaactgagtaagaatatgatgcagatacagtcagacaacgtatataaggaggactacaacaattggatgaagggtatcggctggatccctatagggtcactggatgtggaaaaggtgaagaaggcaggagatgcactgaatgagaaaaagtacaggcagcatccagatacattgaagttcacatccatagtggattcacccgttatggtgcaggcgaaacaaaataccaagcaggtttccgacattctgtacaaggcaaagggagaggatgtcaaacacaagtacacgatgtcgccggatctgccacagttcctccaggcaaagtgcaatgcatacaatatctcagacgtttgctacaagagagattggtacgacctcattgccaaagggaacaacgtcctgggtgatgccattcccatcacagccgccaaggccagtcgcaacatcgcttctgactataagtacaaggaagcatatgagaaatcaaaaggaaagcacgtcggatttcgatctctgcaggacgatccaaagctggtgcattatatgaatgtggctaaactacagtcagatagagagtacaaaaaaaattacgagaatacaaagaccagttatcacacccccggggacatggtgtcgatcacagccgctaaaatggcacaagatgtggccactaatgtgaattacaagcagccattacaccactatacttacctgcctgacgccatgagtctggagcacaccagaaacgtcaatcagattcagtcagataatgtttataaggacgagtacaattccttcctgaagggcataggctggatccctataggctccctggaggtcgaaaaggtgaagaaggctggcgacgccctaaacgaaagaaagtacagacagcacccggacaccgtaaaattcacctccgtaccagatagcatgggcatggtgctggcccagcacaatactaagcagttaagtgacctgaactataaagtggaaggagagaagctgaagcacaagtacaccatcgatcctgaactgccacagttcattcaggccaaagtgaacgctctcaatatgtccgatgctcactataaggccgattggaaaaaaaccatcgccaagggctacgatctcagacctgacgctattccgatcgtggccgccaaaagctctcggaacatcgcatccgattgcaaatacaaggaggcatatgagaaggctaagggcaagcaggtgggctttttatcgttgcaggatgacccaaaactggtgcattatatgaacgtcgccaaaattcagagtgacagagagtataagaagggctacgaggcgagtaagaccaagtaccatacaccattggacatggtgtccgtcacggcggctaagaagtcgcaagaggtggccaccaacgctaactacaggcagagctaccatcactatactcttctgcccgacgctctcaacgtcgagcactcaaggaatgcaatgcaaatccagtcagacaatctctataaatctgactttaccaattggatgaaaggaatcggatgggtacccatcgagagcctggaggttgagaaggccaagaaagcaggcgagatcctcagtgaaaaaaagtaccgccagcatcccgaaaagcttaagttcacttacgccatggatacaatggaacaggcacttaacaagtccaataaactcaacatggacaagcggctgtacactgagaaatggaacaaagacaagacaactatacacgtcatgccagacacacctgatatcctccttagccgggtgaaccagattactatgagcgataagctgtataaagccgggtgggaggaagagaagaaaaaggggtatgaccttcgtcccgatgcaattgccatcaaggccgcccgcgcttccagagacattgcatctgactacaaatataaaaaggcatatgagcaagcgaagggcaagcatatcgggttcagatctctagaggacgaccccaaactagtacattttatgcaggttgctaaaatgcagagcgatcgggaatataaaaaaggttacgaaaaatccaaaaccagttttcacacgcccgttgacatgctctctgtcgtcgcagctaaaaaatcacaggaggtcgccaccaatgctaactacaggaatgttatccacacgtacaacatgctgcctgatgcaatgtcatttgagttagccaagaacatgatgcagatccagtctgacaaccagtacaaggcagattacgcagacttcatgaaggggataggctggctgcccctagggagcttggaagccgaaaagaacaaaaaggctatggaaattatttccgaaaagaagtaccgccagcatcctgatacactgaaatattccacactgatggacagcatgaatatggtgctggcacaaaacaacgccaaaattatgaacgagcacctctacaagcaggcctgggaggctgataaaactaaagtccacatcatgccggacatcccccagatcatcctcgcgaaggcgaatgccattaacatgagcgacaaactgtataagctgtctctggaggagagcaaaaagaagggatatgacttgcgcccagatgcgattcctatcaaagcggccaaagcctcacgcgacatcgctagcgattataagtacaagtacaattatgaaaagggaaagggcaaaatggttggcttccgatctctggaagatgatccaaagttggtgcattccatgcaggtcgccaagatgcagtctgatagagaatataagaagaattatgagaataccaagacctcctatcatacccctgcggacatgctttctgtgacagcagccaaagatgcccaggccaacatcaccaatactaactataaacatctaattcataaatacatcctcttgcctgacgcaatgaatattgagctgactcgcaacatgaatcgcatacagagtgacaacgaatataaacaagactataacgagtggtataagggcctgggatggagtccagccggcagtctcgaggttgagaaggccaagaaagcgaccgaatatgctagtgatcagaaatatcgtcagcacccatcaaattttcaatttaaaaagctgaccgattctatggacatggtactcgccaagcagaatgcacacaccatgaacaaacacctgtacacgattgactggaacaaggataaaacaaaaattcacgtgatgccggatacccctgatatccttcaggctaaacagaaccagaccctctatagccaaaagctgtataagctgggctgggaagaggcgttgaagaagggttacgatttacccgtggatgcaatcagcgttcagctggctaaggcgagccgggacattgcttctgactacaaatataagcagggataccgaaaacagctggggcaccacgtaggttttagatctcttcaggacgacccaaaacttgtgctgagcatgaatgtagcaaagatgcagagtgaacgggagtataaaaaggatttcgagaagtggaaaaccaagtttagcagtccggttgacatgctcggcgtggtgctggcaaaaaagtgccaagaactggtgtcggatgtggactacaagaattatttgcaccagtggacctgcctgcctgatcagaatgatgtagtgcaggctaagaaagtctatgagcttcagtccgaaaacctgtacaagtcagacctggaatggttacgcgggatcggatggagtcccctgggcagcttggaagccgaaaagaataagcgcgcatctgagattataagcgagaagaaatataggcaacccccagataggaacaagtttacatccatcccagatgcaatggatatcgtgttggctaagactaatgccaagaatcgctccgaccggctgtatcgggaggcgtgggataaggacaaaacccagatccatataatgccagacacaccagacattgtgttggccaaggctaatctcatcaacacgagcgacaagttataccgaatggggtacgaggagcttaagcgaaagggatacgatctaccagtggatgccatccccatcaaagctgccaaggctagccgcgaaatcgccagcgagtacaaatataaggagggcttcaggaaacagcttggacaccatattggtgcccggaatatagaggacgacccaaagatgatgtggtccatgcatgtagcgaagatccagtctgacagggagtacaagaaagatttcgaaaaatggaagactaaattctcatctcccgtcgacatgcttggcgtcgtgctggcaaagaagtgccagactttggttagtgatgtggactataaaaactacctgcatcaatggacctgcttaccggatcaaagtgacgtgattcatgcccgacaagcgtacgatctgcaaagcgacaacctgtataagtcagatctgcagtggctcaaaggaattgggtggatgacctccggctcattggaggacgaaaagaataagcgtgccacgcagattctcagcgaccacgtgtatagacaacacccagatcagttcaagttttcatctttaatggacagtataccaatggtcctcgcaaagaataacgccatcaccatgaaccatcggctgtacaccgaggcctgggacaaagataagactacagtgcacattatgcccgatacacctgaggtcttgttggccaaacagaacaaagtgaactatagtgagaagctttacaagctcggcctagaggaagctaagcgaaaggggtatgacatgcgagtggacgccatcccgatcaaagcagccaaggcctctagggacatcgccagcgaatttaagtataaggagggctatagaaaacagctcgggcaccatattggcgcacgcgccattagggacgacccgaaaatgatgtggagtatgcacgtggccaaaatccaatctgatagggaatacaagaaggacttcgagaagtggaagaccaagttctcgagccctgtggatatgctcggtgtcgtgctagctaagaagtgccagaccctggtttctgacgtggattataagaactatctacatcagtggacgtgcttacccgatcaatctgatgtcattcacgcacgccaggcatacgatttgcagagtgacaatatgtacaagtcagacctccagtggatgcgtggcatcggatgggtgagtataggcagtcttgatgtggaaaagtgtaaacgggctaccgagatcctgtccgacaaaatttatagacagccacctgaccgtttcaagttcacttctgtgacagatagtttggaacaggtcctggctaaaaataatgcactgaatatgaacaagcgcctctataccgaagcttgggacaaggataaaacgcagatacacatcatgccggacactcccgaaattatgctcgcccgtcaaaacaagatcaactacagtgaaaccctgtacaagctagctaacgaggaagctaagaaaaagggatacgatctaagatcagatgccattcccatcgtggcggccaaggcttcccgcgatgtgattagcgactataagtataaagacggctaccgaaagcaactcggccaccatatcggagcgcgaaacatcgaagatgatcctaaaatgatgtggagtatgcacgtagccaaaatccaatccgatcgggagtacaaaaaggacttcgagaagtggaagactaagttctcctctcctgtggatatgctaggcgtcgtcctcgcaaagaaatgtcaaacattagtttctgacgtggactacaagaattatctgcacgagtggacttgtttgcctgaccagaatgatgtcatccacgcacgtcaagcttacgacctccaatcggataacatctataaaagcgacttgcagtggttaaggggaatagggtgggttcctatcggcagcatggatgtggtgaaatgcaagcgcgccgccgaaatcttgtcagataatatttatcgccagcccccagacaaacttaagttcacaagtgtcacagactcccttgagcaagtgctcgctaagaataacgccctgaacatgaataagaggctgtacacggaggcatgggataaagacaagactcaggtccacattatgcctgatactccagaaataatgttggcgaggcagaacaagattaattactctgagtcgctgtaccggcaggccatggaagaggccaagaaagaagggtacgacctgaggagcgatgctataccaatcgtggcagccaaggctagccgcgacatcgccagcgactacaagtataaggaagcataccgcaagcagctggggcatcacatcggggccagggcggttcacgatgaccctaagattatgtggtcgcttcatatagctaaagttcaaagcgatagggagtataaaaaggacttcgagaagtataaaacacgctatagctccccggtggacatgcttgggattgtgctggcgaaaaaatgccaaaccctcgtctccgatgtggactacaaacatccccttcatgaatggatttgcctccctgaccaaaacgatataattcacgcccggaaggcctatgatcttcagtcagacaacctgtacaagtctgacttggaatggatgaagggcataggttgggtacctatcgactctttggaggttgtcagagccaaacgggccggtgagctactgtcagataccatctatcgccagagacccgaaactcttaaattcacctcaattacggacacccccgagcaggtgctggcaaagaataatgctctgaatatgaataagcggctgtataccgaagcctgggacaacgataagaaaaccattcacgtcatgcccgacactcctgagatcatgctcgcaaagctgaatagaattaattactccgacaagttgtataaactggcacttgaggagtccaaaaaggaaggctatgacttgagactggatgcaattccgattcaggcagctaaagcctcccgggacattgcatcggactataagtacaaagagggttatcggaaacagctcgggcatcatattggagctcgaaacatcaaggatgatcccaaaatgatgtggtccatccacgttgccaagatccaaagtgaccgcgaatacaagaaagaattcgagaagtggaagactaaattcagctcccccgtggatatgttgggagtcgtcctggccaagaaatgccagatcttagttagcgacatagactataagcaccccctgcacgaatggacttgtctgcccgaccaaaacgacgtcatccaggccagaaaggcttatgacctgcaatcagatgccatctataaatccgatctggaatggctcagaggtatcggctgggtgccaattggtagcgtagaagttgagaaggtaaaaagagcaggcgaaattctgtcggataggaagtataggcaacccgcggatcaactcaaattcacgtgcataacagatacacctgagatcgtccttgccaaaaataacgcactgactatgtctaagcacctctacaccgaggcgtgggacgcggacaagacatcaatccacgtaatgccagacacaccagacatcttgctcgcaaagagcaattctgcaaacataagccagaagctgtacacgaagggatgggatgaaagcaagatgaaggactatgacctgcgtgccgatgctattagcatcaaatcagcaaaagccagccgtgatattgccagtgactataagtataaagaggcctacgaaaaacaaaaaggacatcacataggcgctcagtccatcgaagacgatcccaagatcatgtgcgctattcacgctggcaaaattcagagcgaaagagaatataagaaagagtttcagaagtggaagacaaaattctcctcacctgtggacatgctgagtatcctcctagccaagaaatgtcagaccctggtgacggatatagactacagaaactatctccatgagtggacctgcatgccagatcagaacgatatcatccaggcaaagaaagcttatgatcttcagtccgacgctttgtacaaagcggatctggagtggttacgcgggatcgggtggatgccacaagggtctcccgaggtcctgcgcgtcaagaatgcgcaaaacattttttgcgacagtgtatatagaacaccagttgtaaatctgaagtacaccagtatcgttgacacgcctgaggtggtgctggctaagtccaatgccgagaatatctctatcccaaagtaccgcgaagtgtgggacaaggacaaaacctctattcacattatgccagatacaccagaaatcaatctggcgagggccaatgcactcaatgtctccaacaaactttatagggaaggctgggatgaaatgaaggcagggtgcgatgtccgcctggacgccatccccattcaggctgctaaagcctcgcgagagattgcctcggattacaagtacaaacttgaccacgagaagcagaagggccattacgttggtaccctgaccgcccgagacgacaacaagattcggtgggctctgatcgccgacaagctgcaaaatgaacgggagtaccgactggactgggccaagtggaaggccaagatccagtcgcctgtggacatgctctctattctccattcaaagaatagccaggctcttgtgagtgacatggactaccgtaactatctgcaccagtggacatgtatgcccgaccagaacgacgttatccaagctaaaaaagcctacgagcttcagtctgacaatgtgtacaaggctgatctggagtggttgagaggcatcggatggatgccgaacgattccgtcagcgtcaatcatgccaagcacgccgctgatatctttagcgaaaaaaagtataggacaaagatagagacccttaatttcacccccgtcgacgacagagtcgactatgtgaccgctaaacaatctggggaaatcctcgacgatatcaagtatcgcaaagactggaacgcgacgaagtcaaagtatacactgactgaaactccacttctgcatacagctcaggaagcagcaaggattctggaccagtacctttacaaggaggggtgggagaggcagaaggctaccggttatatcctcccaccagatgctgtaccatttgtccatgcacaccactgtaacgacgtgcaatcagagctgaagtacaaagccgagcacgtcaaacagaagggccactatgtgggggtgcccacaatgcgggatgatccaaagctggtgtggtttgagcatgctgggcagatccagaacgagcgcctttacaaggaagactatcataagactaaggccaagatcaacattcccgccgacatggtctcagttcttgctgccaagcagggccagactctggtcagtgacattgattaccggaattacctgcaccaatggatgtgccatcccgatcagaatgatgttatacaggcaaggaaagcctatgacctgcaaagtgacaacgtctaccgagctgacctagaatggctacgtggcatcggttggataccattggattctgtcgatcacgtgcgcgtgacaaaaaaccaggaaatgatgagtcagattaagtataaaaagaacgcccttgaaaattacccaaacttccgatctgtggtggatcccccagagatagtcttggctaagattaactctgtgaaccaaagcgatgtgaaatataaagaaactttcaataaagctaaagggaagtacacattctcaccggacactccacacatttcccatagtaaagatatgggtaagctgtattctaccatcctctacaaaggcgcatgggaaggcacaaaggcttacggttacacgttggacgagagatacatccctatcgtaggcgcaaagcacgctgatctggtcaactccgagctgaagtacaaggagacctatgagaaacagaaaggacattatctggctggcaaggtcataggcgaatttcccggggtcgtccactgtctcgacttccagaaaatgcgcagcgccttaaattataggaagcactatgaggatactaaggccaatgttcatatacccaacgacatgatgaatcacgttttagcgaagcgctgtcagtacatactgtcggacctcgaatacagacattactttcatcaatggacaagccttctggaggagcctaacgtaatccgtgttcggaatgctcaggaaatcctgtccgacaatgtgtataaagatgacttaaactggttgaaggggatcggctgttacgtatgggacacaccacagattctgcacgcgaagaaaagttatgatctccaaagccagctgcagtataccgccgccggcaaagaaaacctgcaaaactacaacctggtgacagatactccgctgtacgtgacagcagttcagtctggtattaacgctagtgaagtaaaatataaagaaaattaccatcagattaaggacaaatatactactgtgttggagacagtcgactacgatcggacacgcaatctgaagaatctttactctagtaatctctacaaggaggcatgggacagagtcaaagctaccagttatatcttaccaagctccacactgagcctcactcacgccaaaaatcaaaagcatttggcctctcacataaagtatcgcgaagagtacgagaaattcaaggcattgtacaccctcccgcggagcgtagatgacgaccccaataccgctcggtgcctgagagttgggaagctgaacatcgaccgactctatagatccgtctacgaaaagaataagatgaagattcatatcgtcccagatatggttgaaatggtcaccgctaaggacagtcagaagaaggtcagcgaaatcgattatcgactgcggcttcacgagtggatctgccatccagacttacaagtgaatgaccacgtgcgcaaagtgactgatcagatctcagatatcgtctacaaggatgacctgaattggctcaagggcattggatgctatgtatgggatacgcccgagattctgcacgcgaaacacgcctacgacctgcgagatgacatcaaatataaggctcacatgcttaagacgagaaacgattacaagttggtcacagacacacccgtgtacgttcaggcggtaaaatccgggaaacagctttcagacgccgtatatcactacgactatgtccactccgtgagagggaaagtagcccccaccactaagaccgtggatcttgatcgagctctgcatgcatataagctgcagagctcaaatttgtataaaacgagtttgcgcacattgccaactggctatagacttccaggagatactccccattttaaacatataaaagacactcgctacatgtcatcatattttaagtacaaggaagcgtacgagcacactaaagcttatggctacactctggggcctaaggacgtgccattcgttcatgtgcgccgagtcaataacgtgacctcggaaaggttgtatagagagctgtaccacaagcttaaagacaaaatccacaccacacctgacaccccggagatccgacaggttaagaaaacacaggaggcggtaagcgaattaatttacaagtctgatttcttcaagatgcagggacacatgatttctctcccttatactccacaagtcatacattgcaggtacgtgggagatattacctctgatatcaagtataaagaagatctccaggtactgaaaggatttggctgttttctgtacgataccccagatatggtcagatccagacacctgaggaaattgtggagcaactacctgtatactgataaagccaggaagatgcgggataagtacaaagtcgtgttggatacaccagagtaccgtaaagtgcaggagttaaaaacccatctcagcgaactcgtttatcgagcagcaggaaagaagcagaaatccattttcactagcgtgcctgatacccccgacctcttacgagccaaacgcgggcaaaagctccagtcccaatatctttacgtcgagctggctacaaaggagaggcctcatcatcacgcaggcaatcaaacgaccgccctgaagcatgcgaaggacgttaaagacatggtgtccgaaaaaaaatacaaaattcagtatgaaaaaatgaaggataagtacacccctgtaccagacaccccaatcctgattcgcgccaagcgcgcatactggaatgcatccgatcttagatataaagaaacctttcagaagacaaagggaaaatatcacacagtgaaagacgcattggacatcgtataccaccgaaaggttaccgatgatattagtaagatcaaatataaggagaattacatgtcccaactgggtatctggcgatctattccagacagaccagagcatttccatcacagggcagttacagacaccgtgagcgatgtaaaatacaaagaggatctgacctggctgaaaggaatcggctgctacgcctatgacactcctgattttactctggctgaaaagaacaaaacactatattctaaatacaaatataaagaagtgttcgagcggaccaagtcagacttcaaatatgttgctgactccccaataaatcggcactttaagtacgcgacacaactgatgaacgagaagaaatacagagctgactacgagcaacgcaaggacaaatatcacttggtggtggacgagccccgtcacttactggccaagacggccggcgatcaaatctctcagatcaagtatcgcaagaattacgagaaatccaaggataagttcaccagcattgtagacacccccgaacaccttcggactacgaaggtaaataagcagattagtgacattctgtacaagctggagtataataaagccaagccccggggctacaccacgatacacgacacaccaatgctcctccatgttaggaaggtaaaggacgaggtgtcagacttgaaatacaaggaggtttatcagaggaacaaaagtaattgcactatagaaccggatgcggtgcatataaaggctgcaaaggatgcctacaaggtcaacacgaacttggattacaaaaagcagtatgaggcaaacaaggcccactggaaatggacccccgaccgtcccgactttctgcaggcagcaaagtccagtctgcagcagtcagattttgagtacaaactcgacagagaattcttgaaaggctgcaaactttctgtgacggatgataagaatacagtcctcgcgttaaggaacactttgatcgagagtgacttaaagtataaggaaaagcacgtaaaagaaagaggcacatgccacgccgtcccagacactccacaaatccttcttgccaagacagtgagtaatctcgtttctgagaataaatacaaggatcatgttaagaagcacctcgcacagggcagctataccactctgccagaaacccgggacactgtacacgtaaaggaagtgaccaaacacgtgtccgacactaattacaaaaagaagttcgttaaagaaaagggtaagtcgaactatagtataatgttggaaccccctgaagtgaaacacgccatggaggtggccaagaagcaaagtgatgtggcctatcggaaggacgcaaaggagaatctgcattacaccaccgtcgcagacagacctgatattaaaaaggctacacaagcagctaagcaagcttccgaagtggagtatcgcgccaaacatcgaaaagaagggtcccatgggctgagtatgctgggcaggcccgatatcgaaatggccaaaaaagctgcgaaacttagcagtcaggttaagtatcgggagaactttgacaaggagaaaggcaagacaccaaaatataaccccaaggactctcaactctacaaagtgatgaaagacgccaacaacctggcaagtgaagtgaagtataaagccgatctgaagaagttgcataagcctgtcacggacatgaaggaatccctcattatgaatcatgttctgaacacctcacagctggcctcaagctatcaatacaagaagaaatacgagaagagtaaaggacactaccacactatccccgacaacctagagcagctccatcttaaggaagctacagagctccagtctatcgtcaagtacaaagagaagtatgagaaagagcgaggaaagccaatgctggacttcgaaacaccaacctacattaccgctaaagaatcgcaacagatgcagagtggaaaagagtacaggaaagattatgaagaatctataaaaggaagaaatttgaccggcctggaggttacgcctgcccttctgcacgtgaagtatgccactaagatcgcatcagaaaaggagtaccgaaaggatcttgaggaaagcattagaggaaagggcctcaccgagatggaagacacaccagacatgttgagggccaagaatgcaacgcagatactgaacgagaaagaatacaaaagagacttggagctggaggttaagggacgaggcctcaacgctatggccaacgagacccctgactttatgagggcgcgaaacgccaccgacattgcctcacagatcaaatacaaacagtccgccgagatggagaaagcgaatttcacctccgtggtggacacgccagagataatccatgctcagcaggtcaagaacctgtcctctcagaaaaaatataaggaagacgcggagaagagcatgtcttactatgaaaccgtgctggatactcctgagatccagagggtccgcgaaaatcaaaagaatttcagtttactccagtaccagtgcgatttaaaaaacagcaaaggaaaaatcactgtggtgcaggacactccagagatcctgcgcgtaaaggaaaatcaaaagaattttagctccgtactgtataaggaggacgtctctccggggacggcaatagggaagacccccgagatgatgcgtgtgaaacaaacccaggatcatatttcaagtgtgaagtataaagaggccatcgggcagggcacacccatacctgacctgcctgaagtgaaaagagtaaaggagactcagaagcacatctcaagtgtgatgtacaaggaaaatctcggtaccggcattcccacaacagttaccccagaaatcgagcgggtgaagcgaaatcaggaaaacttctcctctgtgctttacaaggagaacctgggcaaggggattcccacaccaataacaccagagatggagcgtgttaagcgcaaccaggagaattttagttccgtgctttacaaggaaaacatgggtaagggtactcccctggcagtgacaccagagatggaacgggtgaagcataatcaagaaaatatatcatcagtcctttataaggaaaacgtggggaaggctaccgccaccccagtcacccctgagatgcaacgcgtgaaacgaaatcaggaaaacatatccagtgttctatataaggagaatttgggcaaagccacacctacaccatttaccccagaaatggagagggtcaagaggaatcaagaaaattttagctccgttctttataaagaaaatatgaggaaggcgacccctactcccgttacacctgaaatggaacgcgcaaaacgtaatcaggaaaatatttccagcgtgctatactccgatagtttccggaagcagatccagggaaaggcagcttacgtccttgatactccagaaatgcgccgggtgagggagacacagcggcatatatccacagtgaagtatcatgaagattttgagaagcataagggatgtttcaccccagtggtcaccgaccctatcaccgagcgtgtcaaaaaaaacatgcaggatttttcagatatcaactatcgtgggattcaaagaaaagtggtggagatggaacaaaagcggaacgatcaggaccaggagaccattacaggtctgagagtgtggaggacaaatcccggatctgtctttgactacgatcccgcagaagataatattcagtctcgatctttgcatatgatcaatgtccaagcacagcggcgatcccgtgaacagtccaggagtgcaagcgcgctctctatctccggcggggaagaaaagagtgaacatagcgaggcacctgaccaccacctctccacttacagcgatggaggggtgttcgctgtctctacagcctacaaacatgcaaaaactaccgagctaccacaacaacggtcaagctccgtggccacccaacagacgaccgtgagctctatcccatctcacccctcgactgcagggaaaatattccgcgctatgtacgattacatggccgcagatgccgatgaggtatccttcaaagacggggatgccatcatcaatgtccaggctatagatgaggggtggatgtatggtactgtccaaaggacgggcagaaccggaatgctgcctgctaactacgttgaggctatctag

SEQ ID NO: 147359 - DNA, 20010 bp, Artificial Sequence
  derived and/or modified sequence
atggctgatgatgaagattatgaggaggtggtggagtactacacagaggaggtggtgtatgaggaggtgcctggagagaccatcaccaagatctatgagaccaccaccaccaggaccagtgactatgagcagagcgagaccagcaagccagccctggcccagcctgccctggcccagcctgccagcgccaagcctgtggagaggaggaaggtgatcaggaagaaggtggaccccagcaagttcatgaccccctacatcgcccacagccagaagatgcaggacctcttcagccccaacaagtacaaggagaagtttgagaagaccaagggccagccctatgccagcaccacagacaccccagagctgcggcgcatcaagaaggtgcaggaccagctgtctgaggtgaagtacaggatggatggagatgtggccaagaccatctgccacgtggatgagaaggccaaggacattgaacatgccaagaaggtgtcccagcaggtgtccaaggtgctgtacaagcagaactgggaggacaccaaggacaagtacctgctgcccccagatgcccctgagctggtgcaggccgtgaagaacacagccatgttcagcaagaagctgtacacagaggactgggaggccgacaagagcctcttctacccctacaatgacagccctgagctgcggcgggtggcccaggcccagaaggccctgagtgatgtggcctacaagaagggcctggccgagcagcaggcccagttcacccccctggccgaccccccagacatcgagtttgccaagaaggtgaccaaccaggtgtccaagcagaagtacaaggaggactatgagaacaagatcaagggcaagtggagcgagaccccctgctttgaggtggccaatgccaggatgaatgctgacaacatcagcaccaggaagtaccaggaggactttgagaacatgaaggaccagatctacttcatgcagacagagaccccagagtacaagatgaacaagaaggccggcgtggccgccagcaaggtgaagtacaaggaggactatgagaagaacaagggcaaggctgactacaacgtgctgcctgccagcgagaacccccagctgcggcagctgaaggctgctggagatgccctgagtgacaagctgtacaaggaaaattatgagaagaccaaggccaagagcatcaactactgtgagacccccaagttcaagctggacacagtgctgcagaacttcagcagtgacaagaagtacaaggacagctacctgaaggacatcctgggccactacgtgggcagctttgaggacccctaccacagccactgcatgaaggtgacagcccagaacagcgacaagaactacaaggccgagtatgaggaggaccggggcaagggcttcttcccccagaccatcacccaggagtatgaggccatcaagaagctggaccagtgcaaggaccacacctacaaggtgcacccagacaagaccaagttcacccaggtgacagacagccctgtgctgctgcaggcccaggtgaacagcaagcagctgagtgacctgaactacaaggccaagcatgagagcgagaagttcaagtgccacatccccccagacaccccagccttcatccagcacaaggtgaatgcctacaacctgagtgacaacctgtacaagcaggactgggagaagagcaaggccaagaagtttgacatcaaggtggatgccatccccctgctggccgccaaggccaacaccaagaacaccagtgatgtgatgtacaagaaggactatgagaagaacaagggcaagatgattggagtgctgagcatcaatgatgaccccaagatgctgcacagcctgaaggtggccaagaaccagagcgaccggctgtacaaggaaaattatgagaagaccaaggccaagtccatgaactactgtgagacccccaagtaccagctggacacccagctgaagaacttcagcgaggcccgctacaaggacctgtatgtgaaggatgtgctgggccactacgtgggctccatggaggacccctaccacacccactgcatgaaggtggccgcccagaacagcgacaagagctacaaggccgagtatgaagaagataaaggcaagtgctacttcccccagaccatcacccaggagtatgaggccatcaagaagctggaccagtgcaaggaccacacctacaaggtgcacccagacaagaccaagttcaccgctgtgacagacagccctgtgctgctgcaggcccagctgaacaccaagcagctgagtgacctgaactacaaggccaagcatgaaggagagaagttcaagtgccacatcccagcagatgccccccagttcatccagcaccgggtgaatgcctacaacctgagtgacaacgtgtacaagcaggactgggagaagagcaaggccaagaagtttgacatcaaggtggatgccatccccctgctggccgccaaggccaacaccaagaacaccagtgatgtgatgtacaagaaggactatgagaagagcaagggcaagatgattggagccctgagcatcaatgatgaccccaagatgctgcacagcctgaagacagccaagaaccagagcgaccgggagtacaggaaggactatgagaagagcaagaccatctacacagcccccctggacatgctgcaggtgacccaggccaagaagagccaggccatcgccagtgatgtggactacaagcacatcctgcacagctacagctaccccccagacagcatcaacgtggacctggccaagaaggcctatgccctgcagagtgatgtggagtacaaggctgactacaacagctggatgaagggctgcggctgggtgcccttcggcagcctggagatggagaaggccaagagggccagtgacatcctgaatgagaagaagtaccggcagcacccagacaccctgaagttcaccagcattgaagatgcccccatcaccgtgcagagcaagatcaaccaggcccagaggagtgacatcgcctacaaggccaagggggaggagatcatccacaagtacaacctgcccccagacctgccccagttcatccaggccaaggtgaatgcctacaacatcagcgagaacatgtacaaggctgacctgaaggacctgagcaagaagggctatgacctgaggacagatgccatccccatccgggccgccaaggccgcccggcaggccgccagtgatgtgcagtacaagaaggactatgagaaggccaagggcaagatggtgggcttccagagcctgcaggatgaccccaagctggtgcactacatgaatgtggccaagatccagagcgaccgggagtacaagaaggactatgagaagaccaagagcaagtacaacacccctcatgacatgtttaatgtggtggccgccaagaaggcccaggatgtggtgtccaatgtgaactacaagcacagcctgcaccactacacctacctgcctgatgccatggacctggagctgagcaagaacatgatgcagatccagagcgacaacgtgtacaaggaggactacaacaactggatgaagggcatcggctggatccccatcggcagcctggatgtggagaaggtgaagaaggctggagatgccctgaatgagaagaagtaccggcagcacccagacaccctgaagttcaccagcatcgtggacagccctgtgatggtgcaggccaagcagaacaccaagcaggtgtctgacatcctgtacaaggccaagggggaggatgtgaagcacaagtacaccatgagcccagacctgccccagttcctgcaggccaagtgcaatgcctacaacatcagtgatgtgtgctacaagagggactggtatgacctgattgccaagggcaacaacgtgctgggagatgccatccccatcacagctgccaaggccagcaggaacatcgccagtgactacaagtacaaggaggcctatgagaagagcaagggcaagcacgtgggcttccgcagcctgcaggatgaccccaagctggtgcactacatgaatgtggccaagctgcagagcgaccgggagtacaagaagaactatgagaacaccaagaccagctaccacacccctggggacatggtgtccatcacagctgccaagatggcccaggatgtggccaccaacgtgaactacaagcagcccctgcaccactacacctacctgcctgatgccatgagcctggagcacaccagaaatgtgaaccagatccagagcgacaacgtgtacaaggatgagtacaacagcttcctgaagggcatcggctggatccccatcggcagcctggaggtggagaaggtgaagaaggctggagatgccctgaatgaaaggaagtaccggcagcacccagacacagtgaagttcacctctgtgcctgacagcatgggcatggtgctggcccagcacaacaccaagcagctgagtgacctgaactacaaggtggagggggagaagctgaagcacaagtacaccatcgaccctgagctgccccagttcatccaggccaaggtgaatgccctgaacatgtctgatgcccactacaaggctgactggaagaagaccatcgccaagggctatgacctgcggccagatgccatccccatcgtggccgccaagagcagcaggaacatcgccagtgactgcaagtacaaggaggcctatgagaaggccaagggcaagcaggtgggcttcctgagcctgcaggatgaccccaagctggtgcactacatgaatgtggccaagatccagagcgaccgggagtacaagaagggctatgaggccagcaagaccaagtaccacacccccctggacatggtgtctgtgacagctgccaagaagagccaggaggtggccaccaatgccaactaccggcagagctaccaccactacaccctgctgcctgatgccctgaatgtggagcacagcagaaatgccatgcagatccagagcgacaacctgtacaagagtgacttcaccaactggatgaagggcatcggctgggtgcccatcgagagcctggaggtggagaaggccaagaaggccggggagatcctgtctgagaagaagtaccggcagcaccctgagaagctgaagttcacctacgccatggacaccatggagcaggccctgaacaagagcaacaagctgaacatggacaagaggctgtacacagagaagtggaacaaggacaagaccaccatccacgtgatgccagacaccccagacatcctgctgagccgggtgaaccagatcaccatgtctgacaagctgtacaaggccggctgggaggaggagaagaagaagggctatgacctgcggccagatgccatcgccatcaaggccgcccgggccagccgggacatcgccagtgactacaagtacaagaaggcctatgagcaggccaagggcaagcacatcggcttccgcagcctggaggatgaccccaagctggtgcacttcatgcaggtggccaagatgcagagcgaccgggagtacaagaagggctatgagaagagcaagaccagcttccacacccctgtggacatgctgtctgtggtggccgccaagaagagccaggaggtggccaccaatgccaactacagaaatgtcatccacacctacaacatgctgcctgatgccatgagctttgagctggccaagaacatgatgcagatccagagcgacaaccagtacaaggctgactatgctgacttcatgaagggcatcggctggctgcccctgggcagcctggaggccgagaagaacaagaaggccatggagatcatcagcgagaagaagtaccggcagcacccagacaccctgaagtacagcaccctgatggacagcatgaacatggtgctggcccagaacaatgccaagatcatgaatgagcacctgtacaagcaggcctgggaggccgacaagaccaaggtgcacatcatgccagacatcccccagatcatcctggccaaggccaatgccatcaacatgtctgacaagctgtacaagctgagcctggaggagagcaagaagaagggctatgacctgcggccagatgccatccccatcaaggccgccaaggccagccgggacatcgccagtgactacaagtacaagtacaactatgagaagggcaagggcaagatggtgggcttccgcagcctggaggatgaccccaagctggtgcacagcatgcaggtggccaagatgcagagcgaccgggagtacaagaagaactatgagaacaccaagaccagctaccacaccccagctgacatgctgtctgtgacagctgccaaggatgcccaggccaacatcaccaacaccaactacaagcacctgatccacaagtacatcctgctgcctgatgccatgaacatcgagctgaccaggaacatgaaccgcatccagagcgacaatgagtacaagcaggactacaatgagtggtacaagggcctgggctggagccctgctggcagcctggaggtggagaaggccaagaaggccacagaatatgccagtgaccagaagtaccggcagcaccccagcaacttccagttcaagaagctgacagacagcatggacatggtgctggccaagcagaatgcccacaccatgaacaagcacctgtacaccatcgactggaacaaggacaagaccaagatccacgtgatgccagacaccccagacatcctgcaggccaagcagaaccagaccctgtacagccagaagctgtacaagctgggctgggaggaggccctgaagaagggctatgacctgcctgtggatgccatctctgtgcagctggccaaggccagccgggacatcgccagtgactacaagtacaagcagggctacaggaagcagctgggccaccacgtgggcttccgcagcctgcaggatgaccccaagctggtgctgtccatgaatgtggccaagatgcagagcgagcgggagtacaagaaggactttgagaagtggaagaccaagttcagcagccctgtggacatgctgggcgtggtgctggccaagaagtgccaggagctggtgtctgatgtggactacaagaactacctgcaccagtggacctgcctgcctgaccagaatgatgtggtgcaggccaagaaggtgtatgagctgcagagtgaaaatctctacaagagtgacctggagtggctgcggggcatcggctggagccccctgggcagcctggaggccgagaagaacaagagggccagcgagatcatcagcgagaagaagtaccggcagcccccagacaggaacaagttcaccagcatcccagatgccatggacatcgtgctggccaagaccaatgccaagaacagaagtgaccggctgtaccgggaggcctgggacaaggacaagacccagatccacatcatgccagacaccccagacatcgtgctggccaaggccaacctgatcaacaccagtgacaagctgtacaggatgggctatgaggagctgaagaggaagggctatgacctgcctgtggatgccatccccatcaaggccgccaaggccagccgggagatcgccagcgagtacaagtacaaggagggcttcaggaagcagctgggccaccacatcggggccaggaacattgaagatgaccccaagatgatgtggagcatgcacgtggccaagatccagagcgaccgggagtacaagaaggactttgagaagtggaagaccaagttcagcagccctgtggacatgctgggcgtggtgctggccaagaagtgccagaccctggtgtctgatgtggactacaagaactacctgcaccagtggacctgcctgcctgaccagagtgatgtgatccacgcccggcaggcctatgacctgcagagcgacaacctgtacaagagtgacctgcagtggctgaagggcatcggctggatgaccagcggcagcctggaggatgagaagaacaagagggccacccagatcctgagtgaccacgtgtaccggcagcacccagaccagttcaagttcagcagcctgatggacagcatccccatggtgctggccaagaacaatgccatcaccatgaaccaccggctgtacacagaggcctgggacaaggacaagaccaccgtgcacatcatgccagacaccccagaggtgctgctggccaagcagaacaaggtgaactacagcgagaagctgtacaagctgggcctggaggaggccaagaggaagggctatgacatgagggtggatgccatccccatcaaggccgccaaggccagccgggacatcgccagcgagttcaagtacaaggagggctacaggaagcagctgggccaccacatcggggcccgggccatcagagatgaccccaagatgatgtggagcatgcacgtggccaagatccagagcgaccgggagtacaagaaggactttgagaagtggaagaccaagttcagcagccctgtggacatgctgggcgtggtgctggccaagaagtgccagaccctggtgtctgatgtggactacaagaactacctgcaccagtggacctgcctgcctgaccagagtgatgtgattcatgcccggcaggcctatgacctgcagagcgacaacatgtacaagagtgacctgcagtggatgaggggcatcggctgggtgtccatcggcagcctggatgtggagaagtgcaagagggccacagagatcctgagtgacaagatctaccggcagcccccagaccgcttcaagttcacctctgtgacagacagcctggagcaggtgctggccaagaacaatgccatcaccatgaacaagaggctgtacacagaggcctgggacaaggacaagacccagatccacatcatgccagacaccccagagatcatgctggcccggcagaacaagatcaactacagcgagaccctgtacaagctggccaatgaggaggccaagaagaagggctatgacctgcggagtgatgccatccccatcgtggccgccaaggccagcagagatgtgatcagtgactacaagtacaaggatggctacaggaagcagctgggccaccacatcggggccaggaacattgaagatgaccccaagatgatgtggagcatgcacgtggccaagatccagagcgaccgggagtacaagaaggactttgagaagtggaagaccaagttcagcagccctgtggacatgctgggcgtggtgctggccaagaagtgccagaccctggtgtctgatgtggactacaagaactacctgcacgagtggacctgcctgcctgaccagaatgatgtgatccacgcccggcaggcctatgacctgcagagcgacaacatctacaagagtgacctgcagtggctgcggggcatcggctgggtgcccatcggctccatggatgtggtgaagtgcaagagagctgctgagatcctgagtgacaacatctaccggcagcccccagacaagctgaagttcacctctgtgacagacagcctggagcaggtgctggccaagaacaatgccctgaacatgaacaagaggctgtacacagaggcctgggacaaggacaagacccaggtgcacatcatgccagacaccccagagatcatgctggcccggcagaacaagatcaactacagcgagagcctgtaccggcaggccatggaggaggccaagaaggagggctatgacctgcggagtgatgccatccccatcgtggccgccaaggccagccgggacatcgccagtgactacaagtacaaggaggcctacaggaagcagctgggccaccacatcggggcccgggctgtgcatgatgaccccaagatcatgtggagcctgcacatcgccaaggtgcagagcgaccgggagtacaagaaggactttgagaagtacaagacccgctacagcagccctgtggacatgctgggcatcgtgctggccaagaagtgccagaccctggtgtctgatgtggactacaagcaccccctgcacgagtggatctgcctgcctgaccagaatgacatcatccacgccaggaaggcctatgacctgcagagcgacaacctgtacaagagtgacctggagtggatgaagggcatcggctgggtgcccatcgacagcctggaggtggtgcgggccaagagagctggggagctgctgagtgacaccatctaccggcagaggcctgagaccctgaagttcaccagcatcacagacaccccagagcaggtgctggccaagaacaatgccctgaacatgaacaagaggctgtacacagaggcctgggacaatgacaagaagaccatccacgtgatgccagacaccccagagatcatgctggccaagctgaaccgcatcaactacagcgacaagctgtacaagctggccctggaggagagcaagaaggagggctatgacctgcggctggatgccatccccatccaggccgccaaggccagccgggacatcgccagtgactacaagtacaaggagggctacaggaagcagctgggccaccacatcggggccaggaacatcaaggatgaccccaagatgatgtggagcatccacgtggccaagatccagagcgaccgggagtacaagaaggagtttgagaagtggaagaccaagttcagcagccctgtggacatgctgggcgtggtgctggccaagaagtgccagatcctggtgtctgacatcgactacaagcaccccctgcacgagtggacctgcctgcctgaccagaatgatgtgatccaggccaggaaggcctatgacctgcagagtgatgccatctacaagagtgacctggagtggctgcggggcatcggctgggtgcccatcggctctgtggaggtggagaaggtgaagagagctggggagatcctgagtgacaggaagtaccggcagcctgctgaccagctgaagttcacctgcatcacagacaccccagagatcgtgctggccaagaacaatgccctgaccatgagcaagcacctgtacacagaggcctgggatgctgacaagaccagcatccacgtgatgccagacaccccagacatcctgctggccaagagcaacagcgccaacatcagccagaagctgtacaccaagggctgggatgagagcaagatgaaggactatgacctgcgggcagatgccatcagcatcaagagcgccaaggccagccgggacatcgccagtgactacaagtacaaggaggcctatgagaagcagaagggccaccacatcggggcccagagcattgaagatgaccccaagatcatgtgtgccatccatgctgggaagatccagagcgagcgggagtacaagaaggagttccagaagtggaagaccaagttcagcagccctgtggacatgctgagcatcctgctggccaagaagtgccagaccctggtgacagacatcgactacagaaactacctgcacgagtggacctgcatgccagaccagaatgacatcatccaggccaagaaggcctatgacctgcagagtgatgccctgtacaaggctgacctggagtggctgcggggcatcggctggatgccccagggcagccctgaggtgctgcgggtgaagaatgcccagaacatcttctgtgacagcgtgtaccgcacccctgtggtgaacctgaagtacaccagcatcgtggacaccccagaggtggtgctggccaagagcaatgctgagaacatcagcatccccaagtaccgggaggtgtgggacaaggacaagaccagcatccacatcatgccagacaccccagagatcaacctggcccgggccaatgccctgaatgtgagcaacaagctgtaccgggagggctgggatgagatgaaggccggctgtgatgtgcggctggatgccatccccatccaggccgccaaggccagccgggagatcgccagtgactacaagtacaagctggaccacgagaagcagaagggccactacgtgggcaccctgacagccagagatgacaacaagatccgctgggccctgattgctgacaagctgcagaatgaaagagagtaccgcctggactgggccaagtggaaggccaagatccagagccctgtggacatgctgagcatcctgcacagcaagaacagccaggccctggtgtctgacatggactacagaaactacctgcaccagtggacctgcatgccagaccagaatgatgtgatccaggccaagaaggcctatgagctgcagagcgacaacgtgtacaaggctgacctggagtggctgcggggcatcggctggatgcccaatgattctgtgtctgtgaaccacgccaagcacgccgctgacatcttcagcgagaagaagtaccgcaccaagattgagaccctgaacttcacccctgtggatgacagagtggactatgtgacagccaagcagagcggggagatcctggatgacatcaagtacaggaaggactggaatgccaccaagagcaagtacaccctgacagagacccccctgctgcacacagcccaggaggccgcccgcatcctggaccagtacctgtacaaggagggctgggagcggcagaaggccaccggctacatcctgcccccagatgctgtgccctttgtgcacgcccaccactgcaatgatgtgcagagcgagctgaagtacaaggccgagcacgtgaagcagaagggccactacgtgggcgtgcccaccatgagagatgaccccaagctggtgtggtttgagcacgccggccagatccagaatgaaagactctacaaggaggactaccacaagaccaaggccaagatcaacatcccagctgacatggtgtctgtgctggccgccaagcagggccagaccctggtgtctgacatcgactacagaaactacctgcaccagtggatgtgccacccagaccagaatgatgtgatccaggccaggaaggcctatgacctgcagagcgacaacgtgtacagagctgacctggagtggctgcggggcatcggctggatccccctggacagcgtggaccacgtgcgggtgaccaagaaccaggagatgatgagccagatcaagtacaagaagaatgccctggagaactaccccaacttccgctctgtggtggaccccccagaaattgtgctggccaagatcaacagcgtgaaccagagtgatgtgaagtacaaggagaccttcaacaaggccaagggcaagtacaccttctccccagacaccccccacatcagccacagcaaggacatgggcaagctgtacagcaccatcctgtacaagggggcctgggagggcaccaaggcctacggctacaccctggatgagcgctacatccccatcgtgggcgccaagcacgccgacctggtgaacagcgagctgaagtacaaggagacctatgagaagcagaagggccactacctggccggcaaggtgattggagagttccctggggtggtgcactgcctggacttccagaagatgaggtctgccctgaactacaggaagcactatgaggacaccaaggccaacgtgcacatccccaatgacatgatgaaccacgtgctggccaagcgctgccagtacatcctgagtgacctggagtaccgccactacttccaccagtggaccagcctgctggaggagcccaacgtcatccgggtgagaaatgcccaggagatcctgagtgacaacgtgtacaaggatgacctgaactggctgaagggcatcggctgctacgtgtgggacaccccccagatcctgcacgccaagaagagctatgacctgcagagccagctgcagtacacagctgctgggaaggagaacctgcagaactacaacctggtgacagacacccccctgtatgtgacagctgtgcagagcggcatcaatgccagcgaggtgaagtacaaggagaactaccaccagatcaaggacaagtacaccaccgtgctggagaccgtggactatgacaggaccaggaacctgaagaacctgtacagcagcaacctgtacaaggaggcctgggacagagtgaaggccaccagctacatcctgcccagcagcaccctgagcctgacccacgccaagaaccagaagcacctggccagccacatcaagtaccgggaggagtatgagaagttcaaggccctgtacaccctgcccaggtctgtggatgatgaccccaacacagcccgctgcctgcgggtgggcaagctgaacatcgaccggctgtacagatctgtgtatgagaagaacaagatgaagatccacatcgtgcctgacatggtggagatggtgacagccaaggacagccagaagaaggtgtctgaaattgactaccgcctgcggctgcacgagtggatctgccacccagacctgcaggtgaatgaccacgtgaggaaggtgacagaccagatcagtgacatcgtgtacaaggatgacctgaactggctgaagggcatcggctgctacgtgtgggacaccccagagatcctgcacgccaagcacgcctatgacctgagagatgacatcaagtacaaggcccacatgctgaagaccagaaatgactacaagctggtgacagacacccctgtgtatgtgcaggccgtgaagagcggcaagcagctgagtgatgctgtgtaccactatgactatgtgcacagcgtgcggggcaaggtggcccccaccaccaagacagtggacctggaccgggccctgcacgcctacaagctgcagagcagcaacctgtacaagaccagcctgcggaccctgcccaccggctaccgcctgcccggggacaccccccacttcaagcacatcaaggacacccgctacatgagcagctacttcaagtacaaggaggcctatgagcacaccaaggcctacggctacaccctgggccccaaggatgtgccctttgtgcacgtgcggcgggtgaacaacgtgaccagcgagcggctgtaccgggagctgtaccacaagctgaaggacaagatccacaccaccccagacaccccagagatccggcaggtgaagaagacccaggaggccgtgtctgagctgatctacaagagtgacttcttcaagatgcagggccacatgatcagcctgccctacaccccccaggtgatccactgccgctacgtgggggacatcaccagtgacatcaagtacaaggaggacctgcaggtgctgaagggcttcggctgcttcctgtatgacaccccagacatggtgcgcagccgccacctgaggaagctgtggagcaactacctgtacacagacaaggccaggaagatgagggacaagtacaaggtggtgctggacaccccagagtacaggaaggtgcaggagctgaagacccacctgtctgagctggtgtacagagctgctgggaagaagcagaagagcatcttcacctctgtgcctgacaccccagacctgctgcgggccaagaggggccagaagctgcagagccagtacctgtatgtggagctggccaccaaggagcggccccaccaccacgccggcaaccagaccacagccctgaagcacgccaaggatgtgaaggacatggtgtctgagaagaagtacaagatccagtatgagaagatgaaggacaagtacacccctgtgcctgacacccccatcctgatccgggccaagagggcctactggaatgccagtgacctgcgctacaaggagaccttccagaagaccaagggcaagtaccacacagtgaaggatgccctggacatcgtgtaccacaggaaggtgacagatgacatcagcaagatcaagtacaaggagaactacatgagccagctgggcatctggaggagcatcccagacaggcctgagcacttccaccacagagctgtgacagacacagtgtctgatgtgaagtacaaggaggacctgacctggctgaagggcatcggctgctacgcctatgacaccccagacttcaccctggccgagaagaacaagaccctgtacagcaagtacaagtacaaggaggtgtttgagaggaccaagagtgacttcaagtatgtggccgacagccccatcaacagacacttcaagtatgccacccagctgatgaatgagaagaagtacagagctgactatgagcagaggaaggacaagtaccacctggtggtggatgagcccaggcacctgctggccaagacagctggggaccagatcagccagatcaagtacaggaagaactatgagaagagcaaggacaagttcaccagcatcgtggacaccccagagcacctgcggaccaccaaggtgaacaagcagatcagtgacatcctgtacaagctggagtacaacaaggccaagccccggggctacaccaccatccatgacacccccatgctgctgcacgtgaggaaggtgaaggatgaggtgtctgacctgaagtacaaggaggtgtaccagaggaacaagagcaactgcaccattgaaccagatgctgtgcacatcaaggccgccaaggatgcctacaaggtgaacaccaacctggactacaagaagcagtatgaggccaacaaggcccactggaagtggaccccagacagaccagacttcctgcaggccgccaagagcagcctgcagcagagcgactttgagtacaagctggaccgggagttcctgaagggctgcaagctgtctgtgacagatgacaagaacacagtgctggccctgaggaacaccctgattgaaagtgacctgaagtacaaggagaagcacgtgaaggagcggggcacctgccacgctgtgcctgacaccccccagatcctgctggccaagacagtgagcaacctggtgtctgagaacaagtacaaggaccacgtgaagaagcacctggcccagggcagctacaccaccctgcctgagacccgggacacagtgcacgtgaaggaggtgaccaagcacgtgtctgacaccaactacaagaagaagtttgtgaaggagaagggcaagagcaactacagcatcatgctggagcccccagaggtgaagcacgccatggaggtggccaagaagcagagtgatgtggcctacaggaaggatgccaaggagaacctgcactacaccaccgtggccgacagaccagacatcaagaaggccacccaggccgccaagcaggccagcgaggtggagtaccgggccaagcacaggaaggagggcagccacggcctgtccatgctgggccgcccagacatcgagatggccaagaaggccgccaagctgagcagccaggtgaagtacagagaaaattttgacaaggagaagggcaagacccccaagtacaaccccaaggacagccagctgtacaaggtgatgaaggatgccaacaacctggccagcgaggtgaagtacaaggctgacctgaagaagctgcacaagcctgtgacagacatgaaggagagcctcatcatgaaccacgtgctgaacaccagccagctggccagcagctaccagtacaagaagaagtatgagaagagcaagggccactaccacaccatcccagacaacctggagcagctgcacctgaaggaggccacagagctgcagagcatcgtgaagtacaaggagaagtatgagaaggagcggggcaagcccatgctggactttgagacccccacctacatcacagccaaggagagccagcagatgcagagcggcaaggagtacaggaaggactatgaggagagcatcaagggcaggaacctgaccggcctggaggtgaccccagccctgctgcacgtgaagtatgccaccaagatcgccagcgagaaggagtacaggaaggacctggaggagagcatccggggcaagggcctgacagagatggaggacaccccagacatgctgcgggccaagaatgccacccagatcctgaatgagaaggagtacaagagggacctggagctggaggtgaagggccggggcctgaatgccatggccaatgagaccccagacttcatgagggccagaaatgccacagacatcgccagccagatcaagtacaagcagagcgctgagatggagaaggccaacttcacctctgtggtggacaccccagagatcatccacgcccagcaggtgaagaacctgagcagccagaagaagtacaaggaggatgctgagaagtccatgagctactatgaaacagtgctggacaccccagagatccagagggtgcgggagaaccagaagaacttcagcctgctgcagtaccagtgtgacctgaagaacagcaagggcaagatcaccgtggtgcaggacaccccagagatcctgcgggtgaaggagaaccagaagaacttcagctctgtgctgtacaaggaggatgtgtccccaggcacagccatcggcaagaccccagagatgatgagggtgaagcagacccaggaccacatcagctctgtgaagtacaaggaggccatcggccagggcacccccatcccagacctgcctgaggtgaagagggtgaaggagacccagaagcacatcagctctgtgatgtacaaggagaacctgggcaccggcatccccaccaccgtgaccccagaaattgaaagagtgaagaggaaccaggagaacttcagctctgtgctgtacaaggagaacctgggcaagggcatccccacccccatcaccccagagatggagcgggtgaagaggaaccaggagaacttcagctctgtgctgtacaaggagaacatgggcaagggcacccccctggccgtgaccccagagatggagcgggtgaagcacaaccaggagaacatcagctctgtgctgtacaaggaaaatgtgggcaaggccacagccacccctgtgaccccagagatgcagagggtgaagaggaaccaggagaacatcagctctgtgctgtacaaggagaacctgggcaaggccacccccacccccttcaccccagagatggagcgggtgaagaggaaccaggagaacttcagctctgtgctgtacaaggagaacatgaggaaggccacccccacccctgtgaccccagagatggagcgggccaagaggaaccaggagaacatcagctctgtgctgtacagcgacagcttcaggaagcagatccagggcaaggccgcctacgtgctggacaccccagagatgagaagagtgcgggagacccagaggcacatcagcacagtgaagtaccacgaggactttgagaagcacaagggctgcttcacccctgtggtgacagaccccatcacagagcgggtgaagaagaacatgcaggacttcagtgacatcaactaccggggcatccagaggaaggtggtggagatggagcagaagagaaatgaccaggaccaggagaccatcaccggcctgcgggtgtggaggaccaaccctggctctgtgtttgattatgaccctgctgaggacaacatccagagccgcagcctgcacatgatcaacgtgcaggcccagaggaggagccgggagcagagccgcagcgccagcgccctgagcatctctggaggagaggagaagtctgagcacagcgaggccccagaccaccacctgagcacctacagtgatggcggcgtgtttgctgtgtccacagcctacaagcacgccaagaccacagagctgccccagcagaggagcagctctgtggccacccagcagaccaccgtgagcagcatccccagccaccccagcacagctgggaagatcttccgggccatgtatgactacatggccgcagatgctgatgaggtgtccttcaaggatggagatgccatcatcaacgtgcaggccattgatgagggctggatgtatggaacagtgcagaggactggaagaacaggcatgctgcctgccaactacgtggaggccatctag

SEQ ID NO: 147360 - DNA, 20010 bp, Artificial Sequence
  derived and/or modified sequence
atggctgatgatgaagattatgaggaggtggtggagtactacacagaggaggtggtgtatgaggaggtgcctggagagaccatcaccaagatctatgagaccaccaccaccaggaccagtgactatgagcagagcgagaccagcaagccagccctggcccagcctgccctggcccagcctgccagcgccaagcctgtggagaggaggaaggtgatcaggaagaaggtggaccccagcaagttcatgaccccctacatcgcccacagccagaagatgcaggacctcttcagccccaacaagtacaaggagaagtttgagaagaccaagggccagccctatgccagcaccacagacaccccagagctgcggcgcatcaagaaggtgcaggaccagctgtctgaggtgaagtacaggatggatggagatgtggccaagaccatctgccacgtggatgagaaggccaaggacattgaacatgccaagaaggtgtcccagcaggtgtccaaggtgctgtacaagcagaactgggaggacaccaaggacaagtacctgctgcccccagatgcccctgagctggtgcaggccgtgaagaacacagccatgttcagcaagaagctgtacacagaggactgggaggccgacaagagcctcttctacccctacaatgacagccctgagctgcggcgggtggcccaggcccagaaggccctgagtgatgtggcctacaagaagggcctggccgagcagcaggcccagttcacccccctggccgaccccccagacatcgagtttgccaagaaggtgaccaaccaggtgtccaagcagaagtacaaggaggactatgagaacaagatcaagggcaagtggagcgagaccccctgctttgaggtggccaatgccaggatgaatgctgacaacatcagcaccaggaagtaccaggaggactttgagaacatgaaggaccagatctacttcatgcagacagagaccccagagtacaagatgaacaagaaggccggcgtggccgccagcaaggtgaagtacaaggaggactatgagaagaacaagggcaaggctgactacaacgtgctgcctgccagcgagaacccccagctgcggcagctgaaggctgctggagatgccctgagtgacaagctgtacaaggaaaattatgagaagaccaaggccaagagcatcaactactgtgagacccccaagttcaagctggacacagtgctgcagaacttcagcagtgacaagaagtacaaggacagctacctgaaggacatcctgggccactacgtgggcagctttgaggacccctaccacagccactgcatgaaggtgacagcccagaacagcgacaagaactacaaggccgagtatgaggaggaccggggcaagggcttcttcccccagaccatcacccaggagtatgaggccatcaagaagctggaccagtgcaaggaccacacctacaaggtgcacccagacaagaccaagttcacccaggtgacagacagccctgtgctgctgcaggcccaggtgaacagcaagcagctgagtgacctgaactacaaggccaagcatgagagcgagaagttcaagtgccacatccccccagacaccccagccttcatccagcacaaggtgaatgcctacaacctgagtgacaacctgtacaagcaggactgggagaagagcaaggccaagaagtttgacatcaaggtggatgccatccccctgctggccgccaaggccaacaccaagaacaccagtgatgtgatgtacaagaaggactatgagaagaacaagggcaagatgattggagtgctgagcatcaatgatgaccccaagatgctgcacagcctgaaggtggccaagaaccagagcgaccggctgtacaaggaaaattatgagaagaccaaggccaagtccatgaactactgtgagacccccaagtaccagctggacacccagctgaagaacttcagcgaggcccgctacaaggacctgtatgtgaaggatgtgctgggccactacgtgggctccatggaggacccctaccacacccactgcatgaaggtggccgcccagaacagcgacaagagctacaaggccgagtatgaagaagataaaggcaagtgctacttcccccagaccatcacccaggagtatgaggccatcaagaagctggaccagtgcaaggaccacacctacaaggtgcacccagacaagaccaagttcaccgctgtgacagacagccctgtgctgctgcaggcccagctgaacaccaagcagctgagtgacctgaactacaaggccaagcatgaaggagagaagttcaagtgccacatcccagcagatgccccccagttcatccagcaccgggtgaatgcctacaacctgagtgacaacgtgtacaagcaggactgggagaagagcaaggccaagaagtttgacatcaaggtggatgccatccccctgctggccgccaaggccaacaccaagaacaccagtgatgtgatgtacaagaaggactatgagaagagcaagggcaagatgattggagccctgagcatcaatgatgaccccaagatgctgcacagcctgaagacagccaagaaccagagcgaccgggagtacaggaaggactatgagaagagcaagaccatctacacagcccccctggacatgctgcaggtgacccaggccaagaagagccaggccatcgccagtgatgtggactacaagcacatcctgcacagctacagctaccccccagacagcatcaacgtggacctggccaagaaggcctatgccctgcagagtgatgtggagtacaaggctgactacaacagctggatgaagggctgcggctgggtgcccttcggcagcctggagatggagaaggccaagagggccagtgacatcctgaatgagaagaagtaccggcagcacccagacaccctgaagttcaccagcattgaagatgcccccatcaccgtgcagagcaagatcaaccaggcccagaggagtgacatcgcctacaaggccaagggggaggagatcatccacaagtacaacctgcccccagacctgccccagttcatccaggccaaggtgaatgcctacaacatcagcgagaacatgtacaaggctgacctgaaggacctgagcaagaagggctatgacctgaggacagatgccatccccatccgggccgccaaggccgcccggcaggccgccagtgatgtgcagtacaagaaggactatgagaaggccaagggcaagatggtgggcttccagagcctgcaggatgaccccaagctggtgcactacatgaatgtggccaagatccagagcgaccgggagtacaagaaggactatgagaagaccaagagcaagtacaacacccctcatgacatgtttaatgtggtggccgccaagaaggcccaggatgtggtgtccaatgtgaactacaagcacagcctgcaccactacacctacctgcctgatgccatggacctggagctgagcaagaacatgatgcagatccagagcgacaacgtgtacaaggaggactacaacaactggatgaagggcatcggctggatccccatcggcagcctggatgtggagaaggtgaagaaggctggagatgccctgaatgagaagaagtaccggcagcacccagacaccctgaagttcaccagcatcgtggacagccctgtgatggtgcaggccaagcagaacaccaagcaggtgtctgacatcctgtacaaggccaagggggaggatgtgaagcacaagtacaccatgagcccagacctgccccagttcctgcaggccaagtgcaatgcctacaacatcagtgatgtgtgctacaagagggactggtatgacctgattgccaagggcaacaacgtgctgggagatgccatccccatcacagctgccaaggccagcaggaacatcgccagtgactacaagtacaaggaggcctatgagaagagcaagggcaagcacgtgggcttccgcagcctgcaggatgaccccaagctggtgcactacatgaatgtggccaagctgcagagcgaccgggagtacaagaagaactatgagaacaccaagaccagctaccacacccctggggacatggtgtccatcacagctgccaagatggcccaggatgtggccaccaacgtgaactacaagcagcccctgcaccactacacctacctgcctgatgccatgagcctggagcacaccagaaatgtgaaccagatccagagcgacaacgtgtacaaggatgagtacaacagcttcctgaagggcatcggctggatccccatcggcagcctggaggtggagaaggtgaagaaggctggagatgccctgaatgaaaggaagtaccggcagcacccagacacagtgaagttcacctctgtgcctgacagcatgggcatggtgctggcccagcacaacaccaagcagctgagtgacctgaactacaaggtggagggggagaagctgaagcacaagtacaccatcgaccctgagctgccccagttcatccaggccaaggtgaatgccctgaacatgtctgatgcccactacaaggctgactggaagaagaccatcgccaagggctatgacctgcggccagatgccatccccatcgtggccgccaagagcagcaggaacatcgccagtgactgcaagtacaaggaggcctatgagaaggccaagggcaagcaggtgggcttcctgagcctgcaggatgaccccaagctggtgcactacatgaatgtggccaagatccagagcgaccgggagtacaagaagggctatgaggccagcaagaccaagtaccacacccccctggacatggtgtctgtgacagctgccaagaagagccaggaggtggccaccaatgccaactaccggcagagctaccaccactacaccctgctgcctgatgccctgaatgtggagcacagcagaaatgccatgcagatccagagcgacaacctgtacaagagtgacttcaccaactggatgaagggcatcggctgggtgcccatcgagagcctggaggtggagaaggccaagaaggccggggagatcctgtctgagaagaagtaccggcagcaccctgagaagctgaagttcacctacgccatggacaccatggagcaggccctgaacaagagcaacaagctgaacatggacaagaggctgtacacagagaagtggaacaaggacaagaccaccatccacgtgatgccagacaccccagacatcctgctgagccgggtgaaccagatcaccatgtctgacaagctgtacaaggccggctgggaggaggagaagaagaagggctatgacctgcggccagatgccatcgccatcaaggccgcccgggccagccgggacatcgccagtgactacaagtacaagaaggcctatgagcaggccaagggcaagcacatcggcttccgcagcctggaggatgaccccaagctggtgcacttcatgcaggtggccaagatgcagagcgaccgggagtacaagaagggctatgagaagagcaagaccagcttccacacccctgtggacatgctgtctgtggtggccgccaagaagagccaggaggtggccaccaatgccaactacagaaatgtcatccacacctacaacatgctgcctgatgccatgagctttgagctggccaagaacatgatgcagatccagagcgacaaccagtacaaggctgactatgctgacttcatgaagggcatcggctggctgcccctgggcagcctggaggccgagaagaacaagaaggccatggagatcatcagcgagaagaagtaccggcagcacccagacaccctgaagtacagcaccctgatggacagcatgaacatggtgctggcccagaacaatgccaagatcatgaatgagcacctgtacaagcaggcctgggaggccgacaagaccaaggtgcacatcatgccagacatcccccagatcatcctggccaaggccaatgccatcaacatgtctgacaagctgtacaagctgagcctggaggagagcaagaagaagggctatgacctgcggccagatgccatccccatcaaggccgccaaggccagccgggacatcgccagtgactacaagtacaagtacaactatgagaagggcaagggcaagatggtgggcttccgcagcctggaggatgaccccaagctggtgcacagcatgcaggtggccaagatgcagagcgaccgggagtacaagaagaactatgagaacaccaagaccagctaccacaccccagctgacatgctgtctgtgacagctgccaaggatgcccaggccaacatcaccaacaccaactacaagcacctgatccacaagtacatcctgctgcctgatgccatgaacatcgagctgaccaggaacatgaaccgcatccagagcgacaatgagtacaagcaggactacaatgagtggtacaagggcctgggctggagccctgctggcagcctggaggtggagaaggccaagaaggccacagaatatgccagtgaccagaagtaccggcagcaccccagcaacttccagttcaagaagctgacagacagcatggacatggtgctggccaagcagaatgcccacaccatgaacaagcacctgtacaccatcgactggaacaaggacaagaccaagatccacgtgatgccagacaccccagacatcctgcaggccaagcagaaccagaccctgtacagccagaagctgtacaagctgggctgggaggaggccctgaagaagggctatgacctgcctgtggatgccatctctgtgcagctggccaaggccagccgggacatcgccagtgactacaagtacaagcagggctacaggaagcagctgggccaccacgtgggcttccgcagcctgcaggatgaccccaagctggtgctgtccatgaatgtggccaagatgcagagcgagcgggagtacaagaaggactttgagaagtggaagaccaagttcagcagccctgtggacatgctgggcgtggtgctggccaagaagtgccaggagctggtgtctgatgtggactacaagaactacctgcaccagtggacctgcctgcctgaccagaatgatgtggtgcaggccaagaaggtgtatgagctgcagagtgaaaatctctacaagagtgacctggagtggctgcggggcatcggctggagccccctgggcagcctggaggccgagaagaacaagagggccagcgagatcatcagcgagaagaagtaccggcagcccccagacaggaacaagttcaccagcatcccagatgccatggacatcgtgctggccaagaccaatgccaagaacagaagtgaccggctgtaccgggaggcctgggacaaggacaagacccagatccacatcatgccagacaccccagacatcgtgctggccaaggccaacctgatcaacaccagtgacaagctgtacaggatgggctatgaggagctgaagaggaagggctatgacctgcctgtggatgccatccccatcaaggccgccaaggccagccgggagatcgccagcgagtacaagtacaaggagggcttcaggaagcagctgggccaccacatcggggccaggaacattgaagatgaccccaagatgatgtggagcatgcacgtggccaagatccagagcgaccgggagtacaagaaggactttgagaagtggaagaccaagttcagcagccctgtggacatgctgggcgtggtgctggccaagaagtgccagaccctggtgtctgatgtggactacaagaactacctgcaccagtggacctgcctgcctgaccagagtgatgtgatccacgcccggcaggcctatgacctgcagagcgacaacctgtacaagagtgacctgcagtggctgaagggcatcggctggatgaccagcggcagcctggaggatgagaagaacaagagggccacccagatcctgagtgaccacgtgtaccggcagcacccagaccagttcaagttcagcagcctgatggacagcatccccatggtgctggccaagaacaatgccatcaccatgaaccaccggctgtacacagaggcctgggacaaggacaagaccaccgtgcacatcatgccagacaccccagaggtgctgctggccaagcagaacaaggtgaactacagcgagaagctgtacaagctgggcctggaggaggccaagaggaagggctatgacatgagggtggatgccatccccatcaaggccgccaaggccagccgggacatcgccagcgagttcaagtacaaggagggctacaggaagcagctgggccaccacatcggggcccgggccatcagagatgaccccaagatgatgtggagcatgcacgtggccaagatccagagcgaccgggagtacaagaaggactttgagaagtggaagaccaagttcagcagccctgtggacatgctgggcgtggtgctggccaagaagtgccagaccctggtgtctgatgtggactacaagaactacctgcaccagtggacctgcctgcctgaccagagtgatgtgattcatgcccggcaggcctatgacctgcagagcgacaacatgtacaagagtgacctgcagtggatgaggggcatcggctgggtgtccatcggcagcctggatgtggagaagtgcaagagggccacagagatcctgagtgacaagatctaccggcagcccccagaccgcttcaagttcacctctgtgacagacagcctggagcaggtgctggccaagaacaatgccctgaacatgaacaagaggctgtacacagaggcctgggacaaggacaagacccagatccacatcatgccagacaccccagagatcatgctggcccggcagaacaagatcaactacagcgagaccctgtacaagctggccaatgaggaggccaagaagaagggctatgacctgcggagtgatgccatccccatcgtggccgccaaggccagcagagatgtgatcagtgactacaagtacaaggatggctacaggaagcagctgggccaccacatcggggccaggaacattgaagatgaccccaagatgatgtggagcatgcacgtggccaagatccagagcgaccgggagtacaagaaggactttgagaagtggaagaccaagttcagcagccctgtggacatgctgggcgtggtgctggccaagaagtgccagaccctggtgtctgatgtggactacaagaactacctgcacgagtggacctgcctgcctgaccagaatgatgtgatccacgcccggcaggcctatgacctgcagagcgacaacatctacaagagtgacctgcagtggctgcggggcatcggctgggtgcccatcggctccatggatgtggtgaagtgcaagagagctgctgagatcctgagtgacaacatctaccggcagcccccagacaagctgaagttcacctctgtgacagacagcctggagcaggtgctggccaagaacaatgccctgaacatgaacaagaggctgtacacagaggcctgggacaaggacaagacccaggtgcacatcatgccagacaccccagagatcatgctggcccggcagaacaagatcaactacagcgagagcctgtaccggcaggccatggaggaggccaagaaggagggctatgacctgcggagtgatgccatccccatcgtggccgccaaggccagccgggacatcgccagtgactacaagtacaaggaggcctacaggaagcagctgggccaccacatcggggcccgggctgtgcatgatgaccccaagatcatgtggagcctgcacatcgccaaggtgcagagcgaccgggagtacaagaaggactttgagaagtacaagacccgctacagcagccctgtggacatgctgggcatcgtgctggccaagaagtgccagaccctggtgtctgatgtggactacaagcaccccctgcacgagtggatctgcctgcctgaccagaatgacatcatccacgccaggaaggcctatgacctgcagagcgacaacctgtacaagagtgacctggagtggatgaagggcatcggctgggtgcccatcgacagcctggaggtggtgcgggccaagagagctggggagctgctgagtgacaccatctaccggcagaggcctgagaccctgaagttcaccagcatcacagacaccccagagcaggtgctggccaagaacaatgccctgaacatgaacaagaggctgtacacagaggcctgggacaatgacaagaagaccatccacgtgatgccagacaccccagagatcatgctggccaagctgaaccgcatcaactacagcgacaagctgtacaagctggccctggaggagagcaagaaggagggctatgacctgcggctggatgccatccccatccaggccgccaaggccagccgggacatcgccagtgactacaagtacaaggagggctacaggaagcagctgggccaccacatcggggccaggaacatcaaggatgaccccaagatgatgtggagcatccacgtggccaagatccagagcgaccgggagtacaagaaggagtttgagaagtggaagaccaagttcagcagccctgtggacatgctgggcgtggtgctggccaagaagtgccagatcctggtgtctgacatcgactacaagcaccccctgcacgagtggacctgcctgcctgaccagaatgatgtgatccaggccaggaaggcctatgacctgcagagtgatgccatctacaagagtgacctggagtggctgcggggcatcggctgggtgcccatcggctctgtggaggtggagaaggtgaagagagctggggagatcctgagtgacaggaagtaccggcagcctgctgaccagctgaagttcacctgcatcacagacaccccagagatcgtgctggccaagaacaatgccctgaccatgagcaagcacctgtacacagaggcctgggatgctgacaagaccagcatccacgtgatgccagacaccccagacatcctgctggccaagagcaacagcgccaacatcagccagaagctgtacaccaagggctgggatgagagcaagatgaaggactatgacctgcgggcagatgccatcagcatcaagagcgccaaggccagccgggacatcgccagtgactacaagtacaaggaggcctatgagaagcagaagggccaccacatcggggcccagagcattgaagatgaccccaagatcatgtgtgccatccatgctgggaagatccagagcgagcgggagtacaagaaggagttccagaagtggaagaccaagttcagcagccctgtggacatgctgagcatcctgctggccaagaagtgccagaccctggtgacagacatcgactacagaaactacctgcacgagtggacctgcatgccagaccagaatgacatcatccaggccaagaaggcctatgacctgcagagtgatgccctgtacaaggctgacctggagtggctgcggggcatcggctggatgccccagggcagccctgaggtgctgcgggtgaagaatgcccagaacatcttctgtgacagcgtgtaccgcacccctgtggtgaacctgaagtacaccagcatcgtggacaccccagaggtggtgctggccaagagcaatgctgagaacatcagcatccccaagtaccgggaggtgtgggacaaggacaagaccagcatccacatcatgccagacaccccagagatcaacctggcccgggccaatgccctgaatgtgagcaacaagctgtaccgggagggctgggatgagatgaaggccggctgtgatgtgcggctggatgccatccccatccaggccgccaaggccagccgggagatcgccagtgactacaagtacaagctggaccacgagaagcagaagggccactacgtgggcaccctgacagccagagatgacaacaagatccgctgggccctgattgctgacaagctgcagaatgaaagagagtaccgcctggactgggccaagtggaaggccaagatccagagccctgtggacatgctgagcatcctgcacagcaagaacagccaggccctggtgtctgacatggactacagaaactacctgcaccagtggacctgcatgccagaccagaatgatgtgatccaggccaagaaggcctatgagctgcagagcgacaacgtgtacaaggctgacctggagtggctgcggggcatcggctggatgcccaatgattctgtgtctgtgaaccacgccaagcacgccgctgacatcttcagcgagaagaagtaccgcaccaagattgagaccctgaacttcacccctgtggatgacagagtggactatgtgacagccaagcagagcggggagatcctggatgacatcaagtacaggaaggactggaatgccaccaagagcaagtacaccctgacagagacccccctgctgcacacagcccaggaggccgcccgcatcctggaccagtacctgtacaaggagggctgggagcggcagaaggccaccggctacatcctgcccccagatgctgtgccctttgtgcacgcccaccactgcaatgatgtgcagagcgagctgaagtacaaggccgagcacgtgaagcagaagggccactacgtgggcgtgcccaccatgagagatgaccccaagctggtgtggtttgagcacgccggccagatccagaatgaaagactctacaaggaggactaccacaagaccaaggccaagatcaacatcccagctgacatggtgtctgtgctggccgccaagcagggccagaccctggtgtctgacatcgactacagaaactacctgcaccagtggatgtgccacccagaccagaatgatgtgatccaggccaggaaggcctatgacctgcagagcgacaacgtgtacagagctgacctggagtggctgcggggcatcggctggatccccctggacagcgtggaccacgtgcgggtgaccaagaaccaggagatgatgagccagatcaagtacaagaagaatgccctggagaactaccccaacttccgctctgtggtggaccccccagaaattgtgctggccaagatcaacagcgtgaaccagagtgatgtgaagtacaaggagaccttcaacaaggccaagggcaagtacaccttctccccagacaccccccacatcagccacagcaaggacatgggcaagctgtacagcaccatcctgtacaagggggcctgggagggcaccaaggcctacggctacaccctggatgagcgctacatccccatcgtgggcgccaagcacgccgacctggtgaacagcgagctgaagtacaaggagacctatgagaagcagaagggccactacctggccggcaaggtgattggagagttccctggggtggtgcactgcctggacttccagaagatgaggtctgccctgaactacaggaagcactatgaggacaccaaggccaacgtgcacatccccaatgacatgatgaaccacgtgctggccaagcgctgccagtacatcctgagtgacctggagtaccgccactacttccaccagtggaccagcctgctggaggagcccaacgtcatccgggtgagaaatgcccaggagatcctgagtgacaacgtgtacaaggatgacctgaactggctgaagggcatcggctgctacgtgtgggacaccccccagatcctgcacgccaagaagagctatgacctgcagagccagctgcagtacacagctgctgggaaggagaacctgcagaactacaacctggtgacagacacccccctgtatgtgacagctgtgcagagcggcatcaatgccagcgaggtgaagtacaaggagaactaccaccagatcaaggacaagtacaccaccgtgctggagaccgtggactatgacaggaccaggaacctgaagaacctgtacagcagcaacctgtacaaggaggcctgggacagagtgaaggccaccagctacatcctgcccagcagcaccctgagcctgacccacgccaagaaccagaagcacctggccagccacatcaagtaccgggaggagtatgagaagttcaaggccctgtacaccctgcccaggtctgtggatgatgaccccaacacagcccgctgcctgcgggtgggcaagctgaacatcgaccggctgtacagatctgtgtatgagaagaacaagatgaagatccacatcgtgcctgacatggtggagatggtgacagccaaggacagccagaagaaggtgtctgaaattgactaccgcctgcggctgcacgagtggatctgccacccagacctgcaggtgaatgaccacgtgaggaaggtgacagaccagatcagtgacatcgtgtacaaggatgacctgaactggctgaagggcatcggctgctacgtgtgggacaccccagagatcctgcacgccaagcacgcctatgacctgagagatgacatcaagtacaaggcccacatgctgaagaccagaaatgactacaagctggtgacagacacccctgtgtatgtgcaggccgtgaagagcggcaagcagctgagtgatgctgtgtaccactatgactatgtgcacagcgtgcggggcaaggtggcccccaccaccaagacagtggacctggaccgggccctgcacgcctacaagctgcagagcagcaacctgtacaagaccagcctgcggaccctgcccaccggctaccgcctgcccggggacaccccccacttcaagcacatcaaggacacccgctacatgagcagctacttcaagtacaaggaggcctatgagcacaccaaggcctacggctacaccctgggccccaaggatgtgccctttgtgcacgtgcggcgggtgaacaacgtgaccagcgagcggctgtaccgggagctgtaccacaagctgaaggacaagatccacaccaccccagacaccccagagatccggcaggtgaagaagacccaggaggccgtgtctgagctgatctacaagagtgacttcttcaagatgcagggccacatgatcagcctgccctacaccccccaggtgatccactgccgctacgtgggggacatcaccagtgacatcaagtacaaggaggacctgcaggtgctgaagggcttcggctgcttcctgtatgacaccccagacatggtgcgcagccgccacctgaggaagctgtggagcaactacctgtacacagacaaggccaggaagatgagggacaagtacaaggtggtgctggacaccccagagtacaggaaggtgcaggagctgaagacccacctgtctgagctggtgtacagagctgctgggaagaagcagaagagcatcttcacctctgtgcctgacaccccagacctgctgcgggccaagaggggccagaagctgcagagccagtacctgtatgtggagctggccaccaaggagcggccccaccaccacgccggcaaccagaccacagccctgaagcacgccaaggatgtgaaggacatggtgtctgagaagaagtacaagatccagtatgagaagatgaaggacaagtacacccctgtgcctgacacccccatcctgatccgggccaagagggcctactggaatgccagtgacctgcgctacaaggagaccttccagaagaccaagggcaagtaccacacagtgaaggatgccctggacatcgtgtaccacaggaaggtgacagatgacatcagcaagatcaagtacaaggagaactacatgagccagctgggcatctggaggagcatcccagacaggcctgagcacttccaccacagagctgtgacagacacagtgtctgatgtgaagtacaaggaggacctgacctggctgaagggcatcggctgctacgcctatgacaccccagacttcaccctggccgagaagaacaagaccctgtacagcaagtacaagtacaaggaggtgtttgagaggaccaagagtgacttcaagtatgtggccgacagccccatcaacagacacttcaagtatgccacccagctgatgaatgagaagaagtacagagctgactatgagcagaggaaggacaagtaccacctggtggtggatgagcccaggcacctgctggccaagacagctggggaccagatcagccagatcaagtacaggaagaactatgagaagagcaaggacaagttcaccagcatcgtggacaccccagagcacctgcggaccaccaaggtgaacaagcagatcagtgacatcctgtacaagctggagtacaacaaggccaagccccggggctacaccaccatccatgacacccccatgctgctgcacgtgaggaaggtgaaggatgaggtgtctgacctgaagtacaaggaggtgtaccagaggaacaagagcaactgcaccattgaaccagatgctgtgcacatcaaggccgccaaggatgcctacaaggtgaacaccaacctggactacaagaagcagtatgaggccaacaaggcccactggaagtggaccccagacagaccagacttcctgcaggccgccaagagcagcctgcagcagagcgactttgagtacaagctggaccgggagttcctgaagggctgcaagctgtctgtgacagatgacaagaacacagtgctggccctgaggaacaccctgattgaaagtgacctgaagtacaaggagaagcacgtgaaggagcggggcacctgccacgctgtgcctgacaccccccagatcctgctggccaagacagtgagcaacctggtgtctgagaacaagtacaaggaccacgtgaagaagcacctggcccagggcagctacaccaccctgcctgagacccgggacacagtgcacgtgaaggaggtgaccaagcacgtgtctgacaccaactacaagaagaagtttgtgaaggagaagggcaagagcaactacagcatcatgctggagcccccagaggtgaagcacgccatggaggtggccaagaagcagagtgatgtggcctacaggaaggatgccaaggagaacctgcactacaccaccgtggccgacagaccagacatcaagaaggccacccaggccgccaagcaggccagcgaggtggagtaccgggccaagcacaggaaggagggcagccacggcctgtccatgctgggccgcccagacatcgagatggccaagaaggccgccaagctgagcagccaggtgaagtacagagaaaattttgacaaggagaagggcaagacccccaagtacaaccccaaggacagccagctgtacaaggtgatgaaggatgccaacaacctggccagcgaggtgaagtacaaggctgacctgaagaagctgcacaagcctgtgacagacatgaaggagagcctcatcatgaaccacgtgctgaacaccagccagctggccagcagctaccagtacaagaagaagtatgagaagagcaagggccactaccacaccatcccagacaacctggagcagctgcacctgaaggaggccacagagctgcagagcatcgtgaagtacaaggagaagtatgagaaggagcggggcaagcccatgctggactttgagacccccacctacatcacagccaaggagagccagcagatgcagagcggcaaggagtacaggaaggactatgaggagagcatcaagggcaggaacctgaccggcctggaggtgaccccagccctgctgcacgtgaagtatgccaccaagatcgccagcgagaaggagtacaggaaggacctggaggagagcatccggggcaagggcctgacagagatggaggacaccccagacatgctgcgggccaagaatgccacccagatcctgaatgagaaggagtacaagagggacctggagctggaggtgaagggccggggcctgaatgccatggccaatgagaccccagacttcatgagggccagaaatgccacagacatcgccagccagatcaagtacaagcagagcgctgagatggagaaggccaacttcacctctgtggtggacaccccagagatcatccacgcccagcaggtgaagaacctgagcagccagaagaagtacaaggaggatgctgagaagtccatgagctactatgaaacagtgctggacaccccagagatccagagggtgcgggagaaccagaagaacttcagcctgctgcagtaccagtgtgacctgaagaacagcaagggcaagatcaccgtggtgcaggacaccccagagatcctgcgggtgaaggagaaccagaagaacttcagctctgtgctgtacaaggaggatgtgtccccaggcacagccatcggcaagaccccagagatgatgagggtgaagcagacccaggaccacatcagctctgtgaagtacaaggaggccatcggccagggcacccccatcccagacctgcctgaggtgaagagggtgaaggagacccagaagcacatcagctctgtgatgtacaaggagaacctgggcaccggcatccccaccaccgtgaccccagaaattgaaagagtgaagaggaaccaggagaacttcagctctgtgctgtacaaggagaacctgggcaagggcatccccacccccatcaccccagagatggagcgggtgaagaggaaccaggagaacttcagctctgtgctgtacaaggagaacatgggcaagggcacccccctggccgtgaccccagagatggagcgggtgaagcacaaccaggagaacatcagctctgtgctgtacaaggaaaatgtgggcaaggccacagccacccctgtgaccccagagatgcagagggtgaagaggaaccaggagaacatcagctctgtgctgtacaaggagaacctgggcaaggccacccccacccccttcaccccagagatggagcgggtgaagaggaaccaggagaacttcagctctgtgctgtacaaggagaacatgaggaaggccacccccacccctgtgaccccagagatggagcgggccaagaggaaccaggagaacatcagctctgtgctgtacagcgacagcttcaggaagcagatccagggcaaggccgcctacgtgctggacaccccagagatgagaagagtgcgggagacccagaggcacatcagcacagtgaagtaccacgaggactttgagaagcacaagggctgcttcacccctgtggtgacagaccccatcacagagcgggtgaagaagaacatgcaggacttcagtgacatcaactaccggggcatccagaggaaggtggtggagatggagcagaagagaaatgaccaggaccaggagaccatcaccggcctgcgggtgtggaggaccaaccctggctctgtgtttgattatgaccctgctgaggacaacatccagagccgcagcctgcacatgatcaacgtgcaggcccagaggaggagccgggagcagagccgcagcgccagcgccctgagcatctctggaggagaggagaagtctgagcacagcgaggccccagaccaccacctgagcacctacagtgatggcggcgtgtttgctgtgtccacagcctacaagcacgccaagaccacagagctgccccagcagaggagcagctctgtggccacccagcagaccaccgtgagcagcatccccagccaccccagcacagctgggaagatcttccgggccatgtatgactacatggccgcagatgctgatgaggtgtccttcaaggatggagatgccatcatcaacgtgcaggccattgatgagggctggatgtatggaacagtgcagaggactggaagaacaggcatgctgcctgccaactacgtggaggccatctag

SEQ ID NO: 147361 - DNA, 20010 bp, Artificial Sequence
  derived and/or modified sequence
atggccgacgacgaggactacgaggaggtggtggagtactacaccgaggaggtcgtgtatgaggaggtcccgggcgaaacaattactaaaatttatgagaccactacaacccggacctccgactacgagcagtctgaaacttctaagcctgccctcgcccagccagctctcgcccagcctgcgtcggcaaagcctgttgagcggagaaaagtgataaggaagaaagtcgacccaagtaaattcatgaccccctatatcgctcactcccagaagatgcaggacctgttctctcccaacaagtacaaggagaaatttgagaagaccaaagggcagccctacgccagcaccaccgataccccagagttacgaagaatcaaaaaggttcaggatcaattatcggaggtgaaataccgcatggacggcgacgttgccaaaactatttgtcatgttgacgagaaagcgaaggatatcgaacacgccaagaaagtaagccaacaggtaagcaaggttctctataaacagaattgggaagacacaaaagataagtaccttctgcctcccgatgcgcccgagctggtccaggccgtgaagaatactgccatgttttctaagaagttgtacaccgaagactgggaggcagacaagtctcttttttacccgtataacgacagtccagagctccggagagtggcacaggctcaaaaagctctctctgatgtggcttacaagaagggactcgcggagcaacaagcccagttcacaccactggctgatcctcctgacattgaattcgccaagaaagtcaccaaccaggtctcaaagcagaagtacaaggaggattacgagaataagatcaagggtaagtggagcgagacgccctgtttcgaggtggccaacgcacgaatgaacgcggataatattagcactcgcaaatatcaggaggactttgaaaacatgaaggaccaaatatacttcatgcagacagagacaccagaatataaaatgaacaagaaagctggcgttgcagccagtaaagtcaaatataaagaagattacgagaagaacaaaggtaaggctgattataacgtgctgccggccagcgagaaccctcagctgaggcaactcaaggcagcgggagatgctctctctgacaagctatacaaggagaactacgagaagacgaaggctaaaagcataaactactgtgaaaccccaaagtttaagctggacactgtgctgcagaactttagcagcgataaaaagtataaagactcatacctgaaagacattcttgggcactacgtgggctccttcgaggatccttatcactctcactgtatgaaagtaacagcacagaattccgataagaattacaaggctgaatacgaagaggaccgtggcaaggggttctttcctcagaccattacgcaagagtacgaagccattaaaaaattagatcagtgtaaggaccatacgtacaaggttcatccggataaaacaaaatttacccaagtcaccgactcccctgtgctcctgcaagcacaggtgaactcaaaacagctctccgacctgaattacaaggcgaagcacgaatctgagaaattcaaatgccatattcctccagacacccctgcctttatccagcacaaggttaatgcctacaacctttctgataacctctacaagcaagactgggaaaagtctaaagcgaaaaagtttgacatcaaggtggacgcaatccccctcctggctgccaaggctaacacaaagaacacttctgatgttatgtataaaaaggactatgagaagaataaggggaagatgatcggcgtgctatccattaatgatgaccctaaaatgcttcattcccttaaagtcgccaagaaccagtcagacagactctataaggaaaactatgagaaaaccaaagctaagtcaatgaattattgcgagactcctaagtaccaattggacacccagttgaagaacttcagtgaagctagatacaaggacctctatgtgaaagatgttctcgggcattacgtgggctcgatggaggacccctaccatacacattgtatgaaggtcgcggctcagaatagcgacaaaagctacaaagccgaatacgaagaagataagggaaagtgctacttcccacagactatcacacaagaatatgaggcgattaaaaaattagaccaatgcaaagaccatacctacaaggtgcatccagacaaaacaaagtttaccgccgttacagattctccagttcttctccaagcccagttgaataccaaacagctctcagacctcaactacaaggccaagcacgagggtgaaaagtttaagtgccacattccagctgatgctccacagttcattcaacaccgggtcaatgcgtacaatctatccgataacgtgtacaagcaggactgggagaagtctaaagccaagaaattcgatataaaagttgatgccataccgttgctggccgctaaagcaaatactaagaacacctcggatgttatgtataagaaggactatgaaaagtcaaagggcaaaatgattggcgccctgtcaattaacgatgatccgaagatgctgcattccttaaaaacggcgaaaaaccagtcggaccgtgagtaccgaaaggactacgagaagagcaaaaccatctataccgccccacttgacatgctgcaggtgactcaagccaagaaaagccaggctattgccagcgacgtcgattacaagcatatcctgcacagttacagttaccctcctgacagcattaacgtcgacctggccaagaaggcttatgctctgcaatccgacgtggagtataaagctgactacaattcatggatgaagggctgcggctgggttccattcggttctcttgaaatggaaaaagcaaaaagggccagcgatatactcaatgagaaaaagtaccgtcaacacccagacaccctgaagttcacttccattgaggatgcccctattactgtgcagtcgaaaataaatcaggcgcagcggtctgacatcgcctataaggccaagggggaagagatcattcacaaatacaacctcccaccggatctcccccagtttattcaggctaaagtgaatgcatataatatctcagagaatatgtataaagcagacctgaaggacctgtctaaaaaaggctatgacttgcggacggatgctatcccaatcagggcagccaaggccgcccgccaggctgctagcgatgtgcagtacaaaaaggattacgagaaagcaaaaggtaaaatggtaggcttccagtctctgcaggacgatccaaaacttgtgcactacatgaatgttgcaaaaatccagtcagacagggagtataaaaaagattacgaaaaaaccaagtcaaagtacaacactcctcacgatatgtttaacgtcgtcgccgcgaaaaaggcccaggatgtggtgtcaaacgtaaattacaaacattcactgcatcactacacatacctgccagatgctatggatctggagttgtcgaaaaatatgatgcagattcagtccgataatgtctacaaagaggattacaacaattggatgaaggggatcgggtggattccaatcggtagcctggacgtggagaaggtcaagaaagcaggagacgcactcaatgagaagaaatacagacagcatcctgacaccctgaagtttactagcattgtggacagccctgtgatggtacaagccaaacagaatacaaaacaagttagtgatattttatataaagcaaagggagaagacgtgaaacataaatatactatgtctccagacctgcctcaatttctgcaggctaagtgcaatgcctataatataagcgacgtgtgttacaagagggactggtatgacctcattgccaaggggaataacgtcctgggagacgccattccgatcacagcagccaaggccagtaggaacattgcatcggactacaagtacaaagaggcgtatgagaagagcaaaggtaaacatgtgggttttcgaagtctccaggacgaccctaagctggtgcactatatgaacgtcgctaagctgcagagtgaccgggagtataagaaaaattacgaaaatacaaaaacctcctaccatacacccggggatatggtaagtatcacagccgcgaagatggcacaggacgtagccaccaacgttaattacaagcagcctctacaccactatacttaccttccagacgccatgtctctggaacacacccggaatgtgaatcagatccagagcgacaatgtctataaagacgagtacaactcctttcttaagggcatagggtggatccctatagggtcactggaagtggagaaggtcaaaaaggccggggacgccctcaatgagagaaagtacaggcaacacccggatactgtaaaatttacatctgtgcccgacagcatgggtatggtgctagcgcagcataatacaaaacagctgagtgatctgaattataaagtagaaggagagaaactgaagcacaagtacaccatcgatcctgaactgccgcagttcatccaagccaaggtcaacgcgctcaacatgagcgacgcccattacaaagctgattggaagaaaacaattgccaaggggtatgatcttcggcccgacgccatccccatcgtggccgccaaatcaagccggaatattgcatctgactgcaagtacaaggaagcgtatgagaaggccaagggtaagcaggtgggctttctctctcttcaagatgaccctaagcttgtgcactacatgaatgtggcaaagatccagtctgaccgcgagtataaaaagggctacgaagccagtaagactaaataccatactcccttggacatggtcagcgtaactgcagccaagaagagtcaggaggtcgctaccaatgctaattaccgccagtcataccatcactacacgctgctaccagacgcattgaacgtagaacactcacgtaacgctatgcagatccagagcgataacctgtacaaatctgatttcacaaactggatgaagggtataggttgggttccaatcgagtctctggaggtcgagaaagccaagaaggcaggagagattctgtctgagaaaaagtatcgacagcaccctgaaaagcttaaatttacctatgctatggatactatggagcaggccctgaataaatcgaacaaattgaacatggataaacggctttacaccgaaaagtggaataaggacaagacgactatccatgtcatgccagatacccccgacattttactgagtcgggtaaaccagatcacgatgtcggacaagctgtacaaggccgggtgggaggaagagaaaaagaaagggtatgatttgaggcctgacgctatcgctatcaaagcggccagagccagtagggacatagcctcagattacaagtataaaaaggcctacgagcaagcaaaggggaaacacattggatttaggtcgcttgaggatgatccaaaactggttcattttatgcaagtggccaaaatgcagtccgatcgcgagtataagaaagggtacgagaagagcaagacaagtttccacacacccgttgacatgctctcagtagtcgctgccaagaaatcccaggaagtggcaaccaacgctaattacagaaatgtgatccacacttataatatgcttcccgacgcaatgtctttcgagctcgcgaaaaatatgatgcagattcagtcggataaccagtacaaggccgactatgcagactttatgaagggcattggctggctgcctctcggaagtctcgaagctgagaagaacaagaaagctatggagataatctctgaaaagaagtataggcagcacccagacaccctgaaatactcgaccctcatggacagcatgaacatggtgttagcacagaacaatgctaaaataatgaatgagcatctgtacaaacaggcctgggaagcagacaagaccaaggtgcacataatgcctgacattccgcagataattctggccaaggcgaatgcaattaacatgtccgataagctgtacaagttgtccctggaggagagcaagaagaaggggtacgaccttaggccggacgctattcccattaaggcagccaaagcaagcagggatatcgcctccgactataagtataagtataattacgagaaaggtaaaggcaagatggttgggtttcggtcactcgaagatgatccaaagctggtccacagcatgcaggttgcaaagatgcaaagtgatagagaatataaaaagaattatgaaaataccaaaacatcctaccacacccccgctgacatgttaagtgtcacagctgcaaaagatgcacaggccaacataaccaacacgaattataaacatctgatccacaagtatatactgttgccagatgcaatgaatattgaacttactaggaacatgaaccgaatccagagcgataacgaatacaaacaggattacaatgaatggtacaaaggcctggggtggtccccagccgggtccctggaggtggaaaaagccaagaaagccacggagtacgcttcggatcagaaatacagacaacaccccagcaattttcaattcaaaaaactaacggactctatggatatggtgttagccaaacagaacgcccacaccatgaataagcacctttatacaattgactggaataaggacaagacaaaaattcacgttatgccggatacaccggacatcctgcaggctaagcagaaccagacgctgtactcccagaaattgtataagctgggctgggaagaggcgttaaaaaagggttatgatctgcctgtggacgctatctcggtgcagttagccaaagcaagccgcgatatagcctccgactacaagtacaagcaggggtatcggaaacagctaggccatcacgttggctttaggtctctgcaggacgatcctaagctcgtgctgagcatgaacgttgcgaaaatgcagagcgagagggaatacaaaaaagattttgagaaatggaaaacaaagttcagctctcctgtggatatgctaggggttgtgttggccaagaagtgtcaggagctcgtaagcgacgttgactataaaaattatctccatcagtggacatgtttgccagaccagaatgacgtggtgcaggccaagaaggtttatgagctgcagagcgagaacttgtataagagtgacctggagtggttacggggcattggctggagcccgcttgggagtttagaggcagagaaaaacaagagggcgtctgaaattatttcagaaaaaaaatatagacagccacctgatcgtaataaatttacatctataccagatgcgatggacatcgtgctagcaaaaactaatgccaaaaataggtccgatagactttacagagaggcttgggacaaggacaaaactcagattcatattatgccagatactccggatattgttcttgctaaagcaaatttgatcaataccagtgacaaattgtaccggatgggctatgaagagttgaagagaaagggctacgatttgcccgtggatgcaattcctatcaaggcggcaaaggccagccgagagattgcatccgagtacaaatacaaggaagggttccgtaagcaattgggtcaccatattggggctcgcaatatcgaagacgatcccaaaatgatgtggagcatgcatgtggctaaaatccagtccgaccgcgagtacaagaaagattttgagaagtggaagacaaagttctcctctccagtggatatgctgggcgttgtcctggccaagaaatgccaaactctcgtgagtgatgtcgattataaaaattatctgcaccaatggacttgcttgcccgaccagagtgacgtcatccacgcaagacaggcgtatgacctccagtccgataatctgtataagtcagatttgcaatggttaaaaggtataggttggatgacgtccggttcactcgaggatgaaaagaacaagagggctacacagatccttagcgaccacgtctaccgccaacaccctgaccagtttaagttctcctccttgatggattccattcccatggtgttggcgaagaataacgccataacaatgaaccaccggctctacaccgaggcctgggataaagataaaaccactgtccacataatgccagacacgcccgaggttctcctggccaaacagaacaaggtcaattactctgagaagctgtataaattaggattagaagaggccaaaagaaaagggtacgacatgagagtggatgcaataccaattaaggccgctaaagccagccgcgacattgcgagtgagtttaagtataaagagggctatcgtaaacaactgggccaccacattggggctcgcgccatacgcgatgatccaaagatgatgtggagcatgcacgttgctaagatccagtctgatagagagtacaaaaaagatttcgaaaagtggaagactaagttttcgtccccagttgatatgctgggtgtggtcctcgccaaaaaatgtcagaccctcgtctccgacgttgactacaagaattatctccaccagtggacttgtctcccagatcagagtgacgtcatccacgcccgccaggcttatgatctgcagtctgacaacatgtataagagtgatctccaatggatgagaggtattggatgggtgtctatcggatcacttgatgtcgaaaaatgtaaacgggctacagagatcctctcagacaagatttatcgccagcctcctgatcgctttaagttcacatcagttactgacagccttgagcaggtgctggctaaaaataacgcaatcacaatgaacaagcggctgtacacggaggcatgggacaaagataagacacagattcatattatgcccgatacacccgagattatgctagcccgccagaataagattaactacagcgagaccctgtataagctcgccaacgaggaggctaagaaaaaggggtacgacctgaggtctgacgccatcccaatcgtggcggccaaggcctctcgggacgtgatctctgactataaatacaaagatgggtaccggaagcagcttggacaccacattggcgcccggaacatcgaggacgatcctaaaatgatgtggtccatgcatgttgccaagatccagtccgatcgcgagtataagaaggatttcgagaagtggaaaacaaagttctcttctcccgtcgatatgctaggcgtggttctggctaaaaagtgccaaacactcgtctcagatgtagattataagaactacctacatgagtggacttgtcttcctgatcagaatgatgtaattcatgctcgccaagcatatgacctccagagcgataatatctataagtcagacctccagtggctacgcgggattggctgggtaccaattgggtccatggatgtagttaaatgtaagcgagcagccgaaatcctgtcggacaacatctatcgtcagccgcccgataagctcaaatttacctctgtgaccgattccctggagcaggtgctagctaaaaacaatgcgttgaacatgaacaagcgtctttacactgaagcttgggacaaagataagactcaggtgcacatcatgccggacacaccagagattatgctcgcacgtcaaaacaaaatcaactattcggagtccttgtataggcaggccatggaggaggctaaaaaggaggggtatgatctacgcagcgacgctatcccaatagtggcggccaaagcttcccgtgacattgcatccgactacaagtataaggaagcatatcggaagcagctcggacaccacattggtgcacgagcagtgcacgacgacccaaaaatcatgtggtcacttcacattgctaaggtgcagtctgatcgcgaatacaaaaaggactttgaaaagtataaaacccggtatagcagccccgtcgacatgctggggatagtgctggcaaagaaatgccaaacattggtttccgatgttgactataagcacccgctccatgagtggatctgtttacctgatcaaaatgatatcatccacgcccgcaaggcttacgatctgcagtctgataacttgtacaagagcgacttagaatggatgaagggcatcggatgggtgcccattgattctctcgaagtggtgagagccaaaagggccggggaattgctaagcgatactatctaccggcagaggcccgagacactgaaatttacctctataaccgataccccagagcaggtgctcgcaaaaaataatgcgctgaatatgaataaacggctctatactgaggcatgggataatgataagaagacaattcacgtgatgcccgacacgccggagattatgctcgccaagctgaatagaatcaattattccgacaagctctacaaactggccctggaggaatctaagaaggaaggatacgacctacgtcttgacgccatcccgattcaggccgctaaagccagccgagatattgcttccgattacaagtacaaagaaggataccgtaaacagttgggccaccacattggtgcccggaatataaaggacgaccctaagatgatgtggtcgatccatgttgcaaaaatccagagtgacagagagtacaagaaggaatttgaaaagtggaagaccaagttcagcagccccgtcgacatgctcggtgtagtgcttgctaaaaaatgccagattctcgtctctgacatcgactacaaacatccactgcacgagtggacctgtctgcctgaccaaaatgacgtaatccaggcccgaaaggcatacgatttacaatctgacgccatctacaagtcagatctggagtggctccgaggaatcggatgggtgccgatcgggagtgttgaggtggaaaaggtaaagagggccggagagatcctgtccgatcggaagtacagacagccagcagaccaacttaagttcacctgcattaccgacacccctgagattgtactggcgaagaacaacgcccttacaatgagcaagcacctctataccgaggcctgggatgcagacaaaactagtatacacgtgatgccggatacacccgatatcctgttggcaaagtctaattcggcgaatatttcacagaaactgtacactaaaggttgggacgagtcgaaaatgaaagactacgacctccgcgccgatgccatttctatcaaatcagctaaggcaagccgggatattgcctccgattacaaatataaggaagcctacgaaaagcagaagggccatcatattggagcccagtctatcgaagacgacccgaaaatcatgtgcgccatccatgctgggaagatccagagcgagagagagtataagaaagaattccagaaatggaagacaaagttcagctctccagtcgatatgttaagcattctcttggcaaagaagtgccaaacactggtcactgatattgactatcggaactacctgcacgagtggacgtgtatgcctgaccagaatgatattatacaggctaaaaaggcctatgacttgcagagcgacgcgttatacaaggcagatttggagtggcttcggggcatcggttggatgccacagggctccccagaagtccttcgagtcaaaaatgctcagaatatcttttgcgactctgtgtatagaactcccgtggtgaatctgaagtacacttccatagtcgatacacctgaagtcgtcctcgccaagtcaaacgccgagaatatctctattcctaagtaccgcgaggtgtgggacaaagacaaaacaagcattcatatcatgcctgataccccagagattaacctcgctcgcgctaacgccttgaatgtgtccaataaactgtaccgcgagggttgggacgagatgaaagccggctgtgacgtgcgcttagacgctatccccattcaggcggctaaagcaagccgtgaaatagcttccgactataaatacaagttagatcatgagaaacagaagggccactacgtaggaactttgacagcccgcgatgacaataagatccgatgggccctgattgctgacaaattacagaacgagagagagtatcggctggactgggccaaatggaaggccaaaatccagagcccggtggatatgctcagcatcctgcatagtaagaacagccaggccttggtcagcgacatggactatcggaattacctgcaccagtggacttgcatgcctgaccagaatgatgtgatccaggccaagaaagcatacgaactccagtccgataacgtgtacaaggcagacctggagtggttacgaggtataggctggatgccgaatgatagcgtgtccgtgaatcacgccaagcacgcagcggatatcttcagcgagaagaaataccgaaccaagattgaaaccttgaatttcactccagtagacgatcgcgtcgattacgtcaccgccaagcaatccggagaaattctggacgacataaagtacaggaaggattggaatgcgactaaatcaaagtacacactcacggagactcctcttcttcacactgcacaggaggccgcaagaatcttggaccagtacttgtataaagaagggtgggaacgtcagaaagcaactgggtacatcctcccaccagacgccgttccttttgtgcacgcacaccattgcaacgacgttcagtctgagctcaagtataaagctgagcacgtaaaacagaaaggacattacgttggggtgcctacaatgcgtgacgaccctaagttagtgtggtttgagcatgccggtcaaattcaaaatgagaggctttacaaagaggactaccataaaaccaaggctaagatcaatattccggccgatatggtcagtgtcctggcagccaagcagggacagacactggtcagcgatatcgactatcgtaactacctccaccagtggatgtgccacccggatcagaacgacgtaattcaggccaggaaagcgtatgacctgcagtcagacaacgtgtaccgcgctgatctggaatggctccgtggaatcgggtggattccactcgattcagtagatcatgtaagggtgaccaaaaaccaagagatgatgagccagattaaatacaagaaaaacgctctcgaaaattatcccaatttcaggtcagtggtagatcctccagaaatcgtcctggccaagataaattctgtcaatcagagtgacgtcaagtataaagagaccttcaataaggctaaaggcaaatacactttctcgccagatactccacatattagccacagcaaagacatggggaagctctacagcaccattctgtacaaaggtgcatgggaggggacaaaggcgtacggatacactctggacgaacggtacatcccaatagtcggggcaaagcacgcggacttagtcaactctgaactgaaatacaaggagacttatgaaaaacagaaaggccattatctcgccggcaaggtcatcggagaattccccggcgtggtccactgcctcgattttcagaaaatgaggtctgcgctgaattatcgaaagcattacgaagataccaaagccaacgtccatatcccgaatgatatgatgaaccatgtcttagcaaagcggtgtcagtatatcctcagtgacttagagtacaggcactattttcaccagtggaccagcctgctggaagaacccaacgtgatccgagttagaaatgcccaggaaatattaagtgacaacgtatacaaggatgacctgaattggctgaaagggattggatgttacgtgtgggacacgcctcaaatcctgcatgccaaaaaatcttatgacctccagagtcaactccaatacaccgcagctggcaaggagaatctgcaaaactacaatttggtcaccgatacgcctctgtacgtaaccgctgtgcagtccggtatcaacgcaagcgaagtaaagtataaagaaaactatcatcagataaaagacaaatacaccacggtgctggagacggttgattacgatcgaaccagaaacttgaaaaacttatattcctcaaatctctacaaagaagcttgggaccgggtgaaagccacatcctatattctccctagctctacgttatcactgacacacgccaagaatcagaagcacctggcgtctcacatcaaatatagggaggagtatgagaagtttaaagcgctgtacaccctacccagatcggtggatgacgatcctaataccgccaggtgcctcagggtcggcaagctgaacatcgatagactctatcggtcagtttacgaaaaaaataagatgaaaatccatattgtccccgacatggtcgagatggtgactgctaaggattcacaaaagaaggtttcagagatcgactatcgcctgcgactccacgagtggatttgccacccagacctccaggttaatgaccatgtgcggaaagtgactgaccagatcagcgacatcgtgtataaagacgacctgaattggttgaagggcattggatgctatgtgtgggacactcccgagattttgcatgcgaagcatgcctacgacctaagggatgatatcaaatataaggctcatatgctaaagacacggaacgattataagttggttaccgacactcctgtctacgtgcaggcagtgaagagcggaaagcagctctccgacgctgtctaccactacgattatgtacactccgtgcggggtaaagtcgcccccaccactaagaccgtggacttggaccgcgcactgcacgcttataagctgcagtccagtaacttgtacaagacctctctccgcacgttacctaccggatataggctgcccggcgatactccacattttaaacatatcaaggatacccggtacatgagttcgtatttcaagtacaaggaggcctatgagcacactaaggcttacggctacactctcggccctaaggacgtcccgtttgttcacgtgaggagggtgaataatgtcactagtgagcggctgtatcgcgagctgtaccacaaactaaaagataagattcatacaactcctgataccccagagataagacaggtgaaaaaaactcaagaggccgtgtcagaactaatttacaagtccgacttctttaagatgcagggacatatgattagcttgccttacactccacaggtgattcattgccgatacgttggagacattacctcggatatcaagtacaaggaagacttacaggtgcttaagggtttcggatgtttcctatacgataccccagacatggtacggtcacgacacctccgcaagctgtggtctaactacctgtataccgataaagcgcggaagatgagggacaagtacaaggtagtgctggatacccccgagtatagaaaagtgcaggagctgaagacccacctctccgagcttgtctaccgggcagcaggaaaaaagcagaaaagcatcttcacgtcagtgcctgacacccccgatctcctaagagccaagcggggacagaagctacagtcacagtacctttacgtagaactggccacgaaggaacgcccgcaccaccacgcgggaaatcagactaccgccctgaagcacgctaaagatgttaaggacatggtctctgaaaaaaagtacaagatccaatacgagaaaatgaaagataagtatacccctgtgcctgacacacccattcttattagagccaagagagcctattggaatgcatccgatctccgatacaaagagacatttcagaagaccaagggtaagtaccacaccgttaaagacgccctcgacatcgtgtatcatagaaaagtcaccgatgacatcagcaagatcaagtataaagagaattacatgagccaactggggatctggcggtccattccagataggccggaacacttccatcacagggcagtgacagataccgtgagtgacgtaaaatataaggaagatctcacctggctgaagggcatcgggtgctacgcatatgatactccggactttacactggctgagaagaataagactttatactctaagtacaagtacaaggaggtgttcgagcggactaagagtgacttcaagtacgtggcggattcccctatcaatagacatttcaagtacgctacacagctgatgaatgagaaaaagtaccgggcagactatgaacaaaggaaggacaaataccaccttgtggtagatgagcctaggcacttgctggccaaaacagccggagatcagatctcccaaattaagtaccgaaagaactacgagaaaagcaaggacaaatttacttccattgtcgatactcctgagcaccttaggactaccaaagtcaataagcagattagtgatattctctataagctggaatataacaaggccaagcctcgcggctacaccactatccatgatactcccatgctgttacacgtcaggaaggtaaaggatgaagtttcggatcttaagtacaaagaagtgtaccagaggaacaagtctaattgcaccatagagcccgacgctgtgcacataaaggcagccaaggacgcttataaggttaataccaacctggactataaaaaacaatacgaagctaacaaagcccattggaaatggacgcccgaccgtcctgatttcctgcaggcggctaaatcttcgctgcagcagagtgattttgagtacaaacttgacagagaatttctgaagggatgcaaactaagcgttacagatgataaaaacactgtgctcgccctgagaaacacattgattgaatcggaccttaagtataaggaaaagcacgtgaaagaaagagggacctgccatgcagttcctgacacaccccagatccttcttgcaaagacggtatctaacctcgtcagcgaaaacaaatacaaggaccacgtgaaaaagcatctcgctcaagggtcctatacgacactgccagagactcgagatacagtgcatgttaaagaagtcacgaaacacgttagcgacacaaattacaagaagaaatttgtcaaagaaaaaggaaaatccaactatagcatcatgctggaacccccggaagtaaagcacgcaatggaggtggcaaagaaacagtcagatgtggcctatcgcaaggacgctaaggagaacctgcattataccacagtggctgacaggccagatattaagaaggctacccaggcggctaagcaggccagcgaagtggagtacagagcaaagcacagaaaagaaggctcccacggactgtcaatgttggggagacccgacattgagatggccaagaaagccgcaaagctcagttcccaggtcaagtaccgtgaaaatttcgacaaggaaaaagggaaaacccctaaatataatcctaaggactctcagctgtacaaagtcatgaaagacgctaacaaccttgctagcgaggtcaaatataaagcagaccttaaaaagctccataagcccgtgactgacatgaaggagtctttaattatgaaccacgtgctgaacacaagtcaactcgctagcagctatcagtataaaaaaaagtatgaaaagtctaagggacactaccacactattcctgataatctcgaacagctccacctgaaagaagcaacagaactccagtccattgtaaagtataaggagaagtatgaaaaagagcggggcaaaccaatgctggactttgaaactcctacttacattactgccaaagaaagccaacagatgcagtcaggcaaggaatatcgtaaggactacgaagaatccataaagggccgcaatctaacaggacttgaggttactcctgccctactgcatgtcaaatatgctacaaagattgcatcggaaaaggagtacaggaaggatttggaggaatcaatccgcggcaagggtttgactgaaatggaagatacccctgacatgctccgggcgaaaaacgcaacccaaatacttaacgagaaggagtacaaacgcgatttggagcttgaagtgaaaggccggggtctcaatgccatggctaatgaaactccagattttatgagggcaaggaacgctaccgatatcgcgagccagatcaagtataagcaatcagctgaaatggaaaaagcaaatttcacttcggtagtggacacccctgagattattcatgctcaacaggtaaaaaatcttagcagtcagaaaaagtataaggaagacgcagaaaagtccatgagctattatgaaactgttttagacacaccagaaatacagcgcgtccgcgaaaatcaaaaaaactttagtctgctgcagtatcagtgtgacctcaagaactcaaagggtaaaatcaccgtggtgcaggataccccagagatcctccgcgtgaaggaaaatcagaaaaatttttcttctgttctatataaggaagatgtgtctcccgggactgcaattggcaaaacacccgagatgatgcgggtgaaacagacacaagatcacatctcgtccgtcaaatacaaggaagctattggccaggggactcctatcccagacttgcctgaagtgaaacgcgtaaaggagacacagaagcacatctcatccgttatgtacaaggagaatctcgggacaggcatccccaccacagtgaccccagaaatcgagagggtgaaacggaatcaagagaatttcagttccgtgctgtacaaagagaatctgggaaaggggatcccgacgcccatcacccccgagatggaaagggtaaagagaaatcaggagaacttctcaagcgttctgtataaggaaaatatgggaaaagggacccccctcgctgtgacgcccgagatggaaagagtcaagcacaaccaagaaaacatttcgtcggtactgtataaggagaacgtgggaaaggccactgctacccccgtcacccccgagatgcagcgagtaaaaaggaaccaggagaacattagttcagtgctatataaggagaacctcggcaaagccacgcctactccctttacccctgagatggagagagtgaaacgcaaccaggagaacttttcgtccgttctatacaaggaaaacatgagaaaagccacacccaccccggtgacccctgaaatggagcgggcaaagagaaaccaggagaacatcagctcggtcctgtatagtgattcgtttagaaagcagattcaaggtaaagctgcttatgtgctagacacacctgagatgagacgggtgcgggagacccagcggcatattagtactgtgaagtatcacgaggatttcgaaaagcataaaggctgctttacccctgtcgtgaccgacccaataactgagagggtgaaaaagaacatgcaggacttttcagacataaactaccgaggcatccagaggaaggttgtcgagatggagcagaaacggaatgatcaggatcaagaaacaatcaccggcttaagagtctggcggacaaacccgggcagcgtttttgactatgatccagcagaggataatattcagtctcgctccctacatatgattaatgtgcaggcccagaggagatctcgtgaacagtcacggagcgccagcgccctatcaatcagtggcggtgaggagaagtccgagcattcagaggcgccagaccaccatctgtcaacttatagcgacggaggtgtctttgccgtctccactgcctacaaacatgccaagaccaccgagttgcctcagcagagatccagctctgttgcgacgcagcaaaccacagtcagtagcattccgtcccatcccagcacagccgggaaaatctttcgggctatgtatgattacatggccgcggacgcggacgaagttagctttaaggacggagatgccattattaacgtgcaggcgatcgacgaaggatggatgtatggcaccgtgcagcgaaccgggaggaccgggatgctgcctgctaactatgtcgaggcgatatag

SEQ ID NO: 147362 - DNA, 20010 bp, Artificial Sequence
  derived and/or modified sequence
atggccgacgacgaggactacgaggaggtggtggagtactacaccgaggaagttgtctacgaagaagttcctggggagaccattaccaaaatctacgaaacgacaacgaccaggacatccgactatgaacaatccgagacttcaaagcctgcactggctcagcctgcactggcccagcccgcttcagcaaagcctgtcgagcgccgaaaagtcatcagaaaaaaagtagatcccagcaagtttatgaccccctacattgcacactcccagaaaatgcaggacctgttttctcctaacaagtacaaagaaaaatttgagaaaacgaaagggcagccatacgcgagtactacagacacgccagaactgaggaggatcaaaaaagtgcaggatcagctgtccgaggttaagtacagaatggacggcgatgttgctaaaactatctgccatgtagacgaaaaagccaaggacatagagcacgccaagaaggtatcacagcaagtcagtaaagtgctatacaagcagaattgggaggacaccaaggacaagtacttattaccgcccgatgcccctgagttggtgcaggctgttaagaacaccgctatgttctctaagaagttgtacactgaggactgggaggccgacaaaagcctattttatccctataacgattcaccagagttgcgtcgggtagcccaagcacagaaggccctttcagacgtagcctataagaaaggcctggcagaacagcaagcccaattcactcctctcgccgatccgcccgacatcgagtttgccaagaaggtcactaaccaggtcagcaagcagaaatataaggaggattacgagaataaaataaaagggaaatggtcggagaccccgtgttttgaggtggctaatgccagaatgaatgccgacaacatttccaccaggaagtaccaggaagacttcgaaaatatgaaagatcaaatatacttcatgcagaccgaaacgcctgagtataagatgaacaaaaaggcaggggtggccgcatccaaggtcaagtacaaagaggactacgagaagaataaggggaaggcggattataacgttctgccagctagcgagaacccccagctccgacagcttaaggccgctggtgatgccctcagcgataaactttataaagagaattacgagaagactaaagcgaagtctatcaactactgcgagacaccaaagtttaagctggatactgtgcttcagaacttctcttccgataagaaatataaagactcatacctgaaggacattttgggacactatgtaggatcttttgaggacccttaccacagtcattgtatgaaagtcaccgcgcaaaacagcgacaaaaactataaggcagagtacgaggaggaccgaggcaagggcttcttcccgcagactataacccaagaatacgaggcaataaaaaagttggaccagtgcaaggatcacacgtacaaggtccacccggacaaaacaaaattcacgcaagtgactgatagccccgtactgctccaggctcaggtcaacagcaagcagctgtccgatctaaattataaagctaaacatgaaagtgaaaagttcaagtgccatattcccccggatacacccgcgtttatccaacacaaggtgaacgcctataacttgtccgacaacctatataaacaggattgggagaagtccaaggccaagaaatttgacattaaggtggacgccatcccgctgttagccgccaaggccaataccaagaatacctccgatgtcatgtacaaaaaggattatgagaagaataaagggaagatgatcggggttttaagcatcaatgatgatcccaaaatgctccacagcctgaaagtcgccaaaaatcagtccgacagattgtataaggagaattacgagaaaaccaaagcgaagagcatgaactattgcgagacgccaaagtatcaactggacacgcagttgaagaatttcagcgaggccagatataaggacctatatgtgaaggatgtgttggggcactatgtcgggtccatggaagatccatatcatacacactgtatgaaagtcgccgctcagaattccgataagtcttataaagcagaatacgaagaagacaaggggaagtgctacttcccacaaacaatcacccaggagtatgaggcaattaagaaattagaccaatgcaaagaccatacgtataaggtgcaccccgataaaacaaagtttacggccgttaccgactcccccgtgctgctgcaagcccaactgaatactaaacagttgtccgacctgaattacaaagccaaacacgagggtgagaaattcaaatgtcacattcccgcagacgctccacaattcattcagcacagggtgaacgcgtataacctgagcgataatgtgtataagcaggactgggagaagtcaaaggcgaagaagttcgacattaaggtcgacgccatccctctgctggcggcaaaagcaaacaccaaaaacacctctgacgtgatgtataagaaagattatgagaaaagcaaaggtaagatgatcggagccctgagcattaatgatgatcccaagatgctgcactctcttaaaactgctaagaaccaatctgatagggaataccggaaggattatgaaaagagtaagactatctacaccgctccccttgatatgctgcaggtgacgcaagctaaaaagtcacaggctatcgctagcgacgtggactacaagcacatcctacactcctatagctaccccccagatagcatcaatgttgaccttgccaagaaggcctatgcactgcagtctgacgtggagtataaggccgactataatagctggatgaaggggtgcggctgggtgccttttgggtccctggagatggaaaaagccaaaagggcaagcgatatcctgaatgaaaagaagtaccgtcagcacccagatacccttaagtttacatcaatcgaggacgccccgatcactgtgcagtcgaagattaaccaggcgcagcgctcagatattgcttacaaggccaaaggggaggagatcatacacaaatacaacctgccacctgaccttcctcagtttatacaagcaaaggtaaatgcatataacatcagcgagaacatgtacaaggctgatctgaaagatctgagcaagaagggatacgatctgagaacagacgctatcccaatccgcgctgctaaagcagcaaggcaggctgcttccgatgtgcagtacaagaaggattatgagaaggccaagggcaagatggttgggttccagtcacttcaggatgatcctaagttggttcattacatgaacgtggccaagattcaaagtgatcgggagtataaaaaagactacgaaaagaccaaaagcaagtataatactccccatgacatgtttaacgtcgtcgcggccaaaaaggcacaagacgttgtgtctaatgtcaactataaacactccctccatcactatacttatctgcctgacgccatggatttggaactgagtaaaaacatgatgcaaatccaatccgacaatgtatacaaagaggattataataattggatgaagggtatcggttggattccgattggctcacttgatgtggagaaggtgaagaaggccggtgacgctctgaatgagaaaaagtatcgtcagcacccggacacactgaaatttacatctatcgtggactctccagtgatggtccaggccaaacaaaataccaaacaagtctcagatattctgtacaaggccaagggagaggatgttaagcataagtatactatgtcccctgatcttccccaattcctgcaagccaagtgcaacgcatacaacattagcgacgtgtgctataaacgcgactggtacgatttaatagcaaagggcaataatgtactgggcgacgcaattcccattactgcagctaaggcttcccgcaacattgcctcggactataagtacaaggaggcttacgagaagtccaaaggcaagcacgttggcttcaggtcacttcaggacgaccctaagctagtgcattacatgaacgtcgcaaaactgcagagcgatagggaatataagaaaaactatgagaacacaaaaacaagctatcatacacccggggacatggtcagtattacagctgctaagatggcacaggacgtggctacgaacgtcaactacaagcagccccttcaccactatacatatctccccgatgccatgagcctggaacatacaaggaatgtaaaccagattcagtctgacaacgtgtacaaggatgaatacaactcttttttgaaaggcattggctggatacctatcggttccttagaggtggagaaagtcaaaaaggccggcgatgccttaaatgagcggaaataccgccagcaccccgatacggtaaaatttactagtgtccctgattccatggggatggtgctggcgcagcataataccaagcagctgtcggacctgaactataaggtagagggggagaaattaaaacataagtatacaatcgacccagagttgccgcagtttatccaagctaaggtcaatgctctcaatatgtccgacgctcattacaaagcggactggaaaaagactatcgccaagggttacgatctgaggccagatgccatccccatcgtggcagctaaatcaagccggaacattgccagtgactgtaagtacaaggaagcctatgagaaggcaaaaggaaagcaagtgggctttctgtctttgcaagacgacccgaaactcgtgcattacatgaacgttgcaaagatccagtccgaccgagagtataagaagggctatgaggctagtaagacaaagtaccatacccccctggatatggtaagtgtaacggccgctaagaaaagccaagaagtggcaaccaacgccaattaccggcaatcctaccaccactatactctcctgcccgacgctctgaacgtggaacacagccggaacgcaatgcagattcaaagcgataatctatacaagtccgactttacaaactggatgaaaggaatcggatgggtacctatcgaaagcttggaggtcgaaaaagctaaaaaggccggggagattctcagcgaaaagaagtatcgccagcacccggagaaacttaagtttacttacgctatggataccatggaacaagctttgaataaatccaacaaattgaacatggacaagcggctttacaccgaaaaatggaacaaggacaagaccaccattcacgtcatgcccgacacccccgacatactgttgtcccgggtgaaccagattactatgtcagataagctgtacaaagctggttgggaggaggaaaagaagaaaggctatgatcttagacctgatgccatcgccatcaaagcagcccgggccagtcgagatatcgcatctgactacaaatacaagaaagcttacgaacaagcaaagggtaagcacatcggatttcggagccttgaggacgaccccaagcttgtccacttcatgcaggtagcaaagatgcagtcagatcgcgagtacaagaagggttatgaaaagtccaaaacatcattccatacccccgtggacatgctgtctgttgtggcagctaagaagtcccaggaggtcgctaccaatgccaactacaggaacgtgattcacacatacaatatgctgcctgacgcaatgtcattcgagctagcaaaaaatatgatgcagatccagtcagataaccagtataaagcagattacgctgatttcatgaagggcatcggttggttgccattgggctcccttgaagccgagaaaaacaagaaggcaatggagatcattagtgaaaagaagtaccgacagcaccctgatactttgaaatacagcactctaatggactccatgaacatggtgctggctcagaacaatgccaagattatgaatgaacatctgtataaacaggcgtgggaggccgataagactaaagttcacatcatgcctgatatcccccagattatcctggctaaggcaaatgctatcaatatgtcagataagttgtacaagttgtcactcgaagaaagcaagaaaaagggctacgatctgcggccagatgctatcccaattaaagctgctaaggccagcagagacattgcttctgattataagtataagtataactacgagaagggtaagggaaagatggtaggatttaggtcactcgaagatgatccaaaactggttcactccatgcaggtggccaagatgcagagcgaccgggaatataagaaaaattatgagaacacgaagacttcctaccatacgccagccgacatgctgtccgtcactgcagcgaaagatgcccaggcgaatataaccaacacaaattacaaacacctgatccacaagtacattctgctcccagatgccatgaatattgagctcaccagaaacatgaacagaattcaatcagataacgagtataaacaggactacaatgagtggtacaagggcttaggctggtctccagccgggtcacttgaagtcgagaaagccaaaaaggcgaccgagtatgcaagtgatcagaaataccgccagcatccatcgaactttcagttcaagaagctcaccgactccatggatatggtactcgctaagcagaatgcacacactatgaataaacatctgtatactattgactggaataaggataagaccaaaatccacgttatgccagatacccccgatatactccaggccaagcagaaccagacactgtacagccagaagctgtacaagcttggttgggaagaagcactcaagaagggctacgatctgccagtggacgcaatttccgtgcagctagccaaagcatcacgcgatatcgctagtgattacaagtacaagcaaggctaccgcaagcaattgggtcaccatgttggtttccgctcgttacaagacgaccctaagttagtcctgagcatgaatgtggcaaaaatgcaaagcgagcgggaatacaagaaagattttgagaaatggaagactaagttcagttcccccgtggatatgctcggggtggtgttggctaagaaatgtcaagagttggttagcgatgtagattataaaaattacctgcaccagtggacatgcctgccagatcagaacgatgtggtccaggccaaaaaagtatacgaattgcagagtgaaaatctttacaagagcgatctggagtggctacgaggcatagggtggagtccattggggtccctggaagctgagaagaataaacgggcctccgaaattatctcggaaaagaagtaccgccagccccctgatcggaataaattcaccagtattccagacgcgatggacattgtcctcgccaaaaccaatgcgaaaaatagaagcgatcgcctgtaccgggaagcatgggacaaggataagactcagattcacataatgcccgacacacctgatatcgtgttggccaaggccaatctaataaacaccagcgataagttgtatcgaatgggctacgaggaactgaagaggaagggctacgacttaccagtggatgccatccccataaaagctgccaaagcaagccgagagatagccagtgaatacaagtacaaggaaggcttccggaagcagctcgggcaccacattggagcaagaaacatcgaggatgatcccaaaatgatgtggtcgatgcatgtggccaagatacagtccgacagagagtataaaaaggactttgaaaaatggaagaccaaattttcatctcccgtggacatgctgggggtggtactggccaagaaatgtcagacgttagtgtctgacgttgactataaaaactacctgcaccagtggacctgtctgcccgaccaatcagatgtgattcacgcgagacaggcatacgatctgcagagcgataacctctataaaagcgatttacagtggcttaaagggatcggctggatgactagcgggtctctcgaagatgaaaaaaataagagagcaacgcagattctctccgaccacgtgtatagacagcacccggatcaattcaagttttcctcgcttatggattccatccccatggttctggcaaagaacaatgccataaccatgaaccatcgtctgtatacagaggcatgggataaggataaaacaaccgtacacattatgcctgacaccccagaagtgctgttggcgaaacagaacaaagtgaactactcagagaaactgtacaagctaggattggaggaggcaaagcggaagggctacgacatgcgcgtcgatgcgatcccaatcaaagccgctaaggcttcccgtgacattgcatcggaattcaagtacaaggaaggctaccgcaagcagctcggacatcacatcggtgcaagggccattcgggacgaccccaaaatgatgtggagcatgcacgtcgccaaaatacagtctgacagagagtacaagaaggatttcgaaaaatggaagacaaagttttccagtcccgtcgatatgctaggcgtggtgctcgctaagaaatgccaaactctcgtttcagatgtggactataaaaactacctgcaccaatggacctgcctccctgatcagtctgacgtaattcacgcccgtcaggcatacgatttgcagagtgacaatatgtataaaagcgacttacagtggatgcggggcatcggctgggtatcaatcgggagcctcgatgtggaaaaatgcaaaagggctaccgagatcttaagtgacaagatctaccggcagccgcccgaccgcttcaaattcacatccgtgaccgacagccttgaacaagttctggccaagaacaacgccctcaacatgaataaaagactctataccgaggcatgggacaaggacaaaacacagatccatatcatgccagacacacccgagatcatgctggccagacagaataaaatcaattactccgagacactgtacaagctcgccaatgaggaggctaagaagaagggatatgacctgcgctccgacgctattcccatcgtggccgccaaggcttctagggacgtgatatccgactacaagtacaaggacggctatcggaaacagctcgggcatcatatcggcgcacgcaatatagaggatgatccaaaaatgatgtggtctatgcacgttgctaagatccaaagcgatagggagtacaaaaaagattttgagaagtggaagaccaagttctcttcacctgtagacatgcttggggtggtgctcgctaagaaatgtcaaactctggtgtccgatgtggattacaaaaactacctccatgaatggacctgcctccccgaccagaacgacgttattcacgctcggcaggcatacgacctgcagtccgacaacatctacaagagtgacctgcagtggttgcggggcattggttgggtgcccataggttcaatggatgtagtcaaatgcaaaagagcggcagagattctcagcgataatatttaccggcaaccccctgacaaactgaagttcacttccgtcaccgacagtcttgaacaagtgttggcaaagaacaatgcattgaatatgaacaagcgcctctacaccgaagcctgggataaggacaagacacaggtacacattatgcccgacaccccagagattatgttggcacgtcagaacaagattaattacagcgagtctctgtatcggcaagcgatggaagaggctaaaaaagagggctatgatctgagatcagacgcgatccccattgtcgccgctaaagccagccgagacatcgcttctgattacaagtataaagaggcttataggaagcagctggggcatcacataggagcccgagcggtacacgatgaccccaagataatgtggagcttgcacatcgctaaggtgcagtcagaccgggagtacaagaaagattttgaaaaatacaaaaccaggtattcttcaccagtggacatgctaggcattgtgttggccaaaaaatgccagaccctggtctcggacgtggactataagcaccctctgcacgaatggatttgtctcccggaccagaacgacattatccatgcaagaaaagcttacgatctgcaatcagataatttatacaagtcagacctggaatggatgaagggaatcggatgggtgcctatcgactcccttgaagtggtgagggccaaaagagctggggaactgctcagtgatacaatctatcgccagagacccgagaccctgaaattcacttcaataaccgacacacccgagcaagtgcttgctaagaataatgccctaaacatgaataaaagactctacactgaggcttgggacaacgataagaaaaccatccatgttatgcccgacaccccagaaattatgctggcaaaactcaacagaattaattatagcgacaagctgtataaactggcgctggaagagagcaagaaagaagggtatgacctgcgattggatgccatcccaatccaggccgcaaaggcatcaagggacattgccagcgattacaagtacaaggagggatataggaagcaactcggacaccacatcggggcaaggaatatcaaagatgatcccaaaatgatgtggagcatccatgttgctaagatccagagcgacagggagtacaagaaggaatttgaaaaatggaagacgaagtttagttctcccgtcgacatgctgggcgtcgtcttggcgaaaaagtgtcagatcctagtgtctgatattgattataagcatcctttgcacgagtggacttgcctaccggaccagaacgacgtcattcaggctcgcaaagcgtatgacctgcagagtgacgctatttacaagtcagacttagagtggctgaggggaattggatgggtgccgattggaagcgttgaggtcgaaaaggtcaaacgcgcaggcgaaatcctcagtgatcgcaaataccgacaaccagccgatcagcttaaattcacttgtattacagacactcctgaaatagtccttgctaaaaataacgctttgacaatgtcaaaacatctttacaccgaggcgtgggacgctgacaagacctcaatacacgtaatgccggatacgcccgatatcctcttggctaagagcaacagtgctaatatttcccagaagctatataccaagggctgggatgagtcaaagatgaaagattatgatctacgcgctgatgcaatctccatcaaaagcgcaaaggcctcaagagacattgcttcagattataagtacaaggaggcctatgagaagcagaaaggccaccatatcggagcccagagcattgaagatgacccgaaaataatgtgcgctattcacgctgggaagattcagtcagagcgggagtacaagaaggaatttcagaaatggaagacgaaattctcctctccggtggacatgctgtctatactgctggcaaaaaagtgccaaacactggttacagacattgactaccggaactacttgcacgagtggacatgtatgccagaccagaacgacataatccaggcaaagaaggcctatgatctgcagagcgatgccttgtataaggctgatcttgagtggttgcgggggatcgggtggatgccacaggggagccccgaggtgttgcgagtcaaaaacgctcagaatattttttgtgacagtgtataccgaacccccgtggtgaatcttaagtatacctccatcgtcgacactcccgaggtagtgctcgctaagtctaatgccgagaatatttcgatcccaaagtacagggaggtgtgggataaggacaagacctccatccatatcatgcctgatacccctgagattaatctggcgcgcgcaaacgccctgaacgttagcaacaagttgtaccgagagggctgggatgaaatgaaggccggttgtgatgtacggttggatgctatcccaattcaagccgctaaagcttcacgtgaaatcgcctctgactacaagtataagctagaccatgagaaacaaaagggtcactacgtcggaactttgactgctcgcgatgacaacaagatcagatgggcgctgatcgcagataaattgcagaatgaaagggagtatagacttgattgggctaagtggaaagccaaaatccaatctccggtcgacatgctgagcatactgcacagtaaaaatagccaggcattggtgtccgacatggattacagaaattatctgcatcagtggacgtgcatgcctgaccagaatgacgtcattcaggcaaaaaaggcatacgagctgcagagcgataacgtatacaaagccgacctggaatggctgagaggtattggctggatgccaaatgactcagtgtcagtgaaccatgccaaacatgcagccgacatcttctcggaaaaaaagtaccgcactaaaatcgagactctgaacttcactccggtggacgatcgagtcgattatgtaacagcgaagcaatccggggaaatcctggacgacatcaagtatcgcaaagactggaacgctacaaagtccaaatatacattgaccgagacgccactgctgcacaccgcacaggaggccgcgcgtatcctcgatcagtacctgtacaaggaaggatgggagcgccagaaggctaccggatacatcctgccacctgatgctgtccccttcgtgcacgcgcaccactgcaatgacgtgcaaagcgaactgaagtacaaggcggagcatgtaaaacaaaaagggcactatgtgggtgtcccaaccatgcgtgacgaccccaagctcgtgtggttcgagcatgcaggacaaattcaaaacgagcgcctatacaaagaggactaccataaaacaaaagcaaagataaatatcccagccgacatggtgtccgtgctggcagctaagcaggggcaaacactcgtgtccgacattgactaccgaaattacctccaccaatggatgtgtcacccagatcaaaatgacgtaattcaggcgcggaaggcttatgatctccagtctgataacgtctatcgagccgacctggagtggctgcgtggcattggctggatcccactggactcagtggaccacgtgcgtgtcacgaaaaatcaagagatgatgtcacagattaaatacaagaaaaacgcactagaaaactatccaaatttcagatccgtggttgaccccccggagatcgtgttggccaaaatcaactctgtgaaccagagcgacgtgaagtataaggagacattcaacaaggccaagggaaaatatacattttcaccagacacccctcatatcagccactctaaggacatggggaaattatattctacaattctgtataaaggggcctgggagggcactaaggcgtatggctacaccctggatgagcgttacattccgatcgtcggcgccaaacatgccgatctggtgaattcagagctgaagtacaaagaaacttatgagaaacagaagggccactacctggccggcaaggtcataggggaattccctggggtggtgcactgtctggacttccagaagatgcggagcgccctgaactacaggaagcactatgaggatactaaagctaatgtacacatcccaaacgatatgatgaaccacgtgctggcgaagcgttgccagtatatcctttccgatttggaatacagacactacttccatcaatggactagtttactggaagagcctaatgtcatcagggtgaggaatgcacaagagatcctcagtgacaacgtgtataaagatgaccttaattggctaaagggtatcggctgttatgtgtgggacactccccagatcttacacgctaagaaaagctacgacctgcagtctcaactgcaatacactgccgcaggcaaagagaacctgcagaattacaacctagtgactgataccccgttatatgtgacggccgtgcagtcaggcatcaatgcatcggaggtgaaatataaggagaattatcaccagataaaggataagtataccaccgtgctcgaaacagtggattacgatagaaccagaaacttgaagaacctctattcaagtaacctgtacaaggaggcctgggatcgggttaaggccacaagttacatattgccttcgtctacactcagtctgactcatgctaagaaccagaaacatttagcatctcatatcaagtacagggaggagtacgagaaatttaaagctctatatactctgcctcgctccgtggatgatgatccgaacacggctcggtgcctgcgggtcgggaagctgaatatcgatcggctgtatcggagtgtgtacgaaaaaaataagatgaagattcacatcgtgccagatatggtagaaatggtcacagccaaggactcacagaaaaaggtgtccgaaatcgactatcgactgcgtctccatgagtggatatgccatcctgacctgcaggtgaatgatcacgtgcgtaaggtgaccgatcagatcagcgacattgtctacaaggatgacttaaattggctcaaggggatcggatgttatgtttgggacacccctgagatattgcacgctaagcacgcatacgatctccgtgatgatattaagtataaagctcacatgctaaagaccagaaacgattacaaacttgttacagatacccccgtttacgtccaggcggtgaaatccggcaagcagctgagtgacgccgtgtatcactatgactatgtccatagcgtcagaggtaaggtagcgccaacaacaaaaaccgtagacctggaccgtgccctgcacgcctacaaactgcagtcaagtaacctgtacaaaacttcccttaggaccctgccaacaggctaccgtctgcccggggacaccccccatttcaaacacattaaagacactaggtatatgtccagttattttaagtataaggaggcttacgagcacacaaaggcttacgggtacactttagggcccaaggatgtgccattcgtgcacgtcagaagggtgaataacgtgacgagcgagcgactttaccgcgagctctatcacaaactgaaggacaagatccacacgaccccagatacacctgagatccggcaggtgaagaaaacacaggaggcggtttcagagctgatctacaaatctgacttctttaagatgcaaggacacatgatcagcttgccatatactcctcaagttatccactgccgatacgtcggtgacatcacctccgatatcaaatataaggaagatctgcaggtcctgaagggctttggatgctttctgtatgatactccagatatggtaaggtccaggcatttacgaaaactctggagcaattacctgtacaccgataaggcaaggaagatgcgggacaagtataaagtcgtcctagatactccagagtacagaaaagtgcaggagctcaaaactcacctgtcagagttagtttatcgagcagcagggaaaaagcagaaatcaatattcacttccgtgcccgatacaccagacctactcagagctaaacggggccagaaactccaatctcagtatctgtacgtcgaattggctaccaaggaacgccctcatcaccacgccggcaatcaaaccacagctctgaaacacgccaaagacgtgaaggatatggtctctgagaagaagtacaaaatccagtatgagaaaatgaaggacaaatatacccccgttcctgacacccccattttaattagggctaaacgagcttactggaatgcaagtgatctgcggtataaggagacattccaaaagactaaaggtaagtaccacacagtcaaggacgccttagacattgtttaccatagaaaagtcacagacgacatatctaaaatcaagtacaaggagaactatatgtcacagctcggtatttggcggtccattcctgatcggccagagcacttccatcacagggctgtgacagatacggtgtcagacgtgaagtacaaagaagatctgacatggctgaagggaattgggtgctatgcatacgatacgcctgacttcaccctggccgaaaaaaataagaccctgtactccaagtataagtacaaagaagtgttcgaaaggactaagtctgacttcaaatacgtggcagactcaccaataaatagacatttcaaatatgctactcagcttatgaatgagaagaagtatcgggctgactacgaacaacgaaaggataagtaccaccttgtcgttgacgagccccggcacttactggcaaaaactgctggggaccagatcagtcaaattaaatatcgtaagaattatgaaaagagcaaggacaagttcacttctatcgtcgataccccagagcacctcagaaccacgaaggtgaataaacagatctcagatattttgtacaaactggaatataataaggccaaaccacgagggtatactaccatacatgatacccctatgttattgcatgtccgcaaggttaaggatgaagtttctgaccttaaatataaggaggtatatcaacgaaataaatctaactgcacaattgaaccggacgcagttcatatcaaggctgccaaagatgcctacaaggtgaacacaaacttagactacaaaaagcagtacgaggccaataaggcccactggaaatggaccccggacaggcccgattttctgcaagccgccaagagctccctgcaacagtccgatttcgaatacaaacttgatagggaattcctgaaaggctgtaaattaagcgttactgacgataagaacacggtgctcgccctgcgcaacacccttattgaatcggacttgaaatacaaagagaagcatgttaaggagcgtggaacgtgccacgcagtccctgatacccctcagatcctgctggcgaagactgtgtctaacctcgtgtctgagaacaagtataaggaccatgtgaagaagcacctagcacaagggtcttatacaaccctgcccgaaacacgggataccgtacatgtgaaggaggtcacgaaacacgtctctgacactaattacaagaaaaaattcgtaaaggaaaaaggaaaaagtaattatagtattatgcttgagcccccagaagtcaagcacgctatggaggtcgcaaagaagcaatccgacgttgcctaccggaaggacgccaaggagaatctgcactacaccactgtggcggaccgccctgatatcaagaaggcgacccaggctgctaagcaggccagcgaggtggaatatcgggccaaacataggaaagagggcagtcatggcctgtcaatgctggggcggcccgatattgaaatggcgaaaaaagccgcgaaactgagctcacaggtaaagtaccgcgagaatttcgacaaggagaagggtaaaacaccgaagtacaatcctaaagactctcagctgtacaaagtgatgaaggatgccaacaatctggcctctgaagtcaaatataaggctgacctcaagaagctccataaaccggttactgacatgaaggagagtctcatcatgaatcacgtgctgaatacatctcagctcgcgtcttcctaccagtacaagaagaaatacgagaagtccaagggacactaccatacaattccagataacctggagcaactgcatctgaaggaggccacagaactgcagtcaattgtgaaatataaggagaagtatgagaaggaacgcggaaaaccaatgctcgacttcgaaacacccacgtacatcacggctaaagaatcccagcagatgcagtcaggcaaggaatatagaaaggattacgaagaatccatcaagggacggaatcttacgggtctcgaggtgacccccgcactgcttcacgtgaagtatgctacaaaaatagcctccgaaaaagagtatcgaaaggaccttgaggagtccattaggggcaaaggtcttacagagatggaagacacccccgatatgctcagagcaaagaatgctacacaaattctgaatgagaaagaatacaagcgggacctggaactggaggtcaagggtagaggattgaatgctatggccaatgaaactccagacttcatgagagcccgaaacgctacagacattgcatcacagatcaaatacaagcaaagcgcagagatggaaaaagcgaattttactagcgtggtcgacacaccagaaattatccacgcccagcaagtgaaaaacctttcttcgcaaaaaaaatataaagaagatgccgagaagagtatgtcctactatgaaaccgtccttgataccccagagatccaaagagttcgagaaaatcaaaaaaactttagcttactgcagtaccagtgcgatctcaagaactctaagggcaaaattacagtggttcaagatacgccagaaatccttcgtgtcaaagaaaaccaaaaaaacttctcttctgttttatacaaggaagacgtaagcccagggactgctatcgggaagacaccagagatgatgcgcgttaaacagactcaggaccatatcagctccgtgaagtacaaagaagccattgggcaggggacaccaattccagacctgccagaggtaaagagagtgaaagagacccagaagcacatctccagtgtaatgtacaaggagaacctgggaaccggaatccctactacagtaacaccagaaatcgagcgtgtgaaacgcaaccaggagaacttcagtagcgtcctgtacaaggagaatctggggaaaggcattcctaccccaatcacccctgaaatggaacgcgttaaacgaaatcaggagaacttcagctctgtactgtacaaggagaacatggggaaaggcactcccctggctgtgacaccagagatggaaagagttaaacacaaccaggagaacattagttcagtgctgtataaagagaacgttggcaaagccacggcaactccagtcacccctgagatgcagcgcgtgaaacgcaaccaggaaaatatctcctcagtactgtataaagagaacctgggcaaagctaccccgaccccatttacccctgaaatggagagagtaaagcgcaatcaagagaacttctctagtgtgctgtacaaagagaatatgcgaaaagccacgcctactccggtgacccccgaaatggagcgggccaagcgcaaccaggagaatatctctagtgtgttgtactccgacagcttccggaagcaaatccagggcaaagccgcttacgtgctggacacaccggagatgcggagggttcgggagacacagaggcacatttcaaccgtgaaataccatgaggactttgagaagcacaaaggctgtttcaccccagttgtcacagaccccatcactgaaagagttaagaagaatatgcaagatttttcagacataaactaccggggcatacaacggaaggtggtggaaatggagcagaagagaaatgatcaggaccaagagacaatcacaggcctgagggtgtggagaaccaatccaggcagtgtgttcgactacgatcccgccgaggacaatatacaaagtaggtcccttcatatgattaacgtgcaggcacagcgtagatctcgagaacaatcaaggtctgcgtcagccctttcaattagcggcggagaggagaagtccgaacacagcgaggcgcccgatcaccatctctcaacctacagcgacggaggggtctttgccgtcagtacagcatacaaacacgccaagaccacagagctccctcagcaaagatcttcctctgtggcgacacagcagaccacagtatctagtatcccgtctcacccgagcactgcagggaaaatatttagggcaatgtacgattacatggccgcagatgcagatgaggtctcgtttaaggatggggacgccatcatcaacgttcaggccattgacgaaggttggatgtacggaacagtgcagcgaaccggtcgaaccgggatgttgcccgcgaactatgtcgaggctatttag

SEQ ID NO: 147363 - DNA, 20577 bp, Artificial Sequence
  derived and/or modified sequence
tttgctgctgaggaaatttatttggtagattgaaggtttgaacgagagctacagaaacgaaagaaaaagtctgtataagccaatggtgttcgggaagaaaataaccccattgccttgagtttgtaggtgccactactactctggaaaaatggcagatgacgaagactatgaggaggtggtggagtactacacagaagaagtggtttacgaagaggtgccgggagagacaataacaaaaatttatgagactacgacaacaaggacatctgactatgagcaatcagaaacttccaaaccagctctggcacagccagcactggcacagccagcatcagcaaagccggtggagaggaggaaggtcatccggaagaaagtggatccttcaaagttcatgaccccctacattgcacacagtcagaaaatgcaggatctttttagcccaaataaatacaaggagaagtttgagaaaacaaaaggacagccatacgccagcacaacagatactccagaacttcgcagaatcaaaaaagtacaagatcaactcagtgaggttaagtatcgaatggatggtgatgttgctaagactatatgtcacgtagatgaaaaagcaaaggatattgaacatgcaaagaaagtgtcgcagcaagtcagtaaggttttatacaagcagaactgggaagacaccaaggataagtacctgcttcctcctgatgcccctgaacttgtccaggccgttaagaacaccgccatgttcagcaagaaactgtacactgaagactgggaagcagacaaaagtttgttttacccctataatgatagcccggaactgaggagagttgcccaggcccagaaagctctcagtgatgttgcctacaaaaaaggtctcgctgaacagcaagctcaattcacgcctctggctgatcctccagatatagaatttgccaagaaagtaaccaatcaagtgagcaagcaaaaatacaaagaagactatgaaaataaaatcaaaggcaaatggagtgagacaccttgctttgaagttgcaaatgccagaatgaatgctgataacattagcacaaggaaataccaggaagattttgaaaacatgaaagaccagatctacttcatgcagaccgaaacaccagagtataaaatgaataaaaaagctggtgtggcagctagcaaggtaaaatacaaagaagactatgaaaagaataaaggaaaagcagattataatgtgcttcctgcttcagagaacccacagcttaggcagctgaaggcagcaggagatgccctaagtgacaaactatacaaggaaaactatgaaaagacaaaagcaaagagcataaattactgcgagacccccaaattcaagctcgatactgttctgcagaacttcagtagtgataaaaaatataaagattcctacttaaaagatattttgggacattatgtaggcagcttcgaggatccataccattcacactgcatgaaagtcacagctcaaaacagtgataaaaactacaaagcagaatacgaagaagacagaggcaaaggcttcttccctcagaccataactcaagaatatgaagcaattaagaaactagatcagtgtaaagaccacacctacaaagtccatccagataagacaaaattcacccaagttacagactctcctgttctgctacaagcccaagtcaattccaaacaactgagtgacttaaattacaaagcaaaacatgaaagtgaaaagttcaagtgccatatcccccctgatactcctgcttttatccagcacaaagtcaatgcctataacttgagtgataatctttataagcaagactgggagaagagcaaagccaaaaagtttgacattaaagtggatgccattcccctgctggcagccaaagccaacaccaagaacaccagcgatgtgatgtacaagaaagactatgaaaaaaacaaagggaaaatgattggagtcctcagcattaatgacgatcccaagatgctgcactccttgaaggtggccaaaaaccagagtgatagattatacaaggaaaactatgagaagacaaaggcaaagagtatgaattactgtgagaccccaaaatatcaacttgatactcagctgaagaacttcagtgaggctagatataaagacttatatgtaaaggatgttttgggacattatgtaggcagcatggaggacccatatcacacacactgcatgaaagttgcagctcaaaacagtgataaaagttacaaagcagaatatgaagaagataaaggaaaatgctatttccctcagacaataacacaagaatatgaagcaatcaagaagctggaccagtgtaaagatcatacctacaaagttcatccagataagaccaaattcacggcagtcactgattctcctgtactgttgcaagcccagctcaacacgaaacagcttagtgatctgaattacaaagcaaaacatgaaggtgagaagttcaagtgccatataccagcagatgctccacagtttatccaacacagagtcaatgcctataatctgagtgataatgtttataagcaagactgggagaagagcaaagccaagaagtttgacattaaagtggacgccattcccctgttggcagccaaagccaacaccaagaacaccagcgatgtgatgtacaagaaagactatgaaaagagcaaagggaaaatgattggagccctcagcattaatgacgatccaaagatgctgcactccttgaagacagccaaaaaccagagtgatcgcgaatatcgaaaagattatgaaaagtcaaaaactatctacacggcacctcttgatatgctccaagtcactcaagctaagaaatctcaggcaattgccagcgacgttgattataagcacatcttacacagttacagctacccccctgatagcatcaatgtggaccttgccaagaaggcatatgcgctgcagagcgatgttgaatacaaagctgactacaatagctggatgaaaggttgtggctgggtgccttttgggtccttagaaatggaaaaggcaaagcgagcttcagacatcctcaatgagaaaaaatatcgccaacatccagacaccctcaagtttacctcgattgaagatgctccaattacagtacagtctaaaattaaccaggcccagaggagtgatatcgcttacaaagccaaaggagaggaaattattcacaaatacaacctgccaccagacctgccccagttcatccaggctaaagttaatgcctacaatatcagtgagaatatgtacaaagcagacttgaaagacttgagcaagaagggatatgacctgagaactgatgcgattcccatcagagctgccaaagctgccaggcaggcggcgagtgacgttcagtacaaaaaagactatgaaaaggctaaagggaaaatggttggcttccaaagtcttcaagatgaccctaaactggttcattatatgaacgtggccaagatacaatcagatcgggagtataaaaaagactatgagaagacaaagtccaaatacaacacgccccatgatatgttcaatgtcgtggcggctaagaaagcccaggatgtggtcagcaatgtcaactataagcattctctccatcattacacctacttgcctgacgccatggacctggagctgtctaagaacatgatgcagatacagagtgataacgtctacaaggaagactacaacaactggatgaaaggcattggctggattcctattggcagtctcgacgtcgaaaaagttaaaaaggccggtgatgctctgaatgaaaagaagtacaggcaacatccagacaccctcaaatttaccagcattgtggactccccagttatggtccaggcaaaacagaacacgaagcaagtcagtgatatcttatacaaggctaaaggagaagatgtgaaacataaatacaccatgagtcctgatcttcctcagtttctccaggccaagtgcaatgcttacaatataagtgacgtctgttataaacgggattggtatgacttaatagccaagggcaacaatgtgctgggcgatgctattcccatcactgcagccaaggcatcgagaaacattgccagtgattataaatacaaggaagcttatgagaagtcaaagggaaagcatgtgggtttcagaagcctccaggatgatcccaagctggtccactatatgaatgtggcaaagctgcagtctgatcgtgaatacaagaagaactatgagaacaccaaaaccagctaccatacccctggggacatggttagcatcacagctgcaaagatggcccaggatgtcgctaccaatgtcaactacaaacagccattgcatcattacacatacctacctgacgccatgagtcttgagcatacgaggaatgtcaatcaaattcagagtgataatgtgtataaagacgagtataacagcttcttgaagggcatcggatggatccctattggttccctggaggtggagaaggtcaagaaagcaggcgatgcattaaatgagaggaagtatcgacagcacccagataccgtcaagttcacaagtgtgcctgattccatgggcatggtgttggctcagcataacacaaagcagctaagtgatttgaactacaaggtagagggagagaaactgaagcacaagtatactattgaccctgaattgcctcagtttattcaagccaaagtcaacgccctcaacatgagtgatgctcattataaagcagattggaagaaaaccattgccaagggctatgatttgagaccagatgccatcccaattgttgctgcaaaaagttcaaggaatattgctagtgattgcaaatataaggaggcctacgagaaagccaaaggcaagcaagttggatttctcagtcttcaggatgatcctaaactggttcactacatgaatgtggccaaaatccagtctgatcgtgagtacaaaaagggctatgaagccagcaagaccaagtaccacacacctctggatatggtcagtgtgacagctgcaaagaaatctcaggaggttgccaccaacgccaactacagacagtcataccaccactacactctcctgcccgatgccttgaatgtggagcactccaggaatgccatgcagattcagagtgataatctgtacaaatctgacttcaccaattggatgaaagggatcggctgggtgcccatagagtccctggaggtggagaaggcaaagaaagcaggagagattcttagtgagaagaagtatcgccagcaccccgagaagctgaagttcacttacgccatggacacaatggaacaggcacttaacaagagtaacaaactgaacatggacaagaggctctacactgaaaaatggaacaaggacaagaccaccattcatgtcatgcctgacacaccggatattttactctccagagtaaaccaaatcaccatgagtgataaactgtacaaagctggctgggaagaggaaaagaagaaaggatatgacctgaggcctgatgccattgcaataaaggctgcaagagcctctagagacattgccagtgattacaaatacaagaaagcctatgaacaagccaaagggaaacacattggcttccggagcctggaagatgaccccaagctggtgcacttcatgcaagtggccaagatgcagtcagaccgggaatacaagaagggatatgagaaatccaagacctccttccacaccccggtggacatgctcagtgtggtggcagccaagaagtctcaggaagtggccaccaatgccaactacaggaacgtgatccatacctacaacatgcttcctgatgccatgagctttgaattggccaaaaatatgatgcagattcaaagtgataatcagtacaaggctgactatgctgacttcatgaagggcattggatggctccctctgggctccctggaagcagagaaaaacaagaaagccatggagattattagtgaaaagaagtaccgccagcacccagacactttgaagtattccacactcatggactcgatgaacatggttttggcccagaataatgcaaaaattatgaacgaacatctctacaaacaagcatgggaggctgacaaaaccaaagtccacatcatgcctgatatcccccagattattttggcaaaggcaaatgcaattaatatgagtgataaactctacaaactttccttggaagagtctaaaaagaaaggctatgatctcagacctgatgcaattcctatcaaagctgccaaggcttccagagatattgcaagtgattataaatacaagtacaattatgaaaaagggaaggggaaaatggttggtttccgcagtctcgaggatgatcccaaattagtccattccatgcaagtggctaagatgcaatctgatcgggagtacaagaaaaactatgagaacacaaagaccagctaccacacccctgccgacatgctcagtgtcacggctgcaaaggatgcccaagccaacatcaccaacactaactacaagcacctgattcacaagtacatcctccttccagatgcaatgaacattgagctgaccaggaatatgaatcgcatacagagtgataatgaatataagcaagattacaatgaatggtacaaagggcttggctggagtccagcaggttctctggaagtggagaaggccaagaaagcaactgaatatgccagtgatcagaaataccgccagcacccgagcaacttccagtttaagaagctgactgattccatggacatggtgcttgccaagcagaatgcacataccatgaacaagcatttatacaccattgattggaataaagataagaccaagattcatgtgatgcctgatacaccagatattttacaagccaagcagaatcaaacactgtatagtcagaaactctataaacttggatgggaagaagctttgaagaaaggctatgatctcccagttgatgcaatttctgtacagctagctaaagcttcaagagacattgctagtgattataaatacaaacaaggctaccgaaagcaacttggccaccatgttggattccggagtctgcaagatgacccaaaacttgtgttgtccatgaatgtagccaaaatgcagagtgaaagagaatacaagaaggactttgagaagtggaaaactaagttctccagcccagtggacatgttgggagtggtactggccaagaagtgtcaggagttggttagtgacgtggactacaagaactacctgcatcagtggacatgtctgcctgatcagaacgatgttgtgcaagctaagaaagtttatgaactgcaaagtgagaatctatataaatctgaccttgagtggctgagaggcataggatggagtcccttgggttctttagaggcagaaaagaacaagcgggcttcggaaatcatcagtgagaagaaatatcgtcagcctccagacagaaacaagttcaccagcattcctgatgccatggatatagttctggcaaagacaaatgccaaaaataggagtgatagactttatagagaagcttgggacaaagacaagactcagatccacatcatgcctgatacacctgacattgttctggctaaagcaaacttaatcaacacaagtgataaactctaccgaatgggttatgaggagctgaagagaaaaggttacgatcttcctgttgatgccataccaatcaaagcagcaaaagcctcccgggaaattgccagtgaatacaagtacaaggaaggctttcgcaagcagctcggccaccacattggtgcccggaacattgaagatgaccccaagatgatgtggtccatgcatgtggccaagatccagagtgacagggagtacaagaaggactttgagaagtggaagaccaagttcagcagcccagtggacatgctgggggtggtgttggccaagaagtgccagaccttagtcagcgacgtggactacaagaactacctgcaccagtggacatgcctgcccgaccagagcgatgtcatccatgctcggcaggcctatgacctccagagcgataatttgtacaagtcagaccttcagtggctaaaaggcattggctggatgactagtggttctctcgaggatgagaaaaataaacgagccacccagattttgagtgaccatgtttaccgtcagcacccagatcaatttaagttttccagccttatggattccataccaatggttttggcaaaaaacaatgctattaccatgaatcatcgcctctatacagaagcttgggataaagataaaaccactgtccacattatgccagatacccctgaagttttattagctaaacaaaacaaagtaaattacagtgagaaattgtataagcttggcctagaagaagccaagaggaaaggttatgacatgcgggtagatgccattcctatcaaggcagccaaggcctccagagatattgcaagtgaattcaagtacaaagaaggctatcgtaagcagctcggccaccacattggtgcccgagctatacgtgatgaccccaagatgatgtggtccatgcacgtggccaagatccagagtgacagggagtacaagaaggactttgagaagtggaagaccaagttcagcagcccagtggacatgctgggggtggtgctggccaagaagtgccagaccttagtcagcgatgtggactacaagaactacctgcaccagtggacatgcctgcccgaccagagcgacgtcatccatgctcggcaggcctatgacctccagagcgataatatgtacaagtctgatctccagtggatgagaggcattggctgggtgtccattggctctttggatgtggaaaaatgcaaaagggcaactgaaattttgagtgataaaatctatcgccagcctccagacagattcaaatttaccagtgtgactgactctctggaacaagtgttggccaaaaataatgccatcactatgaacaagcgtttatacacagaggcctgggacaaagacaagactcaaattcacataatgcctgatacaccagagattatgttggcaaggcagaacaaaatcaactacagtgagactctatacaaacttgccaatgaagaagcaaaaaagaaaggctacgacttgcgaagtgacgccatccccatcgtggctgccaaggcctccagggacgttatcagtgattacaaatacaaagatggttaccgcaagcagctcggccaccacattggagcccggaacattgaagatgaccccaagatgatgtggtccatgcatgtggccaagatccagagtgacagggagtataagaaggactttgagaagtggaagaccaagttcagcagcccagtggacatgctgggagtggtgttagccaagaagtgccagaccttagtcagcgatgtggactacaagaactacctgcacgagtggacgtgcctgcccgaccagaatgatgtcatccatgctcggcaggcctatgacctccagagcgataacatttacaaatctgatctccagtggctgagaggcattggctgggtccccattgggtctatggatgtggtcaagtgcaagagagctgctgaaatactgagtgataacatctaccgccagcctccggacaagctgaaatttaccagtgtgactgactctctagagcaggtgctggccaagaacaatgctctcaatatgaacaagcgcttatacacagaagcctgggacaaagacaagacccaagtccatattatgcctgatacacctgaaatcatgttggcaagacaaaataaaataaattatagtgagagcctctatcgtcaggccatggaagaagccaagaaagaaggctatgacttgagaagtgatgccattcccattgtggctgccaaggcctctcgggatattgccagtgattacaaatacaaagaagcatatcgtaaacagttgggtcaccacattggcgcccgagcagtacacgatgaccccaagataatgtggtccctccacattgccaaagtgcagagtgaccgtgagtacaagaaagattttgagaaatacaagacaaggtacagcagcccagtggacatgcttggtatcgttttggccaagaagtgtcagaccttggtcagcgatgtggactataaacatcctctgcatgaatggatctgcctgcccgaccagaatgacatcattcatgcacggaaagcctatgacctccagagtgacaatttgtataagtcagaccttgaatggatgaaaggcattggctgggttccgattgattccttggaagttgttagggccaagagagctggagaattacttagtgatactatctaccgtcagcgtccagaaacgctgaaatttaccagtataacggacactccggagcaggtgctggcaaaaaacaatgctttaaacatgaataagcgcttatatactgaagcctgggacaatgacaagaaaactattcatgtcatgcctgatacaccagaaatcatgttagccaaactcaaccgaataaactacagtgataaactctataaacttgctttggaagagtccaagaaggaaggctatgacttgcgtctggatgccattccaatccaagcagccaaggcttcaagagatattgctagtgattacaagtacaaggaaggctaccgcaaacagcttggccaccatattggggcccggaacattaaggatgacccgaagatgatgtggtccatccatgtggccaagatccagagtgacagggagtacaagaaggagtttgagaagtggaagaccaagttcagcagcccagtggacatgctgggggtggtgctggccaagaagtgtcagatccttgtaagcgacatagactacaagcatcccctgcatgaatggacctgcctgcctgatcagaatgacgtcattcaggctcggaaggcctatgacctgcagagtgatgctatttacaaatctgatcttgagtggctgagaggcataggatgggttcccattggctctgtagaggtcgagaaagtgaagagagctggagaaatcctgagtgacaggaagtatcgccagcctgcagaccagctcaaattcacatgcattaccgacactccggaaattgtcctagcaaagaataatgccctgacaatgagcaagcatttatacacagaagcttgggatgctgacaaaacctccatccacgtgatgccagacaccccagatatcctgctggccaagagtaattctgccaatatcagccaaaaactttacaccaagggatgggatgaatcaaagatgaaggactatgatctgagagcagatgctatttccatcaaaagtgccaaggcctccagggacatcgccagtgactacaaatacaaggaagcctatgagaaacagaaaggccaccacattggagcccagagcattgaagatgatcccaagattatgtgtgccatacatgcaggaaaaattcaaagtgaaagggagtacaagaaggaattccaaaagtggaaaaccaagttctctagcccagtggacatgttaagcatcttgctggccaagaaatgtcagactttggtcactgacattgattatcgcaattacctgcatgaatggacatgcatgccggatcaaaacgacattatccaagcaaaaaaggcctatgacctgcagagtgatgccctctacaaggctgacttggagtggttgcgtggcattggctggatgccccaagggtctcctgaagtgttgagagtcaaaaacgcccagaatatcttttgtgacagtgtctatcggacgcctgtggtgaaccttaagtacacaagcattgttgacacacctgaagtggtccttgctaaatcaaatgctgaaaatattagtattccaaagtacagagaggtttgggacaaggataaaacttcaatacacataatgccagatactccagaaattaatctcgctagagcaaatgctcttaatgtgagcaataaactttaccgtgagggctgggatgaaatgaaggcgggctgtgatgtccggctggatgccatccccatccaggctgccaaggcctccagggagattgccagtgactataaatataagcttgaccatgagaagcagaagggacactacgtgggcaccctcacagccagggatgacaacaagatccgctgggccctcatagctgacaagctccagaatgaacgagagtaccggctggactgggccaaatggaaggccaagatccagagccctgtggacatgctttccatcctgcactctaaaaattcccaggctctggtcagtgacatggattaccgcaattacctgcaccagtggacctgcatgcccgaccagaacgatgtgattcaggccaagaaggcctacgaactgcagagcgataatgtttacaaggctgacttggaatggttgcgtggaattgggtggatgccaaatgactccgtgtccgtcaatcatgccaaacatgccgcggacatcttcagtgagaaaaaatatcgcacaaaaatagaaactctcaactttacgcctgtggatgacagagttgattatgtgacagcgaaacaaagtggcgagatcctcgatgatattaaataccggaaagactggaatgccaccaaatcaaagtacaccctcacagaaacccccctgctgcacactgcccaggaggctgctaggatactggaccagtatctctacaaggaaggctgggagagacaaaaagccacaggttacattttgcctccagatgctgtgccatttgttcatgcccatcactgcaatgacgttcagagtgagctgaaatacaaagctgaacatgtgaagcaaaaaggtcattatgttggtgtcccgacgatgagagatgatcctaagctggtttggtttgagcatgcaggccagattcagaatgagagactatacaaagaggactatcacaaaacaaaggccaaaatcaatatacctgctgatatggtgtcagtcttggccgccaagcaggggcagacccttgtcagtgatattgattatcgtaattacttgcaccaatggatgtgtcatcctgaccagaacgatgttattcaggcaagaaaggcctatgacctacagagtgataatgtctacagagctgacctggagtggctccgaggcattggctggatcccactggattctgtggaccatgtaagggttactaagaaccaggaaatgatgagtcagatcaaatataagaaaaatgcccttgaaaactatcctaactttagaagtgtggtggatcctccagagattgttttagccaagattaattctgtcaatcaaagtgatgtaaaatataaagaaacatttaataaagcaaagggcaaatatacgttttcaccagatacaccacatatctcccactccaaagacatgggaaaactctacagtactatactgtataaaggggcgtgggagggcaccaaggcctatggctacaccctggatgagcgctacattcccattgttggagccaagcatgctgatctggtgaacagtgagcttaaatacaaagagacatatgagaagcagaaaggtcactacctggctggaaaagtgatcggtgaattccctggtgtggttcactgtctggatttccaaaagatgaggagtgcgttgaactacagaaaacattatgaggataccaaagcaaatgttcatatccccaatgacatgatgaatcacgtgctggctaaaaggtgccagtacatcctcagtgacctggagtatcgacactatttccaccagtggacgtctcttctggaagaacccaatgttatacgcgtccgaaacgcccaggagatcttgagtgataatgtgtataaagatgacctgaattggttgaaaggcattggttgctacgtttgggatacaccccaaatcctccatgccaagaaatcatacgaccttcagagtcagctacaatatacagcagcaggtaaagaaaatctacaaaactataatctggtcacagacacgcccctctatgtgactgctgttcagagtggcattaatgccagtgaggtaaaatataaagaaaattatcatcagattaaggacaaatacacaacagttctagaaacagtggattatgacagaaccagaaacctgaagaatctttacagcagtaacctgtacaaggaggcctgggatagagtgaaagccaccagctacatcctgccttccagcaccttgtccctgacacacgccaagaaccagaagcatctggccagccatatcaaatatcgggaagaatatgaaaagttcaaagctctttatacgttaccaagaagtgttgacgatgatccgaacacagcacggtgcctccgagttggcaagcttaacatcgatcgcctgtacagatcagtttatgaaaagaacaagatgaaaatccacatcgtgcccgacatggtagagatggttactgccaaggattcccagaagaaagtcagtgagattgattaccgcctgcgcctccacgaatggatttgccaccccgacttgcaagtcaatgatcacgtcaggaaagtcacagatcagatcagcgatattgtatacaaggatgacctcaactggctgaaaggcattggttgctacgtctgggacactcctgaaatcctccatgccaagcatgcttatgatctacgtgatgatatcaagtataaagctcacatgttgaaaacaaggaatgactacaagcttgtcacagatacaccagtctacgtgcaggctgtcaaaagtgggaaacagctaagtgacgctgtctaccactatgactatgtgcacagtgtcagaggcaaagtggctccaactaccaaaaccgtggatctggaccgggcccttcatgcatacaagctccagagttcgaatctatacaaaaccagcctgcgcaccctgcccactggatatagacttccaggtgacactcctcacttcaaacacatcaaggacacccgttacatgagcagttatttcaagtacaaagaagcctatgaacacaccaaggcatatgggtatacacttggccccaaagatgttccatttgtccacgtccggagagtcaacaatgttaccagcgagagactgtatcgggaattgtaccacaaactgaaagacaagatccatacaactcccgatacccctgagatccgccaagtcaagaagacacaagaggctgtcagtgagttgatctacaaatcagacttcttcaagatgcagggccacatgatctctctgccatacacaccccaagtgatccattgccgctatgtgggagacatcaccagtgatattaaatacaaagaggacttgcaggtcctgaagggatttggctgcttcctgtatgacactcctgacatggtccgctcccggcacctgcggaagctctggtctaattacctatacactgataaggcaaggaagatgcgagacaaatacaaagtggtgcttgacactccagaatacagaaaagtgcaagaactgaagacacatctgagtgagctggtctacagagctgcaggcaagaagcagaagtcaatctttacttcagttcctgatactcctgatcttttaagagccaagcgagggcagaagcttcagagtcagtatctgtatgttgaacttgccaccaaagagagaccccatcatcacgctggaaaccagaccacagccttgaagcatgctaaagacgtgaaggacatggtcagtgagaaaaagtacaagattcaatatgaaaagatgaaagacaagtacactccggttccagatacgccaatcctcatcagagccaagagggcttactggaatgccagtgatctacgctacaaagaaacatttcaaaagaccaaagggaaataccacacggtgaaagatgccctagacattgtctatcatcgcaaagtcacagatgacatcagtaaaataaaatacaaggagaactacatgagccagttgggtatctggaggtccattcctgatcgtccagagcatttccaccaccgagcagtcactgacacagtcagtgatgtaaaatataaagaagacttgacttggcttaaaggcattggttgctatgcctatgatacccctgatttcactctggctgaaaagaacaagactctctacagcaagtataagtataaagaagtatttgaaaggacaaagtcagatttcaagtatgttgccgactctccgatcaataggcatttcaagtatgcaactcaattgatgaatgagaaaaaatacagagctgattatgagcagcggaaagataaataccacctggtagtcgatgagcctagacatctgctggctaagaccgcaggcgaccagatcagtcagatcaaatacaggaaaaactatgaaaaatcaaaggacaaatttacctcaattgtggatactccagaacacctgcgtactacaaaagtcaacaaacaaatcagcgatatcctttataaattggaatacaacaaggccaaacccagaggctacaccacaatccacgacacacccatgttgctgcatgtccgcaaggttaaagatgaagtcagtgatctgaaatacaaagaagtataccaaagaaataaatccaactgcaccattgagccagatgctgttcatatcaaagcagccaaggacgcctacaaagtcaacaccaatctggactataagaaacagtacgaagccaacaaagcccactggaagtggactcctgaccgaccggacttcctccaggctgccaagtcatccctgcagcaaagcgattttgaatataagctggaccgggagttcctcaagggttgcaagctttctgtcactgatgacaaaaacacggtgctcgccctcaggaatactttaatagaaagtgatctgaaatacaaagagaaacatgtcaaggaaagaggaacctgccatgccgtacctgacacgcctcagatcctgctggcgaagactgtcagcaacctggtgtctgagaacaagtacaaggaccatgtcaagaagcacttggcacagggctcatacacaacactaccagagacccgggacactgttcacgtcaaggaagtgaccaagcatgtcagtgatacaaattacaaaaagaagtttgtcaaggagaaaggaaaatccaactactccatcatgctggagccaccagaggtgaaacatgctatggaagtggccaagaagcaaagtgatgtcgcttacagaaaagatgccaaagagaacctgcattacaccacagtggctgatcgaccagacatcaagaaggccacacaggcagccaaacaggccagtgaggtggagtacagagccaagcaccgcaaggaaggcagccatggcttaagcatgctcggtcgcccagacatagaaatggccaagaaggcagccaagctgagcagccaggttaaataccgagaaaatttcgataaagaaaagggcaagacaccaaaatacaatccaaaagacagccagctctacaaagtcatgaaagatgctaataatcttgcaagtgaggttaaatacaaggctgacctgaagaaacttcacaaacccgtgactgacatgaaggagtctctgatcatgaatcatgtcctgaatacaagccaacttgccagttcttaccagtacaagaagaagtatgagaagagtaaaggccactaccacaccatacccgataatctggagcagcttcacctaaaagaggccacagaattacagagtatagtgaaatacaaagaaaagtatgaaaaggaacgaggaaaacccatgctggactttgaaacaccaacgtacatcactgccaaagagtctcagcagatgcagagtgggaaagaatataggaaagattatgaagagtccattaaaggcagaaacctgactggcctggaggtcacgccagctttgttacatgtcaaatatgcaactaaaatagcaagcgagaaagagtacaggaaagatctagaggaaagcatccgtgggaagggcctcactgaaatggaagatacacctgacatgctaagagcaaagaatgccactcaaatcctcaatgagaaagaatataagcgagacctggaactggaagtcaaaggaagaggcctgaatgccatggccaatgaaactccggattttatgagggccaggaatgctactgatattgccagtcagattaagtataagcaatcagcagaaatggagaaagccaatttcacttctgtggttgatactccagagatcattcatgcccaacaagtcaagaatctttcaagccagaaaaagtacaaggaagatgctgagaagtccatgtcgtattatgagactgttttggacaccccagagatacagagagtccgggagaaccaaaagaacttcagccttctccaataccagtgtgaccttaaaaacagtaaaggaaaaattacagttgttcaagacacgccagaaatactgcgtgtaaaagaaaatcagaagaatttcagctcggttttatataaagaggatgtctcaccaggaacggctatcggaaagacacctgagatgatgagagtgaaacaaacacaggaccacattagctcggtgaagtataaggaagcaataggacaaggaactccaatccctgacctgcctgaagtgaaacgtgtgaaggagacgcagaagcacattagctcggttatgtacaaagaaaacttgggaacaggcattccaaccactgtgactccagagattgagagagtcaaacgcaatcaagagaactttagctcggttttgtacaaagaaaatttggggaaaggaatcccaacacctatcactccagagatggagagagtcaaacgcaatcaagagaactttagctcggtgttatacaaagaaaacatgggcaagggaactcctttagctgtcactcccgagatggagcgagtcaaacacaatcaagaaaatattagctcggttttgtacaaagaaaatgtggggaaagccaccgcaacccctgtcactcctgagatgcagagagtcaaacgcaatcaagaaaacattagctcggtgttatacaaagagaacctggggaaagcaacccccacaccctttactcctgagatggaaagagtgaaacgcaatcaagaaaactttagctcggtattgtacaaagagaacatgagaaaagcaactccgacacctgttactccagagatggagagagctaagcgcaaccaagaaaacattagctcggttctttattctgatagtttccggaaacaaatacaaggcaaagctgcctatgtattggatacccccgagatgagacgggtgagggagacccaacggcacatctcaacggtgaaatatcatgaagactttgagaaacacaagggttgcttcacaccagtggtgacagatcctatcactgaacgagtaaagaagaacatgcaggacttcagtgacattaactaccgaggtattcagaggaaagtggtagaaatggaacaaaaacggaatgaccaagatcaggagactattacaggtttacgtgtctggcgtactaatcctggttcggtttttgactatgatccagcagaagacaacatccagtcccgaagcttacacatgattaatgtccaagctcagcgccggagccgggagcagtcacgatctgccagtgcactaagcatcagtgggggtgaggagaagtctgagcattcagaagcaccagaccaccacctttcgacttacagcgacgggggtgtctttgcagtctcaacagcttacaaacatgcaaaaaccacagagctcccacaacaacgatcatcttcagttgctacccaacagacaacggtatcttccatcccatctcatccatctactgctggaaaaatcttccgtgccatgtatgactatatggctgctgatgcagatgaggtgtccttcaaggatggagatgccatcataaatgttcaagcaattgatgaaggctggatgtatggcactgtgcagaggactggcaggaccggaatgctcccagccaactacgttgaagctatttaggcatttcaaagcatcacacttgtctgcaggacttacagatcctgcagtcaatgtttcggtttagactctccactgttacctaagttctcaagctgcctatggtttttctgtgtcaatgtgatttatggtagtaccatcctttctcctttgggttttaaaataagttgcagaacagacactttaaaagcttctgcaatattatttctgtgcctagagtctttctccattataaacatgttttaacattatttcttttctaaaacagggattttgaatatgccaaacacattaaaggaaaaatagcagagatgttcaccttttccttgctgattgctaatgcttattatttctaattcagttctgaagttataaacttataatcaatacaaaccagcaactaataaaacctctaattctgc

SEQ ID NO: 147364 - DNA, 20637 bp, Artificial Sequence
  derived and/or modified sequence
aggcatcacgctggcttttgcctggggttctcaggaggggagagttgggagaggctttgctgctgaggaaatttatttggtagattgaaggtttgaacgagagctacagaaacgaaagaaaaagtctgtataagccaatggtgttcgggaagaaaataaccccattgccttgagtttgtaggtgccactactactctggaaaaatggcagatgacgaagactatgaggaggtggtggagtactacacagaagaagtggtttacgaagaggtgccgggagagacaataacaaaaatttatgagactacgacaacaaggacatctgactatgagcaatcagaaacttccaaaccagctctggcacagccagcactggcacagccagcatcagcaaagccggtggagaggaggaaggtcatccggaagaaagtggatccttcaaagttcatgaccccctacattgcacacagtcagaaaatgcaggatctttttagcccaaataaatacaaggagaagtttgagaaaacaaaaggacagccatacgccagcacaacagatactccagaacttcgcagaatcaaaaaagtacaagatcaactcagtgaggttaagtatcgaatggatggtgatgttgctaagactatatgtcacgtagatgaaaaagcaaaggatattgaacatgcaaagaaagtgtcgcagcaagtcagtaaggttttatacaagcagaactgggaagacaccaaggataagtacctgcttcctcctgatgcccctgaacttgtccaggccgttaagaacaccgccatgttcagcaagaaactgtacactgaagactgggaagcagacaaaagtttgttttacccctataatgatagcccggaactgaggagagttgcccaggcccagaaagctctcagtgatgttgcctacaaaaaaggtctcgctgaacagcaagctcaattcacgcctctggctgatcctccagatatagaatttgccaagaaagtaaccaatcaagtgagcaagcaaaaatacaaagaagactatgaaaataaaatcaaaggcaaatggagtgagacaccttgctttgaagttgcaaatgccagaatgaatgctgataacattagcacaaggaaataccaggaagattttgaaaacatgaaagaccagatctacttcatgcagaccgaaacaccagagtataaaatgaataaaaaagctggtgtggcagctagcaaggtaaaatacaaagaagactatgaaaagaataaaggaaaagcagattataatgtgcttcctgcttcagagaacccacagcttaggcagctgaaggcagcaggagatgccctaagtgacaaactatacaaggaaaactatgaaaagacaaaagcaaagagcataaattactgcgagacccccaaattcaagctcgatactgttctgcagaacttcagtagtgataaaaaatataaagattcctacttaaaagatattttgggacattatgtaggcagcttcgaggatccataccattcacactgcatgaaagtcacagctcaaaacagtgataaaaactacaaagcagaatacgaagaagacagaggcaaaggcttcttccctcagaccataactcaagaatatgaagcaattaagaaactagatcagtgtaaagaccacacctacaaagtccatccagataagacaaaattcacccaagttacagactctcctgttctgctacaagcccaagtcaattccaaacaactgagtgacttaaattacaaagcaaaacatgaaagtgaaaagttcaagtgccatatcccccctgatactcctgcttttatccagcacaaagtcaatgcctataacttgagtgataatctttataagcaagactgggagaagagcaaagccaaaaagtttgacattaaagtggatgccattcccctgctggcagccaaagccaacaccaagaacaccagcgatgtgatgtacaagaaagactatgaaaaaaacaaagggaaaatgattggagtcctcagcattaatgacgatcccaagatgctgcactccttgaaggtggccaaaaaccagagtgatagattatacaaggaaaactatgagaagacaaaggcaaagagtatgaattactgtgagaccccaaaatatcaacttgatactcagctgaagaacttcagtgaggctagatataaagacttatatgtaaaggatgttttgggacattatgtaggcagcatggaggacccatatcacacacactgcatgaaagttgcagctcaaaacagtgataaaagttacaaagcagaatatgaagaagataaaggaaaatgctatttccctcagacaataacacaagaatatgaagcaatcaagaagctggaccagtgtaaagatcatacctacaaagttcatccagataagaccaaattcacggcagtcactgattctcctgtactgttgcaagcccagctcaacacgaaacagcttagtgatctgaattacaaagcaaaacatgaaggtgagaagttcaagtgccatataccagcagatgctccacagtttatccaacacagagtcaatgcctataatctgagtgataatgtttataagcaagactgggagaagagcaaagccaagaagtttgacattaaagtggacgccattcccctgttggcagccaaagccaacaccaagaacaccagcgatgtgatgtacaagaaagactatgaaaagagcaaagggaaaatgattggagccctcagcattaatgacgatccaaagatgctgcactccttgaagacagccaaaaaccagagtgatcgcgaatatcgaaaagattatgaaaagtcaaaaactatctacacggcacctcttgatatgctccaagtcactcaagctaagaaatctcaggcaattgccagcgacgttgattataagcacatcttacacagttacagctacccccctgatagcatcaatgtggaccttgccaagaaggcatatgcgctgcagagcgatgttgaatacaaagctgactacaatagctggatgaaaggttgtggctgggtgccttttgggtccttagaaatggaaaaggcaaagcgagcttcagacatcctcaatgagaaaaaatatcgccaacatccagacaccctcaagtttacctcgattgaagatgctccaattacagtacagtctaaaattaaccaggcccagaggagtgatatcgcttacaaagccaaaggagaggaaattattcacaaatacaacctgccaccagacctgccccagttcatccaggctaaagttaatgcctacaatatcagtgagaatatgtacaaagcagacttgaaagacttgagcaagaagggatatgacctgagaactgatgcgattcccatcagagctgccaaagctgccaggcaggcggcgagtgacgttcagtacaaaaaagactatgaaaaggctaaagggaaaatggttggcttccaaagtcttcaagatgaccctaaactggttcattatatgaacgtggccaagatacaatcagatcgggagtataaaaaagactatgagaagacaaagtccaaatacaacacgccccatgatatgttcaatgtcgtggcggctaagaaagcccaggatgtggtcagcaatgtcaactataagcattctctccatcattacacctacttgcctgacgccatggacctggagctgtctaagaacatgatgcagatacagagtgataacgtctacaaggaagactacaacaactggatgaaaggcattggctggattcctattggcagtctcgacgtcgaaaaagttaaaaaggccggtgatgctctgaatgaaaagaagtacaggcaacatccagacaccctcaaatttaccagcattgtggactccccagttatggtccaggcaaaacagaacacgaagcaagtcagtgatatcttatacaaggctaaaggagaagatgtgaaacataaatacaccatgagtcctgatcttcctcagtttctccaggccaagtgcaatgcttacaatataagtgacgtctgttataaacgggattggtatgacttaatagccaagggcaacaatgtgctgggcgatgctattcccatcactgcagccaaggcatcgagaaacattgccagtgattataaatacaaggaagcttatgagaagtcaaagggaaagcatgtgggtttcagaagcctccaggatgatcccaagctggtccactatatgaatgtggcaaagctgcagtctgatcgtgaatacaagaagaactatgagaacaccaaaaccagctaccatacccctggggacatggttagcatcacagctgcaaagatggcccaggatgtcgctaccaatgtcaactacaaacagccattgcatcattacacatacctacctgacgccatgagtcttgagcatacgaggaatgtcaatcaaattcagagtgataatgtgtataaagacgagtataacagcttcttgaagggcatcggatggatccctattggttccctggaggtggagaaggtcaagaaagcaggcgatgcattaaatgagaggaagtatcgacagcacccagataccgtcaagttcacaagtgtgcctgattccatgggcatggtgttggctcagcataacacaaagcagctaagtgatttgaactacaaggtagagggagagaaactgaagcacaagtatactattgaccctgaattgcctcagtttattcaagccaaagtcaacgccctcaacatgagtgatgctcattataaagcagattggaagaaaaccattgccaagggctatgatttgagaccagatgccatcccaattgttgctgcaaaaagttcaaggaatattgctagtgattgcaaatataaggaggcctacgagaaagccaaaggcaagcaagttggatttctcagtcttcaggatgatcctaaactggttcactacatgaatgtggccaaaatccagtctgatcgtgagtacaaaaagggctatgaagccagcaagaccaagtaccacacacctctggatatggtcagtgtgacagctgcaaagaaatctcaggaggttgccaccaacgccaactacagacagtcataccaccactacactctcctgcccgatgccttgaatgtggagcactccaggaatgccatgcagattcagagtgataatctgtacaaatctgacttcaccaattggatgaaagggatcggctgggtgcccatagagtccctggaggtggagaaggcaaagaaagcaggagagattcttagtgagaagaagtatcgccagcaccccgagaagctgaagttcacttacgccatggacacaatggaacaggcacttaacaagagtaacaaactgaacatggacaagaggctctacactgaaaaatggaacaaggacaagaccaccattcatgtcatgcctgacacaccggatattttactctccagagtaaaccaaatcaccatgagtgataaactgtacaaagctggctgggaagaggaaaagaagaaaggatatgacctgaggcctgatgccattgcaataaaggctgcaagagcctctagagacattgccagtgattacaaatacaagaaagcctatgaacaagccaaagggaaacacattggcttccggagcctggaagatgaccccaagctggtgcacttcatgcaagtggccaagatgcagtcagaccgggaatacaagaagggatatgagaaatccaagacctccttccacaccccggtggacatgctcagtgtggtggcagccaagaagtctcaggaagtggccaccaatgccaactacaggaacgtgatccatacctacaacatgcttcctgatgccatgagctttgaattggccaaaaatatgatgcagattcaaagtgataatcagtacaaggctgactatgctgacttcatgaagggcattggatggctccctctgggctccctggaagcagagaaaaacaagaaagccatggagattattagtgaaaagaagtaccgccagcacccagacactttgaagtattccacactcatggactcgatgaacatggttttggcccagaataatgcaaaaattatgaacgaacatctctacaaacaagcatgggaggctgacaaaaccaaagtccacatcatgcctgatatcccccagattattttggcaaaggcaaatgcaattaatatgagtgataaactctacaaactttccttggaagagtctaaaaagaaaggctatgatctcagacctgatgcaattcctatcaaagctgccaaggcttccagagatattgcaagtgattataaatacaagtacaattatgaaaaagggaaggggaaaatggttggtttccgcagtctcgaggatgatcccaaattagtccattccatgcaagtggctaagatgcaatctgatcgggagtacaagaaaaactatgagaacacaaagaccagctaccacacccctgccgacatgctcagtgtcacggctgcaaaggatgcccaagccaacatcaccaacactaactacaagcacctgattcacaagtacatcctccttccagatgcaatgaacattgagctgaccaggaatatgaatcgcatacagagtgataatgaatataagcaagattacaatgaatggtacaaagggcttggctggagtccagcaggttctctggaagtggagaaggccaagaaagcaactgaatatgccagtgatcagaaataccgccagcacccgagcaacttccagtttaagaagctgactgattccatggacatggtgcttgccaagcagaatgcacataccatgaacaagcatttatacaccattgattggaataaagataagaccaagattcatgtgatgcctgatacaccagatattttacaagccaagcagaatcaaacactgtatagtcagaaactctataaacttggatgggaagaagctttgaagaaaggctatgatctcccagttgatgcaatttctgtacagctagctaaagcttcaagagacattgctagtgattataaatacaaacaaggctaccgaaagcaacttggccaccatgttggattccggagtctgcaagatgacccaaaacttgtgttgtccatgaatgtagccaaaatgcagagtgaaagagaatacaagaaggactttgagaagtggaaaactaagttctccagcccagtggacatgttgggagtggtactggccaagaagtgtcaggagttggttagtgacgtggactacaagaactacctgcatcagtggacatgtctgcctgatcagaacgatgttgtgcaagctaagaaagtttatgaactgcaaagtgagaatctatataaatctgaccttgagtggctgagaggcataggatggagtcccttgggttctttagaggcagaaaagaacaagcgggcttcggaaatcatcagtgagaagaaatatcgtcagcctccagacagaaacaagttcaccagcattcctgatgccatggatatagttctggcaaagacaaatgccaaaaataggagtgatagactttatagagaagcttgggacaaagacaagactcagatccacatcatgcctgatacacctgacattgttctggctaaagcaaacttaatcaacacaagtgataaactctaccgaatgggttatgaggagctgaagagaaaaggttacgatcttcctgttgatgccataccaatcaaagcagcaaaagcctcccgggaaattgccagtgaatacaagtacaaggaaggctttcgcaagcagctcggccaccacattggtgcccggaacattgaagatgaccccaagatgatgtggtccatgcatgtggccaagatccagagtgacagggagtacaagaaggactttgagaagtggaagaccaagttcagcagcccagtggacatgctgggggtggtgttggccaagaagtgccagaccttagtcagcgacgtggactacaagaactacctgcaccagtggacatgcctgcccgaccagagcgatgtcatccatgctcggcaggcctatgacctccagagcgataatttgtacaagtcagaccttcagtggctaaaaggcattggctggatgactagtggttctctcgaggatgagaaaaataaacgagccacccagattttgagtgaccatgtttaccgtcagcacccagatcaatttaagttttccagccttatggattccataccaatggttttggcaaaaaacaatgctattaccatgaatcatcgcctctatacagaagcttgggataaagataaaaccactgtccacattatgccagatacccctgaagttttattagctaaacaaaacaaagtaaattacagtgagaaattgtataagcttggcctagaagaagccaagaggaaaggttatgacatgcgggtagatgccattcctatcaaggcagccaaggcctccagagatattgcaagtgaattcaagtacaaagaaggctatcgtaagcagctcggccaccacattggtgcccgagctatacgtgatgaccccaagatgatgtggtccatgcacgtggccaagatccagagtgacagggagtacaagaaggactttgagaagtggaagaccaagttcagcagcccagtggacatgctgggggtggtgctggccaagaagtgccagaccttagtcagcgatgtggactacaagaactacctgcaccagtggacatgcctgcccgaccagagcgacgtcatccatgctcggcaggcctatgacctccagagcgataatatgtacaagtctgatctccagtggatgagaggcattggctgggtgtccattggctctttggatgtggaaaaatgcaaaagggcaactgaaattttgagtgataaaatctatcgccagcctccagacagattcaaatttaccagtgtgactgactctctggaacaagtgctggccaagaacaatgctctcaacatgaataagcgtttatacacagaggcctgggacaaagacaagactcaaattcacataatgcctgatacaccagagattatgttggcaaggcagaacaaaatcaactacagtgagactctatacaaacttgccaatgaagaagcaaaaaagaaaggctacgacttgcgaagtgacgccatccccatcgtggctgccaaggcctccagggacgttatcagtgattacaaatacaaagatggttaccgcaagcagctcggccaccacattggagcccggaacattgaagatgaccccaagatgatgtggtccatgcatgtggccaagatccagagtgacagggagtataagaaggactttgagaagtggaagaccaagttcagcagcccagtggacatgctgggagtggtgttagccaagaagtgccagaccttagtcagcgatgtggactacaagaactacctgcacgagtggacgtgcctgcccgaccagaatgatgtcatccatgctcggcaggcctatgacctccagagcgataacatttacaaatctgatctccagtggctgagaggcattggctgggtccccattgggtctatggatgtggtcaagtgcaagagagctgctgaaatactgagtgataacatctaccgccagcctccggacaagctgaaatttaccagtgtgactgactctctagagcaggtgctggccaagaacaatgctctcaatatgaacaagcgcttatacacagaagcctgggacaaagacaagacccaagtccatattatgcctgatacacctgaaatcatgttggcaagacaaaataaaataaattatagtgagagcctctatcgtcaggccatggaagaagccaagaaagaaggctatgacttgagaagtgatgccattcccattgtggctgccaaggcctctcgggatattgccagtgattacaaatacaaagaagcatatcgtaaacagttgggtcaccacattggcgcccgagcagtacacgatgaccccaagataatgtggtccctccacattgccaaagtgcagagtgaccgtgagtacaagaaagattttgagaaatacaagacaaggtacagcagcccagtggacatgcttggtatcgttttggccaagaagtgtcagaccttggtcagcgatgtggactataaacatcctctgcatgaatggatctgcctgcccgaccagaatgacatcattcatgcacggaaagcctatgacctccagagtgacaatttgtataagtcagaccttgaatggatgaaaggcattggctgggttccgattgattccttggaagttgttagggccaagagagctggagaattacttagtgatactatctaccgtcagcgtccagaaacgctgaaatttaccagtataacggacactccggagcaggtgctggcaaaaaacaatgctttaaacatgaataagcgcttatatactgaagcctgggacaatgacaagaaaactattcatgtcatgcctgatacaccagaaatcatgttagccaaactcaaccgaataaactacagtgataaactctataaacttgctttggaagagtccaagaaggaaggctatgacttgcgtctggatgccattccaatccaagcagccaaggcttcaagagatattgctagtgattacaagtacaaggaaggctaccgcaaacagcttggccaccatattggggcccggaacattaaggatgacccgaagatgatgtggtccatccatgtggccaagatccagagtgacagggagtacaagaaggagtttgagaagtggaagaccaagttcagcagcccagtggacatgctgggggtggtgctggccaagaagtgtcagatccttgtaagcgacatagactacaagcatcccctgcatgaatggacctgcctgcctgatcagaatgacgtcattcaggctcggaaggcctatgacctgcagagtgatgctatttacaaatctgatcttgagtggctgagaggcataggatgggttcccattggctctgtagaggtcgagaaagtgaagagagctggagaaatcctgagtgacaggaagtatcgccagcctgcagaccagctcaaattcacatgcattaccgacactccggaaattgtcctagcaaagaataatgccctgacaatgagcaagcatttatacacagaagcttgggatgctgacaaaacctccatccacgtgatgccagacaccccagatatcctgctggccaagagtaattctgccaatatcagccaaaaactttacaccaagggatgggatgaatcaaagatgaaggactatgatctgagagcagatgctatttccatcaaaagtgccaaggcctccagggacatcgccagtgactacaaatacaaggaagcctatgagaaacagaaaggccaccacattggagcccagagcattgaagatgatcccaagattatgtgtgccatacatgcaggaaaaattcaaagtgaaagggagtacaagaaggaattccaaaagtggaaaaccaagttctctagcccagtggacatgttaagcatcttgctggccaagaaatgtcagactttggtcactgacattgattatcgcaattacctgcatgaatggacatgcatgccggatcaaaacgacattatccaagcaaaaaaggcctatgacctgcagagtgatgccctctacaaggctgacttggagtggttgcgtggcattggctggatgccccaagggtctcctgaagtgttgagagtcaaaaacgcccagaatatcttttgtgacagtgtctatcggacgcctgtggtgaaccttaagtacacaagcattgttgacacacctgaagtggtccttgctaaatcaaatgctgaaaatattagtattccaaagtacagagaggtttgggacaaggataaaacttcaatacacataatgccagatactccagaaattaatctcgctagagcaaatgctcttaatgtgagcaataaactttaccgtgagggctgggatgaaatgaaggcgggctgtgatgtccggctggatgccatccccatccaggctgccaaggcctccagggagattgccagtgactataaatataagcttgaccatgagaagcagaagggacactacgtgggcaccctcacagccagggatgacaacaagatccgctgggccctcatagctgacaagctccagaatgaacgagagtaccggctggactgggccaaatggaaggccaagatccagagccctgtggacatgctttccatcctgcactctaaaaattcccaggctctggtcagtgacatggattaccgcaattacctgcaccagtggacctgcatgcccgaccagaacgatgtgattcaggccaagaaggcctacgaactgcagagcgataatgtttacaaggctgacttggaatggttgcgtggaattgggtggatgccaaatgactccgtgtccgtcaatcatgccaaacatgccgcggacatcttcagtgagaaaaaatatcgcacaaaaatagaaactctcaactttacgcctgtggatgacagagttgattatgtgacagcgaaacaaagtggcgagatcctcgatgatattaaataccggaaagactggaatgccaccaaatcaaagtacaccctcacagaaacccccctgctgcacactgcccaggaggctgctaggatactggaccagtatctctacaaggaaggctgggagagacaaaaagccacaggttacattttgcctccagatgctgtgccatttgttcatgcccatcactgcaatgacgttcagagtgagctgaaatacaaagctgaacatgtgaagcaaaaaggtcattatgttggtgtcccgacgatgagagatgatcctaagctggtttggtttgagcatgcaggccagattcagaatgagagactatacaaagaggactatcacaaaacaaaggccaaaatcaatatacctgctgatatggtgtcagtcttggccgccaagcaggggcagacccttgtcagtgatattgattatcgtaattacttgcaccaatggatgtgtcatcctgaccagaacgatgttattcaggcaagaaaggcctatgacctacagagtgataatgtctacagagctgacctggagtggctccgaggcattggctggatcccactggattctgtggaccatgtaagggttactaagaaccaggaaatgatgagtcagatcaaatataagaaaaatgcccttgaaaactatcctaactttagaagtgtggtggatcctccagagattgttttagccaagattaattctgtcaatcaaagtgatgtaaaatataaagaaacatttaataaagcaaagggcaaatatacgttttcaccagatacaccacatatctcccactccaaagacatgggaaaactctacagtactatactgtataaaggggcgtgggagggcaccaaggcctatggctacaccctggatgagcgctacattcccattgttggagccaagcatgctgatctggtgaacagtgagcttaaatacaaagagacatatgagaagcagaaaggtcactacctggctggaaaagtgatcggtgaattccctggtgtggttcactgtctggatttccaaaagatgaggagtgcgttgaactacagaaaacattatgaggataccaaagcaaatgttcatatccccaatgacatgatgaatcacgtgctggctaaaaggtgccagtacatcctcagtgacctggagtatcgacactatttccaccagtggacgtctcttctggaagaacccaatgttatacgcgtccgaaacgcccaggagatcttgagtgataatgtgtataaagatgacctgaattggttgaaaggcattggttgctacgtttgggatacaccccaaatcctccatgccaagaaatcatacgaccttcagagtcagctacaatatacagcagcaggtaaagaaaatctacaaaactataatctggtcacagacacgcccctctatgtgactgctgttcagagtggcattaatgccagtgaggtaaaatataaagaaaattatcatcagattaaggacaaatacacaacagttctagaaacagtggattatgacagaaccagaaacctgaagaatctttacagcagtaacctgtacaaggaggcctgggatagagtgaaagccaccagctacatcctgccttccagcaccttgtccctgacacacgccaagaaccagaagcatctggccagccatatcaaatatcgggaagaatatgaaaagttcaaagctctttatacgttaccaagaagtgttgacgatgatccgaacacagcacggtgcctccgagttggcaagcttaacatcgatcgcctgtacagatcagtttatgaaaagaacaagatgaaaatccacatcgtgcccgacatggtagagatggttactgccaaggattcccagaagaaagtcagtgagattgattaccgcctgcgcctccacgaatggatttgccaccccgacttgcaagtcaatgatcacgtcaggaaagtcacagatcagatcagcgatattgtatacaaggatgacctcaactggctgaaaggcattggttgctacgtctgggacactcctgaaatcctccatgccaagcatgcttatgatctacgtgatgatatcaagtataaagctcacatgttgaaaacaaggaatgactacaagcttgtcacagatacaccagtctacgtgcaggctgtcaaaagtgggaaacagctaagtgacgctgtctaccactatgactatgtgcacagtgtcagaggcaaagtggctccaactaccaaaaccgtggatctggaccgggcccttcatgcatacaagctccagagttcgaatctatacaaaaccagcctgcgcaccctgcccactggatatagacttccaggtgacactcctcacttcaaacacatcaaggacacccgttacatgagcagttatttcaagtacaaagaagcctatgaacacaccaaggcatatgggtatacacttggccccaaagatgttccatttgtccacgtccggagagtcaacaatgttaccagcgagagactgtatcgggaattgtaccacaaactgaaagacaagatccatacaactcccgatacccctgagatccgccaagtcaagaagacacaagaggctgtcagtgagttgatctacaaatcagacttcttcaagatgcagggccacatgatctctctgccatacacaccccaagtgatccattgccgctatgtgggagacatcaccagtgatattaaatacaaagaggacttgcaggtcctgaagggatttggctgcttcctgtatgacactcctgacatggtccgctcccggcacctgcggaagctctggtctaattacctatacactgataaggcaaggaagatgcgagacaaatacaaagtggtgcttgacactccagaatacagaaaagtgcaagaactgaagacacatctgagtgagctggtctacagagctgcaggcaagaagcagaagtcaatctttacttcagttcctgatactcctgatcttttaagagccaagcgagggcagaagcttcagagtcagtatctgtatgttgaacttgccaccaaagagagaccccatcatcacgctggaaaccagaccacagccttgaagcatgctaaagacgtgaaggacatggtcagtgagaaaaagtacaagattcaatatgaaaagatgaaagacaagtacactccggttccagatacgccaatcctcatcagagccaagagggcttactggaatgccagtgatctacgctacaaagaaacatttcaaaagaccaaagggaaataccacacggtgaaagatgccctagacattgtctatcatcgcaaagtcacagatgacatcagtaaaataaaatacaaggagaactacatgagccagttgggtatctggaggtccattcctgatcgtccagagcatttccaccaccgagcagtcactgacacagtcagtgatgtaaaatataaagaagacttgacttggcttaaaggcattggttgctatgcctatgatacccctgatttcactctggctgaaaagaacaagactctctacagcaagtataagtataaagaagtatttgaaaggacaaagtcagatttcaagtatgttgccgactctccgatcaataggcatttcaagtatgcaactcaattgatgaatgagaaaaaatacagagctgattatgagcagcggaaagataaataccacctggtagtcgatgagcctagacatctgctggctaagaccgcaggcgaccagatcagtcagatcaaatacaggaaaaactatgaaaaatcaaaggacaaatttacctcaattgtggatactccagaacacctgcgtactacaaaagtcaacaaacaaatcagcgatatcctttataaattggaatacaacaaggccaaacccagaggctacaccacaatccacgacacacccatgttgctgcatgtccgcaaggttaaagatgaagtcagtgatctgaaatacaaagaagtataccaaagaaataaatccaactgcaccattgagccagatgctgttcatatcaaagcagccaaggacgcctacaaagtcaacaccaatctggactataagaaacagtacgaagccaacaaagcccactggaagtggactcctgaccgaccggacttcctccaggctgccaagtcatccctgcagcaaagcgattttgaatataagctggaccgggagttcctcaagggttgcaagctttctgtcactgatgacaaaaacacggtgctcgccctcaggaatactttaatagaaagtgatctgaaatacaaagagaaacatgtcaaggaaagaggaacctgccatgccgtacctgacacgcctcagatcctgctggcgaagactgtcagcaacctggtgtctgagaacaagtacaaggaccatgtcaagaagcacttggcacagggctcatacacaacactaccagagacccgggacactgttcacgtcaaggaagtgaccaagcatgtcagtgatacaaattacaaaaagaagtttgtcaaggagaaaggaaaatccaactactccatcatgctggagccaccagaggtgaaacatgctatggaagtggccaagaagcaaagtgatgtcgcttacagaaaagatgccaaagagaacctgcattacaccacagtggctgatcgaccagacatcaagaaggccacacaggcagccaaacaggccagtgaggtggagtacagagccaagcaccgcaaggaaggcagccatggcttaagcatgctcggtcgcccagacatagaaatggccaagaaggcagccaagctgagcagccaggttaaataccgagaaaatttcgataaagaaaagggcaagacaccaaaatacaatccaaaagacagccagctctacaaagtcatgaaagatgctaataatcttgcaagtgaggttaaatacaaggctgacctgaagaaacttcacaaacccgtgactgacatgaaggagtctctgatcatgaatcatgtcctgaatacaagccaacttgccagttcttaccagtacaagaagaagtatgagaagagtaaaggccactaccacaccatacccgataatctggagcagcttcacctaaaagaggccacagaattacagagtatagtgaaatacaaagaaaagtatgaaaaggaacgaggaaaacccatgctggactttgaaacaccaacgtacatcactgccaaagagtctcagcagatgcagagtgggaaagaatataggaaagattatgaagagtccattaaaggcagaaacctgactggcctggaggtcacgccagctttgttacatgtcaaatatgcaactaaaatagcaagcgagaaagagtacaggaaagatctagaggaaagcatccgtgggaagggcctcactgaaatggaagatacacctgacatgctaagagcaaagaatgccactcaaatcctcaatgagaaagaatataagcgagacctggaactggaagtcaaaggaagaggcctgaatgccatggccaatgaaactccggattttatgagggccaggaatgctactgatattgccagtcagattaagtataagcaatcagcagaaatggagaaagccaatttcacttctgtggttgatactccagagatcattcatgcccaacaagtcaagaatctttcaagccagaaaaagtacaaggaagatgctgagaagtccatgtcgtattatgagactgttttggacaccccagagatacagagagtccgggagaaccaaaagaacttcagccttctccaataccagtgtgaccttaaaaacagtaaaggaaaaattacagttgttcaagacacgccagaaatactgcgtgtaaaagaaaatcagaagaatttcagctcggttttatataaagaggatgtctcaccaggaacggctatcggaaagacacctgagatgatgagagtgaaacaaacacaggaccacattagctcggtgaagtataaggaagcaataggacaaggaactccaatccctgacctgcctgaagtgaaacgtgtgaaggagacgcagaagcacattagctcggttatgtacaaagaaaacttgggaacaggcattccaaccactgtgactccagagattgagagagtcaaacgcaatcaagagaactttagctcggttttgtacaaagaaaatttggggaaaggaatcccaacacctatcactccagagatggagagagtcaaacgcaatcaagagaactttagctcggtgttatacaaagaaaacatgggcaagggaactcctttagctgtcactcccgagatggagcgagtcaaacacaatcaagaaaatattagctcggttttgtacaaagaaaatgtggggaaagccaccgcaacccctgtcactcctgagatgcagagagtcaaacgcaatcaagaaaacattagctcggtgttatacaaagagaacctggggaaagcaacccccacaccctttactcctgagatggaaagagtgaaacgcaatcaagaaaactttagctcggtattgtacaaagagaacatgagaaaagcaactccgacacctgttactccagagatggagagagctaagcgcaaccaagaaaacattagctcggttctttattctgatagtttccggaaacaaatacaaggcaaagctgcctatgtattggatacccccgagatgagacgggtgagggagacccaacggcacatctcaacggtgaaatatcatgaagactttgagaaacacaagggttgcttcacaccagtggtgacagatcctatcactgaacgagtaaagaagaacatgcaggacttcagtgacattaactaccgaggtattcagaggaaagtggtagaaatggaacaaaaacggaatgaccaagatcaggagactattacaggtttacgtgtctggcgtactaatcctggttcggtttttgactatgatccagcagaagacaacatccagtcccgaagcttacacatgattaatgtccaagctcagcgccggagccgggagcagtcacgatctgccagtgcactaagcatcagtgggggtgaggagaagtctgagcattcagaagcaccagaccaccacctttcgacttacagcgacgggggtgtctttgcagtctcaacagcttacaaacatgcaaaaaccacagagctcccacaacaacgatcatcttcagttgctacccaacagacaacggtatcttccatcccatctcatccatctactgctggaaaaatcttccgtgccatgtatgactatatggctgctgatgcagatgaggtgtccttcaaggatggagatgccatcataaatgttcaagcaattgatgaaggctggatgtatggcactgtgcagaggactggcaggaccggaatgctcccagccaactacgttgaagctatttaggcatttcaaagcatcacacttgtctgcaggacttacagatcctgcagtcaatgtttcggtttagactctccactgttacctaagttctcaagctgcctatggtttttctgtgtcaatgtgatttatggtagtaccatcctttctcctttgggttttaaaataagttgcagaacagacactttaaaagcttctgcaatattatttctgtgcctagagtctttctccattataaacatgttttaacattatttcttttctaaaacagggattttgaatatgccaaacacattaaaggaaaaatagcagagatgttcaccttttccttgctgattgctaatgcttattatttctaattcagttctgaagttataaacttataatcaatacaaaccagcaactaataaaacctctaattctgcaactc

SEQ ID NO: 147365 - DNA, 20009 bp, Artificial Sequence
  derived and/or modified sequence
atggccgatgacgaggactatgaggaagtggttgaatattataccgaggaagttgtctacgaggaagtccccggagaaacgatcaccaaaatatacgagacaacgacgacgcgaactagcgactatgagcagtctgaaacatcgaaacccgctctcgcccaacccgcactggcgcagccggcaagtgctaaacctgttgagaggcgcaaggttatccgcaaaaaggtggacccttcaaagtttatgactccatatattgcccactcgcagaaaatgcaggacttattttcaccaaacaagtataaggagaagttcgagaaaaccaagggtcaaccctatgcttccaccacggacacccccgagctacgcagaattaaaaaggttcaagaccagctgtcagaagtcaagtaccgcatggatggagacgtcgctaaaacaatttgccatgtcgatgagaaagccaaagacatcgagcacgccaagaaagtgagccagcaggtgtccaaagtgttgtacaagcagaactgggaggacactaaagataagtatctgcttcctccagatgcacccgaactggtgcaggccgtgaaaaatacagcaatgttctccaagaaattgtatactgaggattgggaggccgataagagtcttttttacccctataatgactctcccgagcttaggagagtggcacaggcccagaaagctctttccgacgtggcttataagaaaggcctcgccgaacaacaagcacagttcacaccgttggcggatcctcccgatatcgaatttgcaaagaaagttactaaccaggtcagcaaacagaaatacaaggaagactatgaaaataagattaagggaaaatggagcgagacaccatgtttcgaagtggcaaatgccagaatgaatgcggataacataagtacacgcaagtatcaagaagactttgagaacatgaaggatcaaatctatttcatgcagactgaaacccctgagtacaagatgaacaagaaggcaggtgtagctgcttctaaagtcaagtacaaggaggattacgagaaaaataagggcaaagctgactataacgtgctcccagcttctgagaacccgcagctgcgacaactgaaggccgctggcgatgcactgtctgataaactttacaaggagaactacgagaaaaccaaagccaaatccatcaactactgtgagaccccaaagttcaagttggacacagtgctccagaatttttcatctgacaagaagtacaaagactcctatctcaaggacattctgggccattacgtcggaagttttgaggacccttatcactctcactgcatgaaggtcacagcacaaaatagtgataaaaactacaaagctgagtatgaagaggaccggggtaaaggtttcttcccacagactatcacccaagaatacgaagccatcaagaagcttgatcagtgtaaagatcacacctacaaggtgcacccagacaaaaccaagttcactcaggtcacggattcccctgtgctgctacaggcccaagtgaatagtaagcagctttcagatcttaactataaggccaagcacgagtcagaaaaatttaagtgtcatattcctccagacacacccgcattcatccagcacaaagtcaatgcctacaacctttcagacaacctgtataaacaagactgggaaaagagcaaggccaagaagtttgatatcaaagtggacgccataccactgctggcagccaaggccaacacaaagaacacctcagacgtcatgtataagaaggattacgaaaaaaataagggaaaaatgatcggagtcctgagtattaatgacgatccaaaaatgttgcactctctgaaggtggctaagaaccagtctgaccgcctgtacaaagagaactatgagaagacgaaagcaaagtctatgaattattgcgagacacccaagtaccaactagacacccagttaaagaacttctctgaggccagatacaaagatttgtatgtgaaggacgttctcgggcattacgtaggctctatggaagatccttaccatacacactgcatgaaagtagctgcacaaaatagtgacaagtcctataaagcagagtatgaggaggataaagggaaatgttatttcccccagacaattacccaggaatacgaagccatcaagaagctggaccagtgtaaggatcatacatataaagtgcatcctgataagactaagttcaccgctgtcacggacagcccagttctgctgcaagcgcaactgaacacaaaacaactttcagacctcaactataaggctaagcacgaaggggagaaattcaagtgccatattcctgccgacgctcctcagttcattcagcaccgggtgaatgcgtacaacctttcggataacgtgtataagcaggactgggagaaatctaaagccaagaaatttgatattaaggtcgacgctatccccttacttgcggctaaagctaacaccaaaaacacctcagacgtaatgtacaagaaagactacgaaaagtccaaaggcaagatgataggagctttgagtattaatgatgaccctaagatgcttcactcactcaagacagcaaagaaccagagcgacagggagtaccgcaaagactatgagaaatctaagaccatctataccgctcccctcgacatgctccaggtgacccaggctaaaaagtctcaggcgattgcctccgacgtcgattataagcacatcctgcacagttattcctatcccccagattctatcaatgtcgatcttgccaaaaaagcttatgccctgcagtccgatgtggagtacaaagcagattacaatagctggatgaagggttgtggttgggtgcctttcggatctttggaaatggagaaggccaaaagggccagtgatatcctcaacgaaaaaaaatatcgtcagcatcccgatactctaaagttcacctcgattgaggatgcccctatcacggttcagagcaagatcaaccaagcacagaggagcgatatcgcatacaaagctaagggggaggaaataattcacaaatacaatctgcctccagacctcccccagttcatccaggccaaggttaatgcatacaacataagtgaaaatatgtacaaggcagacttgaaggacctgagtaagaaggggtatgatcttcggacagatgccattcctatccgagctgccaaagccgctcgtcaggccgcatctgacgtccagtacaaaaaagactatgaaaaagctaagggcaagatggtcgggtttcagtcattgcaggatgatcccaaattggtgcattatatgaatgtggcaaagatccagagcgatagagagtataaaaaggattatgaaaaaacgaagagcaagtacaacacaccccatgatatgttcaacgtcgtggctgctaaaaaagcgcaggatgtcgtgagcaacgtgaattataaacattctctccatcactatacttatctcccagatgcaatggatctcgagctatccaaaaatatgatgcagatccaatcagataacgtatacaaagaagactacaataactggatgaaaggaattggatggatacccatcggttccctcgatgtagaaaaagttaaaaaggccggagatgctctgaatgagaagaagtacaggcagcaccctgatacgctcaagttcacatcaattgtagacagcccagtgatggtccaggccaagcagaacaccaagcaggttagcgacatcctgtacaaggcaaagggggaagacgttaagcacaaatacacaatgagccctgacctgcctcagtttttacaggccaagtgcaacgcatacaacatttcggacgtatgctataaacgggattggtatgacctaatcgccaaggggaacaacgttcttggtgatgcgatccccattacggctgctaaggctagccgcaacatagcctccgactataagtacaaagaggcttatgaaaaatccaaggggaagcacgtgggatttcgctcactccaggacgatcccaaactggtccactacatgaatgtggcaaaacttcagagcgatcgggagtacaagaaaaattacgaaaacaccaagaccagctaccacacaccaggagacatggtcagtattaccgcggctaagatggcacaggatgttgcaactaatgtaaactataagcagccgctgcaccactatacttacttacccgatgccatgtctctcgagcacactagaaacgtgaaccagatccagagcgataatgtgtacaaggatgagtataattcctttctcaaaggaattggatggatacctatcggatccctcgaggtggaaaaagttaagaaggctggggatgccctgaacgagcgaaaatacagacagcaccccgacacagtcaagtttaccagtgtgcctgactccatgggcatggtcctcgcccagcacaatacaaagcagttgtctgatctaaattataaggtggagggtgaaaagctaaagcataaatacactatcgaccccgagcttcctcagtttattcaagctaaggtgaatgccctgaatatgtccgacgctcactataaagccgattggaagaagacaatcgccaagggatatgaccttaggcccgacgccatcccaattgtggccgcaaaatctagcaggaacatcgctagcgattgcaaatataaagaggcctacgaaaaagcgaaaggtaaacaagtggggttcctgtcattgcaggatgatccgaagctcgtgcactacatgaacgtcgccaaaattcagtccgacagggagtacaagaagggatacgaggccagtaaaacaaagtaccacactcctctagatatggtttctgtcaccgcagccaagaagtcacaggaagtagcaacaaacgcaaattacagacaaagttaccatcattacaccctgcttcctgatgcactcaatgtggagcactcgcgcaatgctatgcagatacagagtgacaacctgtacaaatcggattttacgaactggatgaaagggatagggtgggtccccatcgagtcactcgaggtggaaaaagccaaaaaggctggagagattctgagcgagaagaagtataggcagcacccagagaaactcaagttcacctatgccatggacaccatggaacaagccttaaacaagagcaacaagcttaatatggataagcggttatataccgagaaatggaacaaggacaaaactactatccacgtgatgccagacacgccggatattctgctgagccgagtgaaccagattaccatgtctgacaagctgtataaggcgggttgggaggaggagaagaaaaagggatatgacttaaggccagacgcgatcgctattaaagccgcacgcgcaagcagggacatcgcttccgactacaaatacaagaaggcttatgagcaggccaagggtaaacacattggatttcgttctttggaagacgaccctaaactcgtccacttcatgcaagttgctaagatgcagagcgatcgtgagtataagaagggctatgagaagagtaagacctccttccatacccccgtggacatgctaagcgtggttgcggcaaaaaagtctcaggaggtcgcaaccaacgccaattaccgtaacgtcattcacacttacaacatgctgcctgatgctatgtccttcgagctggccaagaacatgatgcaaattcagagcgacaatcagtataaggcggactatgccgactttatgaagggtataggttggctgcctttgggctctctcgaagctgaaaagaataagaaggccatggagatcatatccgagaaaaaatacaggcagcatccagacaccctgaagtatagcacactgatggactctatgaacatggtgctcgcccagaacaatgccaagattatgaacgagcatctttataaacaggcttgggaggccgataaaacgaaagtacacattatgcctgacatccctcagattattctggccaaggctaacgcgattaatatgtctgataaactctacaagttgtctttagaagagagcaaaaaaaaggggtacgacctccgtcctgacgcgatccctatcaaggctgcgaaggcgtcacgtgatattgcgtcagattacaagtacaaatacaactacgaaaaaggcaaaggcaaaatggtgggatttcgatcactggaggacgaccccaaactcgttcactctatgcaggtagccaaaatgcagagcgatcgggagtataaaaaaaattacgagaatactaaaacttcgtaccacaccccagctgacatgttgtctgttactgctgcaaaggatgcccaagctaacatcaccaacaccaattacaaacacctaatccacaagtacatccttctgccggacgcaatgaatatcgaactaactcggaacatgaaccggatccagagtgataatgagtacaagcaggattacaatgagtggtataaaggattggggtggtcaccagccggttctctggaggtcgagaaggcgaaaaaggcgacggaatacgcttcagatcagaaatataggcagcatccttcaaattttcagtttaagaagctgacagattcgatggatatggtgctggcaaaacagaacgcgcacacgatgaacaaacatctttatactatcgattggaacaaagataagaccaagattcatgttatgcccgacacaccagatattctgcaggccaagcagaaccagacactatattcccagaagctttacaaactaggatgggaggaagccctgaagaaaggttacgatctgccagtcgatgctatctctgtgcaactggctaaagcatccagggacatcgccagcgactacaagtataaacagggctaccggaaacagctaggccaccacgttggtttcaggtcactccaggatgaccccaagctggtcctgtccatgaatgtggccaagatgcagagtgagagggagtacaagaaagactttgaaaagtggaagacgaagttttcttcccccgtcgatatgctgggcgtggtgcttgccaagaagtgccaggagctcgtttctgacgttgactacaagaattatctgcatcagtggacatgcctgccggatcagaacgacgtggtgcaggctaagaaagtatacgaactgcaatctgaaaatctttataaatctgatctcgaatggctgaggggcataggctggtccccactgggaagtctggaagcggagaaaaacaaaagagccagcgagatcatctccgagaaaaagtacagacaaccccctgacagaaataagttcacaagcatcccagacgctatggatatagtgcttgctaaaactaacgccaagaatagaagtgatcgcctgtaccgcgaggcttgggataaggataagactcagattcatattatgcccgacaccccggatattgtcctggctaaggccaatctaatcaatacgagcgataagttgtacagaatgggatacgaggagctgaagagaaaaggctatgaccttcccgtcgacgccatacctatcaaagcggcaaaggccagcagagagattgcttcagagtacaaatacaaggaaggcttccggaaacagctgggtcatcatataggggcacggaatatcgaagatgatcctaagatgatgtggtcaatgcacgtggccaagatacagtcagatcgggagtacaaaaaggactttgagaaatggaaaaccaaatttagttcacccgttgacatgttgggcgtggttcttgcgaaaaagtgccagactctggtgtctgatgtagactataaaaattacttacaccagtggacatgcttacccgatcagtccgacgtcatccatgccagacaggcgtatgacttgcagtccgataacttgtataaatcagatctgcagtggcttaaagggattgggtggatgacaagcggcagtctggaggatgaaaagaacaaaagagctacacagattttaagcgaccacgtctatcgtcagcatcccgaccagtttaaattctctagcctcatggacagcatacccatggtcctcgccaaaaacaatgcaatcaccatgaaccacagactatatacagaagcgtgggacaaagacaaaacaactgtacacatcatgcccgacacacctgaggtgcttctggccaagcagaataaggtcaactacagtgagaaactttacaagctgggattggaggaggctaaacgaaagggctacgacatgagagtggacgctatcccaatcaaggcggcaaaggcatctagagatatagcctctgagttcaagtataaggagggatacagaaaacagctgggacatcacatcggcgctagggcaattcgtgatgatccaaaaatgatgtggtcaatgcacgtggctaagattcagtctgatagagagtacaagaaggactttgagaaatggaaaaccaaatttagctccccagtggacatgctcggggtggtgctcgccaagaaatgccagactcttgtttcggatgtggactataaaaattatcttcaccaatggacctgtttgcccgatcagtctgacgttattcacgccaggcaagcttatgacttgcagtcagacaacatgtacaaaagtgacctccagtggatgagaggcattggctgggtcagtataggctccctcgacgtagagaaatgcaaaagggcaacagaaatcctttccgacaagatctatagacagccaccggacagattcaagtttactagcgtcacagattccctcgaacaggtactggctaagaataacgcaatcacaatgaacaaacgcctgtacacggaagcctgggataaagacaaaacccagatccacatcatgccagatacccccgaaattatgcttgcccgacagaataagattaattacagcgagaccctctacaagctagccaacgaagaagcgaagaaaaaaggctacgacctgagaagcgacgccattcctattgtggcagcaaaggcgtcaagggacgtcatcagtgattacaagtacaaggatggataccgcaagcagctgggacaccacatcggcgcacggaacatcgaggacgaccccaagatgatgtggtccatgcacgtggcaaaaattcaatctgatagagaatacaaaaaagacttcgagaagtggaagactaagtttagtagcccggtggacatgctgggggtcgtactagcaaaaaaatgtcagacactagtgtccgacgtcgattataaaaactacctccacgaatggacttgtctgccagaccagaacgacgtgattcatgcgcgacaggcatacgacctgcagtctgacaacatttacaaaagcgatctccagtggctccgaggcatcgggtgggtccccattgggagcatggatgtggtcaaatgtaaacgagcagcggaaatattgtccgataatatctacagacagccccctgacaagcttaagtttacaagtgtgacagatagccttgagcaagtattggctaagaataacgcactgaacatgaacaaaaggctctacactgaagcctgggataaggataagactcaggtgcatatcatgcccgatactcctgaaatcatgctcgccagacagaataaaatcaattattcagaaagcctgtatcgccaggccatggaggaagccaagaaagagggctatgatcttcggagcgacgcgatcccgatcgttgcagccaaagcaagccgggatattgcttctgactacaaatacaaagaggcttatcgcaagcagctgggccaccatattggtgccagggctgttcacgatgatcccaagatcatgtggtctctgcacattgcaaaagtgcaatctgacagagaatataaaaaagacttcgaaaagtataagacgagatacagctcaccagtggatatgctcggcatcgtgttggctaagaaatgccagaccttggtttcagatgtggattacaagcatcccttacatgagtggatctgccttcccgatcagaatgatattatccacgctcgcaaggcctacgacctccagtctgataacctgtataaaagcgatctcgaatggatgaaaggcattggatgggtgccgattgacagcctggaggtcgtgcgagccaagagagccggagaactgctaagtgatacaatttaccgacagaggccagaaacactgaagtttacgtctattacagacacccctgagcaggtgctcgccaagaacaatgccttgaatatgaataaaaggttgtataccgaggcctgggacaatgacaagaagacgattcacgttatgccggacactcctgaaatcatgctcgccaagttgaacaggatcaactactcagacaaattgtacaagttagccctggaagagtccaaaaaagagggttacgatttacgccttgacgcaatcccgatccaggctgccaaggcttcgagggacattgcaagcgactacaagtataaggagggttacaggaaacagctgggccaccacattggcgctcggaatattaaagatgaccctaagatgatgtggagcattcacgtggccaaaatacagtccgaccgagagtacaagaaagagttcgaaaaatggaaaaccaaattctccagtcctgttgatatgctcggtgtcgtgctcgccaaaaagtgccagatcctagtttcagacatagattacaagcatcctctgcacgagtggacgtgcctgcctgaccagaatgacgtaatccaggctcgtaaggcctacgatctacagagtgatgctatctataagtctgacctggagtggttgcggggaatcggctgggttcccatcggttccgtggaggtagaaaaagtcaaacgcgcaggtgaaatcctgtctgatagaaagtaccgacagccagccgatcagctgaagttcacttgtatcacggacacaccagaaatcgtgcttgccaaaaataatgctcttacaatgagcaagcacttgtatacagaggcatgggatgccgacaaaaccagcatccacgttatgcctgatacccccgatattctgttggctaaaagtaactccgccaatatcagtcagaagctttataccaagggctgggacgagtccaaaatgaaggattatgacctccgagcagatgctatttccatcaagagtgccaaggcctcccgagatatagcttcagactataagtacaaagaagcttatgagaagcagaagggacatcatatcggagcccagagcatcgaggatgaccccaaaataatgtgtgcaatccacgccggtaagattcagtctgaaagggagtataagaaggagttccaaaaatggaaaactaagttttcctcccctgtcgacatgctaagtattctgctggcgaaaaagtgtcagacgcttgtcacagatatagattacaggaactacctgcacgagtggacatgcatgccggaccagaatgatatcatacaagccaagaaagcctacgaccttcaatccgatgcactatacaaggccgacttagagtggttgaggggcatagggtggatgccacagggatcacccgaagtacttagagtgaaaaatgcacagaacatattttgtgacagcgtttatcggacacccgtggtgaacctgaaatacaccagcatcgtggacacccccgaagtcgtccttgcaaagagtaatgccgagaatataagcatccccaaatacagagaggtgtgggataaagataagacatccatacatataatgcctgacacccctgaaatcaacctggcgagggcaaacgccttgaatgtgagcaataagttgtaccgggagggctgggacgagatgaaagctggatgtgacgtgcgactcgatgccattcctatccaggcagcaaaggcatcccgagaaattgcatctgactataaatataaattagatcacgagaaacagaagggtcactacgtaggcactctgacagccagagacgataacaaaataagatgggcacttatagccgacaagttgcaaaatgaacgcgagtaccggctcgattgggcgaagtggaaggccaaaatccagagtcctgttgatatgctgagcattctgcatagcaaaaattcccaggctcttgtgtctgacatggactacagaaattatctgcatcagtggacttgcatgcccgaccaaaacgatgtgatacaggcaaagaaggcctacgaactgcagtctgataatgtctacaaggccgacctggagtggcttaggggaattggctggatgcccaatgactccgttagcgtgaaccacgcgaagcacgcagccgacatcttcagtgaaaaaaagtaccgcactaaaatcgagaccttaaattttacccctgtggatgaccgggtcgactatgttacagccaagcaatcaggcgagattcttgatgacatcaaataccgtaaggactggaacgctacgaaaagcaaatacacattgactgaaacgcctctactccataccgcccaggaggcagccaggatccttgaccagtacctctacaaggagggctgggagcgccagaaggcaactggttacattctccctcccgatgctgtacctttcgtgcacgcccaccactgtaatgacgttcagagcgaacttaagtacaaagccgagcatgtgaaacagaaaggacattacgtgggtgttccaacaatgcgtgacgatcccaaactggtctggtttgagcatgcaggccaaattcagaacgagagactctataaggaggactaccacaaaactaaggctaaaatcaatatcccagctgatatggtgagcgtgctggctgctaaacagggtcagaccctggtcagcgatatcgattataggaattacctccatcagtggatgtgtcaccccgaccaaaacgatgttattcaggcgcgaaaggcctacgacctgcagtctgacaatgtgtatcgtgcagaccttgagtggcttagaggtatcggatggattcctctggacagcgttgatcatgtcagggtaaccaagaaccaggagatgatgtcccagattaaatataagaagaatgctttagagaattaccccaactttagatccgtggtagaccccccagaaatcgttttagctaaaataaactccgtgaaccagtccgacgtcaaatacaaggagacttttaacaaggcaaagggaaagtatactttctctcctgacactccccacatcagccacagtaaagacatgggcaagctgtacagcactatactgtataaaggtgcctgggagggcacaaaggcctatggctataccctggatgaaaggtacattcccatcgtcggggctaaacatgctgatctcgtgaatagcgagttaaagtataaggaaacttatgagaagcagaaggggcactatttggctggcaaagttataggtgaatttcctggtgtcgtccattgcttggacttccagaaaatgaggtcagcactgaactatcgaaaacattatgaggacacgaaggccaatgtgcatatcccaaatgatatgatgaaccacgtccttgccaagagatgccagtacatactcagcgatctggaataccgccactacttccatcagtggacatcacttcttgaggaacctaacgtcatacgggttaggaacgctcaggagatcctcagtgataatgtgtacaaagatgaccttaactggctcaaaggaattggctgttacgtgtgggatacccctcagattctccacgcaaagaagtcctacgacctgcagagccagctacagtacacggccgctggtaaagagaatcttcagaattacaatctggtcactgacaccccattatacgtgactgctgtgcaatccggaatcaacgcctccgaggtgaagtacaaggaaaactatcaccaaatcaaagataagtatacaacagtgctggaaactgttgattacgacagaacccggaatctgaagaatctctattctagtaatctatacaaggaggcctgggatcgggtaaaggcaacctcatacattctgccctcttcaaccctgtcactgactcacgccaaaaatcagaaacacctcgcgtcccacatcaaataccgggaggaatacgaaaagttcaaagctctctacacactccctaggtctgtcgatgatgaccccaacaccgcgaggtgtctgcgggttggtaagttgaatattgatcggctctatcgatccgtctatgaaaaaaacaaaatgaaaatccacattgttccagacatggtggagatggtgacagcaaaagacagccagaaaaaggtgtcggagatcgactacaggcttcggctgcatgaatggatctgtcatcccgatctgcaggtgaacgatcatgttcggaaggtaactgaccagatcagtgacattgtatacaaggacgatctcaattggcttaaagggatcggatgttatgtttgggacactcccgagattcttcacgccaagcatgcgtacgatcttcgggacgacatcaagtacaaggcccacatgttgaagactcggaatgattacaagctggtcacagatacgcccgtgtatgtgcaggcagtgaaatccggcaagcagctaagcgacgccgtgtaccactacgactacgtgcactccgtgaggggcaaagttgccccaaccacaaagacggtagacctggacagggccctgcatgcctataagttgcagagctctaatctctacaagacctctctacgaactttgcccactggctacaggcttccaggcgatacaccacactttaagcacataaaggatacaagatatatgtcctcgtatttcaagtataaggaagcttacgagcatacaaaagcatacggctacacactaggacctaaggacgtccccttcgttcacgtacgccgagtcaacaacgtgacgagtgaaaggctctaccgcgagctgtatcacaaacttaaagataaaatccataccaccccagacacacccgagattagacaggtgaaaaaaactcaggaagccgtgagcgagcttatatataagagcgatttctttaaaatgcagggccatatgataagccttccctacacccctcaagtgatccattgtaggtacgtgggggatattacttccgacataaaatacaaagaggacttacaggtgctcaaaggcttcggttgctttttgtacgacacccccgacatggtgcgcagcaggcacctgcggaaactatggagcaattacttgtacacagacaaggctaggaagatgagagataagtataaggtggtgctcgacacgccggaatatcgcaaggtgcaggagcttaaaacgcatctgtcagagctagtgtacagggccgctgggaagaaacagaaaagtattttcacttccgtcccggatacacccgacctgctacgcgcaaagcgtgggcagaaactgcagtcacaatacctctatgtggagttggcgaccaaagaacgtccccaccaccacgcagggaatcagaccactgcactgaagcacgctaaggacgtgaaagacatggtttcagagaagaagtataaaattcagtacgagaagatgaaagacaaatacactccggtgccagatactcccatcctgatacgcgcaaaaagggcctattggaatgcgtcggacctgcgctacaaagaaacttttcagaagaccaaaggcaaatatcatacagtgaaagatgcactcgatatcgtgtaccaccggaaagtcactgatgacatttctaaaattaaatacaaggaaaactatatgtcccagctaggcatttggcgctccattcccgaccgacctgagcactttcatcatagagcggtcactgatacggtcagtgacgttaagtataaggaggacctcacatggctgaaggggattggatgctatgcttacgatacacccgacttcaccttagctgaaaaaaataaaaccctgtatagcaagtacaaatataaagaagttttcgagcgcacaaagtctgatttcaaatacgttgcagacagccctatcaacagacactttaagtatgccacgcaactgatgaatgagaagaaatatcgtgcggattacgaacagagaaaagataagtatcacctggtggtcgacgaaccacgccatctgctggcaaagaccgctggcgaccagatctctcaaatcaagtatcggaagaattacgaaaagagtaaggacaagttcaccagcatcgttgacacacccgaacacctaagaacaaccaaagtaaacaagcagatcagcgacatactctataagttggagtacaacaaagcgaagccacgcggatatactaccattcacgacacccccatgcttttacatgtacgaaaagtcaaggacgaagtgtccgacctaaaatacaaggaggtgtaccaacggaacaaaagtaattgcaccattgagcccgacgctgtgcacataaaggcagccaaggacgcttacaaggttaatactaatttggactacaagaagcagtatgaagctaacaaagcccactggaagtggacacccgacaggcccgacttcctgcaggccgctaagtcttcactgcagcagtcggattttgaatacaaactggaccgcgagttccttaagggctgcaagctgagcgtgaccgacgataagaatactgtgctggccctgcggaataccttgatcgagtctgatctgaagtataaggagaagcatgtgaaggaacgagggacatgccacgctgttccggacacacctcaaattttgctagccaagaccgtaagcaatctggtgtcagaaaacaaatataaagaccacgtgaagaaacacctcgcacaaggaagttacaccacgcttccggagacgagggacaccgttcatgtgaaggaggtcacaaagcacgtcagcgacaccaactataagaagaaatttgttaaagaaaaagggaagagcaattattccataatgctggagccccctgaagtgaagcacgcaatggaggtcgctaagaagcagtccgatgttgcttaccggaaggacgccaaggaaaacctgcactacacaaccgtggctgatcggccagacatcaaaaaagccacgcaagctgccaagcaggcatccgaggtcgagtaccgagccaagcataggaaagagggttcacacggtctgagcatgctggggcgtcctgatatcgaaatggccaagaaggcggctaagttgagctcccaagtgaaatatagggaaaattttgataaggaaaaaggaaaaacacccaaatataaccccaaggactcccagttgtacaaagtcatgaaggacgcgaataacttggcaagcgaggtcaagtataaagcggacttaaaaaagctccacaagcctgtgaccgatatgaaagaatccctgatcatgaaccatgtactgaatacgtctcagctggccagttcataccagtacaagaaaaaatatgagaagagcaagggccattaccataccatcccagacaaccttgaacagctgcaccttaaagaggctaccgagctgcaatcgattgtgaaatacaaggagaaatacgaaaaggagcgtggaaagccaatgctggatttcgagacacctacctatattaccgcgaaagagagtcaacagatgcagtcgggaaaggagtatagaaaagattacgaagagagtattaagggacgaaatctgaccggcctggaggtgactccggctctgttacacgtgaaatatgccacgaaaattgcatccgaaaaggagtaccgcaaggatttggaggaatctatccgtggaaagggcctcactgagatggaagacaccccagacatgttgagagctaagaacgcgacacagatactcaacgagaaggagtacaaaagagatttagaactggaggtgaagggtagaggcctgaacgctatggcgaatgagaccccagatttcatgcgggctcgcaatgcgaccgacattgcgtctcaaataaagtataaacaaagtgccgagatggagaaggcaaacttcacatcagtagtcgacacaccggaaataattcatgcacagcaagtgaaaaacctaagtagtcagaagaagtacaaggaggacgctgaaaagtccatgagctattatgaaactgtcctcgacaccccagaaattcaacgcgtgcgcgagaatcaaaaaaattttagcctgttacagtatcaatgtgacctgaagaacagcaaggggaagatcaccgtggtccaggacacaccagagattctgcgggtgaaggaaaatcagaaaaacttctccagcgtcctgtacaaagaggacgtatctcccggaactgcaataggaaagactccagagatgatgcgtgtgaaacaaacccaggatcatatttcctctgttaagtacaaggaggctatcggacaaggcacccccatcccggatctcccagaagtgaagcgtgtgaaagaaactcagaaacacatctcttcagttatgtataaggagaacctcggcacaggcatccccaccacggtgactcccgagatcgaacgcgtgaagagaaatcaggagaacttttcctcagtgttatataaggagaatctcggcaagggcattcccactcccatcacacctgagatggaacgagtgaagcgcaaccaggagaacttttcctcagttctgtataaagagaatatgggaaaggggactccactggctgtcacccccgagatggaaagagttaaacacaatcaggagaacatcagctcagtgctctataaagagaacgttggaaaagcaactgccactcctgtcacccccgagatgcaacgggttaagcgcaaccaggaaaatatatcaagcgtgctttacaaggaaaaccttggaaaagctactcctaccccttttacacctgagatggagcgcgtgaaacggaatcaggagaacttttcaagtgtcctgtacaaagagaatatgaggaaggccacccccacccccgtgactccagagatggagcgtgcaaaacggaaccaggagaacattagcagtgtgctctacagcgatagcttccgcaaacagattcagggtaaggcagcctacgttctggacacgccggagatgcggagggtccgtgaaactcagaggcatatatccaccgtgaagtatcacgaggacttcgagaaacacaaaggatgctttacaccagtagtgaccgatcccattacagaacgtgtcaagaaaaatatgcaggacttttcagacattaattacagagggattcaaaggaaggttgtggagatggaacagaagcggaatgaccaagatcaggaaacaattacaggacttcgcgtgtggcggaccaatcccggatcagtattcgactacgatccggctgaggacaatatccagagccgatctctccatatgattaacgtgcaggcacagagacgctcaagagaacagagccggtccgcctctgcactgagcatttctgggggtgaagaaaagtccgaacatagtgaagcacctgatcaccacctgagtacatactctgacggtggagtgttcgcagtctccaccgcctacaagcacgctaagaccactgagcttccccagcaacgctcatccagtgtggcaacacagcagacaaccgtctcttcgatccctagccacccttctacagcaggcaagatatttcgggctatgtacgattacatggctgccgatgctgatgaggtcagtttcaaagatggcgatgcaataataaatgttcaggcaatcgacgaaggctggatgtacgggaccgttcagagaactggccgtacggggatgctgccagccaactatgtggaagcaattta

SEQ ID NO: 147366 - DNA, 20010 bp, Artificial Sequence
  derived and/or modified sequence
atggcagatgacgaggactatgaggaggtggtggagtactacaccgaggaagtcgtgtatgaggaagtacccggtgaaactatcaccaaaatctatgagacgaccacgacaagaaccagcgactacgaacagtcagaaacgtccaagcccgcactggctcaacccgctttggcccaacctgccagtgctaaacccgtggagcgacgcaaggtgattagaaagaaagtcgatccctctaagtttatgacaccctacatcgctcactcacagaagatgcaggacctgttctccccgaataagtataaggaaaagttcgaaaaaactaaagggcagccctacgccagcaccactgacactccggagctgcgacgcataaaaaaggtacaggatcagttaagtgaagtcaaatatagaatggatggtgatgttgctaaaacgatttgtcacgtggatgagaaggcgaaggatatcgagcatgccaagaaagtctcacaacaggtttccaaggtgctctataagcagaattgggaagatacaaaggacaaatacctgcttccccctgacgcccctgagctggttcaggcagttaagaacacggcaatgttttcaaagaaactgtacacagaagactgggaagctgacaaatctctgttctatccatacaatgactcccccgagctgcgaagggtcgcacaggcgcagaaggctcttagcgacgtcgcctacaaaaagggccttgccgagcagcaagcccagttcacccctctggccgatccccctgatattgagttcgctaagaaggtgacgaaccaggtttccaagcagaaatacaaggaggattacgagaataagatcaagggaaagtggtccgaaacaccatgctttgaagtggccaacgctcgtatgaacgctgataatatcagcactcggaagtaccaggaagattttgaaaacatgaaagatcagatttactttatgcagactgagaccccagaatacaaaatgaacaaaaaggccggtgtagccgcttcaaaggtgaaatacaaagaggactacgagaagaataaggggaaagcagattataatgtgctgcctgccagtgaaaaccctcagcttcggcaactcaaggctgcaggcgatgccctgtccgacaagctttataaagaaaactatgaaaagactaaggccaaaagtatcaattattgtgaaacgcccaaattcaaactggacaccgtgttgcagaacttctcttcagataagaaatacaaggacagctatctgaaagacatcttggggcactatgttggttcctttgaagacccttatcacagccattgcatgaaagttaccgctcagaacagcgacaagaattacaaagctgaatatgaggaggatcgtggcaaaggcttcttcccacagaccatcacacaggaatatgaagcaatcaagaagctcgaccaatgtaaggatcacacctacaaggtgcaccccgataagaccaaattcacacaggtgacggactctccagtcctgctgcaggcccaggtgaattccaagcagctttcagacctgaattataaggccaaacatgaaagtgaaaagttcaagtgccacattccacccgacacacccgctttcattcaacataaggtgaatgcttataatttgagcgacaacctgtacaagcaggactgggaaaagtccaaagcaaagaagtttgatataaaagtcgacgccattcctctgctggccgcaaaggccaacacaaaaaacacttcggatgtgatgtacaagaaagactatgaaaaaaataaggggaaaatgatcggagtgctgagcattaacgacgacccaaaaatgctgcattccctgaaggtggcgaagaatcagtcagaccgtctttacaaagagaactacgagaagacaaaagcgaagtctatgaattactgtgagacacctaaataccagctggacacgcaactcaagaattttagtgaggcgcgttataaggatctgtatgtgaaagacgttctaggacactatgtggggtcaatggaagatccttaccacacacactgtatgaaagtggccgctcagaactccgataaaagctataaggccgaatacgaggaagacaagggaaaatgttatttcccccaaaccattactcaggaatatgaggccatcaagaaacttgaccagtgtaaagaccacacttacaaggtacaccctgataagacaaagttcacggctgtgaccgattctcccgtactgctccaggcccagctgaataccaaacagctgtctgatctcaattacaaagcgaaacacgagggagaaaaatttaaatgtcacattccagccgacgcccctcaatttatacagcatcgcgttaacgcatataacttgagtgacaatgtctacaagcaggactgggagaagtctaaggcaaagaagttcgacatcaaggtggacgccatcccccttctggccgctaaggcaaatacaaaaaacacctcagacgtgatgtacaagaaggattatgaaaaaagtaaaggcaaaatgattggagctctgtccattaatgacgaccccaagatgctccacagcctaaaaactgctaagaatcagtccgaccgggagtaccggaaggattatgaaaaatctaagacgatctacacggctccactggatatgctgcaagttacgcaggctaaaaagtcccaggcaatagcctctgatgtcgattacaagcatatattacacagctattcatatccccctgacagcatcaacgtggatctggcaaagaaggcatacgctctgcaatcagatgtcgagtacaaggccgactacaatagctggatgaagggctgcggctgggtgccctttggctccctcgagatggagaaagctaagcgggctagcgacatcctaaatgagaaaaagtataggcagcatcctgatacactgaaatttacttctatcgaagacgcgcctattactgtgcaaagcaagataaaccaggcacaacggagcgacattgcctataaagccaaaggcgaggagatcatacacaagtacaacctgccacccgaccttccacagttcatacaggccaaggttaatgcctataacatttccgaaaacatgtataaggccgatctgaaagacctttcaaaaaaggggtatgatctccgtactgatgcaatcccgatccgggcagcgaaggccgctagacaggctgcttctgatgtgcaatacaagaaggattacgagaaggccaagggaaagatggtgggatttcaatctctgcaagacgatcccaagctggttcactatatgaacgttgccaagattcaaagcgaccgggagtacaaaaaagactacgagaaaactaagtctaaatataacacaccacacgacatgtttaacgtggtcgcggcaaaaaaggcacaagatgtggtcagcaacgtcaattataagcactccctgcaccattatacctacttgcctgacgcgatggatctcgagttgagcaagaatatgatgcagatccagtctgacaacgtgtacaaggaggactacaacaactggatgaagggaatcgggtggatcccgatcggttccctggacgtcgaaaaggtgaagaaagccggagatgccctcaacgaaaaaaagtatcgccagcatcccgatacactgaagttcactagcatcgtggatagccccgtcatggtccaggctaagcaaaacacaaagcaggtaagcgatattctgtacaaagctaaaggcgaggacgtgaagcacaagtatactatgtctcccgacttgccacagtttcttcaggcaaagtgtaatgcctacaacatatccgatgtctgttacaaacgtgactggtacgacctgatcgccaaaggaaacaatgtgttgggggacgccatccctataactgccgctaaggcctcccggaatattgcatccgattacaaatacaaagaggcatacgagaaatctaaagggaaacacgtcggatttcgcagccttcaggatgaccccaagttggttcactacatgaatgttgctaaactccagtctgacagggagtacaaaaagaactacgagaatacaaaaacctcttaccacacaccaggcgatatggtgtccattactgccgcaaagatggcacaggacgtggcaacaaacgttaactacaagcagcccttacatcactatacatatctccctgatgcaatgagcctggagcataccagaaatgtcaaccagatccagtcggacaatgtctataaggacgaatataattctttcctcaaggggattgggtggatccctataggatcgctggaggtcgagaaggtcaagaaggcgggagatgccctgaacgaacgaaagtatcggcagcatccggacacggtgaagtttactagcgtgcctgacagtatgggcatggtgctggcacagcacaataccaagcagctgtcagatctcaattataaggtggagggcgaaaagctgaaacataagtacacaattgatcccgaactcccccaatttattcaggctaaggtgaatgccctgaacatgtcggatgctcactataaggcggactggaagaaaactatcgccaagggatacgacctgcgcccagacgccattccaatcgttgcggcaaagagcagtaggaatatagccagtgactgtaaatacaaggaagcatacgaaaaggcgaaggggaagcaggtaggttttctttcacttcaggacgatcctaagctggtccactacatgaacgtggctaagattcagtcggaccgtgagtacaagaagggctatgaagcaagtaagactaagtaccatacacccctggacatggtctccgttaccgctgctaagaaatctcaggaagtggctacaaacgcgaattatcgacagtcctaccaccattatacccttctgccagacgctcttaacgttgaacattcgaggaatgccatgcaaattcagagcgataacctttacaaaagcgactttacaaattggatgaagggaattgggtgggtcccaattgaatcactcgaggtagagaaagcaaagaaagccggtgaaatcctgagtgagaagaagtacagacagcacccggagaagctgaagttcacttatgccatggacacgatggagcaggccctgaacaagtctaacaaactgaatatggataagcgcctgtacacagagaaatggaataaagataaaacaacaattcatgtcatgcccgacacacctgacatactgctatcacgagtaaaccaaatcactatgtctgacaagctgtacaaagccggttgggaggaggaaaaaaagaaaggctacgacctaagacccgacgcaattgctattaaggctgccagagcaagccgtgatattgcctctgattataaatacaagaaggcatacgaacaggccaaaggcaagcatatcggctttagaagccttgaggacgaccccaagctcgtacacttcatgcaggtagccaagatgcagtccgacagagagtataaaaagggttacgaaaaaagcaagacttccttccacacacccgtcgatatgttaagtgttgtggccgcaaagaagtcccaggaagtggctacaaacgctaactaccgtaatgtcatccatacctataacatgttgccggacgctatgtccttcgaactcgctaaaaatatgatgcagattcagagcgacaaccaatataaagcagattatgccgattttatgaaaggcataggttggctgcctctcggatcactggaggctgagaagaataagaaagcaatggagataatctcagagaaaaaataccgtcagcatccagacactctgaaatattctactcttatggatagcatgaacatggtgctggctcagaataatgccaaaattatgaatgaacatctatacaagcaggcttgggaagctgacaagaccaaggtgcacattatgcctgacatccctcagattatcctggccaaagctaatgccattaacatgagcgataaactgtataaactgagcttggaggaaagcaaaaagaaagggtatgaccttaggccagacgccatcccaatcaaagctgccaaggccagtcgagacattgcctccgattataaatataaatataattacgagaagggcaagggcaaaatggtcggttttcggtcactagaagacgaccccaagcttgtgcactctatgcaagtcgccaagatgcagtccgacagggaatataagaagaactatgaaaataccaagacatcctaccatactcccgcagacatgctgagcgtaaccgccgcaaaggatgcacaggccaacattaccaacaccaattacaaacatctcattcataagtacatcctactgcctgatgccatgaacattgaattaactaggaacatgaacagaatccagtccgataacgagtataagcaggattataatgaatggtataaagggttgggttggtcccctgctgggtcccttgaggtcgagaaagcaaaaaaggcgacagagtacgctagtgaccagaaatacaggcagcacccaagtaacttccagttcaaaaagctgactgacagcatggacatggtgctggcgaagcagaatgctcataccatgaacaagcatctttacacgatcgactggaataaggacaagactaagattcatgtaatgccagacacacctgatattctccaagcaaagcagaaccagactttgtactcacagaagctgtacaagctggggtgggaagaagctctgaaaaaggggtacgatctgccagtcgatgcaatatctgtccagctcgctaaggccagtagagatattgcaagtgattataaatataagcagggctatcggaagcagcttggtcatcatgtagggttccgctcgctgcaggatgacccaaagctcgtgctgtccatgaacgtggccaagatgcagagtgagcgggagtataaaaaagactttgaaaagtggaaaactaagttttcctcccctgttgacatgttaggcgtcgtgctggcaaagaagtgccaggagttagtttcagatgtggattataaaaactaccttcatcagtggacttgtctcccagaccagaatgatgttgtccaggccaaaaaggtgtatgaactacaatctgaaaatctgtacaagtctgacttagaatggcttagggggatcggctggtcccctttggggagcctggaggcagagaaaaacaagcgcgcttctgagattattagcgaaaaaaagtaccgccagcctcctgacaggaataaattcacctctatccccgatgcaatggatatagtgttagccaagactaacgccaaaaaccgatctgacagactctaccgagaggcatgggataaggacaaaactcaaatccacatcatgcctgacacccctgacatagtgctggccaaagctaacctgatcaataccagcgacaaactttaccgaatggggtatgaggagctgaagcgtaagggctatgacctgcccgtcgatgcaatcccaatcaaggcagccaaggcctctcgagagatcgcatctgagtataagtacaaggaaggattccggaaacagctagggcatcatataggcgcacggaatatcgaggatgatcctaaaatgatgtggagtatgcacgtcgcgaaaatccaatctgaccgggaatacaaaaaagactttgagaagtggaaaacaaaattctcaagcccagtggacatgttaggggtggtgcttgccaagaagtgtcagactctcgtgagtgacgtggactataagaactatctacaccagtggacctgtttgcccgaccagtcagacgtgatccatgctagacaggcctatgacttgcagtcagacaatctctacaaatcagatcttcaatggctgaagggaattggttggatgacatcagggtcactggaagatgaaaagaataaacgcgcaactcagatcctgtctgaccacgtgtataggcagcatcccgaccagttcaagtttagctcgttaatggattccatacctatggtactggccaagaacaacgccatcaccatgaaccacagattgtacactgaggcatgggacaaagataaaactaccgtgcatattatgccggataccccggaagttcttttggccaagcagaacaaggtgaattacagcgagaagctttacaagctcggattggaggaagccaagaggaagggctacgatatgcgggttgacgctattcctatcaaagccgctaaagcgtcacgggacatcgcaagcgaatttaaatacaaggaggggtaccggaagcaactgggccaccatattggcgcacgcgcaatcagggacgatcccaagatgatgtggtctatgcatgtggccaaaattcagtccgatagggagtataagaaagattttgagaaatggaagactaaattcagtagtcccgtggacatgttgggcgttgtgttggctaagaaatgccagacccttgtaagcgatgtcgattacaaaaactacctacatcagtggacttgcttgcctgatcagtctgacgttattcacgctcgtcaggcctacgacttgcagagtgacaatatgtacaagtctgatcttcagtggatgcgtggaattggatgggtatccatcggttcactggatgtggagaaatgcaagcgggcaaccgaaatcctaagcgataagatttaccggcaacccccagataggttcaaatttacctccgtgactgattcccttgagcaggtgttagccaaaaacaacgcactgaatatgaacaagcggttgtataccgaggcctgggacaaggacaaaacacagattcatatcatgcccgacactccagaaattatgctggccagacagaacaagatcaactacagcgagaccctatacaaactcgcaaatgaagaagcaaaaaaaaaaggatacgaccttcgctccgatgccatccctattgtcgctgccaaggccagcagagatgttatctctgattacaagtacaaggacggctaccggaagcagctggggcatcacattggtgctagaaacatcgaggatgatccaaaaatgatgtggtctatgcacgttgccaagatccagtcagatagggagtacaagaaggatttcgagaagtggaagactaagttttcatcaccagtagacatgttaggcgttgtattggctaaaaaatgccagactctagtttctgatgttgattataagaattacctgcatgagtggacctgtttaccagatcagaacgatgtgatccacgcgaggcaagcatatgacctccagtccgacaacatatacaaatctgacctgcagtggctcagaggaattggttgggttcctatcgggagtatggatgtggtgaaatgtaagagggcagctgagattctcagcgataatatctacagacagcctcctgataaactgaaattcacctcagtgaccgactctctcgagcaagtgttagccaaaaataacgccttgaatatgaataaaaggctctatacagaggcctgggacaaagataagacccaggtacacattatgcccgatacacccgagattatgctcgcaagacagaataaaataaattactctgagagcctctaccgccaggccatggaagaagctaagaaggaaggatacgacctgcgcagcgacgccatacccatcgttgccgcaaaagcaagcagggacatcgcttccgactataaatataaagaagcatacaggaagcaactagggcaccacattggtgcgagagcagttcacgacgatcccaaaattatgtggtcgctgcatattgcaaaagttcaatctgaccgcgaatacaagaaagattttgaaaaatacaagactcgctactcaagtcccgtagatatgctgggtatagtgctggccaaaaagtgccagacactggtatctgacgtggactataagcacccactgcatgagtggatctgcctgccagaccagaatgatattattcacgcccgaaaggcttacgatctccagagtgacaatctttacaaatccgatctggagtggatgaagggtatcggctgggttccaatagattcactggaagtagtgagggctaagcgcgctggagagctgctgagcgacaccatctacagacagcgtccagagacactaaagttcaccagcattacggacacccccgagcaggttctggctaagaataacgctctcaatatgaataaacgcttatacacggaggcatgggacaatgacaaaaaaacaatccacgtgatgcctgacacacctgagattatgctggccaagctcaacagaattaattacagcgacaaattatacaaactggccctggaggagtccaagaaggagggctatgatctcagactggatgccatcccaatacaggccgctaaagcctcccgtgatatcgccagcgattataaatacaaggaggggtatcgcaagcagctgggccaccatattggcgcacgcaatatcaaagatgatccgaagatgatgtggtccatccacgttgcaaaaatccaaagtgacagagagtacaaaaaggagtttgaaaaatggaagacgaagttctcttcgcctgtggatatgctgggagtggtcttggctaagaaatgccagatcctggtctctgatattgactataaacaccccctgcacgaatggacttgtttgcccgatcagaatgacgttattcaggccaggaaagcttatgacctacaatctgatgcaatatacaagagtgacttagagtggcttcgtggaattgggtgggtgcctatcggttccgttgaggtcgagaaggtaaaacgagccggagaaattctcagtgatcggaagtacagacagcccgcagaccagctgaagtttacttgtatcactgacactcctgagatcgtgctggccaagaataatgcgctgaccatgtcaaagcacctgtatacagaggcatgggacgcagacaaaacatccattcatgtcatgcccgatacccccgatatactgcttgctaagagtaactcggcaaatatttctcagaaactctataccaagggctgggacgagtctaagatgaaagactacgaccttcgcgcagatgccatctccatcaaaagtgcaaaggcctcccgagatatcgcctccgactacaagtacaaggaggcttatgagaagcagaaaggtcaccacatcggcgctcagagtatcgaggacgaccccaagattatgtgcgccatacacgccggtaaaatacagagcgaacgcgaatataagaaggaatttcagaagtggaagactaagttttcctcgcctgttgacatgctctcgattttgctggccaaaaagtgccagaccctggtcaccgatattgactatcgcaactatctgcacgaatggacatgtatgcctgatcagaatgatatcatccaagcaaaaaaagcatacgatctgcagagtgatgctctttacaaggccgacctagaatggcttcgtggcatcggctggatgccccagggctctccagaagtgctcagggtcaagaatgcgcagaacattttttgcgacagtgtctaccgtactcctgtggtcaaccttaagtatacaagcattgtcgacacccctgaggtagttttggcgaagtcaaacgccgagaatattagtattccaaaatacagagaggtttgggacaaggacaagacctctattcatataatgcctgatactcctgaaatcaatctcgcacgggcaaatgcgcttaacgtgagcaataagctctacagagaaggatgggacgagatgaaggccggatgcgatgtcagactggacgcgattcccatccaggccgcaaaggcttcccgcgaaattgcaagcgattataaatacaaactcgaccatgagaagcagaaaggacactatgttgggaccctgaccgccagagacgataataagatccggtgggccctgatcgctgacaaacttcaaaatgagcgagagtaccggcttgactgggcgaaatggaaagcaaagatccagtctccagtcgacatgctgagcattttgcactccaaaaacagccaggccctcgtcagtgacatggactacagaaactatcttcatcagtggacatgcatgccagaccagaatgacgttattcaggcaaaaaaggcctatgaattgcagtccgacaatgtgtacaaagcggacctcgagtggttgagaggcatcggctggatgcccaacgattctgtttccgttaatcacgcaaaacatgccgctgacatttttagcgagaagaagtaccggaccaagattgagacgctgaacttcacccccgtggacgacagggttgattatgtcacggctaagcaaagtggcgagatcctggacgacataaaataccgaaaggactggaacgccaccaagtccaaatacaccctcaccgagactccccttctgcacacggctcaagaggcggcaaggatcctcgatcagtatctgtacaaagagggatgggagcgacagaaggcaaccggatacattcttcccccagacgccgtcccattcgtgcacgcccaccactgtaacgatgtgcaaagcgagttaaagtataaagccgaacatgttaaacagaaaggacattacgttggcgtgcccactatgagggacgatcccaaactcgtgtggtttgagcacgccggtcagatccagaatgaaaggttgtataaggaggattaccataaaaccaaagcaaaaatcaacatccctgcagacatggtgtctgtcctggccgctaagcagggccagaccctggtttccgacatagattatcggaactacctccatcagtggatgtgccatcccgatcagaacgatgtgatccaggccaggaaggcctatgatcttcaaagcgacaacgtctacagggctgatctggagtggctgagaggtattggttggattcccctcgactcagttgatcatgtgcgagtgactaaaaatcaagagatgatgagccagattaagtacaagaagaatgcactcgagaattaccctaattttcgtagcgtagtggaccccccagaaatcgtgctggctaaaatcaactccgtcaaccagagtgatgtaaagtataaagaaacattcaacaaggcaaaaggcaagtacaccttttctccagatacaccacacatctctcattcaaaagatatgggaaaattatactccacgatcctatataagggggcttgggagggcacaaaggcatatggttatactctggatgaacgctacatccccattgtgggcgctaagcacgctgatctggtgaactccgagctgaagtacaaggaaacctatgagaagcagaaaggccactatctggccggaaaggttattggcgagttccccggagtcgttcactgcctagactttcaaaagatgaggtcagctctgaactatagaaagcactacgaggatacaaaggccaacgttcacataccaaacgatatgatgaaccacgtcctggctaagcgctgtcagtacatcctctcagacctagagtacaggcactacttccaccagtggacttctctgctggaagagcccaatgtcattcgggtccggaacgcacaggaaatcctgtctgataacgtctataaggacgatttgaactggctgaaggggattggttgttatgtctgggataccccccagattcttcatgctaagaagtcatacgatctccagtctcagctgcaatatacggcagctggaaaggaaaacttgcaaaactataatttggttaccgacacccctctctatgtcactgcggttcaatccggtatcaatgctagcgaggtaaaatacaaggagaattatcatcagattaaggataagtatacaacagtcctggagaccgtggactatgataggaccaggaatctgaaaaatctctatagtagtaacctctacaaagaggcctgggatcgggttaaggcaaccagttacatcctcccgtcctccacattgtcgctaacccatgccaagaaccagaaacatctggctagtcacatcaagtatcgagaggaatatgaaaaattcaaagccttgtatacactgccccgatcagtggacgatgatccaaataccgccagatgtttgcgagtcggcaagctcaacatagacagactgtacaggtcggtttacgaaaagaataagatgaaaatacacatcgtgccggacatggtggaaatggtcaccgcgaaggacagccagaagaaagtttccgagatcgattataggctaaggctccacgagtggatttgtcatcccgacctgcaagtcaacgaccatgtgaggaaagtcaccgatcagatcagcgacatcgtctataaagacgaccttaattggctcaaggggattgggtgctacgtgtgggacaccccggagatcctgcatgccaaacacgcatacgacctcagagacgatattaagtacaaagcccatatgctgaaaacacgcaacgattacaagctcgtgacagatacacctgtctatgttcaggctgtcaaatctggaaagcaactgagcgacgccgtttatcactatgactacgtccactctgtgagaggcaaggtcgcccctactacaaaaaccgtggacttagaccgtgccctccacgcatataaacttcagtcatcgaatctgtataaaactagtcttaggactctgcctacgggataccggcttcccggagataccccccattttaagcatatcaaagatactaggtatatgtctagctattttaagtataaggaggcttacgagcacacaaaagcctacggctacactttgggccctaaggacgtgcccttcgttcacgtgcgccgagtcaataatgtgacgagcgaacgcctgtatcgcgagttatatcataaattaaaggataaaatccataccacacctgacacacctgaaatcaggcaagtgaaaaaaacgcaagaagcagtgtctgagttgatttataagagcgacttctttaaaatgcaggggcacatgatctctttaccttacacaccacaggtgatacattgccgctatgtgggagatattacatcagacatcaaatacaaagaagacctgcaggtgttgaaaggcttcggctgtttcctgtacgatacgcctgatatggttaggagcagacacctccgaaagttgtggtccaactatctgtacactgacaaggccagaaaaatgagggataaatataaagtggttttagacacgcccgagtacaggaaggtgcaggagctgaagacacacctttcagagctggtttatagggctgccggtaaaaaacagaagtcaatttttacaagtgtgccagatacacctgatttgttacgcgcaaaaagaggccagaagctgcagagccagtatctttatgtcgagctggccacaaaggagcgtccccaccatcacgcgggtaaccagaccacagccttgaagcatgccaaggatgtgaaggacatggtgagcgagaaaaagtacaagattcagtacgagaagatgaaggacaagtacacgccagtgccagatacccctatcttgataagggccaaaagagcctattggaatgccagtgatctacgttataaagagacgttccagaagactaaggggaagtaccacacggtcaaggacgcactagacatcgtatatcaccgaaaagtgacggacgacatctctaagatcaagtacaaagaaaattatatgtcccagctcgggatttggaggtccattccagataggcccgaacactttcaccaccgtgctgttaccgatacagtaagcgatgtgaagtataaggaagatctcacttggctcaagggcattggatgctatgcctacgatactcccgatttcaccctggcggagaaaaacaaaacgttgtattctaaatataaatataaggaagtgtttgagcggaccaagagtgacttcaagtatgtagcagactcgcccattaatagacactttaaatatgcgacacaactgatgaacgaaaaaaagtaccgtgccgattatgagcaaagaaaggacaaatatcacctggtggtcgacgaaccaaggcatctgctggccaaaacggctggggaccagatcagccagattaaataccgcaaaaattacgaaaagtccaaggacaagttcacaagcatcgtcgatacaccggaacacctcaggactaccaaagtaaataagcagatttctgatatactgtacaaactggaatacaacaaggccaagcctcggggttacaccactattcatgacacacccatgctacttcatgtgcgcaaagtcaaagacgaagtcagcgatctgaagtacaaggaagtctaccagcgaaacaaatccaactgcaccatcgagcctgatgccgtacacatcaaagctgcgaaggatgcctataaggtgaatacaaatctagactacaagaagcaatatgaagcaaataaggcacactggaagtggacacctgaccggccagactttctacaagctgctaagtcgtctctgcagcagtctgactttgaatacaagctggatcgcgaatttctgaagggctgtaagctttccgtgaccgatgataaaaacacagtgttggctctccggaataccctcatcgagtcggatctcaaatacaaagagaaacacgtgaaggaaaggggaacttgccacgctgttccagataccccccagattctgctcgctaaaactgtctcaaatctggtgagtgagaacaaatacaaggaccacgtcaaaaagcaccttgctcagggcagctacaccacccttcctgagacccgggacaccgttcacgtgaaggaagtgactaaacacgttagtgacaccaactataaaaagaaattcgtgaaggaaaagggaaaaagcaactatagcattatgttggaaccccctgaagtcaaacatgcgatggaggttgccaagaaacagtctgatgtggcctacaggaaagacgcaaaggagaacttgcattacactactgtagcagatagacccgatattaaaaaggccacgcaggccgctaaacaagcttctgaggtcgagtaccgggcaaaacacaggaaggaaggatctcatggcctgtccatgctgggaagacccgacatcgaaatggccaagaaggccgcaaaactctctagtcaggttaaataccgcgagaactttgacaaagaaaagggcaagacaccaaagtacaatccgaaggatagccagctatacaaggtgatgaaagacgctaataatcttgcgagcgaggtcaagtataaagcggaccttaaaaaactccacaaacctgtgactgatatgaaagaatctctgattatgaatcacgtgctaaataccagccagctggcctcaagttatcagtataagaagaagtatgaaaagagtaagggccactatcatacaattccagacaatctcgaacagttacatctgaaagaagctaccgaactgcagagcattgttaagtacaaggagaagtatgaaaaagagcggggtaagccaatgctggatttcgaaactcctacctatataaccgctaaggaaagccagcagatgcagtccgggaaggagtaccgtaaagattatgaggaaagcattaagggcagaaacctcaccggcctggaggttactcctgcccttctccatgtaaaatacgcgacgaaaattgccagcgagaaagaatataggaaggatctcgaggagagcataagaggaaagggtcttactgagatggaggacactccggatatgctgcgggcaaagaatgccacacagatcctgaacgaaaaagaatataagcgggacctcgagttggaagtgaaagggagagggttaaacgccatggccaatgaaacccctgatttcatgcgggcaagaaacgccaccgatatcgcatcccagatcaagtacaaacagtcagccgagatggaaaaggccaacttcacttccgtggtcgatacacccgaaatcatccacgcacaacaggtgaagaatttgtcttctcagaagaaatacaaggaggacgcagaaaagtctatgagttactacgagactgtgcttgacacacccgaaattcagagggtccgggaaaatcagaagaacttctccctgctccaataccagtgtgatcttaaaaattcaaaaggcaaaatcacggtggtgcaggatacgcccgagattcttcgtgtcaaggagaaccagaaaaacttctcctctgtgctttacaaagaagacgtgtcacctgggaccgccatcggtaagacgccggagatgatgcgagtgaagcagacccaggatcacataagctcagtgaaatataaggaggctatagggcagggcaccccaatccctgaccttccagaggtgaagcgcgttaaagaaacccaaaagcatatctccagcgtgatgtataaagagaatctggggactggtatccccacaacagtgacgcctgaaatagagagggtgaaaagaaaccaggaaaatttcagcagcgttttgtacaaagagaatcttggcaagggtatccccacaccaatcacacccgagatggaaagagtgaaaaggaaccaagagaattttagtagcgtcctctataaggaaaacatggggaagggcactcccctagctgtgaccccagaaatggaacgcgtcaaacacaaccaggagaacatctcctccgtcctctataaagaaaacgttggtaaggccacggccacccccgtcacccctgagatgcagcgtgtgaaacggaaccaagaaaatatctcgagtgtgctatacaaagagaacctgggcaaggctactcctacaccttttacaccggaaatggagcgagtgaagcgaaaccaggagaacttctcttcagtgctctacaaagagaatatgcgcaaggccactcccactcctgttacacccgagatggagcgggctaagcgcaatcaggagaacatctccagcgttctttattcagattctttcaggaagcagatccagggcaaggcggcttatgttctggataccccagagatgcgccgtgtgagagaaacccagcggcatatctcgaccgtgaaatatcacgaggacttcgaaaaacacaagggatgctttactcccgtggtgacagatcccattaccgagagggtcaagaagaacatgcaggatttcagcgatataaattatcgaggtatccagcgaaaggtggtggagatggagcagaagagaaatgaccaggaccaggagacaatcacaggcctgcgtgtgtggagaactaatcccggttcggtgtttgactatgatccagccgaggacaacattcagagccggtccctccacatgataaatgtgcaagcgcagcgcaggagcagagaacagtctagaagcgcctctgctctcagcataagcgggggagaggagaagagcgagcacagtgaggccccagaccatcatctgtcaacttattccgatggaggcgtattcgccgtcagcaccgcctataaacacgctaaaactacagaactcccccaacagcgctctagcagtgtggcgacacaacagacaaccgtgagcagcattccatcccatcctagcacggcaggcaaaattttccgtgctatgtatgactacatggccgcagatgctgatgaggtaagctttaaagatggagatgccattataaacgtgcaagccattgatgagggatggatgtacggaacggtacagagaacggggcgaacgggcatgttgcctgctaattacgtggaggcaatttaa

SEQ ID NO: 147367 - DNA, 20010 bp, Artificial Sequence
  derived and/or modified sequence
atggccgacgacgaggactacgaggaggtggtggagtactacaccgaggaggtggtgtacgaggaggtgcccggcgagaccatcaccaagatctacgagaccaccaccaccagaaccagcgactacgagcagagcgagaccagcaagcccgccctggcccagcccgccctggcccagcccgccagcgccaagcccgtggagagaagaaaggtgatcagaaagaaggtggaccccagcaagttcatgaccccctacatcgcccacagccagaagatgcaggacctgttcagccccaacaagtacaaggagaagttcgagaagaccaagggccagccctacgccagcaccaccgacacccccgagctgagaagaatcaagaaggtgcaggaccagctgagcgaggtgaagtacagaatggacggcgacgtggccaagaccatctgccacgtggacgagaaggccaaggacatcgagcacgccaagaaggtgagccagcaggtgagcaaggtgctgtacaagcagaactgggaggacaccaaggacaagtacctgctgccccccgacgcccccgagctggtgcaggccgtgaagaacaccgccatgttcagcaagaagctgtacaccgaggactgggaggccgacaagagcctgttctacccctacaacgacagccccgagctgagaagagtggcccaggcccagaaggccctgagcgacgtggcctacaagaagggcctggccgagcagcaggcccagttcacccccctggccgacccccccgacatcgagttcgccaagaaggtgaccaaccaggtgagcaagcagaagtacaaggaggactacgagaacaagatcaagggcaagtggagcgagaccccctgcttcgaggtggccaacgccagaatgaacgccgacaacatcagcaccagaaagtaccaggaggacttcgagaacatgaaggaccagatctacttcatgcagaccgagacccccgagtacaagatgaacaagaaggccggcgtggccgccagcaaggtgaagtacaaggaggactacgagaagaacaagggcaaggccgactacaacgtgctgcccgccagcgagaacccccagctgagacagctgaaggccgccggcgacgccctgagcgacaagctgtacaaggagaactacgagaagaccaaggccaagagcatcaactactgcgagacccccaagttcaagctggacaccgtgctgcagaacttcagcagcgacaagaagtacaaggacagctacctgaaggacatcctgggccactacgtgggcagcttcgaggacccctaccacagccactgcatgaaggtgaccgcccagaacagcgacaagaactacaaggccgagtacgaggaggacagaggcaagggcttcttcccccagaccatcacccaggagtacgaggccatcaagaagctggaccagtgcaaggaccacacctacaaggtgcaccccgacaagaccaagttcacccaggtgaccgacagccccgtgctgctgcaggcccaggtgaacagcaagcagctgagcgacctgaactacaaggccaagcacgagagcgagaagttcaagtgccacatcccccccgacacccccgccttcatccagcacaaggtgaacgcctacaacctgagcgacaacctgtacaagcaggactgggagaagagcaaggccaagaagttcgacatcaaggtggacgccatccccctgctggccgccaaggccaacaccaagaacaccagcgacgtgatgtacaagaaggactacgagaagaacaagggcaagatgatcggcgtgctgagcatcaacgacgaccccaagatgctgcacagcctgaaggtggccaagaaccagagcgacagactgtacaaggagaactacgagaagaccaaggccaagagcatgaactactgcgagacccccaagtaccagctggacacccagctgaagaacttcagcgaggccagatacaaggacctgtacgtgaaggacgtgctgggccactacgtgggcagcatggaggacccctaccacacccactgcatgaaggtggccgcccagaacagcgacaagagctacaaggccgagtacgaggaggacaagggcaagtgctacttcccccagaccatcacccaggagtacgaggccatcaagaagctggaccagtgcaaggaccacacctacaaggtgcaccccgacaagaccaagttcaccgccgtgaccgacagccccgtgctgctgcaggcccagctgaacaccaagcagctgagcgacctgaactacaaggccaagcacgagggcgagaagttcaagtgccacatccccgccgacgccccccagttcatccagcacagagtgaacgcctacaacctgagcgacaacgtgtacaagcaggactgggagaagagcaaggccaagaagttcgacatcaaggtggacgccatccccctgctggccgccaaggccaacaccaagaacaccagcgacgtgatgtacaagaaggactacgagaagagcaagggcaagatgatcggcgccctgagcatcaacgacgaccccaagatgctgcacagcctgaagaccgccaagaaccagagcgacagagagtacagaaaggactacgagaagagcaagaccatctacaccgcccccctggacatgctgcaggtgacccaggccaagaagagccaggccatcgccagcgacgtggactacaagcacatcctgcacagctacagctacccccccgacagcatcaacgtggacctggccaagaaggcctacgccctgcagagcgacgtggagtacaaggccgactacaacagctggatgaagggctgcggctgggtgcccttcggcagcctggagatggagaaggccaagagagccagcgacatcctgaacgagaagaagtacagacagcaccccgacaccctgaagttcaccagcatcgaggacgcccccatcaccgtgcagagcaagatcaaccaggcccagagaagcgacatcgcctacaaggccaagggcgaggagatcatccacaagtacaacctgccccccgacctgccccagttcatccaggccaaggtgaacgcctacaacatcagcgagaacatgtacaaggccgacctgaaggacctgagcaagaagggctacgacctgagaaccgacgccatccccatcagagccgccaaggccgccagacaggccgccagcgacgtgcagtacaagaaggactacgagaaggccaagggcaagatggtgggcttccagagcctgcaggacgaccccaagctggtgcactacatgaacgtggccaagatccagagcgacagagagtacaagaaggactacgagaagaccaagagcaagtacaacaccccccacgacatgttcaacgtggtggccgccaagaaggcccaggacgtggtgagcaacgtgaactacaagcacagcctgcaccactacacctacctgcccgacgccatggacctggagctgagcaagaacatgatgcagatccagagcgacaacgtgtacaaggaggactacaacaactggatgaagggcatcggctggatccccatcggcagcctggacgtggagaaggtgaagaaggccggcgacgccctgaacgagaagaagtacagacagcaccccgacaccctgaagttcaccagcatcgtggacagccccgtgatggtgcaggccaagcagaacaccaagcaggtgagcgacatcctgtacaaggccaagggcgaggacgtgaagcacaagtacaccatgagccccgacctgccccagttcctgcaggccaagtgcaacgcctacaacatcagcgacgtgtgctacaagagagactggtacgacctgatcgccaagggcaacaacgtgctgggcgacgccatccccatcaccgccgccaaggccagcagaaacatcgccagcgactacaagtacaaggaggcctacgagaagagcaagggcaagcacgtgggcttcagaagcctgcaggacgaccccaagctggtgcactacatgaacgtggccaagctgcagagcgacagagagtacaagaagaactacgagaacaccaagaccagctaccacacccccggcgacatggtgagcatcaccgccgccaagatggcccaggacgtggccaccaacgtgaactacaagcagcccctgcaccactacacctacctgcccgacgccatgagcctggagcacaccagaaacgtgaaccagatccagagcgacaacgtgtacaaggacgagtacaacagcttcctgaagggcatcggctggatccccatcggcagcctggaggtggagaaggtgaagaaggccggcgacgccctgaacgagagaaagtacagacagcaccccgacaccgtgaagttcaccagcgtgcccgacagcatgggcatggtgctggcccagcacaacaccaagcagctgagcgacctgaactacaaggtggagggcgagaagctgaagcacaagtacaccatcgaccccgagctgccccagttcatccaggccaaggtgaacgccctgaacatgagcgacgcccactacaaggccgactggaagaagaccatcgccaagggctacgacctgagacccgacgccatccccatcgtggccgccaagagcagcagaaacatcgccagcgactgcaagtacaaggaggcctacgagaaggccaagggcaagcaggtgggcttcctgagcctgcaggacgaccccaagctggtgcactacatgaacgtggccaagatccagagcgacagagagtacaagaagggctacgaggccagcaagaccaagtaccacacccccctggacatggtgagcgtgaccgccgccaagaagagccaggaggtggccaccaacgccaactacagacagagctaccaccactacaccctgctgcccgacgccctgaacgtggagcacagcagaaacgccatgcagatccagagcgacaacctgtacaagagcgacttcaccaactggatgaagggcatcggctgggtgcccatcgagagcctggaggtggagaaggccaagaaggccggcgagatcctgagcgagaagaagtacagacagcaccccgagaagctgaagttcacctacgccatggacaccatggagcaggccctgaacaagagcaacaagctgaacatggacaagagactgtacaccgagaagtggaacaaggacaagaccaccatccacgtgatgcccgacacccccgacatcctgctgagcagagtgaaccagatcaccatgagcgacaagctgtacaaggccggctgggaggaggagaagaagaagggctacgacctgagacccgacgccatcgccatcaaggccgccagagccagcagagacatcgccagcgactacaagtacaagaaggcctacgagcaggccaagggcaagcacatcggcttcagaagcctggaggacgaccccaagctggtgcacttcatgcaggtggccaagatgcagagcgacagagagtacaagaagggctacgagaagagcaagaccagcttccacacccccgtggacatgctgagcgtggtggccgccaagaagagccaggaggtggccaccaacgccaactacagaaacgtgatccacacctacaacatgctgcccgacgccatgagcttcgagctggccaagaacatgatgcagatccagagcgacaaccagtacaaggccgactacgccgacttcatgaagggcatcggctggctgcccctgggcagcctggaggccgagaagaacaagaaggccatggagatcatcagcgagaagaagtacagacagcaccccgacaccctgaagtacagcaccctgatggacagcatgaacatggtgctggcccagaacaacgccaagatcatgaacgagcacctgtacaagcaggcctgggaggccgacaagaccaaggtgcacatcatgcccgacatcccccagatcatcctggccaaggccaacgccatcaacatgagcgacaagctgtacaagctgagcctggaggagagcaagaagaagggctacgacctgagacccgacgccatccccatcaaggccgccaaggccagcagagacatcgccagcgactacaagtacaagtacaactacgagaagggcaagggcaagatggtgggcttcagaagcctggaggacgaccccaagctggtgcacagcatgcaggtggccaagatgcagagcgacagagagtacaagaagaactacgagaacaccaagaccagctaccacacccccgccgacatgctgagcgtgaccgccgccaaggacgcccaggccaacatcaccaacaccaactacaagcacctgatccacaagtacatcctgctgcccgacgccatgaacatcgagctgaccagaaacatgaacagaatccagagcgacaacgagtacaagcaggactacaacgagtggtacaagggcctgggctggagccccgccggcagcctggaggtggagaaggccaagaaggccaccgagtacgccagcgaccagaagtacagacagcaccccagcaacttccagttcaagaagctgaccgacagcatggacatggtgctggccaagcagaacgcccacaccatgaacaagcacctgtacaccatcgactggaacaaggacaagaccaagatccacgtgatgcccgacacccccgacatcctgcaggccaagcagaaccagaccctgtacagccagaagctgtacaagctgggctgggaggaggccctgaagaagggctacgacctgcccgtggacgccatcagcgtgcagctggccaaggccagcagagacatcgccagcgactacaagtacaagcagggctacagaaagcagctgggccaccacgtgggcttcagaagcctgcaggacgaccccaagctggtgctgagcatgaacgtggccaagatgcagagcgagagagagtacaagaaggacttcgagaagtggaagaccaagttcagcagccccgtggacatgctgggcgtggtgctggccaagaagtgccaggagctggtgagcgacgtggactacaagaactacctgcaccagtggacctgcctgcccgaccagaacgacgtggtgcaggccaagaaggtgtacgagctgcagagcgagaacctgtacaagagcgacctggagtggctgagaggcatcggctggagccccctgggcagcctggaggccgagaagaacaagagagccagcgagatcatcagcgagaagaagtacagacagccccccgacagaaacaagttcaccagcatccccgacgccatggacatcgtgctggccaagaccaacgccaagaacagaagcgacagactgtacagagaggcctgggacaaggacaagacccagatccacatcatgcccgacacccccgacatcgtgctggccaaggccaacctgatcaacaccagcgacaagctgtacagaatgggctacgaggagctgaagagaaagggctacgacctgcccgtggacgccatccccatcaaggccgccaaggccagcagagagatcgccagcgagtacaagtacaaggagggcttcagaaagcagctgggccaccacatcggcgccagaaacatcgaggacgaccccaagatgatgtggagcatgcacgtggccaagatccagagcgacagagagtacaagaaggacttcgagaagtggaagaccaagttcagcagccccgtggacatgctgggcgtggtgctggccaagaagtgccagaccctggtgagcgacgtggactacaagaactacctgcaccagtggacctgcctgcccgaccagagcgacgtgatccacgccagacaggcctacgacctgcagagcgacaacctgtacaagagcgacctgcagtggctgaagggcatcggctggatgaccagcggcagcctggaggacgagaagaacaagagagccacccagatcctgagcgaccacgtgtacagacagcaccccgaccagttcaagttcagcagcctgatggacagcatccccatggtgctggccaagaacaacgccatcaccatgaaccacagactgtacaccgaggcctgggacaaggacaagaccaccgtgcacatcatgcccgacacccccgaggtgctgctggccaagcagaacaaggtgaactacagcgagaagctgtacaagctgggcctggaggaggccaagagaaagggctacgacatgagagtggacgccatccccatcaaggccgccaaggccagcagagacatcgccagcgagttcaagtacaaggagggctacagaaagcagctgggccaccacatcggcgccagagccatcagagacgaccccaagatgatgtggagcatgcacgtggccaagatccagagcgacagagagtacaagaaggacttcgagaagtggaagaccaagttcagcagccccgtggacatgctgggcgtggtgctggccaagaagtgccagaccctggtgagcgacgtggactacaagaactacctgcaccagtggacctgcctgcccgaccagagcgacgtgatccacgccagacaggcctacgacctgcagagcgacaacatgtacaagagcgacctgcagtggatgagaggcatcggctgggtgagcatcggcagcctggacgtggagaagtgcaagagagccaccgagatcctgagcgacaagatctacagacagccccccgacagattcaagttcaccagcgtgaccgacagcctggagcaggtgctggccaagaacaacgccatcaccatgaacaagagactgtacaccgaggcctgggacaaggacaagacccagatccacatcatgcccgacacccccgagatcatgctggccagacagaacaagatcaactacagcgagaccctgtacaagctggccaacgaggaggccaagaagaagggctacgacctgagaagcgacgccatccccatcgtggccgccaaggccagcagagacgtgatcagcgactacaagtacaaggacggctacagaaagcagctgggccaccacatcggcgccagaaacatcgaggacgaccccaagatgatgtggagcatgcacgtggccaagatccagagcgacagagagtacaagaaggacttcgagaagtggaagaccaagttcagcagccccgtggacatgctgggcgtggtgctggccaagaagtgccagaccctggtgagcgacgtggactacaagaactacctgcacgagtggacctgcctgcccgaccagaacgacgtgatccacgccagacaggcctacgacctgcagagcgacaacatctacaagagcgacctgcagtggctgagaggcatcggctgggtgcccatcggcagcatggacgtggtgaagtgcaagagagccgccgagatcctgagcgacaacatctacagacagccccccgacaagctgaagttcaccagcgtgaccgacagcctggagcaggtgctggccaagaacaacgccctgaacatgaacaagagactgtacaccgaggcctgggacaaggacaagacccaggtgcacatcatgcccgacacccccgagatcatgctggccagacagaacaagatcaactacagcgagagcctgtacagacaggccatggaggaggccaagaaggagggctacgacctgagaagcgacgccatccccatcgtggccgccaaggccagcagagacatcgccagcgactacaagtacaaggaggcctacagaaagcagctgggccaccacatcggcgccagagccgtgcacgacgaccccaagatcatgtggagcctgcacatcgccaaggtgcagagcgacagagagtacaagaaggacttcgagaagtacaagaccagatacagcagccccgtggacatgctgggcatcgtgctggccaagaagtgccagaccctggtgagcgacgtggactacaagcaccccctgcacgagtggatctgcctgcccgaccagaacgacatcatccacgccagaaaggcctacgacctgcagagcgacaacctgtacaagagcgacctggagtggatgaagggcatcggctgggtgcccatcgacagcctggaggtggtgagagccaagagagccggcgagctgctgagcgacaccatctacagacagagacccgagaccctgaagttcaccagcatcaccgacacccccgagcaggtgctggccaagaacaacgccctgaacatgaacaagagactgtacaccgaggcctgggacaacgacaagaagaccatccacgtgatgcccgacacccccgagatcatgctggccaagctgaacagaatcaactacagcgacaagctgtacaagctggccctggaggagagcaagaaggagggctacgacctgagactggacgccatccccatccaggccgccaaggccagcagagacatcgccagcgactacaagtacaaggagggctacagaaagcagctgggccaccacatcggcgccagaaacatcaaggacgaccccaagatgatgtggagcatccacgtggccaagatccagagcgacagagagtacaagaaggagttcgagaagtggaagaccaagttcagcagccccgtggacatgctgggcgtggtgctggccaagaagtgccagatcctggtgagcgacatcgactacaagcaccccctgcacgagtggacctgcctgcccgaccagaacgacgtgatccaggccagaaaggcctacgacctgcagagcgacgccatctacaagagcgacctggagtggctgagaggcatcggctgggtgcccatcggcagcgtggaggtggagaaggtgaagagagccggcgagatcctgagcgacagaaagtacagacagcccgccgaccagctgaagttcacctgcatcaccgacacccccgagatcgtgctggccaagaacaacgccctgaccatgagcaagcacctgtacaccgaggcctgggacgccgacaagaccagcatccacgtgatgcccgacacccccgacatcctgctggccaagagcaacagcgccaacatcagccagaagctgtacaccaagggctgggacgagagcaagatgaaggactacgacctgagagccgacgccatcagcatcaagagcgccaaggccagcagagacatcgccagcgactacaagtacaaggaggcctacgagaagcagaagggccaccacatcggcgcccagagcatcgaggacgaccccaagatcatgtgcgccatccacgccggcaagatccagagcgagagagagtacaagaaggagttccagaagtggaagaccaagttcagcagccccgtggacatgctgagcatcctgctggccaagaagtgccagaccctggtgaccgacatcgactacagaaactacctgcacgagtggacctgcatgcccgaccagaacgacatcatccaggccaagaaggcctacgacctgcagagcgacgccctgtacaaggccgacctggagtggctgagaggcatcggctggatgccccagggcagccccgaggtgctgagagtgaagaacgcccagaacatcttctgcgacagcgtgtacagaacccccgtggtgaacctgaagtacaccagcatcgtggacacccccgaggtggtgctggccaagagcaacgccgagaacatcagcatccccaagtacagagaggtgtgggacaaggacaagaccagcatccacatcatgcccgacacccccgagatcaacctggccagagccaacgccctgaacgtgagcaacaagctgtacagagagggctgggacgagatgaaggccggctgcgacgtgagactggacgccatccccatccaggccgccaaggccagcagagagatcgccagcgactacaagtacaagctggaccacgagaagcagaagggccactacgtgggcaccctgaccgccagagacgacaacaagatcagatgggccctgatcgccgacaagctgcagaacgagagagagtacagactggactgggccaagtggaaggccaagatccagagccccgtggacatgctgagcatcctgcacagcaagaacagccaggccctggtgagcgacatggactacagaaactacctgcaccagtggacctgcatgcccgaccagaacgacgtgatccaggccaagaaggcctacgagctgcagagcgacaacgtgtacaaggccgacctggagtggctgagaggcatcggctggatgcccaacgacagcgtgagcgtgaaccacgccaagcacgccgccgacatcttcagcgagaagaagtacagaaccaagatcgagaccctgaacttcacccccgtggacgacagagtggactacgtgaccgccaagcagagcggcgagatcctggacgacatcaagtacagaaaggactggaacgccaccaagagcaagtacaccctgaccgagacccccctgctgcacaccgcccaggaggccgccagaatcctggaccagtacctgtacaaggagggctgggagagacagaaggccaccggctacatcctgccccccgacgccgtgcccttcgtgcacgcccaccactgcaacgacgtgcagagcgagctgaagtacaaggccgagcacgtgaagcagaagggccactacgtgggcgtgcccaccatgagagacgaccccaagctggtgtggttcgagcacgccggccagatccagaacgagagactgtacaaggaggactaccacaagaccaaggccaagatcaacatccccgccgacatggtgagcgtgctggccgccaagcagggccagaccctggtgagcgacatcgactacagaaactacctgcaccagtggatgtgccaccccgaccagaacgacgtgatccaggccagaaaggcctacgacctgcagagcgacaacgtgtacagagccgacctggagtggctgagaggcatcggctggatccccctggacagcgtggaccacgtgagagtgaccaagaaccaggagatgatgagccagatcaagtacaagaagaacgccctggagaactaccccaacttcagaagcgtggtggacccccccgagatcgtgctggccaagatcaacagcgtgaaccagagcgacgtgaagtacaaggagaccttcaacaaggccaagggcaagtacaccttcagccccgacaccccccacatcagccacagcaaggacatgggcaagctgtacagcaccatcctgtacaagggcgcctgggagggcaccaaggcctacggctacaccctggacgagagatacatccccatcgtgggcgccaagcacgccgacctggtgaacagcgagctgaagtacaaggagacctacgagaagcagaagggccactacctggccggcaaggtgatcggcgagttccccggcgtggtgcactgcctggacttccagaagatgagaagcgccctgaactacagaaagcactacgaggacaccaaggccaacgtgcacatccccaacgacatgatgaaccacgtgctggccaagagatgccagtacatcctgagcgacctggagtacagacactacttccaccagtggaccagcctgctggaggagcccaacgtgatcagagtgagaaacgcccaggagatcctgagcgacaacgtgtacaaggacgacctgaactggctgaagggcatcggctgctacgtgtgggacaccccccagatcctgcacgccaagaagagctacgacctgcagagccagctgcagtacaccgccgccggcaaggagaacctgcagaactacaacctggtgaccgacacccccctgtacgtgaccgccgtgcagagcggcatcaacgccagcgaggtgaagtacaaggagaactaccaccagatcaaggacaagtacaccaccgtgctggagaccgtggactacgacagaaccagaaacctgaagaacctgtacagcagcaacctgtacaaggaggcctgggacagagtgaaggccaccagctacatcctgcccagcagcaccctgagcctgacccacgccaagaaccagaagcacctggccagccacatcaagtacagagaggagtacgagaagttcaaggccctgtacaccctgcccagaagcgtggacgacgaccccaacaccgccagatgcctgagagtgggcaagctgaacatcgacagactgtacagaagcgtgtacgagaagaacaagatgaagatccacatcgtgcccgacatggtggagatggtgaccgccaaggacagccagaagaaggtgagcgagatcgactacagactgagactgcacgagtggatctgccaccccgacctgcaggtgaacgaccacgtgagaaaggtgaccgaccagatcagcgacatcgtgtacaaggacgacctgaactggctgaagggcatcggctgctacgtgtgggacacccccgagatcctgcacgccaagcacgcctacgacctgagagacgacatcaagtacaaggcccacatgctgaagaccagaaacgactacaagctggtgaccgacacccccgtgtacgtgcaggccgtgaagagcggcaagcagctgagcgacgccgtgtaccactacgactacgtgcacagcgtgagaggcaaggtggcccccaccaccaagaccgtggacctggacagagccctgcacgcctacaagctgcagagcagcaacctgtacaagaccagcctgagaaccctgcccaccggctacagactgcccggcgacaccccccacttcaagcacatcaaggacaccagatacatgagcagctacttcaagtacaaggaggcctacgagcacaccaaggcctacggctacaccctgggccccaaggacgtgcccttcgtgcacgtgagaagagtgaacaacgtgaccagcgagagactgtacagagagctgtaccacaagctgaaggacaagatccacaccacccccgacacccccgagatcagacaggtgaagaagacccaggaggccgtgagcgagctgatctacaagagcgacttcttcaagatgcagggccacatgatcagcctgccctacaccccccaggtgatccactgcagatacgtgggcgacatcaccagcgacatcaagtacaaggaggacctgcaggtgctgaagggcttcggctgcttcctgtacgacacccccgacatggtgagaagcagacacctgagaaagctgtggagcaactacctgtacaccgacaaggccagaaagatgagagacaagtacaaggtggtgctggacacccccgagtacagaaaggtgcaggagctgaagacccacctgagcgagctggtgtacagagccgccggcaagaagcagaagagcatcttcaccagcgtgcccgacacccccgacctgctgagagccaagagaggccagaagctgcagagccagtacctgtacgtggagctggccaccaaggagagaccccaccaccacgccggcaaccagaccaccgccctgaagcacgccaaggacgtgaaggacatggtgagcgagaagaagtacaagatccagtacgagaagatgaaggacaagtacacccccgtgcccgacacccccatcctgatcagagccaagagagcctactggaacgccagcgacctgagatacaaggagaccttccagaagaccaagggcaagtaccacaccgtgaaggacgccctggacatcgtgtaccacagaaaggtgaccgacgacatcagcaagatcaagtacaaggagaactacatgagccagctgggcatctggagaagcatccccgacagacccgagcacttccaccacagagccgtgaccgacaccgtgagcgacgtgaagtacaaggaggacctgacctggctgaagggcatcggctgctacgcctacgacacccccgacttcaccctggccgagaagaacaagaccctgtacagcaagtacaagtacaaggaggtgttcgagagaaccaagagcgacttcaagtacgtggccgacagccccatcaacagacacttcaagtacgccacccagctgatgaacgagaagaagtacagagccgactacgagcagagaaaggacaagtaccacctggtggtggacgagcccagacacctgctggccaagaccgccggcgaccagatcagccagatcaagtacagaaagaactacgagaagagcaaggacaagttcaccagcatcgtggacacccccgagcacctgagaaccaccaaggtgaacaagcagatcagcgacatcctgtacaagctggagtacaacaaggccaagcccagaggctacaccaccatccacgacacccccatgctgctgcacgtgagaaaggtgaaggacgaggtgagcgacctgaagtacaaggaggtgtaccagagaaacaagagcaactgcaccatcgagcccgacgccgtgcacatcaaggccgccaaggacgcctacaaggtgaacaccaacctggactacaagaagcagtacgaggccaacaaggcccactggaagtggacccccgacagacccgacttcctgcaggccgccaagagcagcctgcagcagagcgacttcgagtacaagctggacagagagttcctgaagggctgcaagctgagcgtgaccgacgacaagaacaccgtgctggccctgagaaacaccctgatcgagagcgacctgaagtacaaggagaagcacgtgaaggagagaggcacctgccacgccgtgcccgacaccccccagatcctgctggccaagaccgtgagcaacctggtgagcgagaacaagtacaaggaccacgtgaagaagcacctggcccagggcagctacaccaccctgcccgagaccagagacaccgtgcacgtgaaggaggtgaccaagcacgtgagcgacaccaactacaagaagaagttcgtgaaggagaagggcaagagcaactacagcatcatgctggagccccccgaggtgaagcacgccatggaggtggccaagaagcagagcgacgtggcctacagaaaggacgccaaggagaacctgcactacaccaccgtggccgacagacccgacatcaagaaggccacccaggccgccaagcaggccagcgaggtggagtacagagccaagcacagaaaggagggcagccacggcctgagcatgctgggcagacccgacatcgagatggccaagaaggccgccaagctgagcagccaggtgaagtacagagagaacttcgacaaggagaagggcaagacccccaagtacaaccccaaggacagccagctgtacaaggtgatgaaggacgccaacaacctggccagcgaggtgaagtacaaggccgacctgaagaagctgcacaagcccgtgaccgacatgaaggagagcctgatcatgaaccacgtgctgaacaccagccagctggccagcagctaccagtacaagaagaagtacgagaagagcaagggccactaccacaccatccccgacaacctggagcagctgcacctgaaggaggccaccgagctgcagagcatcgtgaagtacaaggagaagtacgagaaggagagaggcaagcccatgctggacttcgagacccccacctacatcaccgccaaggagagccagcagatgcagagcggcaaggagtacagaaaggactacgaggagagcatcaagggcagaaacctgaccggcctggaggtgacccccgccctgctgcacgtgaagtacgccaccaagatcgccagcgagaaggagtacagaaaggacctggaggagagcatcagaggcaagggcctgaccgagatggaggacacccccgacatgctgagagccaagaacgccacccagatcctgaacgagaaggagtacaagagagacctggagctggaggtgaagggcagaggcctgaacgccatggccaacgagacccccgacttcatgagagccagaaacgccaccgacatcgccagccagatcaagtacaagcagagcgccgagatggagaaggccaacttcaccagcgtggtggacacccccgagatcatccacgcccagcaggtgaagaacctgagcagccagaagaagtacaaggaggacgccgagaagagcatgagctactacgagaccgtgctggacacccccgagatccagagagtgagagagaaccagaagaacttcagcctgctgcagtaccagtgcgacctgaagaacagcaagggcaagatcaccgtggtgcaggacacccccgagatcctgagagtgaaggagaaccagaagaacttcagcagcgtgctgtacaaggaggacgtgagccccggcaccgccatcggcaagacccccgagatgatgagagtgaagcagacccaggaccacatcagcagcgtgaagtacaaggaggccatcggccagggcacccccatccccgacctgcccgaggtgaagagagtgaaggagacccagaagcacatcagcagcgtgatgtacaaggagaacctgggcaccggcatccccaccaccgtgacccccgagatcgagagagtgaagagaaaccaggagaacttcagcagcgtgctgtacaaggagaacctgggcaagggcatccccacccccatcacccccgagatggagagagtgaagagaaaccaggagaacttcagcagcgtgctgtacaaggagaacatgggcaagggcacccccctggccgtgacccccgagatggagagagtgaagcacaaccaggagaacatcagcagcgtgctgtacaaggagaacgtgggcaaggccaccgccacccccgtgacccccgagatgcagagagtgaagagaaaccaggagaacatcagcagcgtgctgtacaaggagaacctgggcaaggccacccccacccccttcacccccgagatggagagagtgaagagaaaccaggagaacttcagcagcgtgctgtacaaggagaacatgagaaaggccacccccacccccgtgacccccgagatggagagagccaagagaaaccaggagaacatcagcagcgtgctgtacagcgacagcttcagaaagcagatccagggcaaggccgcctacgtgctggacacccccgagatgagaagagtgagagagacccagagacacatcagcaccgtgaagtaccacgaggacttcgagaagcacaagggctgcttcacccccgtggtgaccgaccccatcaccgagagagtgaagaagaacatgcaggacttcagcgacatcaactacagaggcatccagagaaaggtggtggagatggagcagaagagaaacgaccaggaccaggagaccatcaccggcctgagagtgtggagaaccaaccccggcagcgtgttcgactacgaccccgccgaggacaacatccagagcagaagcctgcacatgatcaacgtgcaggcccagagaagaagcagagagcagagcagaagcgccagcgccctgagcatcagcggcggcgaggagaagagcgagcacagcgaggcccccgaccaccacctgagcacctacagcgacggcggcgtgttcgccgtgagcaccgcctacaagcacgccaagaccaccgagctgccccagcagagaagcagcagcgtggccacccagcagaccaccgtgagcagcatccccagccaccccagcaccgccggcaagatcttcagagccatgtacgactacatggccgccgacgccgacgaggtgagcttcaaggacggcgacgccatcatcaacgtgcaggccatcgacgagggctggatgtacggcaccgtgcagagaaccggcagaaccggcatgctgcccgccaactacgtggaggccatctag

SEQ ID NO: 147368 - DNA, 20010 bp, Artificial Sequence
  derived and/or modified sequence
atggccgacgacgaggactacgaggaggtggtggagtactacaccgaggaggtggtgtacgaggaggtgcccggcgagaccatcaccaagatctacgagaccaccaccaccagaaccagcgactacgagcagagcgagaccagcaagcccgccctggcccagcccgccctggcccagcccgccagcgccaagcccgtggagagaagaaaggtgatcagaaagaaggtggaccccagcaagttcatgaccccctacatcgcccacagccagaagatgcaggacctgttcagccccaacaagtacaaggagaagttcgagaagaccaagggccagccctacgccagcaccaccgacacccccgagctgagaagaatcaagaaggtgcaggaccagctgagcgaggtgaagtacagaatggacggcgacgtggccaagaccatctgccacgtggacgagaaggccaaggacatcgagcacgccaagaaggtgagccagcaggtgagcaaggtgctgtacaagcagaactgggaggacaccaaggacaagtacctgctgccccccgacgcccccgagctggtgcaggccgtgaagaacaccgccatgttcagcaagaagctgtacaccgaggactgggaggccgacaagagcctgttctacccctacaacgacagccccgagctgagaagagtggcccaggcccagaaggccctgagcgacgtggcctacaagaagggcctggccgagcagcaggcccagttcacccccctggccgacccccccgacatcgagttcgccaagaaggtgaccaaccaggtgagcaagcagaagtacaaggaggactacgagaacaagatcaagggcaagtggagcgagaccccctgcttcgaggtggccaacgccagaatgaacgccgacaacatcagcaccagaaagtaccaggaggacttcgagaacatgaaggaccagatctacttcatgcagaccgagacccccgagtacaagatgaacaagaaggccggcgtggccgccagcaaggtgaagtacaaggaggactacgagaagaacaagggcaaggccgactacaacgtgctgcccgccagcgagaacccccagctgagacagctgaaggccgccggcgacgccctgagcgacaagctgtacaaggagaactacgagaagaccaaggccaagagcatcaactactgcgagacccccaagttcaagctggacaccgtgctgcagaacttcagcagcgacaagaagtacaaggacagctacctgaaggacatcctgggccactacgtgggcagcttcgaggacccctaccacagccactgcatgaaggtgaccgcccagaacagcgacaagaactacaaggccgagtacgaggaggacagaggcaagggcttcttcccccagaccatcacccaggagtacgaggccatcaagaagctggaccagtgcaaggaccacacctacaaggtgcaccccgacaagaccaagttcacccaggtgaccgacagccccgtgctgctgcaggcccaggtgaacagcaagcagctgagcgacctgaactacaaggccaagcacgagagcgagaagttcaagtgccacatcccccccgacacccccgccttcatccagcacaaggtgaacgcctacaacctgagcgacaacctgtacaagcaggactgggagaagagcaaggccaagaagttcgacatcaaggtggacgccatccccctgctggccgccaaggccaacaccaagaacaccagcgacgtgatgtacaagaaggactacgagaagaacaagggcaagatgatcggcgtgctgagcatcaacgacgaccccaagatgctgcacagcctgaaggtggccaagaaccagagcgacagactgtacaaggagaactacgagaagaccaaggccaagagcatgaactactgcgagacccccaagtaccagctggacacccagctgaagaacttcagcgaggccagatacaaggacctgtacgtgaaggacgtgctgggccactacgtgggcagcatggaggacccctaccacacccactgcatgaaggtggccgcccagaacagcgacaagagctacaaggccgagtacgaggaggacaagggcaagtgctacttcccccagaccatcacccaggagtacgaggccatcaagaagctggaccagtgcaaggaccacacctacaaggtgcaccccgacaagaccaagttcaccgccgtgaccgacagccccgtgctgctgcaggcccagctgaacaccaagcagctgagcgacctgaactacaaggccaagcacgagggcgagaagttcaagtgccacatccccgccgacgccccccagttcatccagcacagagtgaacgcctacaacctgagcgacaacgtgtacaagcaggactgggagaagagcaaggccaagaagttcgacatcaaggtggacgccatccccctgctggccgccaaggccaacaccaagaacaccagcgacgtgatgtacaagaaggactacgagaagagcaagggcaagatgatcggcgccctgagcatcaacgacgaccccaagatgctgcacagcctgaagaccgccaagaaccagagcgacagagagtacagaaaggactacgagaagagcaagaccatctacaccgcccccctggacatgctgcaggtgacccaggccaagaagagccaggccatcgccagcgacgtggactacaagcacatcctgcacagctacagctacccccccgacagcatcaacgtggacctggccaagaaggcctacgccctgcagagcgacgtggagtacaaggccgactacaacagctggatgaagggctgcggctgggtgcccttcggcagcctggagatggagaaggccaagagagccagcgacatcctgaacgagaagaagtacagacagcaccccgacaccctgaagttcaccagcatcgaggacgcccccatcaccgtgcagagcaagatcaaccaggcccagagaagcgacatcgcctacaaggccaagggcgaggagatcatccacaagtacaacctgccccccgacctgccccagttcatccaggccaaggtgaacgcctacaacatcagcgagaacatgtacaaggccgacctgaaggacctgagcaagaagggctacgacctgagaaccgacgccatccccatcagagccgccaaggccgccagacaggccgccagcgacgtgcagtacaagaaggactacgagaaggccaagggcaagatggtgggcttccagagcctgcaggacgaccccaagctggtgcactacatgaacgtggccaagatccagagcgacagagagtacaagaaggactacgagaagaccaagagcaagtacaacaccccccacgacatgttcaacgtggtggccgccaagaaggcccaggacgtggtgagcaacgtgaactacaagcacagcctgcaccactacacctacctgcccgacgccatggacctggagctgagcaagaacatgatgcagatccagagcgacaacgtgtacaaggaggactacaacaactggatgaagggcatcggctggatccccatcggcagcctggacgtggagaaggtgaagaaggccggcgacgccctgaacgagaagaagtacagacagcaccccgacaccctgaagttcaccagcatcgtggacagccccgtgatggtgcaggccaagcagaacaccaagcaggtgagcgacatcctgtacaaggccaagggcgaggacgtgaagcacaagtacaccatgagccccgacctgccccagttcctgcaggccaagtgcaacgcctacaacatcagcgacgtgtgctacaagagagactggtacgacctgatcgccaagggcaacaacgtgctgggcgacgccatccccatcaccgccgccaaggccagcagaaacatcgccagcgactacaagtacaaggaggcctacgagaagagcaagggcaagcacgtgggcttcagaagcctgcaggacgaccccaagctggtgcactacatgaacgtggccaagctgcagagcgacagagagtacaagaagaactacgagaacaccaagaccagctaccacacccccggcgacatggtgagcatcaccgccgccaagatggcccaggacgtggccaccaacgtgaactacaagcagcccctgcaccactacacctacctgcccgacgccatgagcctggagcacaccagaaacgtgaaccagatccagagcgacaacgtgtacaaggacgagtacaacagcttcctgaagggcatcggctggatccccatcggcagcctggaggtggagaaggtgaagaaggccggcgacgccctgaacgagagaaagtacagacagcaccccgacaccgtgaagttcaccagcgtgcccgacagcatgggcatggtgctggcccagcacaacaccaagcagctgagcgacctgaactacaaggtggagggcgagaagctgaagcacaagtacaccatcgaccccgagctgccccagttcatccaggccaaggtgaacgccctgaacatgagcgacgcccactacaaggccgactggaagaagaccatcgccaagggctacgacctgagacccgacgccatccccatcgtggccgccaagagcagcagaaacatcgccagcgactgcaagtacaaggaggcctacgagaaggccaagggcaagcaggtgggcttcctgagcctgcaggacgaccccaagctggtgcactacatgaacgtggccaagatccagagcgacagagagtacaagaagggctacgaggccagcaagaccaagtaccacacccccctggacatggtgagcgtgaccgccgccaagaagagccaggaggtggccaccaacgccaactacagacagagctaccaccactacaccctgctgcccgacgccctgaacgtggagcacagcagaaacgccatgcagatccagagcgacaacctgtacaagagcgacttcaccaactggatgaagggcatcggctgggtgcccatcgagagcctggaggtggagaaggccaagaaggccggcgagatcctgagcgagaagaagtacagacagcaccccgagaagctgaagttcacctacgccatggacaccatggagcaggccctgaacaagagcaacaagctgaacatggacaagagactgtacaccgagaagtggaacaaggacaagaccaccatccacgtgatgcccgacacccccgacatcctgctgagcagagtgaaccagatcaccatgagcgacaagctgtacaaggccggctgggaggaggagaagaagaagggctacgacctgagacccgacgccatcgccatcaaggccgccagagccagcagagacatcgccagcgactacaagtacaagaaggcctacgagcaggccaagggcaagcacatcggcttcagaagcctggaggacgaccccaagctggtgcacttcatgcaggtggccaagatgcagagcgacagagagtacaagaagggctacgagaagagcaagaccagcttccacacccccgtggacatgctgagcgtggtggccgccaagaagagccaggaggtggccaccaacgccaactacagaaacgtgatccacacctacaacatgctgcccgacgccatgagcttcgagctggccaagaacatgatgcagatccagagcgacaaccagtacaaggccgactacgccgacttcatgaagggcatcggctggctgcccctgggcagcctggaggccgagaagaacaagaaggccatggagatcatcagcgagaagaagtacagacagcaccccgacaccctgaagtacagcaccctgatggacagcatgaacatggtgctggcccagaacaacgccaagatcatgaacgagcacctgtacaagcaggcctgggaggccgacaagaccaaggtgcacatcatgcccgacatcccccagatcatcctggccaaggccaacgccatcaacatgagcgacaagctgtacaagctgagcctggaggagagcaagaagaagggctacgacctgagacccgacgccatccccatcaaggccgccaaggccagcagagacatcgccagcgactacaagtacaagtacaactacgagaagggcaagggcaagatggtgggcttcagaagcctggaggacgaccccaagctggtgcacagcatgcaggtggccaagatgcagagcgacagagagtacaagaagaactacgagaacaccaagaccagctaccacacccccgccgacatgctgagcgtgaccgccgccaaggacgcccaggccaacatcaccaacaccaactacaagcacctgatccacaagtacatcctgctgcccgacgccatgaacatcgagctgaccagaaacatgaacagaatccagagcgacaacgagtacaagcaggactacaacgagtggtacaagggcctgggctggagccccgccggcagcctggaggtggagaaggccaagaaggccaccgagtacgccagcgaccagaagtacagacagcaccccagcaacttccagttcaagaagctgaccgacagcatggacatggtgctggccaagcagaacgcccacaccatgaacaagcacctgtacaccatcgactggaacaaggacaagaccaagatccacgtgatgcccgacacccccgacatcctgcaggccaagcagaaccagaccctgtacagccagaagctgtacaagctgggctgggaggaggccctgaagaagggctacgacctgcccgtggacgccatcagcgtgcagctggccaaggccagcagagacatcgccagcgactacaagtacaagcagggctacagaaagcagctgggccaccacgtgggcttcagaagcctgcaggacgaccccaagctggtgctgagcatgaacgtggccaagatgcagagcgagagagagtacaagaaggacttcgagaagtggaagaccaagttcagcagccccgtggacatgctgggcgtggtgctggccaagaagtgccaggagctggtgagcgacgtggactacaagaactacctgcaccagtggacctgcctgcccgaccagaacgacgtggtgcaggccaagaaggtgtacgagctgcagagcgagaacctgtacaagagcgacctggagtggctgagaggcatcggctggagccccctgggcagcctggaggccgagaagaacaagagagccagcgagatcatcagcgagaagaagtacagacagccccccgacagaaacaagttcaccagcatccccgacgccatggacatcgtgctggccaagaccaacgccaagaacagaagcgacagactgtacagagaggcctgggacaaggacaagacccagatccacatcatgcccgacacccccgacatcgtgctggccaaggccaacctgatcaacaccagcgacaagctgtacagaatgggctacgaggagctgaagagaaagggctacgacctgcccgtggacgccatccccatcaaggccgccaaggccagcagagagatcgccagcgagtacaagtacaaggagggcttcagaaagcagctgggccaccacatcggcgccagaaacatcgaggacgaccccaagatgatgtggagcatgcacgtggccaagatccagagcgacagagagtacaagaaggacttcgagaagtggaagaccaagttcagcagccccgtggacatgctgggcgtggtgctggccaagaagtgccagaccctggtgagcgacgtggactacaagaactacctgcaccagtggacctgcctgcccgaccagagcgacgtgatccacgccagacaggcctacgacctgcagagcgacaacctgtacaagagcgacctgcagtggctgaagggcatcggctggatgaccagcggcagcctggaggacgagaagaacaagagagccacccagatcctgagcgaccacgtgtacagacagcaccccgaccagttcaagttcagcagcctgatggacagcatccccatggtgctggccaagaacaacgccatcaccatgaaccacagactgtacaccgaggcctgggacaaggacaagaccaccgtgcacatcatgcccgacacccccgaggtgctgctggccaagcagaacaaggtgaactacagcgagaagctgtacaagctgggcctggaggaggccaagagaaagggctacgacatgagagtggacgccatccccatcaaggccgccaaggccagcagagacatcgccagcgagttcaagtacaaggagggctacagaaagcagctgggccaccacatcggcgccagagccatcagagacgaccccaagatgatgtggagcatgcacgtggccaagatccagagcgacagagagtacaagaaggacttcgagaagtggaagaccaagttcagcagccccgtggacatgctgggcgtggtgctggccaagaagtgccagaccctggtgagcgacgtggactacaagaactacctgcaccagtggacctgcctgcccgaccagagcgacgtgatccacgccagacaggcctacgacctgcagagcgacaacatgtacaagagcgacctgcagtggatgagaggcatcggctgggtgagcatcggcagcctggacgtggagaagtgcaagagagccaccgagatcctgagcgacaagatctacagacagccccccgacagattcaagttcaccagcgtgaccgacagcctggagcaggtgctggccaagaacaacgccctgaacatgaacaagagactgtacaccgaggcctgggacaaggacaagacccagatccacatcatgcccgacacccccgagatcatgctggccagacagaacaagatcaactacagcgagaccctgtacaagctggccaacgaggaggccaagaagaagggctacgacctgagaagcgacgccatccccatcgtggccgccaaggccagcagagacgtgatcagcgactacaagtacaaggacggctacagaaagcagctgggccaccacatcggcgccagaaacatcgaggacgaccccaagatgatgtggagcatgcacgtggccaagatccagagcgacagagagtacaagaaggacttcgagaagtggaagaccaagttcagcagccccgtggacatgctgggcgtggtgctggccaagaagtgccagaccctggtgagcgacgtggactacaagaactacctgcacgagtggacctgcctgcccgaccagaacgacgtgatccacgccagacaggcctacgacctgcagagcgacaacatctacaagagcgacctgcagtggctgagaggcatcggctgggtgcccatcggcagcatggacgtggtgaagtgcaagagagccgccgagatcctgagcgacaacatctacagacagccccccgacaagctgaagttcaccagcgtgaccgacagcctggagcaggtgctggccaagaacaacgccctgaacatgaacaagagactgtacaccgaggcctgggacaaggacaagacccaggtgcacatcatgcccgacacccccgagatcatgctggccagacagaacaagatcaactacagcgagagcctgtacagacaggccatggaggaggccaagaaggagggctacgacctgagaagcgacgccatccccatcgtggccgccaaggccagcagagacatcgccagcgactacaagtacaaggaggcctacagaaagcagctgggccaccacatcggcgccagagccgtgcacgacgaccccaagatcatgtggagcctgcacatcgccaaggtgcagagcgacagagagtacaagaaggacttcgagaagtacaagaccagatacagcagccccgtggacatgctgggcatcgtgctggccaagaagtgccagaccctggtgagcgacgtggactacaagcaccccctgcacgagtggatctgcctgcccgaccagaacgacatcatccacgccagaaaggcctacgacctgcagagcgacaacctgtacaagagcgacctggagtggatgaagggcatcggctgggtgcccatcgacagcctggaggtggtgagagccaagagagccggcgagctgctgagcgacaccatctacagacagagacccgagaccctgaagttcaccagcatcaccgacacccccgagcaggtgctggccaagaacaacgccctgaacatgaacaagagactgtacaccgaggcctgggacaacgacaagaagaccatccacgtgatgcccgacacccccgagatcatgctggccaagctgaacagaatcaactacagcgacaagctgtacaagctggccctggaggagagcaagaaggagggctacgacctgagactggacgccatccccatccaggccgccaaggccagcagagacatcgccagcgactacaagtacaaggagggctacagaaagcagctgggccaccacatcggcgccagaaacatcaaggacgaccccaagatgatgtggagcatccacgtggccaagatccagagcgacagagagtacaagaaggagttcgagaagtggaagaccaagttcagcagccccgtggacatgctgggcgtggtgctggccaagaagtgccagatcctggtgagcgacatcgactacaagcaccccctgcacgagtggacctgcctgcccgaccagaacgacgtgatccaggccagaaaggcctacgacctgcagagcgacgccatctacaagagcgacctggagtggctgagaggcatcggctgggtgcccatcggcagcgtggaggtggagaaggtgaagagagccggcgagatcctgagcgacagaaagtacagacagcccgccgaccagctgaagttcacctgcatcaccgacacccccgagatcgtgctggccaagaacaacgccctgaccatgagcaagcacctgtacaccgaggcctgggacgccgacaagaccagcatccacgtgatgcccgacacccccgacatcctgctggccaagagcaacagcgccaacatcagccagaagctgtacaccaagggctgggacgagagcaagatgaaggactacgacctgagagccgacgccatcagcatcaagagcgccaaggccagcagagacatcgccagcgactacaagtacaaggaggcctacgagaagcagaagggccaccacatcggcgcccagagcatcgaggacgaccccaagatcatgtgcgccatccacgccggcaagatccagagcgagagagagtacaagaaggagttccagaagtggaagaccaagttcagcagccccgtggacatgctgagcatcctgctggccaagaagtgccagaccctggtgaccgacatcgactacagaaactacctgcacgagtggacctgcatgcccgaccagaacgacatcatccaggccaagaaggcctacgacctgcagagcgacgccctgtacaaggccgacctggagtggctgagaggcatcggctggatgccccagggcagccccgaggtgctgagagtgaagaacgcccagaacatcttctgcgacagcgtgtacagaacccccgtggtgaacctgaagtacaccagcatcgtggacacccccgaggtggtgctggccaagagcaacgccgagaacatcagcatccccaagtacagagaggtgtgggacaaggacaagaccagcatccacatcatgcccgacacccccgagatcaacctggccagagccaacgccctgaacgtgagcaacaagctgtacagagagggctgggacgagatgaaggccggctgcgacgtgagactggacgccatccccatccaggccgccaaggccagcagagagatcgccagcgactacaagtacaagctggaccacgagaagcagaagggccactacgtgggcaccctgaccgccagagacgacaacaagatcagatgggccctgatcgccgacaagctgcagaacgagagagagtacagactggactgggccaagtggaaggccaagatccagagccccgtggacatgctgagcatcctgcacagcaagaacagccaggccctggtgagcgacatggactacagaaactacctgcaccagtggacctgcatgcccgaccagaacgacgtgatccaggccaagaaggcctacgagctgcagagcgacaacgtgtacaaggccgacctggagtggctgagaggcatcggctggatgcccaacgacagcgtgagcgtgaaccacgccaagcacgccgccgacatcttcagcgagaagaagtacagaaccaagatcgagaccctgaacttcacccccgtggacgacagagtggactacgtgaccgccaagcagagcggcgagatcctggacgacatcaagtacagaaaggactggaacgccaccaagagcaagtacaccctgaccgagacccccctgctgcacaccgcccaggaggccgccagaatcctggaccagtacctgtacaaggagggctgggagagacagaaggccaccggctacatcctgccccccgacgccgtgcccttcgtgcacgcccaccactgcaacgacgtgcagagcgagctgaagtacaaggccgagcacgtgaagcagaagggccactacgtgggcgtgcccaccatgagagacgaccccaagctggtgtggttcgagcacgccggccagatccagaacgagagactgtacaaggaggactaccacaagaccaaggccaagatcaacatccccgccgacatggtgagcgtgctggccgccaagcagggccagaccctggtgagcgacatcgactacagaaactacctgcaccagtggatgtgccaccccgaccagaacgacgtgatccaggccagaaaggcctacgacctgcagagcgacaacgtgtacagagccgacctggagtggctgagaggcatcggctggatccccctggacagcgtggaccacgtgagagtgaccaagaaccaggagatgatgagccagatcaagtacaagaagaacgccctggagaactaccccaacttcagaagcgtggtggacccccccgagatcgtgctggccaagatcaacagcgtgaaccagagcgacgtgaagtacaaggagaccttcaacaaggccaagggcaagtacaccttcagccccgacaccccccacatcagccacagcaaggacatgggcaagctgtacagcaccatcctgtacaagggcgcctgggagggcaccaaggcctacggctacaccctggacgagagatacatccccatcgtgggcgccaagcacgccgacctggtgaacagcgagctgaagtacaaggagacctacgagaagcagaagggccactacctggccggcaaggtgatcggcgagttccccggcgtggtgcactgcctggacttccagaagatgagaagcgccctgaactacagaaagcactacgaggacaccaaggccaacgtgcacatccccaacgacatgatgaaccacgtgctggccaagagatgccagtacatcctgagcgacctggagtacagacactacttccaccagtggaccagcctgctggaggagcccaacgtgatcagagtgagaaacgcccaggagatcctgagcgacaacgtgtacaaggacgacctgaactggctgaagggcatcggctgctacgtgtgggacaccccccagatcctgcacgccaagaagagctacgacctgcagagccagctgcagtacaccgccgccggcaaggagaacctgcagaactacaacctggtgaccgacacccccctgtacgtgaccgccgtgcagagcggcatcaacgccagcgaggtgaagtacaaggagaactaccaccagatcaaggacaagtacaccaccgtgctggagaccgtggactacgacagaaccagaaacctgaagaacctgtacagcagcaacctgtacaaggaggcctgggacagagtgaaggccaccagctacatcctgcccagcagcaccctgagcctgacccacgccaagaaccagaagcacctggccagccacatcaagtacagagaggagtacgagaagttcaaggccctgtacaccctgcccagaagcgtggacgacgaccccaacaccgccagatgcctgagagtgggcaagctgaacatcgacagactgtacagaagcgtgtacgagaagaacaagatgaagatccacatcgtgcccgacatggtggagatggtgaccgccaaggacagccagaagaaggtgagcgagatcgactacagactgagactgcacgagtggatctgccaccccgacctgcaggtgaacgaccacgtgagaaaggtgaccgaccagatcagcgacatcgtgtacaaggacgacctgaactggctgaagggcatcggctgctacgtgtgggacacccccgagatcctgcacgccaagcacgcctacgacctgagagacgacatcaagtacaaggcccacatgctgaagaccagaaacgactacaagctggtgaccgacacccccgtgtacgtgcaggccgtgaagagcggcaagcagctgagcgacgccgtgtaccactacgactacgtgcacagcgtgagaggcaaggtggcccccaccaccaagaccgtggacctggacagagccctgcacgcctacaagctgcagagcagcaacctgtacaagaccagcctgagaaccctgcccaccggctacagactgcccggcgacaccccccacttcaagcacatcaaggacaccagatacatgagcagctacttcaagtacaaggaggcctacgagcacaccaaggcctacggctacaccctgggccccaaggacgtgcccttcgtgcacgtgagaagagtgaacaacgtgaccagcgagagactgtacagagagctgtaccacaagctgaaggacaagatccacaccacccccgacacccccgagatcagacaggtgaagaagacccaggaggccgtgagcgagctgatctacaagagcgacttcttcaagatgcagggccacatgatcagcctgccctacaccccccaggtgatccactgcagatacgtgggcgacatcaccagcgacatcaagtacaaggaggacctgcaggtgctgaagggcttcggctgcttcctgtacgacacccccgacatggtgagaagcagacacctgagaaagctgtggagcaactacctgtacaccgacaaggccagaaagatgagagacaagtacaaggtggtgctggacacccccgagtacagaaaggtgcaggagctgaagacccacctgagcgagctggtgtacagagccgccggcaagaagcagaagagcatcttcaccagcgtgcccgacacccccgacctgctgagagccaagagaggccagaagctgcagagccagtacctgtacgtggagctggccaccaaggagagaccccaccaccacgccggcaaccagaccaccgccctgaagcacgccaaggacgtgaaggacatggtgagcgagaagaagtacaagatccagtacgagaagatgaaggacaagtacacccccgtgcccgacacccccatcctgatcagagccaagagagcctactggaacgccagcgacctgagatacaaggagaccttccagaagaccaagggcaagtaccacaccgtgaaggacgccctggacatcgtgtaccacagaaaggtgaccgacgacatcagcaagatcaagtacaaggagaactacatgagccagctgggcatctggagaagcatccccgacagacccgagcacttccaccacagagccgtgaccgacaccgtgagcgacgtgaagtacaaggaggacctgacctggctgaagggcatcggctgctacgcctacgacacccccgacttcaccctggccgagaagaacaagaccctgtacagcaagtacaagtacaaggaggtgttcgagagaaccaagagcgacttcaagtacgtggccgacagccccatcaacagacacttcaagtacgccacccagctgatgaacgagaagaagtacagagccgactacgagcagagaaaggacaagtaccacctggtggtggacgagcccagacacctgctggccaagaccgccggcgaccagatcagccagatcaagtacagaaagaactacgagaagagcaaggacaagttcaccagcatcgtggacacccccgagcacctgagaaccaccaaggtgaacaagcagatcagcgacatcctgtacaagctggagtacaacaaggccaagcccagaggctacaccaccatccacgacacccccatgctgctgcacgtgagaaaggtgaaggacgaggtgagcgacctgaagtacaaggaggtgtaccagagaaacaagagcaactgcaccatcgagcccgacgccgtgcacatcaaggccgccaaggacgcctacaaggtgaacaccaacctggactacaagaagcagtacgaggccaacaaggcccactggaagtggacccccgacagacccgacttcctgcaggccgccaagagcagcctgcagcagagcgacttcgagtacaagctggacagagagttcctgaagggctgcaagctgagcgtgaccgacgacaagaacaccgtgctggccctgagaaacaccctgatcgagagcgacctgaagtacaaggagaagcacgtgaaggagagaggcacctgccacgccgtgcccgacaccccccagatcctgctggccaagaccgtgagcaacctggtgagcgagaacaagtacaaggaccacgtgaagaagcacctggcccagggcagctacaccaccctgcccgagaccagagacaccgtgcacgtgaaggaggtgaccaagcacgtgagcgacaccaactacaagaagaagttcgtgaaggagaagggcaagagcaactacagcatcatgctggagccccccgaggtgaagcacgccatggaggtggccaagaagcagagcgacgtggcctacagaaaggacgccaaggagaacctgcactacaccaccgtggccgacagacccgacatcaagaaggccacccaggccgccaagcaggccagcgaggtggagtacagagccaagcacagaaaggagggcagccacggcctgagcatgctgggcagacccgacatcgagatggccaagaaggccgccaagctgagcagccaggtgaagtacagagagaacttcgacaaggagaagggcaagacccccaagtacaaccccaaggacagccagctgtacaaggtgatgaaggacgccaacaacctggccagcgaggtgaagtacaaggccgacctgaagaagctgcacaagcccgtgaccgacatgaaggagagcctgatcatgaaccacgtgctgaacaccagccagctggccagcagctaccagtacaagaagaagtacgagaagagcaagggccactaccacaccatccccgacaacctggagcagctgcacctgaaggaggccaccgagctgcagagcatcgtgaagtacaaggagaagtacgagaaggagagaggcaagcccatgctggacttcgagacccccacctacatcaccgccaaggagagccagcagatgcagagcggcaaggagtacagaaaggactacgaggagagcatcaagggcagaaacctgaccggcctggaggtgacccccgccctgctgcacgtgaagtacgccaccaagatcgccagcgagaaggagtacagaaaggacctggaggagagcatcagaggcaagggcctgaccgagatggaggacacccccgacatgctgagagccaagaacgccacccagatcctgaacgagaaggagtacaagagagacctggagctggaggtgaagggcagaggcctgaacgccatggccaacgagacccccgacttcatgagagccagaaacgccaccgacatcgccagccagatcaagtacaagcagagcgccgagatggagaaggccaacttcaccagcgtggtggacacccccgagatcatccacgcccagcaggtgaagaacctgagcagccagaagaagtacaaggaggacgccgagaagagcatgagctactacgagaccgtgctggacacccccgagatccagagagtgagagagaaccagaagaacttcagcctgctgcagtaccagtgcgacctgaagaacagcaagggcaagatcaccgtggtgcaggacacccccgagatcctgagagtgaaggagaaccagaagaacttcagcagcgtgctgtacaaggaggacgtgagccccggcaccgccatcggcaagacccccgagatgatgagagtgaagcagacccaggaccacatcagcagcgtgaagtacaaggaggccatcggccagggcacccccatccccgacctgcccgaggtgaagagagtgaaggagacccagaagcacatcagcagcgtgatgtacaaggagaacctgggcaccggcatccccaccaccgtgacccccgagatcgagagagtgaagagaaaccaggagaacttcagcagcgtgctgtacaaggagaacctgggcaagggcatccccacccccatcacccccgagatggagagagtgaagagaaaccaggagaacttcagcagcgtgctgtacaaggagaacatgggcaagggcacccccctggccgtgacccccgagatggagagagtgaagcacaaccaggagaacatcagcagcgtgctgtacaaggagaacgtgggcaaggccaccgccacccccgtgacccccgagatgcagagagtgaagagaaaccaggagaacatcagcagcgtgctgtacaaggagaacctgggcaaggccacccccacccccttcacccccgagatggagagagtgaagagaaaccaggagaacttcagcagcgtgctgtacaaggagaacatgagaaaggccacccccacccccgtgacccccgagatggagagagccaagagaaaccaggagaacatcagcagcgtgctgtacagcgacagcttcagaaagcagatccagggcaaggccgcctacgtgctggacacccccgagatgagaagagtgagagagacccagagacacatcagcaccgtgaagtaccacgaggacttcgagaagcacaagggctgcttcacccccgtggtgaccgaccccatcaccgagagagtgaagaagaacatgcaggacttcagcgacatcaactacagaggcatccagagaaaggtggtggagatggagcagaagagaaacgaccaggaccaggagaccatcaccggcctgagagtgtggagaaccaaccccggcagcgtgttcgactacgaccccgccgaggacaacatccagagcagaagcctgcacatgatcaacgtgcaggcccagagaagaagcagagagcagagcagaagcgccagcgccctgagcatcagcggcggcgaggagaagagcgagcacagcgaggcccccgaccaccacctgagcacctacagcgacggcggcgtgttcgccgtgagcaccgcctacaagcacgccaagaccaccgagctgccccagcagagaagcagcagcgtggccacccagcagaccaccgtgagcagcatccccagccaccccagcaccgccggcaagatcttcagagccatgtacgactacatggccgccgacgccgacgaggtgagcttcaaggacggcgacgccatcatcaacgtgcaggccatcgacgagggctggatgtacggcaccgtgcagagaaccggcagaaccggcatgctgcccgccaactacgtggaggccatctag

SEQ ID NO: 147369 - protein, 355 aa, Artificial Sequence
  derived and/or modified sequence
MALRLLKLAATSASARVVAAGAQRVRGIHSSVQCKLRYGMWHFLLGDKASKRLTERSRVITVDGNICTGKGKLAKEIAEKLGFKHFPEAGIHYPDSTTGDGKPLATDYNGNCSLEKFYDDPRSNDGNSYRLQSWLYSSRLLQYSDALEHLLTTGQGVVLERSIFSDFVFLEAMYNQGFIRKQCVDHYNEVKSVTICDYLPPHLVIYIDVPVPEVQRRIQKKGDPHEMKITSAYLQDIENAYKKTFLPEMSEKCEVLQYSAREAQDSKKVVEDIEYLKFDKGPWLKQDNRTLYHLRLLVQDKFEVLNYTSIPIFLPEVTIGAHQTDRVLHQFRELPGRKYSPGYNTEVGDKWIWLK

SEQ ID NO: 147370 - protein, 355 aa, Artificial Sequence
  derived and/or modified sequence
MALRLLKLAATSASARVVARAPSAWRGIHSSVQCKLRYGMWHFLLGDKASKRLTERSRVITVDGNICTGKGKLAKEIAEKLGFKHFPEAGIHYPDSTTGDGKPLATDYNGNCSLEKFYDDPRSNDGNSYRLQSWLYSSRLLQYSDALEHLLTTGQGVVLERSIFSDFVFLEAMYNQGFIRKQCVDHYNEVKSVTICDYLPPHLVIYIDVPVPEVQRRIQKKGDPHEMKITSAYLQDIENAYKKTFLPEMSEKCEVLQYSAREAQDSKKVVEDIEYLKFDKGPWLKQDNRTLYHLRLLVQDKFEVLNYTSIPIFLPEVTIGAHQTDRVLHQFRELPGRKYSPGYNTEVGDKWIWLK

SEQ ID NO: 147371 - DNA, 1068 bp, Artificial Sequence
  derived and/or modified sequence
atggctttgaggctcctgaaattggcggctacctccgctagcgctcgcgtggtggccgcaggtgcccaacgggtgagaggcattcacagttcagtccaatgtaaactgcgctatggtatgtggcacttcttgttgggagataaggctagtaaaagactgactgagagaagtcgcgtcattactgtagatggcaatatctgcacaggcaaaggaaaactggccaaggaaatcgcagagaagttgggattcaaacactttcctgaggctggaattcattaccccgacagtaccacgggagatggcaagccactggctactgattacaatggcaactgctcattggagaaattttatgacgaccctagatccaacgatggtaattcctacaggttgcagtcctggctatatagctcacggctgctccagtattcagatgcgttggaacacctgctgaccaccggccaaggtgtagtgctagagcggtctatatttagtgactttgtcttcttggaggctatgtataatcaaggctttatccggaaacaatgtgttgatcattacaacgaggtcaaatcggtaacgatttgtgactacttgcctccgcacctggtcatatatattgatgtgcccgtgccggaggtgcagcggcggattcagaagaagggagaccctcacgaaatgaaaattacctcagcctacttgcaggacattgaaaatgcatacaaaaaaaccttcctgccagaaatgtctgagaagtgcgaggtactgcagtattcagcgagggaggctcaggatagtaagaaggtggtggaggacattgaatacctcaaatttgacaaaggtccctggttgaagcaggacaacagaaccctttaccacctgcgattgcttgtccaggataagttcgaggtgctgaattacactagcattcctattttcctgcccgaggtcacaatcggggctcatcagactgatcgggtgctgcatcagttcagggaactgcccggtcgaaagtactcacccggctataataccgaagtgggagacaagtggatctggctgaaatag

SEQ ID NO: 147372 - DNA, 1068 bp, Artificial Sequence
  derived and/or modified sequence
atggcacttcgcctgcttaaactcgctgccacctcagcatcagcccgtgtggttgcgcgggctccaagcgcttggcgcggaatccactcgagtgtgcagtgcaaactgcgctacgggatgtggcacttcttgttaggggacaaagccagcaaacgactcactgagcgatcacgggtgattacagtggacggtaacatctgtacaggaaagggcaagctcgccaaggagatcgccgaaaagctgggatttaagcacttccctgaagccggtatacactatccagactctacaacaggcgatggaaaacctcttgccactgattacaacggaaactgcagcttagaaaaattttatgatgaccctcggagcaacgacgggaacagctaccgcttgcagtcttggctttacagttctcgtctgcttcagtattccgacgccctggaacaccttctgactactggccagggagtggtgctggagaggtctattttctccgatttcgtgttcctcgaagcaatgtacaaccagggatttattcgtaaacagtgtgtggaccactacaacgaggtgaagagcgtcactatctgtgactacttacctcctcatctcgtcatctacattgatgtgccagtgccagaagtgcaacgccgtattcagaagaagggtgatcctcatgagatgaagataacctctgcttacttgcaggacatcgagaacgcttataaaaagaccttccttcctgagatgtcggaaaagtgcgaagtgctccagtactctgcaagagaggcccaggactctaagaaggtagtggaagacattgagtacctgaagttcgataagggaccctggctgaaacaagacaataggaccctctatcatctaaggctcttggtgcaggacaaattcgaggtccttaattacacatctattcctatttttcttccagaggtgactatcggagcccatcagactgatagggtgctccaccagttcagggaattgcccggccgtaaatacagtcccggatataacaccgaagtcggcgataagtggatctggctaaaatag

SEQ ID NO: 147373 - DNA, 1068 bp, Artificial Sequence
  derived and/or modified sequence
atggccctgcggctgctgaagctggccgccaccagcgccagcgcccgggtggtggccgccggggcccagagggtgcggggcatccacagctctgtgcagtgcaagctgcgctatggcatgtggcacttcctgctgggggacaaggccagcaagaggctgacagagaggagcagggtcatcaccgtggatggcaacatctgcaccgggaagggcaagctggccaaggagattgctgagaagctgggcttcaagcacttccctgaggccggcatccactacccagacagcaccactggagatggcaagcccctggccacagactacaatggaaactgcagcctggagaagttctatgatgaccccaggagcaatgatggcaacagctaccgcctgcagagctggctgtacagcagccggctgctgcagtacagtgatgccctggagcacctgctgaccaccggccagggcgtggtgctggagaggagcatcttcagtgactttgtgttcctggaggccatgtacaaccagggcttcatcaggaagcagtgtgtggaccactacaatgaggtgaagtctgtgaccatctgtgactacctgcccccccacctggtgatctacattgatgtgcctgtgcctgaggtgcagaggcgcatccagaagaagggggacccccatgagatgaagatcaccagcgcctacctgcaggacattgaaaatgcctacaagaagaccttcctgcctgagatgtctgagaagtgtgaggtgctgcagtacagcgcccgggaggcccaggacagcaagaaggtggtggaggacatcgagtacctgaagtttgacaagggcccctggctgaagcaggacaacagaaccctgtaccacctgcggctgctggtgcaggacaagtttgaggtgctgaactacaccagcatccccatcttcctgcctgaggtgaccatcggggcccaccagacagacagagtgctgcaccagttccgggagctgcccggcaggaagtacagccctggctacaacacagaggtgggggacaagtggatctggctgaagtag

SEQ ID NO: 147374 - DNA, 1068 bp, Artificial Sequence
  derived and/or modified sequence
atggccctgcggctgctgaagctggccgccaccagcgccagcgcccgggtggtggcccgggcccccagcgcctggaggggcatccacagctctgtgcagtgcaagctgcgctatggcatgtggcacttcctgctgggggacaaggccagcaagaggctgacagagaggagcagggtcatcaccgtggatggcaacatctgcaccgggaagggcaagctggccaaggagattgctgagaagctgggcttcaagcacttccctgaggccggcatccactacccagacagcaccactggagatggcaagcccctggccacagactacaatggaaactgcagcctggagaagttctatgatgaccccaggagcaatgatggcaacagctaccgcctgcagagctggctgtacagcagccggctgctgcagtacagtgatgccctggagcacctgctgaccaccggccagggcgtggtgctggagaggagcatcttcagtgactttgtgttcctggaggccatgtacaaccagggcttcatcaggaagcagtgtgtggaccactacaatgaggtgaagtctgtgaccatctgtgactacctgcccccccacctggtgatctacattgatgtgcctgtgcctgaggtgcagaggcgcatccagaagaagggggacccccatgagatgaagatcaccagcgcctacctgcaggacattgaaaatgcctacaagaagaccttcctgcctgagatgtctgagaagtgtgaggtgctgcagtacagcgcccgggaggcccaggacagcaagaaggtggtggaggacatcgagtacctgaagtttgacaagggcccctggctgaagcaggacaacagaaccctgtaccacctgcggctgctggtgcaggacaagtttgaggtgctgaactacaccagcatccccatcttcctgcctgaggtgaccatcggggcccaccagacagacagagtgctgcaccagttccgggagctgcccggcaggaagtacagccctggctacaacacagaggtgggggacaagtggatctggctgaagtag

SEQ ID NO: 147375 - DNA, 4915 bp, Artificial Sequence
  derived and/or modified sequence
gcaccccggccgtgacgtcacggcagcgcgccggccgcgagagagggccccgtcgcgaccgcgtccccttgggtccttgatcctgagctgaccgggtagccatggccttgcggctcctgaagctggcagcgacgtccgcgtccgcccgggtcgtggcggcgggcgcccagcgcgtgagaggaattcatagcagtgtgcagtgcaaactgcgctatggaatgtggcatttcctacttggggataaagcaagcaaaagactgacagaacgcagcagagtgataactgtagatggcaatatatgtactggaaaaggcaaacttgcaaaagaaatagcagagaaactaggcttcaagcactttcctgaagcggggattcattatccagacagtaccacaggagatgggaagcccctcgccaccgactataatggcaactgtagtttggagaaattttacgatgatccgagaagcaatgatggcaacagttaccgcctgcagtcctggttgtacagcagtcgcctgctgcagtactcagatgccttggagcacttgctgaccacaggacaaggtgttgtgttggagcgctccatcttcagtgactttgtgttcctggaggcgatgtacaaccagggattcatccgaaagcagtgtgtggaccactacaacgaggtgaagagcgtcaccatctgcgattacctgcccccccacctggtgatttacatcgatgtgcccgttccagaggtccagaggcggattcagaagaaaggagatccacatgaaatgaagatcacctctgcctatctacaggacattgagaatgcctataagaaaacctttctccctgagatgagtgaaaaatgtgaggttttacaatattctgcaagggaagctcaagattcaaaaaaggtggtagaggacattgaatacctgaagttcgataaagggccgtggctcaagcaggacaatcgcactttataccacctgcgattactggttcaggataagtttgaggtgctgaattacacaagcattcctatctttctcccggaagtcaccattggagctcatcagactgaccgtgtcttacatcagttcagagagctgccgggccgcaagtacagccctgggtacaacaccgaggtgggagacaagtggatctggctgaagtgaacgggccgccttctgctccagctgcatcacagtgatggccaagctgcatcagccgcactctcctggacgccatatagctttaagatcgggggagggtaaataatgcaaaaattgcacagtggaagaaggggtctcacaaaaagcaatccatcctgtagtataggtaatggagttgggggaagcagcttccattctggatgtttggaaccctttagctttgttttggaatggcccaccattctcactggaaaacagtggtctgctgtgaaaggccagctctcggcagcccctgtggtttcagcgctgccgctctgtgtcattcaggttgtgcacattgtttttcttctgacttccagaaataaaagtgtttccatgggaatttccccatcgtacgtctatgtgcgtgcgggcacgtcgaaactgcacacgtgcacacacgctgctctgggccctgtttggtgtggtgtggtttaattgaggcttacattatgctgaagagtttttctaaaggcctactgtatttattttagtaatgtgctacattagagtagaaaaaataagaacgtgaagaagaaatagcaaaaggagaaaattaccacagatttacagaacaatatgttttaagagagacgttgagaaagattcacgtggccgtcctcagcgtctcaaactcctttgaagggagatttgagcttaggctgttgatgacataagatgcaaaagcaaaataatatactctctttattacccagaaaatcaagttgccagtcaaaactgagaaatgagaaagaaaatcagatttctttattcatctctgttgaagcctagaaaaccaaaacaagctggttgtggttcagcatcatggtttaggaatcaagctgtcagttgtgagtcctactgaactgtgggttttccactgtaaagctccactgtgtccattaggaatcaggctgccagttgtgagtcctactgaactgtgggttttccactgtaaagctccactgtgtccaatatggtagctcctagccacatgtgggtattgaaatttaaatgagctaaaatgtaatagagtttaaaattgggttccttggttgcactggccatagttcaggcactccacagccgcctgtgggcagtagttccagtgctggtgcagaggacgatgctctgctccccgcggaagctctaccaggcctcgctgctgcggagcatgcgaagaagatgcacactccttccctccttgcgtccgcctgcctttttccctctccccttccttccctccttctttcctcctccttccctcccttcctttcttccttccatctgtccttgttttcctcccttcccttcctccctgcctctttccttccctccttctcttccttccttccgtctgtccttgttttcctccctgcctctttccttccctccttctcttccttccttccttccgtctgtccttgttttcctcccttcccttcctccctgcctccttccttgttttaagaatttgaaaataaagtttcccaggagttttgaattggagtcgagatttaagtggctgaagttttgcatttcactaggaaaccaacagctttaatcatgaaatgaaagcacagctgggcattgggccagtcacagagtgtcttttgctctgagcacttcacaaacccattgtggaggggaggaaagaaaaagaaagccatctttaattatcttagctgttcctaatgtctttggctgcaaagagctagctgtttccttcaaccttggtggttgcacgggtagtgtcctcagcagtgagagggcaggtctgccctgtggtcaggattgcccttgtgaggggcagagctctccaaccatgcagggctccgtgtcggcatggtgtggactcgggtgctctgatcatcccctgtgtttgcgtctgaccctgtgtggttgcattcccttgatggagtgggaagtatgtaatttgtagtgctgaggacattcgtctgtttgattttctggtgttttcaatgacatgcatgttcagcagagaaagatgaataaacactgtccaattcttctctccacatagaagcctcaagaagaggtgaggagatgccccgatttccttatttcagagcagtacatgcgttcgtctcacgaaagctcttacaactaaaacaacagcaccaacaaaccaggatcaaaataatcgtgcattttccaggattccatgttggacttctcagtgctttggagatcaggaaataatcatgctgttgcagcagtatggttttgtgtctggattttattcatacaggcatgtgtttacaggcatgagaattctgtattgaaaagaaagtccttgtttttttctaacgtatctttctgttccatcaactgttaaaaccaaattgttaagaacattgagcttcttaggagagattacatgcagctacttaggaccacctcagcaaaatggagttgcctgggtagatagcagcagcagctcaccagccccacgctgccaggctgctggctgctgtccaccaggcagctgtggaacctccatgttctgcctaggtgttgtggcaagaacagcagggaaacaggcggccgcctccaggccacaggtggacccagggaccttcagttacgccgcttcaattgaattcgtggtggtttctctgctacagcagaagtggaagaagctcttgtcttgtttggcatttgtcccattttttggctaataattggctttgaatttctctgtgccctgcttaccaattatagctttctggattggctgttcttagcagtgcaaatgtcaatgcaaagaagcaagcaggcggctactttctgggaagaagcatagtccgtgctcacactggatataaatctgcaagatttgggggtttggcaaaataggggtggagggaaagctgccatggctgtcagaaattggggctttttgaagaaaagcttgtgtaggcatcagccactggctggccagaattccatgaatggaagcaggtgcccgagtgatctggggctttacatgtggatataaatagaagccgggagcctgaggctttgctttaggaaaatcatgagccagaaaacagaggaggtgattgtcagtagtcacctcacgccgctagtgttttctaatactctctcgaattgtcaaagcaaaggaccttataacagcaacacgtgtgtgactcgaagcagcgagcttcccttgggaaaaggagcctcttctcagcagagggtcccagcctttctgtccttccccatcggaatgccaggctctgtgagtttggatgttggacattgccacctgaattccaggaggccggggagctccagtgatggacttgtccccaaaagagtggtgctgttctcagagccataaatgttccactgaaagtgtctgtcccctggctcacgctggctgcgcttgcttgaaggaggctgatttaagggttctaataggaagacaaatgaaactgtcaaattttatctttaagcatgtgagtaagtttgctcattcgcttttactattgatgtatagttttaaaattcttaatttaaaaattattttaatagtaaatttttcacaagtgaacactttttatctttaaattaaaattctgaagctccctagttagttagatccaattgctggttacattttgggaagctctcattttagtgctatgtagtttcattgaataaacatgtttttaatgaga

SEQ ID NO: 147376 - DNA, 1489 bp, Artificial Sequence
  derived and/or modified sequence
accgcgtccccttgggtccttgatcctgagctgaccgggtagccatggccttgcggctcctgaagctggcagcgacgtccgcgtccgcccgggtcgtggcgcgggcgcccagcgcgtggagaggaattcatagcagtgtgcagtgcaaactgcgctatggaatgtggcatttcctacttggggataaagcaagcaaaagactgacagaacgcagcagagtgataactgtagatggcaatatatgtactggaaaaggcaaacttgcaaaagaaatagcagagaaactaggcttcaagcactttcctgaagcggggattcattatccagacagtaccacaggagatgggaagcccctcgccaccgactataatggcaactgtagtttggagaaattttacgatgatccgagaagcaatgatggcaacagttaccgcctgcagtcctggttgtacagcagtcgcctgctgcagtactcagatgccttggagcacttgctgaccacaggacaaggtgttgtgttggagcgctccatcttcagtgactttgtgttcctggaggcgatgtacaaccagggattcatccgaaagcagtgtgtggaccactacaacgaggtgaagagcgtcaccatctgcgattacctgcccccccacctggtgatttacatcgatgtgcccgttccagaggtccagaggcggattcagaagaaaggagatccacatgaaatgaagatcacctctgcctatctacaggacattgagaatgcctataagaaaacctttctccctgagatgagtgaaaaatgtgaggttttacaatattctgcaagggaagctcaagattcaaaaaaggtggtagaggacattgaatacctgaagttcgataaagggccgtggctcaagcaggacaatcgcactttataccacctgcgattactggttcaggataagtttgaggtgctgaattacacaagcattcctatctttctcccggaagtcaccattggagctcatcagactgaccgtgtcttacatcagttcagagagctgccgggccgcaagtacagccctgggtacaacaccgaggtgggagacaagtggatctggctgaagtgaacgggccgccttctgctccagctgcatcacagtgatggccaagctgcatcagccgcactctcctggacgccatatagctttaagatcgggggagggtaaataatgcaaaaattgcacagtggaagaaggggtctcacaaaaagcaatccatcctgtagtataggtaatggagttgggggaagcagcttccattctggatgtttggaaccctttagctttgttttggaatggcccaccattctcactggaaaacagtggtctgctgtgaaaggccagctctcggcagcccctgtggtttcagcgctgccgctctgtgtcattcaggttgtgcacattgtttttcttctgacttccagaaataaaagtgtttccatggg

SEQ ID NO: 147377 - DNA, 1068 bp, Artificial Sequence
  derived and/or modified sequence
atggccctgcggctgctgaagctggccgccaccagcgccagcgccagagtcgttgccgctggtgctcagcgcgttagggggatccattcatcggtacaatgcaagctgcggtacggcatgtggcattttttattaggcgacaaggcatcaaagcgactgacggagagatcacgcgtgatcaccgtggacggcaatatatgcacaggcaaaggcaagttggcaaaggagatcgccgagaagctgggtttcaaacactttcccgaagccggcatccactatccagactcaaccacaggcgatggaaaaccactggccactgattacaacgggaactgcagcttggagaaattttacgatgacccccgatcaaatgatggaaattcttacagactgcagagctggttatactcttcccgacttctccagtattcagatgcactagagcaccttctgacgactggccagggcgtcgtccttgaacgatctatcttctcagacttcgtgtttctcgaagcgatgtataatcaggggtttatccgcaagcaatgtgtcgaccactacaatgaggtcaaatcagtgacaatctgcgactatctgcccccacacctggtcatctacatagatgtgcctgtgcctgaagtccagagacggatccaaaagaagggtgacccacacgaaatgaagattacctccgcgtacctgcaagacatcgagaacgcgtacaaaaaaacctttttacctgagatgtctgaaaaatgtgaagtgctgcaatattctgctcgggaggcccaggacagcaagaaggtggtggaagacattgagtatcttaagttcgataagggcccttggttgaagcaggacaaccgcacactctaccatttaaggctcttggtgcaagacaagttcgaggtcctcaactatacatcgatacctatattcctgccagaggtgacaattggcgcccaccaaaccgaccgggtgctccatcagttccgcgagcttcccgggcgaaaatatagtccaggctataacaccgaggtaggtgacaagtggatatggctgaagtag

SEQ ID NO: 147378 - DNA, 1068 bp, Artificial Sequence
  derived and/or modified sequence
atggccctgcggctgctgaagctggccgccaccagcgccagcgccagagtggttgccagagccccatccgcttggcgaggaattcactcgagcgtccagtgtaaactgcgctacgggatgtggcatttcctgctcggagataaggcttcaaagaggctcaccgaaagatcaagggtgataaccgttgatggtaacatctgtaccggtaaaggcaagctggcaaaagagatagccgaaaagctcggcttcaaacacttccccgaggcaggcattcattatcctgattctaccaccggggacggaaagccattggccactgactacaacggtaactgttccctggaaaagttctacgacgacccaagatcaaacgatggcaattcttaccggctccagagctggctgtatagttccagactgctccagtactccgacgcgttggagcacctcctgactacaggccaaggcgtagtcctagaacgtagtattttttccgacttcgttttcctggaagcaatgtataatcagggctttatcaggaaacagtgcgtagatcactacaatgaggtcaagtccgtgacaatttgtgactacttacctccccacctggtcatctacatcgacgtgccggtgcccgaagtgcagagaagaattcagaagaagggcgaccctcatgaaatgaaaattacttccgcatatcttcaggacatcgaaaacgcctataaaaagactttcttgcccgaaatgtccgaaaaatgcgaagtacttcagtattctgcccgtgaggcccaagatagtaaaaaggtggtcgaagacatcgagtacctcaagtttgataaaggcccctggcttaagcaggacaatcggaccctctaccatctgaggttgctcgtgcaggataaatttgaggtgttgaattacacttcaataccgattttcctcccagaagttacaattggtgctcatcaaaccgatcgggtgttgcatcagttccgggaactgcctggcaggaaatactcccccggctacaacaccgaggtgggtgacaagtggatctggctgaagtag

SEQ ID NO: 147379 - DNA, 1068 bp, Artificial Sequence
  derived and/or modified sequence
atggccctcaggcttctgaagctggcggctacttcagcatcagcaagagtggtcgcggcaggcgctcagcgtgtcaggggtatccatagtagcgtacagtgcaagcttcgttacggcatgtggcattttcttcttggggataaggcatccaaaagactaactgagcggtccagggttataacggtcgacggaaatatttgcaccggcaaaggcaagctcgctaaggagatagcagagaagttggggttcaagcactttccggaggctggcatacattacccggatagtaccacaggggacgggaagccgctagcaaccgactataatgggaactgtagcctggaaaagttctatgatgaccccaggtcaaacgacgggaacagctatcggctgcagtcttggctgtactccagtcgcctcctgcagtactctgacgcactggaacacctcttaacaacaggacaaggagtggtgctggagcgtagcatcttcagcgacttcgtgtttctcgaagcgatgtataaccagggctttattcggaaacagtgtgtggaccattataatgaggtcaagagcgtgactatctgtgattatctgcctcctcatctggtaatttacatcgacgtaccagttcctgaggtccaacggaggatccagaagaagggcgacccacatgagatgaagattacaagcgcctatctgcaggatattgagaatgcgtacaaaaagacctttttgccagagatgtcagaaaagtgcgaagtgttgcagtattccgcaagagaggcccaggattcaaaaaaggttgtcgaggacatcgagtacctaaaattcgacaaaggaccatggctaaaacaggataatcggactctctaccaccttcgacttcttgtgcaggacaagttcgaagtcctcaactatacatcaatcccaattttcctcccagaagtgaccataggagcgcaccagactgaccgggtactgcatcagttcagggagctgccgggacgaaaatactctccaggatacaacacagaggtaggagacaagtggatctggctgaaatag

SEQ ID NO: 147380 - DNA, 1068 bp, Artificial Sequence
  derived and/or modified sequence
atggccctgcgcctcctaaagctcgccgctaccagtgcatcagctcgggtcgttgccagagcaccatcagcatggagaggcatccatagctctgtgcagtgtaagcttagatacgggatgtggcatttcctattgggggacaaggcctcaaagcgcctgactgagcggtcacgagtgatcactgtcgacggaaatatctgcactggcaagggcaagcttgccaaggagatagctgagaaactgggcttcaaacatttcccagaggctggcatacactatccggacagcactaccggcgatggcaagcccttggcaacagactacaacggaaattgcagcctcgagaaattctacgacgatcctagatccaatgatggcaactcctacagactacagtcttggctctactcttctaggctgctgcagtattctgatgccttggagcacctcctgacaacaggtcagggggtggtgcttgagaggtctattttcagcgatttcgtgttcttggaggccatgtacaaccaggggttcattagaaaacagtgtgtggaccactataacgaggtaaagagcgtaacaatttgcgactacctgcctccccatctggtcatctacatcgacgtccccgtcccagaggttcagaggaggattcagaaaaaaggggacccccacgagatgaagattacatccgcatatctacaagacatcgagaatgcctataagaaaaccttcttgccggaaatgtccgagaagtgcgaggtgctgcagtactccgccagggaagctcaggacagcaagaaggtggtggaagacattgaatatctgaaatttgacaaaggaccttggcttaaacaagataaccgcactttgtatcacctcagactgctcgtccaggataaattcgaggttctcaactacacatccatacccatattcctgcccgaggtcacgattggggctcatcagactgatagagttctgcatcagttcagagagctcccaggcagaaagtactcacccggatataataccgaagtaggagacaagtggatatggttgaagtag

SEQ ID NO: 147381 - DNA, 1068 bp, Artificial Sequence
  derived and/or modified sequence
atggccctgagactgctgaagctggccgccaccagcgccagcgccagagtggtggccgccggcgcccagagagtgagaggcatccacagcagcgtgcagtgcaagctgagatacggcatgtggcacttcctgctgggcgacaaggccagcaagagactgaccgagagaagcagagtgatcaccgtggacggcaacatctgcaccggcaagggcaagctggccaaggagatcgccgagaagctgggcttcaagcacttccccgaggccggcatccactaccccgacagcaccaccggcgacggcaagcccctggccaccgactacaacggcaactgcagcctggagaagttctacgacgaccccagaagcaacgacggcaacagctacagactgcagagctggctgtacagcagcagactgctgcagtacagcgacgccctggagcacctgctgaccaccggccagggcgtggtgctggagagaagcatcttcagcgacttcgtgttcctggaggccatgtacaaccagggcttcatcagaaagcagtgcgtggaccactacaacgaggtgaagagcgtgaccatctgcgactacctgcccccccacctggtgatctacatcgacgtgcccgtgcccgaggtgcagagaagaatccagaagaagggcgacccccacgagatgaagatcaccagcgcctacctgcaggacatcgagaacgcctacaagaagaccttcctgcccgagatgagcgagaagtgcgaggtgctgcagtacagcgccagagaggcccaggacagcaagaaggtggtggaggacatcgagtacctgaagttcgacaagggcccctggctgaagcaggacaacagaaccctgtaccacctgagactgctggtgcaggacaagttcgaggtgctgaactacaccagcatccccatcttcctgcccgaggtgaccatcggcgcccaccagaccgacagagtgctgcaccagttcagagagctgcccggcagaaagtacagccccggctacaacaccgaggtgggcgacaagtggatctggctgaagtag

SEQ ID NO: 147382 - DNA, 1068 bp, Artificial Sequence
  derived and/or modified sequence
atggccctgagactgctgaagctggccgccaccagcgccagcgccagagtggtggccagagcccccagcgcctggagaggcatccacagcagcgtgcagtgcaagctgagatacggcatgtggcacttcctgctgggcgacaaggccagcaagagactgaccgagagaagcagagtgatcaccgtggacggcaacatctgcaccggcaagggcaagctggccaaggagatcgccgagaagctgggcttcaagcacttccccgaggccggcatccactaccccgacagcaccaccggcgacggcaagcccctggccaccgactacaacggcaactgcagcctggagaagttctacgacgaccccagaagcaacgacggcaacagctacagactgcagagctggctgtacagcagcagactgctgcagtacagcgacgccctggagcacctgctgaccaccggccagggcgtggtgctggagagaagcatcttcagcgacttcgtgttcctggaggccatgtacaaccagggcttcatcagaaagcagtgcgtggaccactacaacgaggtgaagagcgtgaccatctgcgactacctgcccccccacctggtgatctacatcgacgtgcccgtgcccgaggtgcagagaagaatccagaagaagggcgacccccacgagatgaagatcaccagcgcctacctgcaggacatcgagaacgcctacaagaagaccttcctgcccgagatgagcgagaagtgcgaggtgctgcagtacagcgccagagaggcccaggacagcaagaaggtggtggaggacatcgagtacctgaagttcgacaagggcccctggctgaagcaggacaacagaaccctgtaccacctgagactgctggtgcaggacaagttcgaggtgctgaactacaccagcatccccatcttcctgcccgaggtgaccatcggcgcccaccagaccgacagagtgctgcaccagttcagagagctgcccggcagaaagtacagccccggctacaacaccgaggtgggcgacaagtggatctggctgaagtag

SEQ ID NO: 147383 - protein, 95 aa, Artificial Sequence
  derived and/or modified sequence
MESHERQPLVLHEEMGECRSSLSAGGGVHIEPRYRQFPQLTRSQVFQSEFFSGLMWFWILWRFWHDSEEVLGHFPYPDPSQWTDEELGIPPDDED

SEQ ID NO: 147384 - protein, 105 aa, Artificial Sequence
  derived and/or modified sequence
MSALTRLASFARVGGRLFRSGCARTAGDGGVRHAGGGVHIEPRYRQFPQLTRSQVFQSEFFSGLMWFWILWRFWHDSEEVLGHFPYPDPSQWTDEELGIPPDDED

SEQ ID NO: 147385 - protein, 104 aa, Artificial Sequence
  derived and/or modified sequence
SALTRLASFARVGGRLFRSGCARTAGDGGVRHAGGGVHIEPRYRQFPQLTRSQVFQSEFFSGLMWFWILWRFWHDSEEVLGHFPYPDPSQWTDEELGIPPDDED

SEQ ID NO: 147386 - DNA, 288 bp, Artificial Sequence
  derived and/or modified sequence
atggagagccacgagagacagcccctggtgctgcacgaggagatgggcgagtgcagaagcagcctgagcgccggcggcggcgtgcacatcgagcccagatacagacagttcccccagctgaccagaagccaggtgttccagagcgagttcttcagcggcctgatgtggttctggatcctgtggagattctggcacgacagcgaggaggtgctgggccacttcccctaccccgaccccagccagtggaccgacgaggagctgggcatcccccccgacgacgaggactag

SEQ ID NO: 147387 - DNA, 318 bp, Artificial Sequence
  derived and/or modified sequence
atgagcgccctgaccagactggccagcttcgccagagtgggcggcagactgttcagaagcggctgcgccagaaccgccggcgacggcggcgtgagacacgccggcggcggcgtgcacatcgagcccagatacagacagttcccccagctgaccagaagccaggtgttccagagcgagttcttcagcggcctgatgtggttctggatcctgtggagattctggcacgacagcgaggaggtgctgggccacttcccctaccccgaccccagccagtggaccgacgaggagctgggcatcccccccgacgacgaggactag

SEQ ID NO: 147388 - DNA, 315 bp, Artificial Sequence
  derived and/or modified sequence
agcgccctgaccagactggccagcttcgccagagtgggcggcagactgttcagaagcggctgcgccagaaccgccggcgacggcggcgtgagacacgccggcggcggcgtgcacatcgagcccagatacagacagttcccccagctgaccagaagccaggtgttccagagcgagttcttcagcggcctgatgtggttctggatcctgtggagattctggcacgacagcgaggaggtgctgggccacttcccctaccccgaccccagccagtggaccgacgaggagctgggcatcccccccgacgacgaggactag

SEQ ID NO: 147389 - DNA, 288 bp, Artificial Sequence
  derived and/or modified sequence
atggagtctcatgagcgccaacccctcgtgctgcatgaagaaatgggagagtgcagatcgagcctttccgctgggggaggggtacacatagagcctaggtaccgacagttcccccagctgactagatcccaagtgtttcagagcgagtttttttcggggctgatgtggttttggatcttgtggaggttttggcacgactctgaagaggtcttgggccacttcccataccccgatcctagccaatggaccgatgaggaattaggaatcccgccagatgacgaggattag

SEQ ID NO: 147390 - DNA, 318 bp, Artificial Sequence
  derived and/or modified sequence
atgagtgctctcaccagactcgcttctttcgctcgagtaggggggagactatttaggagtggctgcgctcgtaccgcgggcgacggtggcgtcagacatgccgggggaggagtgcacatagagcccaggtatcggcagttcccccaactcacccgcagccaggtgttccagagtgaattcttctctggtctcatgtggttttggatattgtggagattctggcatgactccgaggaagtgctgggccacttcccctatccagacccatctcaatggaccgatgaagaactggggatccctcctgatgacgaagactag

SEQ ID NO: 147391 - DNA, 315 bp, Artificial Sequence
  derived and/or modified sequence
agtgctctgaccaggctcgcttcttttgcccgcgtgggaggtaggctcttccgatctggctgcgccaggaccgcgggcgatggcggggtgcggcacgctggtgggggagtgcacatagagccccgatacaggcaattccctcagttgaccagatcccaggtgttccagtcagaattcttttccggtctcatgtggttttggatactttggcgattttggcacgactctgaggaagtgcttggacacttcccttatccagaccctagccaatggactgacgaagagctcggcattcctcccgacgatgaggattag

SEQ ID NO: 147392 - DNA, 318 bp, Artificial Sequence
  derived and/or modified sequence
atgtccgccctcactcgcttggcttcttttgccagagtgggtggtcgcctctttcgcagcggatgcgctcggaccgcaggagacggcggtgtgagacacgctggtggaggtgttcatatagagccacgttacagacagtttcctcaattgaccagatcacaagtgtttcagagcgagtttttctctgggctgatgtggttttggatcctctggagattctggcacgattccgaggaagtcctgggacatttcccttatcccgacccaagtcaatggacagatgaagagctcggaatacctcctgatgacgaggactag

SEQ ID NO: 147393 - DNA, 318 bp, Artificial Sequence
  derived and/or modified sequence
atgagcgcgctgactcggctggcaagtttcgcccgggtaggcgggcggctatttcggtctggatgcgcacgcacagcaggtgacggtggcgtgcgccatgcggggggtggagtacatatagagcctaggtatagacagtttccgcagctgacaagaagtcaggtattccagagcgaatttttctctggattgatgtggttttggattttgtggaggttctggcacgacagtgaagaggtccttgggcacttcccctatcctgacccatcacagtggaccgatgaggaactgggaataccacccgacgacgaggattag

SEQ ID NO: 147394 - DNA, 288 bp, Artificial Sequence
  derived and/or modified sequence
atggagagccatgagcggcagcccctggtgctgcacgaggagatgggagaatgtcgcagcagcctgtctgctgggggcggcgtgcacatcgagccccgctaccggcagttcccccagctgaccaggagccaggtgttccagagcgagttcttcagcggcctgatgtggttctggatcctgtggaggttctggcatgattctgaggaggtgctgggccacttcccctacccagaccccagccagtggacagatgaggagctgggcatccccccagatgatgaggactag

SEQ ID NO: 147395 - DNA, 318 bp, Artificial Sequence
  derived and/or modified sequence
atgtctgccctgacccggctggccagctttgcccgggtgggcggccgcctcttccgcagcggctgtgccaggacagctggagatggcggcgtgagacatgctgggggcggcgtgcacatcgagccccgctaccggcagttcccccagctgaccaggagccaggtgttccagagcgagttcttcagcggcctgatgtggttctggatcctgtggaggttctggcatgattctgaggaggtgctgggccacttcccctacccagaccccagccagtggacagatgaggagctgggcatccccccagatgatgaggactag

SEQ ID NO: 147396 - DNA, 315 bp, Artificial Sequence
  derived and/or modified sequence
tctgccctgacccggctggccagctttgcccgggtgggcggccgcctcttccgcagcggctgtgccaggacagctggagatggaggagtgagacatgctgggggcggcgtgcacatcgagccccgctaccggcagttcccccagctgaccaggagccaggtgttccagagcgagttcttcagcggcctgatgtggttctggatcctgtggaggttctggcatgacagcgaggaggtgctgggccacttcccctacccagaccccagccagtggacagatgaggagctgggcatccccccagatgatgaagattag

SEQ ID NO: 147397 - DNA, 656 bp, Artificial Sequence
  derived and/or modified sequence
ggcggctggggaccgcggggcggacgggagcgagtatgtccgctctgactcggctggcgtctttcgctcgcgttggaggccgccttttcagaagcggctgcgcacggactgctggagatggtggagtccgtcagaactgaggcccaggaaatgaaaggagtgacttgcctgaagtcccacatggatgaagaatctggagctggggcaggtgtggggtgggcagaaggcaaagccctgtgtgacttgggcaaagacagtgatggagagccatgagcgacagcccttggtcctgcatgaggagatgggggaatgccgatcttccctgagtgccggtggtggtgtgcacattgagccccggtatagacagttcccccagctgaccagatcccaggtgttccagagcgagttcttcagcggactcatgtggttctggattctctggcgcttttggcatgactcagaagaggtgctgggtcactttccgtatcctgatccttcccagtggacagatgaagaattaggtatccctcctgatgatgaagactgaaggtgtagactcagcctcactctgtacaagagccaggtgagaatttcaaggattatcgacttcatattgcacattaaagttacaaattaaagtggcttggtcaagaatg

SEQ ID NO: 147398 - DNA, 504 bp, Artificial Sequence
  derived and/or modified sequence
cgggcggagcgccggggaagcgaagtaggcaggggcgaggcggctggggaccgcggggcggacgggagcgagtatgtccgctctgactcggctggcgtctttcgctcgcgttggaggccgccttttcagaagcggctgcgcacggactgctggagatggtggagtccgtcatgccggtggtggtgtgcacattgagccccggtatagacagttcccccagctgaccagatcccaggtgttccagagcgagttcttcagcggactcatgtggttctggattctctggcgcttttggcatgactcagaagaggtgctgggtcactttccgtatcctgatccttcccagtggacagatgaagaattaggtatccctcctgatgatgaagactgaaggtgtagactcagcctcactctgtacaagagccaggtgagaatttcaaggattatcgacttcatattgcacattaaagttacaaattaaagtggcttggtcaagaatgagaa

SEQ ID NO: 147399 - DNA, 726 bp, Artificial Sequence
  derived and/or modified sequence
tccgctctgactcggctggcgtctttcgctcgcgttggaggccgccttttcagaagcggctgcgcacggactgctggagatggtggagtccgtcatgccggtggtggtgtgcacattgagccccggtatagacagttcccccagctgaccagatcccaggtgttccagagcgagttcttcagcggactcatgtggttctggattctctggcgcttttggcatgactcagaagaggtgctgggtcactttccgtatcctgatccttcccagtggacagatgaagaattaggtatccctcctgatgatgaagactgaaggtgtagactcagcctcactctgtacaaggtctcattctgtcatccagactggagtgcagcgtgatcatggctcactgtaaccccaacctcctgagctcaagtgattctcccgcctcagccttctcagtagctgggactactactcttggctaatttttgtatattttgtagagatgaggttttgccatgttgcccaggctgatctcaaattcttggactcaagtgatccacctcttggcttcccaaagtgttgggattacaggtgtgagccagtgtacctggccaacaaatttgttttaatgactggactgtaaacccttgagagaggaagggtgattttgcttctcttgtctacaaggctgtcacatgatcagtgctcaataaatacttgaataattgaataaatgaa

SEQ ID NO: 147400 - DNA, 1101 bp, Artificial Sequence
  derived and/or modified sequence
agcgaagtaggcaggggcgaggcggctggggaccgcggggcggacgggagcgagtatgtccgctctgactcggctggcgtctttcgctcgcgttggaggccgccttttcagaagcggctgcgcacggactgctggagatggtggagtccgtcatgccggtggtggtgtgcacattgagccccggtatagacagttcccccagctgaccagatcccaggtgttccagagcgagttcttcagcggactcatgtggttctggattctctggcgcttttggcatgactcagaagaggtgctgggtcactttccgtatcctgatccttcccagtggacagatgaagaattaggtatccctcctgatgatgaagactgaaggtgtagactcagcctcactctgtacaagtgggtgtgctccaaatttctttatgtcatatttaccttttttcataaacattagtttttactttgtgcctatgatggacttgaaaaaactgcatattctaacagcatgaagttgagttaaccatgtcctgtatctgcttttttttttttttttgagacagagtcttgctctgtcgcccagactggagtgcagtggcgtgatctgggctcactgcaacctctgccttccaggttcaagtgattctccttcctcagcctcctgagtagctgggattataggcacatgctaccacacttggctaatttttgtatttttagtagaggcagagttttgccacgttggccaggctggtctcgaacttctgacctcaagtgatctgcccacctcagactcccaaagtgctaggattacaggtgtgagccaccacgcctggccatgtatctgatttctgccttaagttttcacatttgctttggtctcttcttccttttcattgtatgttttattttatttacattttttattttgtagagacagggtgtcactatgttgcccaggctggtcttgaactcctgggctcaaatgattctcctgcctctgcctcccaaagtgctgggattacaggcatgtgccaccacacctggcccattgtataataaaaaaaaatttttttcctaagttaggttataattttaggg

SEQ ID NO: 147401 - DNA, 1666 bp, Artificial Sequence
  derived and/or modified sequence
gcgggcggagcgccggggaagcgaagtaggcaggggcgaggcggctggggaccgcggggcggacgggagcgagtatgtccgctctgactcggctggcgtctttcgctcgcgttggaggccgccttttcagaagcggctgcgcacggactgctggagatggtggagtccgtcatgccggtggtggtgtgcacattgagccccggtatagacagttcccccagctgaccagatcccaggtgttccagagcgagttcttcagcggactcatgtggttctggattctctggcgcttttggcatgactcagaagaggtgctgggtcactttccgtatcctgatccttcccagtggacagatgaagaattaggtatccctcctgatgatgaagactgaaggtgtagactcagcctcactctgtacaagtgggtagctagcaacatggaccacagatatactggtgactccgctctcctctggccaagctacaaatcatcacctgaggcagagatgctactaccctcttctggggctcaactaccgatgggcatcagtaatccatcccagtataacatttcaaggatgtgctggagacaatacatggactttctctttcaatggtgaggaatgaaacaagatacaagaaccacagcatggaatatgttttcttttacatccaatggccaggtcataaaggatgccttgagacctccaccctggcccccacagcgctttgggacaggatgactaacgcagtccagcttcatgtgcaatcaagtcccgggaagaaatttacatttcaaactctgaaaaatcagtgtctaggttggcagcagtactctggaaactgataaaaccaaattcggtcctatatttcaatttccccttctaagttaatacatgattgctgcccatcatacagtacttcaaccctaaactacagcaatttctgtcaacatttctgttgtataaaagttccatgctttgaagagcctatgggagtagaaaaagtttctctagaaatgtcactgaactatatttgcaacctagttgctctatgtgataaatatatctgactatactagggattatgtgctttaaaaaaataattttgttcactgaaaatttacctgtgtgttttctcattgttaaatgtgattttggctataaactctttagtgcatttacctatgcagtctaaattgcactctaaaaattattaacacagctgagttaaaccagagtggctgctctcttcacaaatcactgatttctgctaaaatgttagcttttttattgcatcatgaaggcacagtaagatcatttggcaaattgtcaaggtatttttctagagcctcacctacaccatttcaactcatgacctgtaagctatttgctgttcatactcacagtaaaccttccatctctggctatggtgtttatagcctaatggttggaatctgctcgtctcaaggtgctggtattcctagcactaacaatgccaacttggacaaagaagagaatcttgcaaaaagagtaatcattctaccctcttagctgggtggtctttctatgaatgcctgtgcatgtgacaaagctgcagcaaactcattatgaggatgtactgtcatgccaagcctactgaaaattaaaattacatcactgttagt

SEQ ID NO: 147402 - DNA, 288 bp, Artificial Sequence
  derived and/or modified sequence
atggagagccacgagcggcagcccctggtgctgcacgaggagatgggcgaatgccgctcttcactctcggccgggggtggggtgcacatcgagcctaggtatcgccaattcccacagttgaccagaagtcaggtgttccagtccgagtttttctcgggactcatgtggttttggatattgtggcgcttttggcacgactcagaagaggtactgggccacttcccttatccagatccatcacagtggacagatgaggagttgggcatcccgcccgatgacgaagactag

SEQ ID NO: 147403 - DNA, 318 bp, Artificial Sequence
  derived and/or modified sequence
atgagcgccctgacccggctggccagcttcgcccgggtgggcggccgtctctttcggagcggctgtgccagaacggccggggacggaggcgtgcgacacgcaggcggtggggtacacatcgaacctcggtatagacagttccctcaactgactcgctcccaggtgtttcaatctgagtttttcagcggtttaatgtggttttggatcctctggagattttggcacgattctgaagaagtcctgggtcattttccttatccagatccaagccaatggaccgatgaggagctgggaattccaccggacgatgaagactag

SEQ ID NO: 147404 - DNA, 315 bp, Artificial Sequence
  derived and/or modified sequence
agcgccctgacccggctggccagcttcgcccgggtgggcggccggctcttcaggagcgggtgcgcccgcaccgcaggggacggcggggtgagacatgccggaggaggcgtgcacatcgaaccccgatatagacagttcccccagctaactcggtcccaagtttttcagtctgaattcttttctggattgatgtggttctggatactctggcgcttttggcacgacagcgaggaagtgctggggcacttcccttaccctgacccatcccagtggacagacgaggaactgggaatccccccggacgacgaagattag

SEQ ID NO: 147405 - DNA, 318 bp, Artificial Sequence
  derived and/or modified sequence
atgagcgccctgacccggctggccagcttcgcccgggtgggcggccgactttttaggtctggctgtgcccggactgcaggagatggtggggtgagacacgccggcgggggagtgcacattgagccgcggtaccggcagtttccccagcttacccggagccaggtcttccagtcggagtttttctccggcctgatgtggttttggatactatggcgtttctggcacgattctgaagaagtactcgggcacttcccctatcccgaccccagtcagtggacggatgaagagcttggcattccaccagatgatgaggattag

SEQ ID NO: 147406 - DNA, 318 bp, Artificial Sequence
  derived and/or modified sequence
atgagcgccctgacccggctggccagcttcgcccgggtgggcggccgactcttcagatccggttgcgcacgaacagccggcgacggcggtgtgcggcacgccggcgggggggtgcacatcgagccacgctatagacagttccctcagttgactcgaagccaggtgttccagtccgagtttttttctggcctgatgtggttctggatactgtggaggttctggcatgattctgaggaagtcctgggccactttccctaccctgacccatctcagtggacagacgaagaactagggatcccccctgacgacgaagattag

SEQ ID NO: 147407 - DNA, 288 bp, Artificial Sequence
  derived and/or modified sequence
atggagtcccatgagcggcaacctctggtcttacacgaggagatgggcgagtgcagatcatctctctccgctggcggtggcgtgcatatcgaacctcggtaccgccagttcccacaattgacaaggtcacaagtgtttcaatctgagttcttctccggcctaatgtggttttggatattgtggaggttttggcatgacagtgaggaagtgttaggtcatttcccgtatcctgatcccagccagtggacagacgaggagttgggtatccccccagatgatgaggactag

SEQ ID NO: 147408 - DNA, 318 bp, Artificial Sequence
  derived and/or modified sequence
atgtcagctctgacccgactggccagcttcgcccgtgtcgggggaagactgttccgctccgggtgtgctaggactgcaggcgacggcggtgtgcggcacgcgggaggcggagtgcatatcgagcccagatacagacagtttccccagctgacaagatctcaggttttccaatccgaatttttttcaggtttgatgtggttctggatcttgtggcgattctggcacgactccgaggaggttcttggccactttccttacccagacccctcccagtggacggacgaggagttagggatccctccggatgacgaggattag

SEQ ID NO: 147409 - DNA, 315 bp, Artificial Sequence
  derived and/or modified sequence
tctgcacttacccgtctagcatcatttgctcgcgtgggcggacggctttttcgctccggctgtgccagaacggccggagacggtggcgtgcgacatgcgggagggggtgttcacatagagcctcgatataggcagtttccccagcttaccagatcgcaagtgtttcaatccgagtttttcagcgggctgatgtggttctggatcctgtggcgattttggcacgactccgaggaagtcctcggccacttcccctacccggatccctctcagtggacagacgaggagttggggatcccgcctgacgacgaagattag

SEQ ID NO: 147410 - DNA, 318 bp, Artificial Sequence
  derived and/or modified sequence
atgtccgcacttactcgcctcgcttcttttgccagagtgggtggacggctctttcgttccggctgtgcacggacagcaggggatggcggtgttcgccacgccggaggaggtgttcacatcgaaccccgttaccggcaattccctcaacttactcgcagccaggtgtttcaatccgagttcttctctgggctgatgtggttttggattttatggcgcttctggcacgacagcgaggaagtgctcgggcatttcccttacccagacccttctcagtggacggacgaggagctgggcatccccccagatgacgaggattag

SEQ ID NO: 147411 - DNA, 318 bp, Artificial Sequence
  derived and/or modified sequence
atgtccgcactcacaagactggcctcctttgcgagggtgggcggtcgtctcttccgctccggctgtgccagaactgcaggtgacgggggtgtaaggcacgcaggaggcggagtgcatatcgaaccccgttatcgccagtttccacagcttactcgatcacaggtgttccagtctgaatttttttctggtctcatgtggttttggatcctctggagattttggcacgactccgaggaagtgctgggtcactttccataccccgatccttctcaatggacagatgaggagctcgggattcccccagatgatgaggattag

SEQ ID NO: 147412 - protein, 129 aa, Artificial Sequence
  derived and/or modified sequence
MSFPKYKPSSLRTLPETLDPAEYNISPETRRAQAERLAIRAQLKREYLLQYNDPNRRGLIENPALLRWAYARTINVYPNFRPTPKNSLMGALCGFGPLIFIYYIIKTERDRKEKLIQEGKLDRTFHLSY

SEQ ID NO: 147413 - DNA, 390 bp, Artificial Sequence
  derived and/or modified sequence
atgagcttccccaagtacaagcccagcagcctgagaaccctgcccgagaccctggaccccgccgagtacaacatcagccccgagaccagaagagcccaggccgagagactggccatcagagcccagctgaagagagagtacctgctgcagtacaacgaccccaacagaagaggcctgatcgagaaccccgccctgctgagatgggcctacgccagaaccatcaacgtgtaccccaacttcagacccacccccaagaacagcctgatgggcgccctgtgcggcttcggccccctgatcttcatctactacatcatcaagaccgagagagacagaaaggagaagctgatccaggagggcaagctggacagaaccttccacctgagctactag

SEQ ID NO: 147414 - DNA, 390 bp, Artificial Sequence
  derived and/or modified sequence
atgagttttcccaaatacaagccctcttctttaaggaccctgcctgaaacattagatcccgcggagtataacataagcccagaaacccgccgggcccaggcggagaggctcgcaatccgagcacaactgaagagagaatacttgttgcagtataacgatcctaatcgccgaggtctgatagaaaatccggcccttctccggtgggcttatgcccgaacaattaacgtttatccgaatttcagacccactcccaaaaactccctgatgggcgcattatgtggctttgggccattgatctttatttactacattatcaaaaccgaaagagaccgaaaagagaagctcatacaggagggaaagcttgaccgtacctttcatttgtcatattag

SEQ ID NO: 147415 - DNA, 390 bp, Artificial Sequence
  derived and/or modified sequence
atgtccttccccaagtacaagcccagcagcctgcggaccctgcctgagaccctggaccctgctgagtacaacatcagccctgagacccggcgggcccaggccgagcggctggccatccgggcccagctgaagcgggagtacctgctgcagtacaatgaccccaacagaagaggcctgattgaaaatcctgccctgctgcgctgggcctatgcccggaccatcaacgtgtaccccaacttccggcccacccccaagaacagcctgatgggcgccctgtgtggcttcggccccctcatcttcatctactacatcatcaagacagagcgggacaggaaggagaagctgatccaggagggcaagctggacaggaccttccacctgagctactag

SEQ ID NO: 147416 - DNA, 671 bp, Artificial Sequence
  derived and/or modified sequence
gacaaagggcctcagaatcgcgcaggcgcaattgtgccctggttcgccaagatgtcgttcccaaagtataagccgtcgagcctgcgcactctgcctgagaccctcgacccagccgaatacaacatatctccggaaacccggcgggcgcaagccgagcggttggccataagagcccagctgaaacgagagtacctgcttcagtacaacgatcccaaccgccgagggctcatcgaaaatcctgccttgcttcgttgggcctatgcaagaacaataaatgtctatcctaatttcagacccactcctaaaaactcactcatgggagctctgtgtggatttgggcccctcatcttcatttattatattatcaaaactgagagggataggaaagaaaaacttatccaggaaggaaaattggatcgaacatttcacctctcatattaagtctggcaatgatgactatatgtattcctgcctaaataaatcatctattaatcattaagtagtagtttctctttcttagtattaccttgattcaatgttaaaaactattaacaccctaacaacacagaagcagacgcagcccgtgttgggaatctgctgtcagagtgacagcaaacatttgctgtacattgaatgaatgaacataaacttcattaaactgtgagctctta

SEQ ID NO: 147417 - DNA, 390 bp, Artificial Sequence
  derived and/or modified sequence
atgagcttccccaagtacaagcccagcagcctgcggaccctgcccgaaacacttgaccccgctgaatacaatatttctcccgaaacccgccgggcgcaagcggaacgactagctatccgagcccagctaaagcgcgaatatctgctgcagtataatgaccctaatcgtaggggactcatcgaaaaccccgccttgctgcgctgggcctatgctagaacgatcaacgtttatccaaacttccgaccaactccgaaaaactcactcatgggagccctgtgcggttttggacccttgatcttcatttattacatcatcaaaaccgagagggatcgcaaagaaaagttgattcaggaaggaaaactcgatcggaccttccacctgtcctactag

SEQ ID NO: 147418 - DNA, 390 bp, Artificial Sequence
  derived and/or modified sequence
atgagctttcctaagtacaaaccttcctccctgagaacactacccgaaaccctcgatcccgctgagtataatattagtccagaaactcgtagagctcaggcggaacgcttggcgatccgagcccagctgaaacgtgaatacctgctgcagtacaacgacccgaaccgaaggggccttattgagaatccggctctccttcggtgggcctacgcaagaactattaacgtttatccaaactttcggccaacccccaaaaactccctgatgggggcactctgtggttttggccctctgatctttatttactatatcataaaaaccgagcgggatcggaaagagaaattgattcaggagggcaagctggatcgaacgtttcacctgtcgtattag

SEQ ID NO: 147419 - protein, 172 aa, Artificial Sequence
  derived and/or modified sequence
MPDSWDKDVYPEPPRRTPVQPNPIVYMMKAFDLIVDRPVTLVREFIERQHAKNRYYYYHRQYRRVPDITECKEEDIMCMYEAEMQWKRDYKVDQEIINIMQDRLKACQQREGQNYQQNCIKEVEQFTQVAKAYQDRYQDLGAYSSARKCLAKQRQRMLQERKAAKEAAAATS

SEQ ID NO: 147420 - protein, 168 aa, Artificial Sequence
  derived and/or modified sequence
MPDSWDKDVYPEPPRRTPVQPNPIVYMMKAFDLIVDRPVTLVREFIERQHAKNRYYYYHRQYRRVPDITECKEEDIMCMYEAEMQWKRDYKVDQEIINIMQDRLKACQQREGQNYQQNCIKEVEQFTQVAKAYQDRCACPTHPQPPTILLRPGGQNHCKSSLPSLVLT

SEQ ID NO: 147421 - DNA, 519 bp, Artificial Sequence
  derived and/or modified sequence
atgcccgactcctgggacaaggatgtgtatcccgaacctcccagacggactcctgtgcaacccaacccaattgtttatatgatgaaagcttttgaccttatcgttgaccgcccggtaactctggtaagagaatttatcgaacgccagcacgccaagaatcggtattactactatcatcggcaataccgacgggttcccgacatcacggagtgcaaagaagaagatatcatgtgtatgtatgaggccgagatgcagtggaagcgagactacaaagtggaccaagagattattaatataatgcaggataggcttaaagcctgccagcaaagggagggccagaattatcagcagaactgtattaaggaggttgaacaatttacgcaggttgcgaaagcctatcaggatcggtaccaggacctgggggcctacagttccgccagaaagtgcttagctaagcagcggcagcgcatgttacaggagcgcaaggctgccaaggaggccgccgccgccaccagctag

SEQ ID NO: 147422 - DNA, 507 bp, Artificial Sequence
  derived and/or modified sequence
atgccagattcatgggacaaggacgtgtaccctgagcctcccaggagaacacctgtgcaacctaatcctatagtttatatgatgaaagcattcgatctcatcgtggaccggcccgttacattggtcagggagtttattgagcgccaacatgccaagaaccggtattattactatcaccgtcagtatcgccgcgtgccagatatcaccgaatgtaaggaggaagacatcatgtgcatgtacgaggcagagatgcagtggaagcgcgactacaaggtggaccaagaaatcatcaacattatgcaggatcgtctgaaggcctgtcaacagagagaagggcagaactaccagcaaaactgtattaaggaggttgagcagtttactcaggtggccaaagcctatcaggataggtgtgcttgcccgactcacccccagcctccgactatcttgctcagaccgggtgggcagaaccattgtaagtccagcctgccttcgttggttctgacctag

SEQ ID NO: 147423 - DNA, 519 bp, Artificial Sequence
  derived and/or modified sequence
atgccagacagctgggacaaggatgtgtacccagagccccccaggaggacccctgtgcagcccaaccccatcgtgtacatgatgaaggcctttgacctgattgtggacaggcctgtgaccctggtgcgggagttcatcgagcggcagcacgccaagaaccgctactactactaccaccggcagtacagaagagtgcctgacatcacagagtgcaaggaggaggacatcatgtgcatgtatgaggccgagatgcagtggaagagggactacaaggtggaccaggagatcatcaacatcatgcaggaccggctgaaggcctgccagcagcgggagggccagaactaccagcagaactgcatcaaggaggtggagcagttcacccaggtggccaaggcctaccaggaccgctaccaggacctgggcgcctacagcagcgccaggaagtgcctggccaagcagaggcagaggatgctgcaggagaggaaggccgccaaggaggccgctgctgccaccagctag

SEQ ID NO: 147424 - DNA, 507 bp, Artificial Sequence
  derived and/or modified sequence
atgccagacagctgggacaaggatgtgtacccagagccccccaggaggacccctgtgcagcccaaccccatcgtgtacatgatgaaggcctttgacctgattgtggacaggcctgtgaccctggtgcgggagttcatcgagcggcagcacgccaagaaccgctactactactaccaccggcagtacagaagagtgcctgacatcacagagtgcaaggaggaggacatcatgtgcatgtatgaggccgagatgcagtggaagagggactacaaggtggaccaggagatcatcaacatcatgcaggaccggctgaaggcctgccagcagcgggagggccagaactaccagcagaactgcatcaaggaggtggagcagttcacccaggtggccaaggcctaccaggacagatgtgcctgccccacccacccccagccccccaccatcctgctgcggcctgggggccagaaccactgcaagagcagcctgcccagcctggtgctgacctag

SEQ ID NO: 147425 - DNA, 695 bp, Artificial Sequence
  derived and/or modified sequence
agccgccctcggcgtcctctgtagcgggcgacctaggccgcgggacccggacggaggtagaggccagggcagcgcgtccgggagcggagtccgcgcccgccgccgccatgccggacagctgggacaaggatgtgtaccctgagcccccgcgccgcacgccggtgcagcccaatcccatcgtctacatgatgaaagcgttcgacctcatcgtggaccgacccgtgaccctcgtgagagaatttatagagcggcagcacgcaaagaacaggtattactactaccaccggcagtaccgccgcgtgccagacatcactgagtgcaaggaggaggacatcatgtgcatgtatgaagccgaaatgcagtggaagagggactacaaagtcgaccaagaaattatcaacattatgcaggatcggctcaaagcctgtcagcagagggaaggacagaactaccagcagaactgtatcaaggaagtggagcagttcacccaggtggccaaggcctaccaggaccgctatcaggacctgggggcctacagttctgccaggaagtgcctggccaaacagaggcagaggatgctgcaagagagaaaagctgcaaaagaggccgccgctgccacctcctgaggcagctgtgggtgcccctgctgtgtggctctgtatgactgttgctgaaatataaagccctgcaacctg

SEQ ID NO: 147426 - DNA, 812 bp, Artificial Sequence
  derived and/or modified sequence
gacccggacggaggtagaggccagggcagcgcgtccgggagcggagtccgcgcccgccgccgccatgccggacagctgggacaaggatgtgtaccctgagcccccgcgccgcacgccggtgcagcccaatcccatcgtctacatgatgaaagcgttcgacctcatcgtggaccgacccgtgaccctcgtgagagaatttatagagcggcagcacgcaaagaacaggtattactactaccaccggcagtaccgccgcgtgccagacatcactgagtgcaaggaggaggacatcatgtgcatgtatgaagccgaaatgcagtggaagagggactacaaagtcgaccaagaaattatcaacattatgcaggatcggctcaaagcctgtcagcagagggaaggacagaactaccagcagaactgtatcaaggaagtggagcagttcacccaggtggccaaggcctaccaggaccgctgtgcgtgccccacccacccccaaccccccaccatcctcctgaggcctgggggccagaaccattgcaaatcttccctcccctcccttgtgctcacttgactttgccccctttgcatgtagcagaggcctcggttcccagcttgtttccattgcttccccagatcaggacctgggggcctacagttctgccaggaagtgcctggccaaacagaggcagaggatgctgcaagagagaaaagctgcaaaagaggccgccgctgccacctcctgaggcagctgtgggtgcccctgctgtgtggctctgtatgactgttgctgaaatataaagccctgcaacctg

SEQ ID NO: 147427 - DNA, 519 bp, Artificial Sequence
  derived and/or modified sequence
atgcccgacagctgggacaaggacgtgtaccccgagcccccccggcggacccctgtccagcccaatccaattgtttatatgatgaaagcatttgatctcatcgtcgacagacccgtgactctggttcgtgagttcattgaacggcagcacgccaagaacaggtactactattaccataggcagtacagacgagtacctgatatcacagagtgtaaagaggaagatatcatgtgcatgtatgaggcagagatgcagtggaaaagagattacaaagtggaccaggaaattatcaacattatgcaagaccggctcaaagcttgtcagcagcgagaaggccagaactaccaacaaaattgcatcaaagaagttgagcagttcacacaggtcgcgaaggcatatcaggatcgttaccaagacctgggcgcatactccagcgcccgtaaatgtctggctaaacagcgacagcgaatgctgcaggagcggaaagcagccaaagaagcagcggccgccacgagttag

SEQ ID NO: 147428 - DNA, 507 bp, Artificial Sequence
  derived and/or modified sequence
atgcccgacagctgggacaaggacgtgtaccccgagcccccccggcggacccccgtgcagccaaaccccatcgtttacatgatgaaagcttttgaccttatcgtggatcgacccgtcactttggtcagagagttcattgagagacagcacgccaaaaaccgatactattattaccacaggcagtatcggcgggtgcctgacattaccgaatgcaaagaggaagatattatgtgcatgtatgaggctgagatgcagtggaaacgggattataaggttgaccaggagatcatcaacataatgcaagataggttaaaggcttgccaacagcgcgaagggcagaactaccagcagaattgcatcaaggaagtggaacaatttacccaagtggcaaaggcctaccaggacaggtgcgcatgtcccactcacccccagcctcctacaatccttttgcggcccggcggccagaatcactgtaagtcctccctgcccagtctggtcctgacctag

SEQ ID NO: 147429 - DNA, 519 bp, Artificial Sequence
  derived and/or modified sequence
atgccagactcttgggataaggacgtttatcctgaacctcctcgcaggactcccgtacagcctaacccaatagtgtatatgatgaaggcgttcgatctgatcgtggacaggcccgttactctggtgcgggagtttatcgaacgtcaacacgccaagaaccgttattactactatcacagacagtacaggcgtgtacctgacatcactgagtgcaaggaagaggacattatgtgcatgtacgaggctgaaatgcagtggaagcgcgactacaaggtcgaccaagagatcatcaatattatgcaggatagacttaaggcatgccagcagagggaaggtcagaactatcagcagaactgcataaaagaagtcgaacaattcacacaagttgccaaagcctaccaggacaggtatcaggacctgggcgcttactctagcgcaagaaaatgtttggcaaagcagaggcaacggatgctccaggagaggaaggccgcaaaagaggccgcagctgctacttcctag

SEQ ID NO: 147430 - DNA, 507 bp, Artificial Sequence
  derived and/or modified sequence
atgccagatagctgggacaaagacgtatatcccgaacctccaagacggacgccagtccaacccaaccccattgtgtatatgatgaaagccttcgacttgatcgttgatcgtcccgtgacactagtgcgagaatttattgagcgccagcacgccaagaatcggtattattactaccaccgtcaatacaggagggtaccagatatcaccgagtgcaaggaggaagacattatgtgcatgtacgaggcagagatgcagtggaaaagagattacaaagtggatcaggaaataattaacatcatgcaggaccgactgaaggcatgtcaacagcgggagggacagaattaccaacagaattgcataaaggaggtggaacagtttactcaggttgcaaaagcttaccaggaccgatgtgcttgccccacgcaccctcaacctccaaccattctcttacgccctggaggccagaatcactgcaagagttcccttccatcccttgtccttacatag

SEQ ID NO: 147431 - DNA, 519 bp, Artificial Sequence
  derived and/or modified sequence
atgcccgacagctgggacaaggacgtgtaccccgagccccccagaagaacccccgtgcagcccaaccccatcgtgtacatgatgaaggccttcgacctgatcgtggacagacccgtgaccctggtgagagagttcatcgagagacagcacgccaagaacagatactactactaccacagacagtacagaagagtgcccgacatcaccgagtgcaaggaggaggacatcatgtgcatgtacgaggccgagatgcagtggaagagagactacaaggtggaccaggagatcatcaacatcatgcaggacagactgaaggcctgccagcagagagagggccagaactaccagcagaactgcatcaaggaggtggagcagttcacccaggtggccaaggcctaccaggacagataccaggacctgggcgcctacagcagcgccagaaagtgcctggccaagcagagacagagaatgctgcaggagagaaaggccgccaaggaggccgccgccgccaccagctag

SEQ ID NO: 147432 - DNA, 507 bp, Artificial Sequence
  derived and/or modified sequence
atgcccgacagctgggacaaggacgtgtaccccgagccccccagaagaacccccgtgcagcccaaccccatcgtgtacatgatgaaggccttcgacctgatcgtggacagacccgtgaccctggtgagagagttcatcgagagacagcacgccaagaacagatactactactaccacagacagtacagaagagtgcccgacatcaccgagtgcaaggaggaggacatcatgtgcatgtacgaggccgagatgcagtggaagagagactacaaggtggaccaggagatcatcaacatcatgcaggacagactgaaggcctgccagcagagagagggccagaactaccagcagaactgcatcaaggaggtggagcagttcacccaggtggccaaggcctaccaggacagatgcgcctgccccacccacccccagccccccaccatcctgctgagacccggcggccagaaccactgcaagagcagcctgcccagcctggtgctgacctag

SEQ ID NO: 147433 - protein, 119 aa, Artificial Sequence
  derived and/or modified sequence
MIARRNPEPLRFLPDEARSLPPPKLTDPRLLYIGFLGYCSGLIDNLIRRRPIATAGLHRQLLYITAFFFAGYYLVKREDYLYAVRDREMFGYMKLHPEDFPEEDKKTYGEIFEKFHPIR

SEQ ID NO: 147434 - protein, 76 aa, Artificial Sequence
  derived and/or modified sequence
MIARRNPEPLRFLPDEARSLPPPKLTDPRLLYIGFLGYCSGLIDNLIRRRPIATAGLHRQLLYITAFFCWILSCKT

SEQ ID NO: 147435 - DNA, 360 bp, Artificial Sequence
  derived and/or modified sequence
atgatcgccagaagaaaccccgagcccctgagattcctgcccgacgaggccagaagcctgcccccccccaagctgaccgaccccagactgctgtacatcggcttcctgggctactgcagcggcctgatcgacaacctgatcagaagaagacccatcgccaccgccggcctgcacagacagctgctgtacatcaccgccttcttcttcgccggctactacctggtgaagagagaggactacctgtacgccgtgagagacagagagatgttcggctacatgaagctgcaccccgaggacttccccgaggaggacaagaagacctacggcgagatcttcgagaagttccaccccatcagatag

SEQ ID NO: 147436 - DNA, 360 bp, Artificial Sequence
  derived and/or modified sequence
atgatcgcaagacgaaatccagagccacttaggttcttgccagatgaagcccgatccctgcccccccccaagctgacagaccccaggctgctttacatcggatttcttggttactgtagtgggctgattgataatctcattagacgtagacccattgcaacggcaggccttcaccggcaacttctctacatcaccgcgtttttctttgctggatactacctggtgaaacgtgaggattacctttatgcagtcagggatagagaaatgttcggttatatgaagcttcaccctgaggactttccagaagaggacaaaaagacttacggcgagatttttgaaaagtttcatcccatccgctag

SEQ ID NO: 147437 - DNA, 360 bp, Artificial Sequence
  derived and/or modified sequence
atgattgccaggagaaatcctgagcccctgcgcttcctgcctgatgaggcccggagcctgcccccacccaagctgacagacccccggctgctgtacatcggcttcctgggctactgcagcggcctgattgacaacctgatcagaagaagacccatcgccacagctggcctgcaccggcagctgctgtacatcacagccttcttctttgctggctactacctggtgaagcgggaggactacctgtatgctgtgcgggaccgggagatgtttggctacatgaagctgcaccctgaggacttccctgaggaggacaagaagacctacggggagatctttgagaagttccaccccatcagatag

SEQ ID NO: 147438 - DNA, 2518 bp, Artificial Sequence
  derived and/or modified sequence
tagcttttatggaatttcaattaattacgtttatcaaaactacgcatcatgcccatttgtgggtattggatgaaaagataaatctttccagaaggggcaggggagggagaggcaattctggttggggaagttgggagaaaagaaaatcagtatctcctagtcttcgcccagtttggctcgtttggggtactcctcgaccccgcgttaccaggcccgtgaatcccactcccaccagagaattagcgcgggcggacgagcaaagtgaaacttagtagcccggaacttcgcgtgccgggttcccgcagcaacacgtaccgggaagcgtttgggcgctgcaccgcgctgcgccgtgcccgtgagtccggcgcgcagaggaggaggagaaagctgaccgcttaggccggggtagtggtcgtcgtggttttccttgtagttcgtggtctgagaccaggcctcaagtggaaacggcgtcaccatgatcgcacggcggaacccagaacccttacggtttctgccggatgaggcccggagcctgcccccgcccaagctgaccgacccgcggctcctctacatcggcttcttgggctactgctccggcctgattgataacctaatccggcggaggccgatcgcgacggctggtttgcatcgccagcttctatatattacggcctttttttttgctggatattatcttgtaaaacgtgaagactacctgtatgctgtgagggaccgtgaaatgtttggatatatgaaattacatccagaggattttcctgaagaagataagaaaacatatggtgaaatttttgaaaaattccatccaatacgttgaagtcttcaaaatgcttgctccagtttcactgatacctgctgtttctgaatttgatggaacatgtttcttatgacagttgaagcttatgctaatctgtatgttgacaccttgtaattaaaatacgtaccatgagtactctgactctttattgttgtaagaaaaatagttcatcatcagagaatggtcagtttccattcacccatctgaaagattttaagatgaggttgaattctagtttagagttagcagactacccaaatctggcccactgccaataaagtctcattggaacacagccatgctcatttgtttacatgttgtttatggcgactgccatgctgcaagagcagaattgagtagttgtgatagagacctatggcctgcaaagcctaattaatatgtagccctttcagaaaaggtttgcctgcccctgtcctagtgcaaagtgaatttagagtgagccagattatggaggattctgtgactcttgccaaataattttgacttcatcctgtaggtattaagtcattaaggcgttttaaatcatacagtcaggtttgtatttctgagctgtctataatgaatgatatagaaggtggtttcgaaggaggagactccagacaaggaaaacagaaatcttatgttgccaagttgtctttgctcttaggtgggttatcctggagaaaatggactcaggagctaatactgtctacagtggagcttggtgcaattagaagcaaaagactgtacctaactggaatgaggttactttttatggcttatcaaatgcttgtcctggcccgatgcagtggctcatgcctgtaatcccagcactttgagaggctgaggcagggcagattgcatgagcccaggagttcgagaccaacttgggcaacatggtgaaacactgtctctacataaaatacaaaaattagctgggcgtggtggcacgttcctgcaatcccagctactcataaggctgaggtgggaggatctattgagccctggaattcgaggatgcaattaattgtggttgtgtcacagttcactgcagcctgggtgacactccagcctgggtgacaaaggagaccccgtcaaaaaaaaaagtacttgtcccaaaagtttttgtttcctagcttagaatttataatcagattaggttttggagataaagtatatgtggtatttttttttttttttttgagacgacagtcttgctctgtcatcaggctggagtgcagtggcgcaatttcggctcactgcaacctccacctcctgggttcaagcaattctcctgcctcagcctcccgagtagctgggactacaggtgcatgccacgacgcccagctgatttttgtgtttttagtagagacggggtttcaccatgttggccaagatggtctcaatctcttgaccttgtgatccacctgccttggccttccaaagtgttggaattacaggcgtgagccaccgcgcctggtctatatgtgatttcaaattaggtggccttataaatataagcagatggtttctgggcaaaatcaaatgatttctgtctctattttcttgagtaccaattgtaaaaactgaaattaggttgaggaaagtgctttagaaataataaagatgtacaaatacaaggctttggattttttattagttctgcaataaataataggttta

SEQ ID NO: 147439 - DNA, 360 bp, Artificial Sequence
  derived and/or modified sequence
atgatcgcccggcggaaccccgagcccctgcggttcctgcccgacgaggccagatccctgcctcctcctaagctgactgacccaagactcctgtatattggcttcctggggtactgcagtggccttatcgataacttaatcaggagaaggcccatagctacggccggcctgcacagacagctgttgtacattacagccttcttcttcgcgggctattacctggtaaagagggaagattatttgtatgcggttcgggacagggaaatgttcggctacatgaagctccatccggaggactttccggaggaggacaagaagacctatggcgagatcttcgagaagtttcatccaattcggtag

SEQ ID NO: 147440 - DNA, 360 bp, Artificial Sequence
  derived and/or modified sequence
atgatcgccaggagaaatccagaacctctgcgttttcttcccgatgaggctcggtctctgcccccaccaaaactcacagatcctagacttctgtacattggttttttaggctactgctctggactgattgacaacttgatccgaagaaggccaatagccactgcaggccttcacaggcagctgctgtacatcacagccttcttctttgccggatattacctggtgaaacgcgaggattacctctatgcagtcagagacagagagatgttcggatatatgaaactacaccctgaggactttccagaagaggacaagaaaacgtatggcgagatttttgaaaagttccaccccatccggtag

SEQ ID NO: 147441 - protein, 463 aa, Artificial Sequence
  derived and/or modified sequence
MAALRALCGFRGVAAQVLRPGAGVRLPIQPSRGVRQWQPDVEWAQQFGGAVMYPSKETAHWKPPPWNDVDPPKDTIVKNITLNFGPQHPAAHGVLRLVMELSGEMVRKCDPHIGLLHRGTEKLIEYKTYLQALPYFDRLDYVSMMCNEQAYSLAVEKLLNIRPPPRAQWIRVLFGEITRLLNHIMAVTTHALDLGAMTPFFWLFEEREKMFEFYERVSGARMHAAYIRPGGVHQDLPLGLMDDIYQFSKNFSLRLDELEELLTNNRIWRNRTIDIGVVTAEEALNYGFSGVMLRGSGIQWDLRKTQPYDVYDQVEFDVPVGSRGDCYDRYLCRVEEMRQSLRIIAQCLNKMPPGEIKVDDAKVSPPKRAEMKTSMESLIHHFKLYTEGYQVPPGATYTAIEAPKGEFGVYLVSDGSSRPYRCKIKAPGFAHLAGLDKMSKGHMLADVVAIIGTQDIVFGEVDR

SEQ ID NO: 147442 - DNA, 1392 bp, Artificial Sequence
  derived and/or modified sequence
atggcagctctaagagccctgtgtggcttcagaggagtggccgcccaggtcctccgccctggggccggcgttaggctgccaattcagccaagccgaggtgtgagacagtggcagcccgatgtagaatgggctcagcagttcggtggagccgtgatgtacccttctaaagagaccgcccattggaaaccaccgccttggaatgatgtggatccccccaaagacactattgtcaaaaatatcaccctcaactttggtccgcaacaccccgctgcccatggggtcctgaggctggtgatggagctatccggagagatggtccgaaaatgtgatccacacatcggcctgctacatcgtgggactgaaaagttaatagagtacaaaacttacctccaggctctcccatacttcgacaggctagactatgtctcgatgatgtgtaatgaacaggcttactcccttgcagtggaaaaactgctcaacatcagacccccccctagggcacagtggattcgggtgctattcggggaaattacgcgtctgctcaatcatataatggctgttacgactcatgccctggatctcggagccatgacccccttcttttggctgttcgaggagcgcgaaaaaatgttcgagttctatgaaagagtgtctggcgcccgtatgcacgccgcatatatacgccctgggggggtacatcaggacctacctctgggccttatggacgatatctatcagttttcaaaaaatttttccctgcgactggatgagctggaggaacttcttaccaataatagaatctggcgaaacagaaccattgacattggagttgtcaccgctgaggaggcgctgaattatggcttcagtggcgtcatgctgcgcggcagcggaatccagtgggacctgagaaagacccaaccctacgacgtgtacgatcaggtggaatttgatgtccccgttggcagccggggagactgctatgatcgctacctatgcagggttgaagaaatgcgacagagtctcagaatcattgcccaatgcctgaacaagatgccacctggcgaaattaaagtggacgatgcgaaagtgtcaccacctaaaagagccgagatgaagaccagcatggagtccctcattcaccacttcaaattatatacagagggctatcaagtccctcctggggctacttacaccgctattgaggcccctaagggcgagttcggggtgtatttggtttcagatggaagttcgcgcccctataggtgcaagatcaaggcacccggctttgcccatctggccgggctggataaaatgagcaaaggacatatgctggcggatgtcgtggccattatcggaacccaggacatcgtgttcggagaagttgataggtag

SEQ ID NO: 147443 - DNA, 1392 bp, Artificial Sequence
  derived and/or modified sequence
atggccgccctgcgggccctgtgtggcttccggggcgtggccgcccaggtgctgcggcctggggccggcgtgcggctgcccatccagcccagcagaggagtgcggcagtggcagccagatgtggagtgggcccagcagtttggaggagctgtgatgtaccccagcaaggagacagcccactggaagcccccaccctggaatgatgtggacccccccaaggacaccatcgtgaagaacatcaccctgaactttggcccccagcaccctgctgcccacggcgtgctgcggctggtgatggagctgagcggggagatggtgaggaaatgtgacccccacatcggcctgctgcaccggggcacagagaagctgattgagtacaagacctacctgcaggccctgccctactttgaccggctggactatgtgtccatgatgtgcaatgagcaggcctacagcctggccgtggagaagctgctgaacatccggcccccaccccgggcccagtggatccgggtgctgtttggagagatcacccggctgctgaaccacatcatggctgtgaccacccacgccctggacctgggcgccatgacccccttcttctggctgtttgaggagcgggagaagatgtttgagttctatgaaagagtgtctggggccaggatgcacgccgcctacatccggcctggaggagtgcaccaggacctgcccctgggcctgatggatgacatctaccagttcagcaagaacttcagcctgcggctggatgagctggaggagctgctgaccaacaaccgcatctggaggaacagaaccattgatattggagtggtgacagctgaggaggccctgaactacggcttctctggagtgatgctgcggggcagcggcatccagtgggacctgaggaagacccagccctatgatgtgtatgaccaggtggagtttgatgtgcctgtgggcagcagaggagactgctatgaccgctacctgtgccgggtggaggagatgaggcagagcctgcgcatcatcgcccagtgcctgaacaagatgcctcctggagagatcaaggtggatgatgccaaggtgtccccacccaagagagctgagatgaagacctccatggagagcctcatccaccacttcaagctgtacacagagggctaccaggtgcccccaggggccacctacacagccatcgaggcccccaagggggagtttggagtgtacctggtgtctgatggcagcagccggccctaccgctgcaagatcaaggcccctggctttgcccacctggccggcctggacaagatgagcaagggccacatgctggctgatgtggtggccatcatcggcacccaggacatcgtgtttggagaggtggacagatag

SEQ ID NO: 147444 - DNA, 2042 bp, Artificial Sequence
  derived and/or modified sequence
gccccaggagaggcagagagtgagggaaagggcctggccggcatgcacagataggatcacggtcctgggagaattcctgctcttatagtctaacctaccatggcttctcttttctcaaggctccctcatgctgccctttggccctagtggctggtttccagggctgaggggactgagtgagctgcctgagaaaagagggtagggaacagaaaagccagccaggagctgtgggaggaaacgccctcagtaaagatgaccgcggtcactgttatctaaacgcaagtgaagccgagtcacaggacccggatgttgtcagttcgacggtaaacgaccctgccagcttccaagagggcggcttcactgtgcgaataggtgagaagccaagaaggaggcgcgctggagttacttccgcccggttctccttcccgcagtctgcagccggagtaagatggcggcgctgagggctttgtgcggcttccggggcgtcgcggcccaggtgctgcggcctggggctggagtccgattgccgattcagcccagcagaggtgttcggcagtggcagccagatgtggaatgggcacagcagtttgggggagctgttatgtacccaagcaaagaaacagcccactggaagcctccaccttggaatgatgtggaccctccaaaggacacaattgtgaagaacattaccctgaactttgggccccaacacccagcagcgcatggtgtcctgcgactagtgatggaattgagtggggagatggtgcggaagtgtgatcctcacatcgggctcctgcaccgaggcactgagaagctcattgaatacaagacctatcttcaggcccttccatactttgaccggctagactatgtgtccatgatgtgtaacgaacaggcctattctctagctgtggagaagttgctaaacatccggcctcctcctcgggcacagtggatccgagtgctgtttggagaaatcacacgtttgttgaaccacatcatggctgtgaccacacatgccctggaccttggggccatgacccctttcttctggctgtttgaagaaagggagaagatgtttgagttctacgagcgagtgtctggagcccgaatgcatgctgcttatatccggccaggaggagtgcaccaggacctaccccttgggcttatggatgacatttatcagttttctaagaacttctctcttcggcttgatgagttggaggagttgctgaccaacaataggatctggcgaaatcggacaattgacattggggttgtaacagcagaagaagcacttaactatggttttagtggagtgatgcttcggggctcaggcatccagtgggacctgcggaagacccagccctatgatgtttacgaccaggttgagtttgatgttcctgttggttctcgaggggactgctatgataggtacctgtgccgggtggaggagatgcgccagtccctgagaattatcgcacagtgtctaaacaagatgcctcctggggagatcaaggttgatgatgccaaagtgtctccacctaagcgagcagagatgaagacttccatggagtcactgattcatcactttaagttgtatactgagggctaccaagttcctccaggagccacatatactgccattgaggctcccaagggagagtttggggtgtacctggtgtctgatggcagcagccgcccttatcgatgcaagatcaaggctcctggttttgcccatctggctggtttggacaagatgtctaagggacacatgttggcagatgtcgttgccatcataggtacccaagatattgtatttggagaagtagatcggtgagcaggggagcagcgtttgatcccccctgcctatcagcttcttctgtggagcctgttcctcactggaaattggcctctgtgtgtgtgtgtgtgtgtgtgtgtgtgtgtatgttcatgtacacttggctgtcaggctttctgtgcatgtactaaaaaaggagaaattataataaattagccgtcttgcggcccctaggcctaaa

SEQ ID NO: 147445 - DNA, 875 bp, Artificial Sequence
  derived and/or modified sequence
aagatggcggcgctgagggctttgtgcggcttccggggcgtcgcggcccaggtgctgcggcctggggctggagtccgattgccgattcagcccagcagaggtgttcggcagtggcagccagatgtggaatgggcacagcagtttgggggagctgttatgtacccaagcaaagaaacagcccactggaagcctccaccttggaatgatgtggaccctccaaaggacacaattgtgaagaacattaccctgaactttgggccccaacacccagcagcgcatggtgtcctgcgactagtgatggaattgagtggggagatggtgcggaagtgtgatcctcacatcgggctcctgcaccgaggcactgagaagctcattgaatacaagacctatcttcagtgctgtttggagaaatcacacgtttgttgaaccacatcatggctgtgaccacacatgccctggaccttggggccatgacccctttcttctggctgtttgaagaaagggagaagatgtttgagttctacgagcgagtgtctggagcccgaatgcatgctgcttatatccggccaggaggagtgcaccaggacctaccccttgggcttatggatgacatttatcagttttctaagaacttctctcttcggcttgatgagttggaggaggtaagctaggagtcaatgggaaaaatctctcccccacaagaagggctagagaaatacagagatatttgaagagtgtgaggaagagtattaacacaccagttttcttgatcaatagttgctgaccaacaataggatctggcgaaatcggacaattgacattggggttgtaacagcagaagaagcacttaactatggttttaggtgaggggaata

SEQ ID NO: 147446 - DNA, 1392 bp, Artificial Sequence
  derived and/or modified sequence
atggccgccctgcgggccctgtgcggcttccggggcgtggccgcccaagtgctaaggccaggagctggagtgagactgccaatccagcctagcagaggcgtcagacagtggcaaccagatgtggaatgggctcagcagtttgggggcgcagttatgtacccgtccaaggagaccgcccactggaaaccaccaccttggaatgacgtagatccaccaaaggacactattgtgaagaacatcactctgaacttcggaccacaacatcctgcggctcacggtgtgctgaggctggtcatggagctgtctggagagatggtccgcaagtgcgacccccacatcggcctgctccatcgggggactgagaaactgattgagtacaagacttacctccaggcactgccctattttgacagactagattacgtgagtatgatgtgtaacgaacaggcatactcacttgccgtggagaagttactgaatatccgtccacctccacgcgctcaatggattcgggtgttgtttggcgagatcacccgcttgctgaaccatataatggccgtcacgactcatgcactggacctcggggcaatgacccctttcttttggctctttgaggaaagggaaaaaatgttcgagttttacgagagagttagtggcgccagaatgcacgcggcatacattcgcccagggggcgtccatcaggatctcccacttggcttaatggacgatatttaccagttctccaaaaattttagcttacggctggacgaactggaagagctgttgaccaataacagaatttggaggaaccgaacaatcgacattggagttgtgacagctgaggaggctctaaactatggcttttccggcgtcatgctgcgaggctctggtatccagtgggatcttcgaaagacgcagccgtatgacgtgtacgatcaggttgagtttgatgttcctgttggaagtcgcggcgattgctacgaccggtacctgtgccgcgtcgaggaaatgaggcagtcactgaggataattgctcagtgtctgaacaaaatgccgcccggagagattaaggtggacgacgccaaggttagcccacctaagcgagccgagatgaaaaccagcatggagtcacttatccatcacttcaaactctacaccgaagggtaccaggtgcctccgggcgccacgtacacagccatagaagccccgaaaggcgaatttggggtctacctggtatccgatggatccagtcggccataccgatgtaaaatcaaggcccctggctttgcgcacctggccgggctcgacaagatgagtaaaggacacatgttggccgacgtggttgctataattggaacccaggacattgtgtttggcgaggtagatcgatag

SEQ ID NO: 147447 - DNA, 1392 bp, Artificial Sequence
  derived and/or modified sequence
atggccgctctgcgcgcactttgcgggttccggggtgtggccgcacaggtactgcggcctggagccggagtccggttgcccattcaaccttcgcgcggtgtgagacagtggcagcctgacgtcgaatgggcccaacaattcggtggtgccgtgatgtatcccagcaaggagaccgcccattggaaaccgccaccatggaatgacgtcgatccgcctaaggacaccatagtgaagaacattaccctgaatttcggtcctcagcatcccgcagcgcacggggtgcttaggctcgtgatggagctgagcggggagatggttcgtaagtgcgatccccacattggactgctgcatcgcggaaccgaaaaattgatcgaatataaaacttatctgcaggccctgccctacttcgatcggctggactacgtgtcaatgatgtgcaatgaacaagcctattctctcgccgtggagaaactgcttaatattcgccctcctccacgagctcaatggatcagagtgttgtttggcgagattactcgcttgctcaatcacatcatggccgtgacaacacacgcacttgacttgggcgctatgacgcccttcttctggctcttcgaggagcgggaaaagatgtttgagttttatgaaagggtgtcgggggcacgcatgcacgctgcctacatccgtcctggcggtgtgcatcaggatctacctctcggcctcatggatgacatctaccagttcagcaagaatttttcgctccgtctcgacgagctggaggagctcctgacaaataatcgcatttggcgcaaccggaccatagatatcggagtggtgacggccgaggaagccctgaattacgggttctccggagttatgctgcggggatcaggaatccagtgggatctgcgcaagacacagccatatgatgtgtatgatcaggtcgaattcgacgtgcccgttggctccaggggtgattgttacgacaggtatctatgccgtgtcgaagagatgcgccaatccctccgcataattgcccagtgtttaaataaaatgcctccaggtgagattaaagtggacgatgccaaggtctccccgcctaaacgtgccgagatgaagacgagcatggaatctctgatccaccatttcaagctatacacggaaggataccaagtcccacctggcgctacatataccgccattgaggccccaaagggtgaatttggagtgtatctcgtgagcgatggctcatcacgaccttacagatgcaagattaaggctcccggatttgcgcatcttgctggactcgataagatgtccaaggggcacatgctggctgatgtagttgccataataggtactcaggatatagtctttggcgaggtcgatcggtag

SEQ ID NO: 147448 - DNA, 1392 bp, Artificial Sequence
  derived and/or modified sequence
atggccgccctgagagccctgtgcggcttcagaggcgtggccgcccaggtgctgagacccggcgccggcgtgagactgcccatccagcccagcagaggcgtgagacagtggcagcccgacgtggagtgggcccagcagttcggcggcgccgtgatgtaccccagcaaggagaccgcccactggaagccccccccctggaacgacgtggacccccccaaggacaccatcgtgaagaacatcaccctgaacttcggcccccagcaccccgccgcccacggcgtgctgagactggtgatggagctgagcggcgagatggtgagaaagtgcgacccccacatcggcctgctgcacagaggcaccgagaagctgatcgagtacaagacctacctgcaggccctgccctacttcgacagactggactacgtgagcatgatgtgcaacgagcaggcctacagcctggccgtggagaagctgctgaacatcagacccccccccagagcccagtggatcagagtgctgttcggcgagatcaccagactgctgaaccacatcatggccgtgaccacccacgccctggacctgggcgccatgacccccttcttctggctgttcgaggagagagagaagatgttcgagttctacgagagagtgagcggcgccagaatgcacgccgcctacatcagacccggcggcgtgcaccaggacctgcccctgggcctgatggacgacatctaccagttcagcaagaacttcagcctgagactggacgagctggaggagctgctgaccaacaacagaatctggagaaacagaaccatcgacatcggcgtggtgaccgccgaggaggccctgaactacggcttcagcggcgtgatgctgagaggcagcggcatccagtgggacctgagaaagacccagccctacgacgtgtacgaccaggtggagttcgacgtgcccgtgggcagcagaggcgactgctacgacagatacctgtgcagagtggaggagatgagacagagcctgagaatcatcgcccagtgcctgaacaagatgccccccggcgagatcaaggtggacgacgccaaggtgagcccccccaagagagccgagatgaagaccagcatggagagcctgatccaccacttcaagctgtacaccgagggctaccaggtgccccccggcgccacctacaccgccatcgaggcccccaagggcgagttcggcgtgtacctggtgagcgacggcagcagcagaccctacagatgcaagatcaaggcccccggcttcgcccacctggccggcctggacaagatgagcaagggccacatgctggccgacgtggtggccatcatcggcacccaggacatcgtgttcggcgaggtggacagatag

SEQ ID NO: 147449 - protein, 264 aa, Artificial Sequence
  derived and/or modified sequence
MAAAAVARLWWRGILGASALTRGTGRPSVLLLPVRRESAGADTRPTVRPRNDVAHKQLSAFGEYVAEILPKYVQQVQVSCFNELEVCIHPDGVIPVLTFLRDHTNAQFKSLVDLTAVDVPTRQNRFEIVYNLLSLRFNSRIRVKTYTDELTPIESAVSVFKAANWYEREIWDMFGVFFANHPDLRRILTDYGFEGHPFRKDFPLSGYVELRYDDEVKRVVAEPVELAQEFRKFDLNSPWEAFPVYRQPPESLKLEAGDKKPDAK

SEQ ID NO: 147450 - DNA, 795 bp, Artificial Sequence
  derived and/or modified sequence
atggctgccgcagcggtggcacggctgtggtggcgcggcatactgggagcctctgccctcacaagagggaccggccgcccttctgtgcttcttctcccagtaaggagagagagcgcaggggccgatacacgccccactgtacgaccgcggaatgacgtggctcacaaacaactgagcgcatttggcgagtatgtcgcagagatactgcccaagtacgtccaacaggtccaagtgagctgtttcaatgagctcgaggtttgtatccatcccgacggagtaatcccggtactgacctttctgcgagatcacactaacgctcagttcaagagtctagtcgacctgaccgctgtggatgtgccaactagacaaaaccggtttgagatcgtgtacaacctactgtctctgcgtttcaattcgagaatacgcgtcaagacatataccgatgaactgacccctatagagagcgccgtgtctgtgtttaaggccgcaaactggtatgagagggagatttgggacatgtttggcgtgttcttcgcaaaccacccagatctgcgcagaattctcacagactacggctttgagggacatccatttcgaaaggacttccctttgagtggttatgttgagctccgctacgatgacgaggttaagagagtggttgctgagcccgtggagctggcgcaggaatttcgtaagtttgatctcaactcaccttgggaggcgtttcctgtgtataggcagccacccgaatcgctaaagcttgaggccggagacaaaaaaccagacgctaagtag

SEQ ID NO: 147451 - DNA, 795 bp, Artificial Sequence
  derived and/or modified sequence
atggctgctgctgctgtggcccggctgtggtggaggggcatcctgggcgccagcgccctgacccggggcaccggccggcccagcgtgctgctgctgcctgtgagaagagagagcgctggagctgacacccggcccaccgtgcggcccagaaatgatgtggcccacaagcagctgagcgcctttggagaatatgtggccgagatcctgcccaagtatgtgcagcaggtgcaggtgtcctgcttcaatgagctggaggtgtgcatccacccagatggagtcatccctgtgctgaccttcctgcgggaccacaccaatgcccagttcaagagcctggtggacctgacagctgtggatgtgcccacccggcagaacagatttgagatcgtgtacaacctgctgagcctgcgcttcaacagccgcatccgggtgaagacctacacagatgagctgacccccattgaatctgctgtgtctgtgttcaaggccgccaactggtatgaaagagagatctgggacatgtttggagtcttctttgccaaccacccagacctgcggcgcatcctgacagattatggctttgagggccaccccttcaggaaggacttccccctgagcggctacgtggagctgcgctatgatgatgaggtgaagagggtggtggccgagcctgtggagctggcccaggagttcaggaagtttgacctgaacagcccctgggaggccttccctgtgtaccggcagcccccagagagcctgaagctggaggccggggacaagaagccagatgccaagtag

SEQ ID NO: 147452 - DNA, 958 bp, Artificial Sequence
  derived and/or modified sequence
acacttccgtttccggtccgtgcccttggggctccgtgtcctgctgtctttccgtccgctgcctagtctgcatctgagtaacatggcggcggcggcggtagccaggctgtggtggcgcgggatcttgggggcctcggcgctgaccagggggactgggcgaccctccgttctgttgctgccggtgaggcgggagagcgccggggccgacacgcgccccactgtcagaccacggaatgatgtggcccacaagcagctctcagcttttggagagtatgtggctgaaatcttgcccaagtatgtccaacaagttcaggtgtcctgcttcaatgagttagaggtctgtatccatcctgatggcgtcatcccagtgctgactttcctcagggatcacaccaatgcacagttcaaatctctggttgacttgacagcagtggacgtcccaactcggcaaaaccgttttgagattgtctacaacctgttgtctctgcgcttcaactcacggatccgtgtgaagacctacacagatgagctgacgcccattgagtctgctgtctctgtgttcaaggcagccaactggtatgaaagggagatctgggacatgtttggagtcttctttgctaaccaccctgatctaagaaggatcctgacagattatggcttcgagggacatcctttccggaaagactttcctctatctggctatgttgagttacgttatgatgatgaagtgaagcgggtggtggcagagccggtggagttggcccaagagttccgcaaatttgacctgaacagcccctgggaggctttcccagtctatcgccaacccccggagagtctcaagcttgaagccggagacaagaagcctgatgccaagtagctccagggaacgcatgtggatcctagacagcgccttatctatgattgagtgtccgtgtaaataaattcctacttagactta

SEQ ID NO: 147453 - DNA, 795 bp, Artificial Sequence
  derived and/or modified sequence
atggccgccgccgccgtggcccggctgtggtggcggggcatcctgggggcgtccgcactgacccgagggacgggccgaccctccgtcctgttgctcccagtccgacgcgaaagcgctggcgcagacacccgtcctacggttcgacctcggaatgacgtggcccacaagcagttgagcgccttcggggagtacgtggcagaaatccttcccaagtacgttcaacaagtgcaggtatcttgctttaacgagctggaggtctgcatccaccccgatggcgtgatcccggtactgacgttcctgagggatcatacaaacgcacagtttaagagcttggtagatctaactgcggtcgatgtgcccactagacagaatagattcgaaatcgtatataatttgttgtccctgcggttcaactcacgcatcagagtgaagacttatacagatgagcttactcctatcgaatcggcggtaagcgtctttaaggcagccaattggtacgagcgcgaaatctgggacatgttcggggttttcttcgctaaccaccctgacctgagaaggatcttgaccgattacggattcgaaggccatcctttcagaaaggacttccctctgagcggatatgtagaattacgctatgatgacgaagtgaagcgggttgtggccgaaccagttgagctggcgcaggagtttcggaagttcgatcttaatagcccctgggaagcttttcctgtgtataggcagccaccagaaagcctaaaactggaagcaggagataagaagccagacgcaaaatag

SEQ ID NO: 147454 - DNA, 795 bp, Artificial Sequence
  derived and/or modified sequence
atggcagctgccgctgtagctcgtctgtggtggcgaggcattttgggagccagtgccttgacacggggaaccggaaggccctctgtgctcctgctgcctgtccgacgggaaagcgctggggctgacaccaggcccaccgtcagacctaggaacgatgtggcccataaacaactatcagcatttggtgagtacgtggcagagattctgcccaaatacgtgcagcaggtgcaggtgagctgcttcaacgagctggaggtctgtatccatccagatggcgtcattcctgtactgaccttcctgcgcgaccacacgaacgcccaattcaagtccctggtggacctgaccgcagttgatgtgcccactagacaaaacagattcgaaattgtgtacaacctcctgtcactgagatttaactccaggatcagggtgaagacatacactgatgagctgacccctatcgaatcggctgtcagtgtgttcaaggctgcgaactggtacgagagggagatttgggacatgtttggggtcttttttgccaaccatcccgacctacgacgcatcctcacagattacggctttgaaggccaccccttcaggaaggatttcccgctgtctggttacgtcgagctccggtatgacgacgaagtgaaacgagtcgtcgcagaaccagtggaactagctcaggaatttcgtaagttcgacctgaactccccttgggaggccttcccagtctaccgacagcctcccgagtccttaaagctggaggctggcgacaagaagccagatgcaaagtag

SEQ ID NO: 147455 - DNA, 795 bp, Artificial Sequence
  derived and/or modified sequence
atggccgccgccgccgtggccagactgtggtggagaggcatcctgggcgccagcgccctgaccagaggcaccggcagacccagcgtgctgctgctgcccgtgagaagagagagcgccggcgccgacaccagacccaccgtgagacccagaaacgacgtggcccacaagcagctgagcgccttcggcgagtacgtggccgagatcctgcccaagtacgtgcagcaggtgcaggtgagctgcttcaacgagctggaggtgtgcatccaccccgacggcgtgatccccgtgctgaccttcctgagagaccacaccaacgcccagttcaagagcctggtggacctgaccgccgtggacgtgcccaccagacagaacagattcgagatcgtgtacaacctgctgagcctgagattcaacagcagaatcagagtgaagacctacaccgacgagctgacccccatcgagagcgccgtgagcgtgttcaaggccgccaactggtacgagagagagatctgggacatgttcggcgtgttcttcgccaaccaccccgacctgagaagaatcctgaccgactacggcttcgagggccaccccttcagaaaggacttccccctgagcggctacgtggagctgagatacgacgacgaggtgaagagagtggtggccgagcccgtggagctggcccaggagttcagaaagttcgacctgaacagcccctgggaggccttccccgtgtacagacagccccccgagagcctgaagctggaggccggcgacaagaagcccgacgccaagtag

SEQ ID NO: 147456 - protein, 124 aa, Artificial Sequence
  derived and/or modified sequence
MAAAMTFCRLLNRCGEAARSLPLGARCFGVRVSPTGEKVTHTGQVYDDKDYRRIRFVGRQKEVNENFAIDLIAEQPVSEVETRVIACDGGGGALGHPKVYINLDKETKTGTCGYCGLQFRQHHH

SEQ ID NO: 147457 - DNA, 375 bp, Artificial Sequence
  derived and/or modified sequence
atggctgccgctatgacattttgtagactcttgaatagatgcggagaagcagcacgctctctgccccttggcgcacgatgcttcggagtcagagtgtcacctactggagagaaagtcactcatacagggcaggtgtatgacgacaaggattaccggagaattcgcttcgtgggcaggcaaaaggaggtcaacgagaactttgccatcgacctgattgcagagcagcctgttagcgaggtcgaaacacgggtgatagcttgcgatgggggcggaggtgcccttggtcacccgaaagtgtacatcaacttggacaaggaaaccaagaccgggacatgtggctactgcggactgcagttccgacagcatcatcactag

SEQ ID NO: 147458 - DNA, 375 bp, Artificial Sequence
  derived and/or modified sequence
atggctgctgccatgaccttctgccgcctgctgaacagatgtggggaggccgcccggagcctgcccctgggcgcccgctgcttcggcgtgcgggtgagccccactggagagaaggtgacccacacaggccaggtgtatgatgacaaggactaccgccgcatccgctttgtgggccggcagaaggaggtgaatgaaaattttgccatcgacctgattgctgagcagcctgtgtctgaggtggagaccagggtgattgcctgtgatggcggcggcggggccctgggccaccccaaggtgtacatcaacctggacaaggagaccaagacaggcacctgtggctactgcggcctgcagttccggcagcaccaccactag

SEQ ID NO: 147459 - DNA, 1082 bp, Artificial Sequence
  derived and/or modified sequence
aaaggccagcggcgcaaaatggcggcggcgatgaccttctgccggctgctgaaccggtgtggcgaggcggcgcggagcctgcccctgggcgccaggtgtttcggggtgcgggtctcgccgaccggggagaaggtcacgcacactggccaggtttatgatgataaagactacaggagaattcggtttgtaggtcgtcagaaagaggtgaatgaaaactttgccattgatttgatagcagagcagcccgtgagcgaggtggagactcgggtgatagcgtgcgatggcggcgggggagctcttggccacccaaaagtgtatataaacttggacaaagaaacaaaaaccggcacatgcggttactgtgggctccagttcagacagcaccaccactagagcgtgtggcacgccgggggtcccgcagcatcctgtgagcatttccgcggggaagctgagcacgtgaagctcgctggttctgtgcgaagggtattcctggtgctgaataaagggtgttgctgtcaaggctgacaatttgtaagtttgtttctttcatagtctgggctttggaagtgaacatccacgtggacatgggtagacatgcgagtggaagcagtgcccgctccagtgagcctgagctgcctcctgccggccgctgcctgccttaccggctgcttctgtgtgtctcctcttatccttggggccacgtgggctgcaggaatgggcggggggcagggaaggagaaggagaagtgcctcttgttttgcagatgcaactgtgcttcagagagccaaggtgggtcttgaggtgcatagtgaaggagggtgcccaggcctcaactggtcctatgggaaggtcagcctctctcctgttgctggcttgcagagctggtctatccgtccgtcctagtccctatgttgaaatgtcagatcttaaaacccaagaatttaagcactggtttgaaggcatcgaaagtcacatactggccacattaaggacagtctatgtttttaaaagagtaaggattataatgtagtgtaacataaaaataaaagtagattttgagggaagagaaaggagtcttgcta

SEQ ID NO: 147460 - DNA, 375 bp, Artificial Sequence
  derived and/or modified sequence
atggccgccgccatgaccttctgccggctgctgaaccggtgcggcgaggcagcccgttccttgccattaggcgccaggtgttttggagtccgggtgtctccaaccggcgagaaggtgacacatacggggcaggtgtatgacgataaggactatcgccgcattaggtttgtggggcggcaaaaagaagtgaacgaaaatttcgccattgatcttatcgccgaacaacctgttagcgaagtagagaccagagttatcgcctgtgacgggggggggggagcactgggtcatcctaaagtctacattaatctggacaaagagacaaagaccgggacatgcggatattgcggcttgcagtttcgccagcatcatcactag

SEQ ID NO: 147461 - DNA, 375 bp, Artificial Sequence
  derived and/or modified sequence
atggccgcagccatgaccttttgcaggttattgaatcggtgcggggaggccgctcgctctctgccactcggggcacggtgcttcggagtcagagtctcgccgaccggagagaaggttacacacactgggcaggtatatgacgataaggactaccgccgaattagattcgtgggtcgccagaaagaggtgaatgagaacttcgctatcgatctgatagccgagcagccggtctctgaggtcgagaccagggtgatagcctgtgacgggggaggaggggcactggggcaccccaaagtttacatcaacctagataaggagacaaagacaggtacctgtggttattgtgggttgcagttccgtcaacaccatcattag

SEQ ID NO: 147462 - DNA, 375 bp, Artificial Sequence
  derived and/or modified sequence
atggccgccgccatgaccttctgcagactgctgaacagatgcggcgaggccgccagaagcctgcccctgggcgccagatgcttcggcgtgagagtgagccccaccggcgagaaggtgacccacaccggccaggtgtacgacgacaaggactacagaagaatcagattcgtgggcagacagaaggaggtgaacgagaacttcgccatcgacctgatcgccgagcagcccgtgagcgaggtggagaccagagtgatcgcctgcgacggcggcggcggcgccctgggccaccccaaggtgtacatcaacctggacaaggagaccaagaccggcacctgcggctactgcggcctgcagttcagacagcaccaccactag

SEQ ID NO: 147463 - protein, 902 aa, Artificial Sequence
  derived and/or modified sequence
MGAASCEDEELEFKLVFGEEKEAPPLGAGGLGEELDSEDAPPCCRLALGEPPPYGAAPIGIPRPPPPRPGMHSPPPRPAPSPGTWESQPARSVRLGGPGGGAGGAGGGRVLECPSIRITSISPTPEPPAALEDNPDAWGDGSPRDYPPPEGFGGYREAGGQGGGAFFSPSPGSSSLSSWSFFSDASDEAALYAACDEVESELNEAASRFGLGSPLPSPRASPRPWTPEDPWSLYGPSPGGRGPEDSWLLLSAPGPTPASPRPASPCGKRRYSSSGTPSSASPALSRRGSLGEEGSEPPPPPPLPLARDPGSPGPFDYVGAPPAESIPQKTRRTSSEQAVALPRSEEPASCNGKLPLGAEESVAPPGGSRKEVAGMDYLAVPSPLAWSKARIGGHSPIFRTSALPPLDWPLPSQYEQLELRIEVQPRAHHRAHYETEGSRGAVKAAPGGHPVVKLLGYSEKPLTLQMFIGTADERNLRPHAFYQVHRITGKMVATASYEAVVSGTKVLEMTLLPENNMAANIDCAGILKLRNSDIELRKGETDIGRKNTRVRLVFRVHVPQGGGKVVSVQAASVPIECSQRSAQELPQVEAYSPSACSVRGGEELVLTGSNFLPDSKVVFIERGPDGKLQWEEEATVNRLQSNEVTLTLTVPEYSNKRVSRPVQVYFYVSNGRRKRSPTQSFRFLPVICKEEPLPDSSLRGFPSASATPFGTDMDFSPPRPPYPSYPHEDPACETPYLSEGFGYGMPPLYPQTGPPPSYRPGLRMFPETRGTTGCAQPPAVSFLPRPFPSDPYGGRGSSFSLGLPFSPPAPFRPPPLPASPPLEGPFPSQSDVHPLPAEGYNKVGPGYGPGEGAPEQEKSRGGYSSGFRDSVPIQGITLEEVSEIIGRDLSGFPAPPGEEPPA

SEQ ID NO: 147464 - protein, 915 aa, Artificial Sequence
  derived and/or modified sequence
MLSGRDLGAPAGSMGAASCEDEELEFKLVFGEEKEAPPLGAGGLGEELDSEDAPPCCRLALGEPPPYGAAPIGIPRPPPPRPGMHSPPPRPAPSPGTWESQPARSVRLGGPGGGAGGAGGGRVLECPSIRITSISPTPEPPAALEDNPDAWGDGSPRDYPPPEGFGGYREAGGQGGGAFFSPSPGSSSLSSWSFFSDASDEAALYAACDEVESELNEAASRFGLGSPLPSPRASPRPWTPEDPWSLYGPSPGGRGPEDSWLLLSAPGPTPASPRPASPCGKRRYSSSGTPSSASPALSRRGSLGEEGSEPPPPPPLPLARDPGSPGPFDYVGAPPAESIPQKTRRTSSEQAVALPRSEEPASCNGKLPLGAEESVAPPGGSRKEVAGMDYLAVPSPLAWSKARIGGHSPIFRTSALPPLDWPLPSQYEQLELRIEVQPRAHHRAHYETEGSRGAVKAAPGGHPVVKLLGYSEKPLTLQMFIGTADERNLRPHAFYQVHRITGKMVATASYEAVVSGTKVLEMTLLPENNMAANIDCAGILKLRNSDIELRKGETDIGRKNTRVRLVFRVHVPQGGGKVVSVQAASVPIECSQRSAQELPQVEAYSPSACSVRGGEELVLTGSNFLPDSKVVFIERGPDGKLQWEEEATVNRLQSNEVTLTLTVPEYSNKRVSRPVQVYFYVSNGRRKRSPTQSFRFLPVICKEEPLPDSSLRGFPSASATPFGTDMDFSPPRPPYPSYPHEDPACETPYLSEGFGYGMPPLYPQTGPPPSYRPGLRMFPETRGTTGCAQPPAVSFLPRPFPSDPYGGRGSSFSLGLPFSPPAPFRPPPLPASPPLEGPFPSQSDVHPLPAEGYNKVGPGYGPGEGAPEQEKSRGGYSSGFRDSVPIQGITLEEVSEIIGRDLSGFPAPPGEEPPA

SEQ ID NO: 147465 - protein, 934 aa, Artificial Sequence
  derived and/or modified sequence
MADGGADSAAQRLPEGPGRVAPGRDLGAPAGSMGAASCEDEELEFKLVFGEEKEAPPLGAGGLGEELDSEDAPPCCRLALGEPPPYGAAPIGIPRPPPPRPGMHSPPPRPAPSPGTWESQPARSVRLGGPGGGAGGAGGGRVLECPSIRITSISPTPEPPAALEDNPDAWGDGSPRDYPPPEGFGGYREAGGQGGGAFFSPSPGSSSLSSWSFFSDASDEAALYAACDEVESELNEAASRFGLGSPLPSPRASPRPWTPEDPWSLYGPSPGGRGPEDSWLLLSAPGPTPASPRPASPCGKRRYSSSGTPSSASPALSRRGSLGEEGSEPPPPPPLPLARDPGSPGPFDYVGAPPAESIPQKTRRTSSEQAVALPRSEEPASCNGKLPLGAEESVAPPGGSRKEVAGMDYLAVPSPLAWSKARIGGHSPIFRTSALPPLDWPLPSQYEQLELRIEVQPRAHHRAHYETEGSRGAVKAAPGGHPVVKLLGYSEKPLTLQMFIGTADERNLRPHAFYQVHRITGKMVATASYEAVVSGTKVLEMTLLPENNMAANIDCAGILKLRNSDIELRKGETDIGRKNTRVRLVFRVHVPQGGGKVVSVQAASVPIECSQRSAQELPQVEAYSPSACSVRGGEELVLTGSNFLPDSKVVFIERGPDGKLQWEEEATVNRLQSNEVTLTLTVPEYSNKRVSRPVQVYFYVSNGRRKRSPTQSFRFLPVICKEEPLPDSSLRGFPSASATPFGTDMDFSPPRPPYPSYPHEDPACETPYLSEGFGYGMPPLYPQTGPPPSYRPGLRMFPETRGTTGCAQPPAVSFLPRPFPSDPYGGRGSSFSLGLPFSPPAPFRPPPLPASPPLEGPFPSQSDVHPLPAEGYNKVGPGYGPGEGAPEQEKSRGGYSSGFRDSVPIQGITLEEVSEIIGRDLSGFPAPPGEEPPA

SEQ ID NO: 147466 - DNA, 2709 bp, Artificial Sequence
  derived and/or modified sequence
atgggcgccgccagctgcgaggacgaggagctggagttcaagctggtgttcggcgaggagaaggaggccccccccctgggcgccggcggcctgggcgaggagctggacagcgaggacgcccccccctgctgcagactggccctgggcgagccccccccctacggcgccgcccccatcggcatccccagaccccccccccccagacccggcatgcacagccccccccccagacccgcccccagccccggcacctgggagagccagcccgccagaagcgtgagactgggcggccccggcggcggcgccggcggcgccggcggcggcagagtgctggagtgccccagcatcagaatcaccagcatcagccccacccccgagccccccgccgccctggaggacaaccccgacgcctggggcgacggcagccccagagactaccccccccccgagggcttcggcggctacagagaggccggcggccagggcggcggcgccttcttcagccccagccccggcagcagcagcctgagcagctggagcttcttcagcgacgccagcgacgaggccgccctgtacgccgcctgcgacgaggtggagagcgagctgaacgaggccgccagcagattcggcctgggcagccccctgcccagccccagagccagccccagaccctggacccccgaggacccctggagcctgtacggccccagccccggcggcagaggccccgaggacagctggctgctgctgagcgcccccggccccacccccgccagccccagacccgccagcccctgcggcaagagaagatacagcagcagcggcacccccagcagcgccagccccgccctgagcagaagaggcagcctgggcgaggagggcagcgagccccccccccccccccccctgcccctggccagagaccccggcagccccggccccttcgactacgtgggcgccccccccgccgagagcatcccccagaagaccagaagaaccagcagcgagcaggccgtggccctgcccagaagcgaggagcccgccagctgcaacggcaagctgcccctgggcgccgaggagagcgtggccccccccggcggcagcagaaaggaggtggccggcatggactacctggccgtgcccagccccctggcctggagcaaggccagaatcggcggccacagccccatcttcagaaccagcgccctgccccccctggactggcccctgcccagccagtacgagcagctggagctgagaatcgaggtgcagcccagagcccaccacagagcccactacgagaccgagggcagcagaggcgccgtgaaggccgcccccggcggccaccccgtggtgaagctgctgggctacagcgagaagcccctgaccctgcagatgttcatcggcaccgccgacgagagaaacctgagaccccacgccttctaccaggtgcacagaatcaccggcaagatggtggccaccgccagctacgaggccgtggtgagcggcaccaaggtgctggagatgaccctgctgcccgagaacaacatggccgccaacatcgactgcgccggcatcctgaagctgagaaacagcgacatcgagctgagaaagggcgagaccgacatcggcagaaagaacaccagagtgagactggtgttcagagtgcacgtgccccagggcggcggcaaggtggtgagcgtgcaggccgccagcgtgcccatcgagtgcagccagagaagcgcccaggagctgccccaggtggaggcctacagccccagcgcctgcagcgtgagaggcggcgaggagctggtgctgaccggcagcaacttcctgcccgacagcaaggtggtgttcatcgagagaggccccgacggcaagctgcagtgggaggaggaggccaccgtgaacagactgcagagcaacgaggtgaccctgaccctgaccgtgcccgagtacagcaacaagagagtgagcagacccgtgcaggtgtacttctacgtgagcaacggcagaagaaagagaagccccacccagagcttcagattcctgcccgtgatctgcaaggaggagcccctgcccgacagcagcctgagaggcttccccagcgccagcgccacccccttcggcaccgacatggacttcagcccccccagacccccctaccccagctacccccacgaggaccccgcctgcgagaccccctacctgagcgagggcttcggctacggcatgccccccctgtacccccagaccggccccccccccagctacagacccggcctgagaatgttccccgagaccagaggcaccaccggctgcgcccagccccccgccgtgagcttcctgcccagacccttccccagcgacccctacggcggcagaggcagcagcttcagcctgggcctgcccttcagcccccccgcccccttcagacccccccccctgcccgccagcccccccctggagggccccttccccagccagagcgacgtgcaccccctgcccgccgagggctacaacaaggtgggccccggctacggccccggcgagggcgcccccgagcaggagaagagcagaggcggctacagcagcggcttcagagacagcgtgcccatccagggcatcaccctggaggaggtgagcgagatcatcggcagagacctgagcggcttccccgccccccccggcgaggagccccccgcctag

SEQ ID NO: 147467 - DNA, 2748 bp, Artificial Sequence
  derived and/or modified sequence
atgctgagcggcagagacctgggcgcccccgccggcagcatgggcgccgccagctgcgaggacgaggagctggagttcaagctggtgttcggcgaggagaaggaggccccccccctgggcgccggcggcctgggcgaggagctggacagcgaggacgcccccccctgctgcagactggccctgggcgagccccccccctacggcgccgcccccatcggcatccccagaccccccccccccagacccggcatgcacagccccccccccagacccgcccccagccccggcacctgggagagccagcccgccagaagcgtgagactgggcggccccggcggcggcgccggcggcgccggcggcggcagagtgctggagtgccccagcatcagaatcaccagcatcagccccacccccgagccccccgccgccctggaggacaaccccgacgcctggggcgacggcagccccagagactaccccccccccgagggcttcggcggctacagagaggccggcggccagggcggcggcgccttcttcagccccagccccggcagcagcagcctgagcagctggagcttcttcagcgacgccagcgacgaggccgccctgtacgccgcctgcgacgaggtggagagcgagctgaacgaggccgccagcagattcggcctgggcagccccctgcccagccccagagccagccccagaccctggacccccgaggacccctggagcctgtacggccccagccccggcggcagaggccccgaggacagctggctgctgctgagcgcccccggccccacccccgccagccccagacccgccagcccctgcggcaagagaagatacagcagcagcggcacccccagcagcgccagccccgccctgagcagaagaggcagcctgggcgaggagggcagcgagccccccccccccccccccctgcccctggccagagaccccggcagccccggccccttcgactacgtgggcgccccccccgccgagagcatcccccagaagaccagaagaaccagcagcgagcaggccgtggccctgcccagaagcgaggagcccgccagctgcaacggcaagctgcccctgggcgccgaggagagcgtggccccccccggcggcagcagaaaggaggtggccggcatggactacctggccgtgcccagccccctggcctggagcaaggccagaatcggcggccacagccccatcttcagaaccagcgccctgccccccctggactggcccctgcccagccagtacgagcagctggagctgagaatcgaggtgcagcccagagcccaccacagagcccactacgagaccgagggcagcagaggcgccgtgaaggccgcccccggcggccaccccgtggtgaagctgctgggctacagcgagaagcccctgaccctgcagatgttcatcggcaccgccgacgagagaaacctgagaccccacgccttctaccaggtgcacagaatcaccggcaagatggtggccaccgccagctacgaggccgtggtgagcggcaccaaggtgctggagatgaccctgctgcccgagaacaacatggccgccaacatcgactgcgccggcatcctgaagctgagaaacagcgacatcgagctgagaaagggcgagaccgacatcggcagaaagaacaccagagtgagactggtgttcagagtgcacgtgccccagggcggcggcaaggtggtgagcgtgcaggccgccagcgtgcccatcgagtgcagccagagaagcgcccaggagctgccccaggtggaggcctacagccccagcgcctgcagcgtgagaggcggcgaggagctggtgctgaccggcagcaacttcctgcccgacagcaaggtggtgttcatcgagagaggccccgacggcaagctgcagtgggaggaggaggccaccgtgaacagactgcagagcaacgaggtgaccctgaccctgaccgtgcccgagtacagcaacaagagagtgagcagacccgtgcaggtgtacttctacgtgagcaacggcagaagaaagagaagccccacccagagcttcagattcctgcccgtgatctgcaaggaggagcccctgcccgacagcagcctgagaggcttccccagcgccagcgccacccccttcggcaccgacatggacttcagcccccccagacccccctaccccagctacccccacgaggaccccgcctgcgagaccccctacctgagcgagggcttcggctacggcatgccccccctgtacccccagaccggccccccccccagctacagacccggcctgagaatgttccccgagaccagaggcaccaccggctgcgcccagccccccgccgtgagcttcctgcccagacccttccccagcgacccctacggcggcagaggcagcagcttcagcctgggcctgcccttcagcccccccgcccccttcagacccccccccctgcccgccagcccccccctggagggccccttccccagccagagcgacgtgcaccccctgcccgccgagggctacaacaaggtgggccccggctacggccccggcgagggcgcccccgagcaggagaagagcagaggcggctacagcagcggcttcagagacagcgtgcccatccagggcatcaccctggaggaggtgagcgagatcatcggcagagacctgagcggcttccccgccccccccggcgaggagccccccgcctag

SEQ ID NO: 147468 - DNA, 2709 bp, Artificial Sequence
  derived and/or modified sequence
atgggcgccgcttcttgcgaggatgaagaactggaattcaagttggtctttggcgaagagaaggaggcccctcctctgggcgctggcggcctgggtgaagagctggattctgaggatgctcctccctgctgcagacttgccctgggggagcctcctccctatggcgctgcacccataggtattcctcggcctcctccaccacgccctggtatgcatagtccgccccctcgccctgcaccttcacccggtacttgggagagtcagcccgcaaggtctgtgagactgggcggcccaggcgggggagctggcggtgccggaggcggcagagttctagagtgcccgtccattcgcattaccagcatcagtccgactcctgagccccccgccgcgctcgaagacaatccagacgcctggggcgacggtagcccacgggactatccaccgccagagggcttcggcggctatagggaggccggagggcagggcggaggtgcgtttttcagtccatctcccggcagttctagccttagctcctggtcgttcttttccgatgcaagcgatgaggccgctctgtatgctgcatgtgatgaagttgaaagcgaactcaacgaggcggccagtaggttcggtctaggcagtcctctgccttcgcctagagcttctcctagaccctggacacctgaggacccgtggagtctctatgggccaagccctggcggcaggggccctgaggattcctggcttctcctttctgctccaggcccgacacccgctagccccaggccggcaagcccatgtggaaagcggcggtactcgtcctcaggcacgcccagttctgccagtccagcactgagccggcgtggttcattgggggaggagggatctgagccaccccccccaccaccactgcctctggcacgggaccccggctcaccaggtccttttgactatgtcggagctccaccagcagagtctattccacagaagacaagaagaacaagctctgaacaggctgtggctctgccacggtcggaggagcctgctagctgcaatggcaagctgcccctcggtgcagaggagagtgttgccccccccgggggaagcaggaaagaagtcgcaggtatggactacctagctgtcccttcccccctggcctggagcaaggcaagaatcggcggccactctcccattttcagaacttcggccttgccaccccttgattggcccctcccaagccagtatgaacagctagaactcagaatagaggtgcagccgagggcccaccaccgcgctcattatgagaccgagggtagccggggagccgtaaaagcagcccctggaggacaccccgtcgtcaaacttctgggctattctgaaaaacccctgactctgcagatgtttattggcaccgctgatgagcgaaacctgcgcccccacgctttctaccaggtccaccggattacaggtaagatggtggctaccgcatcttacgaggccgtggtgtccggcaccaaggtgctcgagatgacgttgctccccgaaaataacatggccgccaacatcgactgtgctggcatactcaaactgaggaatagcgatattgaactcagaaaaggcgaaaccgacatcggccgaaagaacacgcgagttcggctggtattccgtgtgcacgtgcctcagggaggaggaaaggtggtgtccgttcaagctgccagcgtgccaatcgagtgttcgcagcggagcgcgcaagagctccctcaggtggaggcgtactctcctagtgcctgctccgtgcgtggtggggaggagctggtgctcactggtagtaatttcctcccggacagcaaagtcgtctttatcgaacgaggacccgacggcaagctgcagtgggaggaggaagccaccgtgaataggctgcagtccaacgaggtcacactcacactcacagtccctgagtatagtaataagcgcgtgtctaggcccgtgcaggtctacttttacgtgtccaatggacgccgcaaacgcagccccactcagtctttcaggtttctcccagtcatatgtaaagaggaacccctgcctgacagttcactgcgcggctttccgagcgcttcagctacccccttcggcacagacatggacttttcccctcccagacccccgtacccgtcttacccgcatgaggaccccgcctgcgagacgccatacctgtctgagggtttcgggtacggcatgccgcccctttatcctcagacagggcctccaccaagctaccggccagggctcagaatgttccctgagacacggggaactacagggtgtgcacaacctccagcagtgtcctttctccctaggccttttccttcagacccatatggcggacggggaagtagcttttcactgggtctgccattctcgcctcccgcccccttcagaccccctcccctccccgcaagccccccactcgaaggacccttcccaagccaatcggacgtgcaccccctacctgctgaagggtacaataaggtcggccctgggtacggacctggagaaggggcccccgaacaggaaaaatcaagaggcggttactcaagcgggttccgcgactcggtaccgatccagggaattacccttgaagaggttagtgagatcatcggccgcgatctgtccggctttcctgcgccgcccggagaggaaccgcctgcttag

SEQ ID NO: 147469 - DNA, 2748 bp, Artificial Sequence
  derived and/or modified sequence
atgctcagcggccgggatctgggagcgcctgcaggaagtatgggggcggcttcatgcgaggacgaggaactggagtttaaactggtctttggcgaggagaaggaggctcctccactcggggccggcggcttgggtgaggagctcgactcggaagatgcacctccctgttgtagattagcgttgggtgaaccaccaccctatggtgccgctcctattggcatcccaagacctcctccaccacggccaggaatgcactctcctcccccgcgtcccgcgccctcccccggtacctgggaaagccaacctgctagaagcgtgcggctgggggggcccggagggggggccggaggagccggtggtgggagagtcctggagtgcccttccatcagaattaccagcatctcacccacccctgagccgcccgccgcgcttgaagataacccagacgcttggggcgatggctcccctagagactatccgcctccggagggatttggtggttatcgcgaggctggcggtcaaggagggggggcgtttttcagcccctccccgggctcttcctctttgtcctcctggtctttcttcagcgatgcttccgacgaggccgccctatacgccgcgtgcgacgaggtggaaagcgagctgaatgaggctgctagtaggttcggcctaggaagcccgctgcctagcccaagagctagtcccagaccctggaccccagaagatccatggagcctgtatgggcctagcccaggcggccgtggaccggaagatagctggttactgctctcagcaccaggtccaactcccgcatctccccgacctgcgagcccctgtggcaaacgccgctacagttctagcggaacaccaagctcggcttcgccggcgctgtcgcgccgcgggagcctcggagaggaaggatccgagcctccgcctcctccccctctacctctcgcaagagacccgggctcgccgggcccctttgattacgtgggggcgccccctgcggagagcatcccacagaagaccagaagaacaagcagcgaacaagccgtggcactccccaggagcgaagaacctgcctcatgcaacggcaaattgccattaggagccgaagagtccgttgcaccgcctgggggcagcagaaaagaggttgccggaatggattaccttgccgtgccttcgcccctggcatggtcaaaggcccgcatcggcgggcattctcccatcttcaggacatcagcgttgcctcccctggactggccacttcccagtcagtatgaacagctggagttgcgtatcgaggtgcagccacgagcacaccacagagcccactatgaaaccgagggctctagaggcgcagtgaaagcggcgccaggtggccatcccgtcgtgaagctccttggctattccgagaagcccctcacgctgcagatgttcatcggaaccgctgacgagaggaacctgcgacctcatgcattttatcaggtgcatcggataacagggaagatggtcgccactgcctcttacgaagccgttgtcagtggaactaaagtactggagatgaccctgttgcctgagaacaacatggcagcaaacatcgattgcgccggtatcctgaaactgcgtaactcggacatcgagctgcgcaagggagaaactgatatcggtcgtaaaaacacgagggtgcgtctggtatttcgtgtccatgtacctcagggaggagggaaagttgttagtgtccaggccgcttcagtgccaatagagtgcagccagcgttcggcccaggaactccctcaggttgaggcctactcccctagcgcctgcagtgtgagaggcggggaagagttggttctgacaggcagtaatttcctgccagattctaaagtcgtcttcatagaacgcggccccgatggaaaacttcagtgggaggaggaagcaacagtgaaccggcttcagtctaatgaagtcacactaacactgaccgtgccggaatatagtaataagagggtgagcagacctgtgcaggtgtacttctatgtatccaatggcagaagaaagagatcacctactcaatccttccgcttcctgcccgtgatctgcaaggaagaacctctgcccgactcgagtctacgaggctttccttcagcttccgccaccccatttggcaccgatatggacttcagtcctcctcgtcccccctatccttcttatcctcatgaagatcccgcctgcgagaccccctacctgtccgagggttttggctatgggatgcctccattgtatccacagacaggaccaccccccagctacagacccggactgaggatgttccccgaaactagggggaccactggttgcgcgcagccccccgctgtcagctttcttccccgccccttcccatccgatccatatggagggcgaggctcttccttttcactggggctgccttttagtccgccagcacccttcagacctccacctctgcctgctagtcctcccctcgaggggccgtttccgtcccaatctgatgtgcacccactgccagccgagggctacaacaaggtgggacccggttacggacccggagaaggggcgcccgagcaagagaagtctcggggaggttattctagtggtttcagggacagtgtgccaattcagggtatcaccctggaggaggtctccgagataattggacgggatctgagtggcttccccgctcctccaggcgaggagccgcctgcatag

SEQ ID NO: 147470 - DNA, 2709 bp, Artificial Sequence
  derived and/or modified sequence
atgggcgccgccagctgtgaagatgaggagctggagttcaagctggtgtttggagaggagaaggaggccccacccctgggcgctgggggcctgggggaggagctggacagtgaagatgccccaccctgctgccgcctggccctgggggagcccccaccctacggggccgcccccatcggcatcccccggcccccaccacccaggcctggcatgcacagccccccacccaggcctgcccccagccctggcacctgggagagccagcctgcccggtctgtgcggctgggcggccctgggggcggggccggcggggccggcggcggccgggtgctggagtgccccagcatccgcatcaccagcatcagccccaccccagagcccccagctgccctggaggacaacccagatgcctggggagatggcagcccccgggactacccacctcctgagggctttggaggctaccgggaggccggcggccagggcggcggggccttcttcagccccagccctggcagcagcagcctgagctcctggagcttcttcagtgatgccagtgatgaagctgccctgtatgctgcctgtgatgaggtggagagcgagctgaatgaagctgccagcagatttggcctgggcagccccctgcccagcccccgggccagcccccggccctggaccccagaggacccctggagcctgtatggccccagccctgggggccggggccctgaggacagctggctgctgctgagcgcccctggccccaccccagccagccccaggcctgccagcccctgtgggaagaggcgctacagcagcagcggcacccccagcagcgccagccctgccctgagccggcggggcagcctgggggaggagggcagcgagcccccacctcctccacccctgcccctggcccgggaccccggcagccctggcccctttgattatgtgggcgcccctcctgctgagagcatcccccagaagaccaggaggaccagcagcgagcaggccgtggccctgcccaggtctgaggagcccgccagctgcaatggcaagctgcccctgggcgctgaggagagcgtggcccctcctgggggcagcaggaaggaggtggccggcatggactacctggccgtgcccagccccctggcctggagcaaggccagaattggaggccacagccccatcttccgcaccagcgccctgccccccctggactggcccctgcccagccagtatgagcagctggagctgagaattgaggtgcagccccgggcccaccaccgggcccactatgaaacagagggcagcagaggagctgtgaaggccgcccctgggggccaccctgtggtgaagctgctgggctacagcgagaagcccctgaccctgcagatgttcatcggcacagcagatgagaggaacctgcggccccacgccttctaccaggtgcaccgcatcaccgggaagatggtggccacagccagctatgaagctgtggtgtctggcaccaaggtgctggagatgaccctgctgcctgagaacaacatggccgccaacatcgactgtgccggcatcctgaagctgaggaacagcgacatcgagctgaggaagggggagacagacattggaaggaagaacaccagggtgcggctggtgttccgggtgcacgtgccccagggcggcggcaaggtggtgtctgtgcaggccgcctctgtgcccatcgagtgcagccagaggtctgcccaggagctgccccaggtggaggcctacagccccagcgcctgcagcgtgcggggcggggaggagctggtgctgaccggcagcaacttcctgcctgacagcaaggtggtgttcatcgagcggggcccagatggcaagctgcagtgggaggaggaggccaccgtgaaccggctgcagagcaatgaggtgaccctgaccctgactgtgcctgagtacagcaacaagagggtgtccaggcctgtgcaggtgtacttctacgtgtccaatggccgcaggaagaggagccccacccagagcttccgcttcctgcctgtgatctgcaaggaggagcccctgcctgacagcagcctgcggggcttccccagcgccagcgccaccccatttggaacagacatggacttcagccccccccggcccccctaccccagctacccccatgaggaccctgcctgtgagaccccctacctgtctgagggcttcggctacggcatgccacccctgtacccccagacaggccccccacccagctaccggcccggcctgaggatgtttcctgagacccggggcaccaccggctgtgcccagcccccagctgtgtccttcctgccccggcccttccccagcgacccctacggcggccggggcagcagcttcagcctgggcctgcccttcagccccccagcccccttccggcccccacccctgcctgccagcccccccctggagggccccttccccagccagagtgatgtgcaccccctgcctgctgagggctacaacaaggtgggccctggctacggccctggagagggcgcccctgagcaggagaagagcagaggaggctacagcagcggcttccgggacagcgtgcccatccagggcatcaccctggaggaggtgtctgagatcatcggccgggacctgagcggcttccctgcccctcctggagaggagcccccagcctag

SEQ ID NO: 147471 - DNA, 2748 bp, Artificial Sequence
  derived and/or modified sequence
atgctgagcggccgggacctgggcgccccagctggctccatgggcgccgccagctgtgaagatgaggagctggagttcaagctggtgtttggagaggagaaggaggccccacccctgggcgccggcggcctgggggaggagctggacagtgaagatgccccaccctgctgccgcctggccctgggggagcccccaccctatggagctgcccccatcggcatccccaggcctcctccaccccggcccggcatgcacagccccccacccaggcctgcccccagccctggcacctgggagagccagcctgcccggtctgtgcggctgggcggccctgggggcggggccggcggggccggcggcggccgggtgctggagtgccccagcatccgcatcaccagcatcagccccaccccagagcccccagctgccctggaggacaacccagatgcctggggagatggcagcccccgggactacccacctcctgagggctttggaggctaccgggaggccggcggccagggcggcggggccttcttcagccccagccctggcagcagcagcctgagctcctggagcttcttcagtgatgccagtgatgaggccgccctgtatgctgcctgtgatgaggtggagagcgagctgaatgaggccgccagccgcttcggcctgggcagccccctgcccagcccccgggccagcccccggccctggaccccagaggacccctggagcctgtatggccccagccctgggggccggggcccagaagattcctggctgctgctgagcgcccctggccccaccccagccagccccaggcctgccagcccctgtgggaagaggcgctacagcagcagcggcacccccagcagcgccagccctgccctgagcagaagaggcagcctgggggaggagggcagcgagcccccacctcctccacccctgcccctggcccgggaccccggcagccctggcccctttgattatgtgggcgcccccccagctgagagcatcccccagaagaccaggaggaccagcagcgagcaggccgtggccctgcccaggtctgaggagcccgccagctgcaatggcaagctgcccctgggcgctgaggagagcgtggcccctcctgggggcagcaggaaggaggtggccggcatggactacctggccgtgcccagccccctggcctggagcaaggcccgcatcggcggccacagccccatcttccgcaccagcgccctgccccccctggactggcccctgcccagccagtatgagcagctggagctgcgcatcgaggtgcagccccgggcccaccaccgggcccactatgaaacagagggcagcagaggagctgtgaaggccgcccctgggggccaccctgtggtgaagctgctgggctacagcgagaagcccctgaccctgcagatgtttattggaacagcagatgaaagaaacctgcggccccacgccttctaccaggtgcaccgcatcaccgggaagatggtggccacagccagctatgaggccgtggtgtctggcaccaaggtgctggagatgaccctgctgcctgagaacaacatggccgccaacatcgactgtgccggcatcctgaagctgaggaacagcgacatcgagctgaggaaaggagaaacagacatcggcaggaagaacaccagggtgcggctggtgttccgggtgcacgtgccccagggcggcggcaaggtggtgtctgtgcaggccgcctctgtgcccattgaatgttcccagaggtctgcccaggagctgccccaggtggaggcctacagccccagcgcctgcagcgtgcggggcggggaggagctggtgctgaccggcagcaacttcctgcctgacagcaaggtggtgttcatcgagcggggcccagatggcaagctgcagtgggaggaggaggccaccgtgaaccggctgcagagcaatgaggtgaccctgaccctgactgtgcctgagtacagcaacaagagggtgtccaggcctgtgcaggtgtacttctacgtgtccaatggaagaaggaagaggagccccacccagagcttccgcttcctgcccgtcatctgcaaggaggagcccctgcctgacagcagcctgcggggcttccccagcgccagcgccacccccttcggcacagacatggacttcagcccccccaggcctccctaccccagctacccccatgaagatcctgcctgtgagaccccctacctgtctgagggcttcggctacggcatgccacccctgtacccccagacaggccccccacccagctacagacctggcctgaggatgtttcctgagacccggggcaccaccggctgtgcccagcccccagctgtgtccttcctgccccggcccttccccagcgacccctatggaggccggggcagcagcttcagcctgggcctgcccttcagccccccagcccccttccggcccccacccctgcctgccagcccccccctggagggccccttccccagccagagtgatgtgcaccccctgcctgctgagggctacaacaaggtgggccctggctacggccctggagagggcgcccctgagcaggagaagagccggggcggctacagcagcggcttccgggacagcgtgcccatccagggcatcaccctggaggaggtgtctgagatcatcggccgggacctgagcggcttccctgcccctcctggagaggagcccccagcctag

SEQ ID NO: 147472 - DNA, 2709 bp, Artificial Sequence
  derived and/or modified sequence
atgggcgccgccagctgcgaggacgaggagctggagttcaagctggtgtttggcgaagaaaaagaagcacctcccctcggggctggtggcttgggggaggaactcgacagcgaggacgcccccccctgttgtcggctggctctgggggaaccaccgccttatggagctgctcctatcggcatccctagaccacctccgccacggccgggaatgcactccccaccacctcgacctgccccctcgcccgggacctgggaatcacaacccgcaaggtctgtacgtctgggtggacccggggggggggccgggggcgcaggcggcggtcgcgtactcgagtgtccaagtatccggataacgtctatttccccgacccctgaacctccagcagccctggaggacaacccagatgcttggggtgatggcagcccgcgagactatccgccacctgaaggattcggaggctatagggaagctgggggtcagggcggaggcgcattcttcagtccatcaccgggatcgtcgtccctctcttcatggtcctttttttccgacgcttctgatgaggcggctttgtacgccgcttgtgacgaagtggaaagtgagctcaacgaagccgcgtcccggttcgggcttggatcgcccctgccgtcaccacgggcttcgccccggccatggacacctgaagatccttggtcactgtacggcccctctccaggcgggcgaggccccgaagattcctggctgctcctgtccgctcctggcccgactccagcctcacctaggccagcctcgccctgcggcaagaggcgctacagttctagtggtacaccatcatctgcctcccccgcactgagccgacgggggtcgttaggtgaggaaggcagtgaaccgccgcctcccccaccactaccgctagctcgcgatcccggctctcctgggccattcgattacgtaggcgctccgcctgcagagtccattcctcagaagacccgacggaccagttcagaacaagccgtagctttaccacgttcagaggaaccagctagctgcaatggcaagctgcctctgggcgcagaagaaagcgtggcccctccaggcggctctcgtaaggaagtggccgggatggactatctggctgttccttcccctctggcctggagcaaggcaagaatcggagggcactctccaatcttccgcacttctgcactgccccccctggactggcccctgccatctcaatatgagcagcttgaattgaggattgaagtacaaccacgggcacaccacagagcgcattatgagactgaagggtcaaggggcgctgtaaaggccgctcccggcgggcacccagttgtgaaacttttagggtattcagagaagccactaacacttcagatgttcatagggactgccgacgaacgaaacctgcggccacacgcattctaccaggttcatcggatcaccgggaaaatggtcgctactgcatcttacgaggctgtcgtgtcaggcacaaaggtgctggagatgactctgctgccagagaataacatggctgccaatattgactgtgccggcatcctgaagttgcggaatagtgatatcgagctaagaaagggcgaaacggacatagggcggaagaacacaagggtgaggttggtgtttcgggtgcacgttccacaaggtggaggaaaggttgtcagtgttcaggcggcctcagtccctatcgaatgctctcagcgatccgcacaggagctgccccaagtcgaagcctactctccctcagcttgtagcgtgcgagggggggaagagcttgtgcttactggatccaattttttgccagactccaaagttgttttcatcgagcgtggaccagatggcaagctgcagtgggaagaagaggcaaccgtcaataggctgcaatccaacgaggtgactcttactctaactgtgccggaatatagcaacaagagggtgtctaggccagtgcaggtctatttttacgtttcaaatgggcgtcgcaaacggtctccaacccaatcctttcgctttctgccagtcatctgcaaggaggaaccgcttcctgatagctctcttagaggattcccatcagcaagtgctacaccgtttggaaccgacatggacttcagtccacctcggccaccctacccttcgtacccccacgaggaccctgcctgcgagacaccttacttgtctgaggggttcggctatggcatgcccccactgtatccccaaacaggacctccaccatcataccgccccggactccgcatgttccctgagaccaggggaactacgggctgcgcacagccacccgccgtgtcctttctcccccgccccttcccaagcgatccttacgggggacgagggagctcatttagtctagggctgccatttagtccaccagcccctttcagaccgccaccactcccggccagccctcccctcgaaggacctttcccctcccagtctgacgtgcaccccctgccagcagagggctataataaggtagggcctggatacggccccggtgagggtgcacctgaacaagagaagtctaggggcggttattccagtgggttcagagattccgtgcctatccaggggataaccctcgaagaggtgagcgagattataggccgcgatctgagcggttttcccgccccgccaggagaagagcccccggcttag

SEQ ID NO: 147473 - DNA, 2748 bp, Artificial Sequence
  derived and/or modified sequence
atgctgagcggccgggacctgggcgcccccgccggcagcatgggcgcagcaagctgcgaagacgaggagctcgagttcaaactggtgttcggcgaggagaaagaggccccccctctgggagccgggggcctcggtgaagagctggatagtgaggacgctccgccatgctgtcggttagctctcggggaacccccaccctacggtgcagcgccaattggaatcccaagacctccaccaccgcgtccgggcatgcatagccctcctcccagacctgcgccgtcccctggcacatgggagagtcagcctgcaaggtcagttcggctgggcgggcccggcgggggcgctggtggggccggaggcgggagagtgctggaatgtccatccatcaggatcacatcgatctcccccacccccgagcctcctgcagcccttgaggataacccagacgcctggggagacgggagtccccgcgactatcccccacctgagggttttggcggctatcgggaggccgggggccagggggggggggcattcttctcaccgtccccaggctcctctagcctgagctcgtggtccttctttagtgatgcctcagatgaagctgctctttacgcagcttgtgacgaagtggagagtgaattgaacgaggccgcgagccgctttgggcttggaagccctcttccctccccacgagcctcacccaggccatggacacccgaggacccatggagcctatacggcccctccccgggtggtcgggggcccgaggacagctggctgctgctttccgctcccggacctacccctgccagtcccaggcctgcctcaccttgtggcaagcggcgttatagctcttcaggaaccccttcttccgcttcccctgctcttagcaggagaggatctcttggagaagaaggctctgagccacctcccccaccaccccttcctttagctcgcgatcctgggtctccaggtccattcgattacgtaggagctccccccgcagaatctattccccaaaagacccgccgaacaagctctgagcaggccgtggcactgccgcgttctgaggagcccgcgagttgcaacggaaagcttcccctgggagcagaggagtctgtggccccgccaggcgggtcacgcaaggaggtcgccgggatggattaccttgcagtgccatctcctctggcatggagtaaagcacgtatcggagggcattctcctatctttcgcacgtccgcactgcctccattagattggcccctgcccagccagtacgagcagctcgaactcaggatcgaggtccaacctagagcccaccacagagcccattacgaaaccgaaggatcacggggagcagtgaaggcggcccccgggggccatccggttgttaaactacttggctattcggagaaacctctgacactccaaatgttcatcggcaccgccgatgagagaaacctccgacctcatgctttttaccaggtccatcggattacaggaaagatggtggccactgctagctacgaggccgtggtcagcggcactaaagtactggagatgactctgctccctgagaacaacatggcggccaacattgattgtgccgggatcctgaagctgcggaactctgatattgaattacgaaagggggaaaccgatattgggcgcaagaatactcgcgtgcgattggtctttagggtccacgtgcctcaaggggggggcaaggtggtctctgtgcaagcagcttccgtgccgattgaatgttctcagcgatctgcacaggagctgcctcaggttgaggcctatagcccctcagcctgttccgtccgcgggggcgaggaacttgtcttgactggctctaactttttgccagattctaaagtggtgtttatcgaacggggccccgatgggaaacttcagtgggaggaagaagcaaccgtcaacaggctgcagtctaatgaggtgactttgacactaactgtgccagagtatagcaacaagcgggtaagtcgccccgtgcaggtttacttctacgttagcaacggaaggaggaagcggagcccaacacagagtttcagattcctcccggtaatctgcaaagaggagcctctgccagactcgtcgctccgaggcttcccctccgctagcgccactccttttgggaccgacatggactttagccctcctagaccgccctacccgtcctacccccacgaggatccagcctgcgaaacaccctacctgagcgagggattcggctacgggatgcccccactgtacccccagacaggcccacccccctcgtaccgccctgggctaagaatgttccccgagactcggggtactacaggctgcgctcaacctcctgccgtaagctttctgcccaggccttttccaagtgacccttacggagggagggggtcctctttcagcctgggcctgcctttttctccccctgcgcccttccggccacctccacttccagcctctcctccactcgagggacccttcccgagccagagcgacgtccatcccctgccagctgaggggtataacaaggttggtccggggtacgggccgggcgagggagcaccagaacaggagaaatcccgcggcggatactcctcaggtttcagagactccgtgccaatccagggaataaccctggaagaggtgtcagagatcatcggaagagatcttagcgggtttcctgccccccccggcgaagagcctcccgcgtag

SEQ ID NO: 147474 - DNA, 2830 bp, Artificial Sequence
  derived and/or modified sequence
gaagaggaggggaacccacagggtccggaggtttcaggcccctagtaaacctggcaaggatttttagaagagccggagtgggatgctatcgggccgggacctgggggctcctgccggatccatgggggcggccagctgcgaggatgaggagctggaatttaagctggtgttcggggaggaaaaggaggcccccccgctgggcgcggggggattgggggaagaactggactcagaggatgccccgccatgctgccgtctggccttgggagagccccctccctatggcgctgcacctatcggtattccccgacctccaccccctcggcctggcatgcattcgccaccgccgcgaccagccccctcacctggcacctgggagagccagcccgccaggtcggtgaggctgggaggaccaggagggggtgctgggggtgctgggggtggccgtgttctcgagtgtcccagcatccgcatcacctccatctctcccacgccggagccgccagcagcgctggaggacaaccctgatgcctggggggacggctctcctagagattaccccccaccagaaggctttgggggctacagagaagcagggggccagggtgggggggccttcttcagcccaagccctggcagcagcagcctgtcctcgtggagcttcttctccgatgcctctgacgaggcagccctgtatgcagcctgcgacgaggtggagtctgagctaaatgaggcggcctcccgctttggcctgggctccccgctgccctcgccccgggcctcccctcggccatggacccccgaagatccctggagcctgtatggtccaagccccggaggccgagggccagaggatagctggctactcctcagtgctcctgggcccaccccagcctccccgcggcctgcctctccatgtggcaagcggcgctattccagctcgggaaccccatcttcagcctccccagctctgtcccgccgtggcagcctgggggaagaggggtctgagccacctccaccacccccattgcctctggcccgggacccgggctcccctggtccctttgactatgtgggggccccaccagctgagagcatccctcagaagacacggcggacttccagcgagcaggcagtggctctgcctcggtctgaggagcctgcctcatgcaatgggaagctgcccttgggagcagaggagtctgtggctcctccaggaggttcccggaaggaggtggctggcatggactacctggcagtgccctccccactcgcttggtccaaggcccggattgggggacacagccctatcttcaggacctctgccctacccccactggactggcctctgcccagccaatatgagcagctggagctgaggatcgaggtacagcctagagcccaccaccgggcccactatgagacagaaggcagccgtggagctgtcaaagctgcccctggcggtcaccccgtagtcaagctcctaggctacagtgagaagccactgaccctacagatgttcatcggcactgcagatgaaaggaacctgcggcctcatgccttctatcaggtgcaccgtatcacaggcaagatggtggccacggccagctatgaagccgtagtcagtggcaccaaggtgttggagatgactctgctgcctgagaacaacatggcggccaacattgactgcgcgggaatcctgaagcttcggaattcagacattgagcttcggaagggtgagacggacatcgggcgcaaaaacacacgtgtacggctggtgttccgggtacacgtgccccagggcggcgggaaggtcgtctcagtacaggcagcatcggtgcccatcgagtgctcccagcgctcagcccaggagctgccccaggtggaggcctacagccccagtgcctgctctgtgagaggaggcgaggaactggtactgactggctccaacttcctgccagactccaaggtggtgttcattgagaggggtcctgatgggaagctgcaatgggaggaggaggccacagtgaaccgactgcagagcaacgaggtgacgctgaccctgactgtccccgagtacagcaacaagagggtttcccggccagtccaggtctacttttatgtctccaatgggcggaggaaacgcagtcctacccagagtttcaggtttctgcctgtgatctgcaaagaggagcccctaccggactcatctctgcggggtttcccttcagcatcggcaaccccctttggcactgacatggacttctcaccacccaggcccccctacccctcctatccccatgaagaccctgcttgcgaaactccttacctatcagaaggcttcggctatggcatgccccctctgtacccccagacggggcccccaccatcctacagaccgggcctgcggatgttccctgagactaggggtaccacaggttgtgcccaaccacctgcagtttccttccttccccgccccttccctagtgacccgtatggagggcggggctcctctttctccctggggctgccattctctccgccagccccctttcggccgcctcctcttcctgcatccccaccgcttgaaggccccttcccttcccagagtgatgtgcatcccctacctgctgagggatacaataaggtagggccaggctatggccctggggagggggctccggagcaggagaaatccaggggtggctacagcagcggcttccgagacagtgtccctatccagggtatcacgctggaggaagtgagtgagatcattggccgagacctgagtggcttccctgcacctcctggagaagagcctcctgcctga

SEQ ID NO: 147475 - DNA, 2709 bp, Artificial Sequence
  derived and/or modified sequence
atgggcgcagcctcctgcgaagatgaggaactggagttcaagctcgttttcggagaagagaaggaagccccaccactcggcgcaggcggactgggagaagagctggatagcgaagacgctccgccttgttgccgcctcgccctgggggaacctccaccttacggtgccgcaccgataggaatcccaaggccacctccaccaagaccagggatgcattctcctccgccaagaccagctcccagcccaggcacatgggagtctcagccagccaggtctgtgaggcttggtggccctggcggaggggctggcggtgctggaggagggagggtcctcgagtgcccttcgattcggataacaagcatatctcctacccctgagccacctgctgcactggaagataatcctgacgcctggggtgatggctcccccagggattaccctccacctgaaggcttcggcggttaccgggaagccggtggccagggcggaggcgcatttttctctcccagtcccggtagctcttccctgtcttcttggtcttttttttcagacgccagcgatgaggccgctttgtatgcagcatgtgacgaggttgaaagcgagctcaacgaagcggcatctcgcttcgggctcggctcgcccctaccctccccaagggcatccccacggccttggacccccgaggacccatggtcattatacggtccctccccgggtggcagggggccagaagactcatggttgttactgtccgcacctggcccaacaccggcaagccctagaccagcctctccttgcgggaagaggaggtatagcagctctgggaccccgtcttccgccagcccggctttgagccggagaggctccctgggcgaggagggaagtgaacctcctcccccacccccattacctttggctcgggatccaggcagtcccggaccctttgattacgtaggtgctccccctgcggaaagtatcccacagaaaacccgacggaccagcagtgagcaagcagtggcactgccaagaagtgaagaacccgcaagttgcaacggaaagttacccttgggcgctgaagaaagtgtcgcaccacctggtggcagccggaaagaggtggcaggcatggattatctggcggtgccgtctcctttggcatggtcgaaagccagaattggaggccactcacccatcttcaggacttcagccttgccccctctggactggcccctgccctctcagtatgagcagctggagctgcggattgaagttcagcctagggcgcaccatcgagcccattacgaaacggagggctcacgaggagctgtcaaagccgcacccggaggccacccagtggtgaaactgctgggatatagtgagaagccactcactctgcaaatgtttattggtactgctgacgagcgtaatttaaggcctcacgccttctatcaggtacatagaattacaggaaagatggtggctacggcctcgtacgaggccgtagtgtccggaactaaagtcctggagatgaccctgctgcccgaaaacaacatggcagccaacatagactgcgcgggtattttgaaacttaggaattctgatatcgagttaagaaaaggcgagacagacattggcaggaaaaacacccgtgtccggctggtctttagagtgcacgttcctcagggaggaggcaaggttgttagtgttcaagccgcaagtgtgccaatcgaatgtagccagcgctccgctcaggaactgccccaggtggaggcctactccccgtcagcttgctcagtgcggggaggcgaggaactggtgcttactgggtccaacttcctcccggactcaaaggtggtttttatcgagcgcggaccagacggcaaattgcagtgggaagaggaagcgacagttaacagactccaatctaatgaagttacactgacccttacagtccctgagtactcaaacaagagggtctcacgcccagtgcaggtgtatttttatgtgtccaatggacgacgcaagcggagcccaactcagtctttcaggtttctgcctgtcatctgcaaagaagaacccttgcccgattcttccctcagaggctttcctagtgcctctgctacccctttcggtaccgatatggacttttcgcccccacggccaccttatccttcttatccccacgaggatcctgcctgcgagaccccatacctctcagaggggttcgggtacgggatgccgcctctgtacccgcagacagggccaccaccgtcttaccgccctggattgcgaatgtttccagagactcgcggaacaaccggctgtgcccaacctcccgcagtgtcctttctcccaagaccattcccctccgacccttatggcggtcggggaagctccttctctttgggccttccctttagcccacctgcgccttttcgcccaccccctctacctgcaagcccccctctggaagggccttttcccagccagtctgatgtgcatcccctgcccgcagaaggctataataaggtcggccctggctatggtcctggcgagggcgcaccggagcaagagaaatctaggggtggatattccagcggctttcgggatagtgtccctattcagggtatcacattagaggaggtatccgagataatcggcagagatctttctggtttccccgctcctccgggtgaggaacctccagcctag

SEQ ID NO: 147476 - DNA, 2748 bp, Artificial Sequence
  derived and/or modified sequence
atgctgtctggcagggacttaggcgcaccagctgggagcatgggcgcagcatcttgtgaggacgaagagctggaatttaagttggtctttggcgaagagaaggaagcgcctcccctaggggcaggcggactcggggaggaactggacagcgaggacgcacccccatgctgcagactggctctgggtgaaccaccaccatacggggctgcaccgatcggcatccctaggccccctcccccacgcccaggcatgcacagtcccccaccacgcccagccccttctcccggaacatgggagagtcaacccgcaagatcggtgaggctgggcggaccagggggaggggctgggggagcagggggagggcgtgtgttagagtgcccttccatccgcataaccagtatctctccgacccctgagccaccagcagcgttggaagataacccagatgcatggggagacggaagcccgagggattacccccctcccgagggatttggtggctatcgtgaggccggtggtcaaggcggaggggcatttttcagtccctcccctggttcttcttcactgtcatcatggtcattcttctctgacgcttccgacgaggccgctctttacgccgcatgtgacgaagtggaatctgagctcaatgaagctgcgagtcggttcggtctgggttctcctctgccatctccaagagcttctccgagaccttggacccccgaagatccttggtctctgtatggcccttcacctggcggacgaggcccagaggatagctggttgctattgtcagctcccggtcctacacccgctagcccacgccctgcctcgccctgtggcaaaaggaggtactcatcatctggcacaccgtccagcgcatcacccgcattgtctaggagagggtccctgggcgaggaagggagcgagccgcctccgccacctcctctgccactggcccgagatccgggatctcccggaccttttgattatgtgggagctcctccggctgaatcaattcctcagaaaaccagacgcactagctctgaacaagccgtggccctccctagatctgaggagccagcatcctgtaacggtaagttacctctgggcgcagaggagtcggtagccccacctggcggatcccgcaaagaggtggcaggcatggactacctggccgtcccttcgccactggcctggtctaaggccaggatcgggggacactctcctatattccgaacctccgctttacctcccctagactggcccttgccttcccagtacgaacagcttgagctccgcattgaagtgcaacctcgcgctcaccaccgcgcacattacgagactgaggggtcacgcggtgcggttaaagccgctcccggagggcatccagtcgtgaaactgctcgggtattcagagaagccactgaccctgcagatgttcatcggtaccgccgacgagcgaaatctccgcccacatgctttttaccaggtgcaccgcatcaccggcaaaatggtggctactgcctcctacgaggcagtggtatctgggaccaaggtattggaaatgactttactccctgaaaataacatggccgctaatatcgactgtgccggtattctgaagttgagaaacagcgacatcgaactgcgtaagggcgagactgacattgggagaaagaatacacgtgtgcgactggttttccgcgtgcatgtcccccagggtggtggcaaagtggtcagtgtgcaggccgcaagcgtaccaatcgaatgcagccagcgaagtgcccaggagctgcctcaggtcgaggcctactccccctccgcttgcagtgtgcgaggcggagaggaactggttctgactgggtccaactttttacctgactctaaagtcgtgtttattgagcgcggacctgatgggaagctacagtgggaagaagaagccactgttaatcggcttcagtctaacgaggtgacactcacactgaccgtgccagaatacagcaacaagagagtctctagacctgtgcaggtgtacttctatgtaagcaatggacgtcggaagaggtctcctacccagagctttcggtttctcccagtgatatgtaaagaggagcccttaccagactcatccctgcggggatttccctcagctagcgccacaccatttgggactgatatggacttcagcccgcctcgccctccttatcccagttaccctcatgaggatcctgcctgtgagaccccgtacctttcggagggcttcggatatggcatgcctcccctgtatccccagactggcccaccgccatcataccgcccaggccttagaatgttccccgaaacccggggaaccacaggatgcgcacagcccccagccgtctcctttctaccacggcctttcccatccgacccgtacggcggacggggatccagcttctcgctggggttacccttctcacctcccgctccgttcaggcctcctcccctacctgcaagcccacccctcgagggaccgttcccttcacaatccgatgttcaccctctgcccgcagaggggtacaataaggtaggacctggttatgggccaggggagggagcccctgagcaggaaaaaagtcgagggggatacagtagtggatttagagactccgttccaattcagggcatcaccctggaggaagtctccgagatcatagggcgtgatttatccggattccccgcacccccaggcgaggagccccctgcttag

SEQ ID NO: 147477 - protein, 1068 aa, Artificial Sequence
  derived and/or modified sequence
MTTANCGAHDELDFKLVFGEDGAPAPPPPGSRPADLEPDDCASIYIFNVDPPPSTLTTPLCLPHHGLPSHSSVLSPSFQLQSHKNYEGTCEIPESKYSPLGGPKPFECPSIQITSISPNCHQELDAHEDDLQINDPEREFLERPSRDHLYLPLEPSYRESSLSPSPASSISSRSWFSDASSCESLSHIYDDVDSELNEAAARFTLGSPLTSPGGSPGGCPGEETWHQQYGLGHSLSPRQSPCHSPRSSVTDENWLSPRPASGPSSRPTSPCGKRRHSSAEVCYAGSLSPHHSPVPSPGHSPRGSVTEDTWLNASVHGGSGLGPAVFPFQYCVETDIPLKTRKTSEDQAAILPGKLELCSDDQGSLSPARETSIDDGLGSQYPLKKDSCGDQFLSVPSPFTWSKPKPGHTPIFRTSSLPPLDWPLPAHFGQCELKIEVQPKTHHRAHYETEGSRGAVKASTGGHPVVKLLGYNEKPINLQMFIGTADDRYLRPHAFYQVHRITGKTVATASQEIIIASTKVLEIPLLPENNMSASIDCAGILKLRNSDIELRKGETDIGRKNTRVRLVFRVHIPQPSGKVLSLQIASIPVECSQRSAQELPHIEKYSINSCSVNGGHEMVVTGSNFLPESKIIFLEKGQDGRPQWEVEGKIIREKCQGAHIVLEVPPYHNPAVTAAVQVHFYLCNGKRKKSQSQRFTYTPVLMKQEHREEIDLSSVPSLPVPHPAQTQRPSSDSGCSHDSVLSGQRSLICSIPQTYASMVTSSHLPQLQCRDESVSKEQHMIPSPIVHQPFQVTPTPPVGSSYQPMQTNVVYNGPTCLPINAASSQEFDSVLFQQDATLSGLVNLGCQPLSSIPFHSSNSGSTGHLLAHTPHSVHTLPHLQSMGYHCSNTGQRSLSSPVADQITGQPSSQLQPITYGPSHSGSATTASPAASHPLASSPLSGPPSPQLQPMPYQSPSSGTASSPSPATRMHSGQHSTQAQSTGQGGLSAPSSLICHSLCDPASFPPDGATVSIKPEPEDREPNFATIGLQDITLDDDQFISDLEHQPSGSAEKWPNHSVLSCPAPFWRI

SEQ ID NO: 147478 - protein, 589 aa, Artificial Sequence
  derived and/or modified sequence
MFIGTADDRYLRPHAFYQVHRITGKTVATASQEIIIASTKVLEIPLLPENNMSASIDCAGILKLRNSDIELRKGETDIGRKNTRVRLVFRVHIPQPSGKVLSLQIASIPVECSQRSAQELPHIEKYSINSCSVNGGHEMVVTGSNFLPESKIIFLEKGQDGRPQWEVEGKIIREKCQGAHIVLEVPPYHNPAVTAAVQVHFYLCNGKRKKSQSQRFTYTPVLMKQEHREEIDLSSVPSLPVPHPAQTQRPSSDSGCSHDSVLSGQRSLICSIPQTYASMVTSSHLPQLQCRDESVSKEQHMIPSPIVHQPFQVTPTPPVGSSYQPMQTNVVYNGPTCLPINAASSQEFDSVLFQQDATLSGLVNLGCQPLSSIPFHSSNSGSTGHLLAHTPHSVHTLPHLQSMGYHCSNTGQRSLSSPVADQITGQPSSQLQPITYGPSHSGSATTASPAASHPLASSPLSGPPSPQLQPMPYQSPSSGTASSPSPATRMHSGQHSTQAQSTGQGGLSAPSSLICHSLCDPASFPPDGATVSIKPEPEDREPNFATIGLQDITLDDDQFISDLEHQPSGSAEKWPNHSVLSCPAPFWRI

SEQ ID NO: 147479 - DNA, 4005 bp, Artificial Sequence
  derived and/or modified sequence
cggctgcggttcctggtgctgctcggcgcgcggccagctttcggaacggaacgctcggcgtcgcgggccccgcccggaaagtttgccgtggagtcgcgacctcttggcccgcgcggcccggcatgaagcggcgttgaggagctgctgccgccgcttgccgctgccgccgccgccgcctgaggaggagctgcagcaccctgggccacgccgatgactactgcaaactgtggcgcccacgacgagctcgacttcaaactcgtctttggcgaggacggggcgccggcgccgccgcccccgggctcgcggcctgcagatcttgagccagatgattgtgcatccatttacatctttaatgtagatccacctccatctactttaaccacaccactttgcttaccacatcatggattaccgtctcactcttctgttttgtcaccatcgtttcagctccaaagtcacaaaaactatgaaggaacttgtgagattcctgaatctaaatatagcccattaggtggtcccaaaccctttgagtgcccaagtattcaaattacatctatctctcctaactgtcatcaagaattagatgcacatgaagatgacctacagataaatgacccagaacgggaatttttggaaaggccttctagagatcatctctatcttcctcttgagccatcctaccgggagtcttctcttagtcctagtcctgccagcagcatctcttctaggagttggttctctgatgcatcttcttgtgaatcgctttcacatatttatgatgatgtggactcagagttgaatgaagctgcagcccgatttacccttggatcccctctgacttctcctggtggctctccagggggctgccctggagaagaaacttggcatcaacagtatggacttggacactcattatcacccaggcaatctccttgccactctcctagatccagtgtcactgatgagaattggctgagccccaggccagcctcaggaccctcatcaaggcccacatccccctgtgggaaacggaggcactccagtgctgaagtttgttatgctgggtccctttcaccccatcactcacctgttccttcacctggtcactcccccaggggaagtgtgacagaagatacgtggctcaatgcttctgtccatggtgggtcaggccttggccctgcagtttttccatttcagtactgtgtagagactgacatccctctcaaaacaaggaaaacttctgaagatcaagctgccatactaccaggaaaattagagctgtgttcagatgaccaagggagtttatcaccagcccgggagacttcaatagatgatggccttggatctcagtatcctttaaagaaagattcatgtggtgatcagtttctttcagttccttcaccctttacctggagcaaaccaaagcctggccacacccctatatttcgcacatcttcattacctccactagactggcctttaccagctcattttggacaatgtgaactgaaaatagaagtgcaacctaaaactcatcatcgagcccattatgaaactgaaggtagccgaggggcagtaaaagcatctactgggggacatcctgttgtgaagctcctgggctataacgaaaagccaataaatctacaaatgtttattgggacagcagatgatcgatatttacgacctcatgcattttaccaggtgcatcgaatcactgggaagacagtcgctactgcaagccaagagataataattgccagtacaaaagttctggaaattccacttcttcctgaaaataatatgtcagccagtattgattgtgcaggtattttgaaactccgcaattcagatatagaacttcgaaaaggagaaactgatattggcagaaagaatactagagtacgacttgtgtttcgtgtacacatcccacagcccagtggaaaagtcctttctctgcagatagcctctatacccgttgagtgctcccagcggtctgctcaagaacttcctcatattgagaagtacagtatcaacagttgttctgtaaatggaggtcatgaaatggttgtgactggatctaattttcttccagaatccaaaatcatttttcttgaaaaaggacaagatggacgacctcagtgggaggtagaagggaagataatcagggaaaaatgtcaaggggctcacattgtccttgaagttcctccatatcataacccagcagttacagctgcagtgcaggtgcacttttatctttgcaatggcaagaggaaaaaaagccagtctcaacgttttacttatacaccagttttgatgaagcaagaacacagagaagagattgatttgtcttcagttccatctttgcctgtgcctcatcctgctcagacccagaggccttcctctgattcagggtgttcacatgacagtgtactgtcaggacagagaagtttgatttgctccatcccacaaacatatgcatccatggtgacctcatcccatctgccacagttgcagtgtagagatgagagtgttagtaaagaacagcatatgattccttctccaattgtacaccagccttttcaagtcacaccaacacctcctgtggggtcttcctatcagcctatgcaaactaatgttgtgtacaatggaccaacttgtcttcctattaatgctgcctctagtcaagaatttgattcagttttgtttcagcaggatgcaactctttctggtttagtgaatcttggctgtcaaccactgtcatccataccatttcattcttcaaattcaggctcaacaggacatctcttagcccatacacctcattctgtgcataccctgcctcatctgcaatcaatgggatatcattgttcaaatacaggacaaagatctctttcttctccagtggctgaccagattacaggtcagccttcgtctcagttacaacctattacatatggtccttcacattcagggtctgctacaacagcttccccagcagcttctcatcccttggctagttcaccgctttctgggccaccatctcctcagcttcagcctatgccttaccaatctcctagctcaggaactgcctcatcaccgtctccagccaccagaatgcattctggacagcactcaactcaagcacaaagtacgggccaggggggtctttctgcaccttcatccttaatatgtcacagtttgtgtgatccagcgtcatttccacctgatggggcaactgtgagcattaaacctgaaccagaagatcgagagcctaactttgcaaccattggtctgcaggacatcactttagatgatgaccaatttatatctgacttggaacaccagccatcaggttcagcagagaaatggcctaaccacagtgtgctctcatgtccagctcctttctggagaatctagaggtgaacgagataattgggagagacatgtcccagatttctgtttcccaaggagcaggggtgagcaggcaggctcccctcccgagtcctgagtccctggatttaggaagatctgatgggctctaacagtgcttactgcagccttgtgtccaccaccaacttctcagcatgtttctctccttggaccttgggtttccaactctgcagccttcaggtctggggccaggagtgggacccaccatttgtggggaaagtagcattcctccacctcaggccttgggtagatttggcaaaagaacaggagcagcataggctgtttgagctttggggaaatgaactttgctttttatatttaactaggatacttttatatgatgggtgctttgagtgtgaatgcagcaggctctcttgtttccgaggtgctgcttttgcaggtgacctggttacttagctaggattggtgatttgtactgctttatggtcatttgaagggccctttagtttttatgataatttttaaaataggaacttttgataagaccttctagaagcaaaaaaaaaaaaaaaaaaaaaaaaaagaaaaaaaaag

SEQ ID NO: 147480 - DNA, 3207 bp, Artificial Sequence
  derived and/or modified sequence
atgaccaccgccaactgcggcgcccacgacgagctggacttcaagctggtgttcggcgaggacggcgcccccgccccccccccccccggcagcagacccgccgacctggagcccgacgactgcgccagcatctacatcttcaacgtggaccccccccccagcaccctgaccacccccctgtgcctgccccaccacggcctgcccagccacagcagcgtgctgagccccagcttccagctgcagagccacaagaactacgagggcacctgcgagatccccgagagcaagtacagccccctgggcggccccaagcccttcgagtgccccagcatccagatcaccagcatcagccccaactgccaccaggagctggacgcccacgaggacgacctgcagatcaacgaccccgagagagagttcctggagagacccagcagagaccacctgtacctgcccctggagcccagctacagagagagcagcctgagccccagccccgccagcagcatcagcagcagaagctggttcagcgacgccagcagctgcgagagcctgagccacatctacgacgacgtggacagcgagctgaacgaggccgccgccagattcaccctgggcagccccctgaccagccccggcggcagccccggcggctgccccggcgaggagacctggcaccagcagtacggcctgggccacagcctgagccccagacagagcccctgccacagccccagaagcagcgtgaccgacgagaactggctgagccccagacccgccagcggccccagcagcagacccaccagcccctgcggcaagagaagacacagcagcgccgaggtgtgctacgccggcagcctgagcccccaccacagccccgtgcccagccccggccacagccccagaggcagcgtgaccgaggacacctggctgaacgccagcgtgcacggcggcagcggcctgggccccgccgtgttccccttccagtactgcgtggagaccgacatccccctgaagaccagaaagaccagcgaggaccaggccgccatcctgcccggcaagctggagctgtgcagcgacgaccagggcagcctgagccccgccagagagaccagcatcgacgacggcctgggcagccagtaccccctgaagaaggacagctgcggcgaccagttcctgagcgtgcccagccccttcacctggagcaagcccaagcccggccacacccccatcttcagaaccagcagcctgccccccctggactggcccctgcccgcccacttcggccagtgcgagctgaagatcgaggtgcagcccaagacccaccacagagcccactacgagaccgagggcagcagaggcgccgtgaaggccagcaccggcggccaccccgtggtgaagctgctgggctacaacgagaagcccatcaacctgcagatgttcatcggcaccgccgacgacagatacctgagaccccacgccttctaccaggtgcacagaatcaccggcaagaccgtggccaccgccagccaggagatcatcatcgccagcaccaaggtgctggagatccccctgctgcccgagaacaacatgagcgccagcatcgactgcgccggcatcctgaagctgagaaacagcgacatcgagctgagaaagggcgagaccgacatcggcagaaagaacaccagagtgagactggtgttcagagtgcacatcccccagcccagcggcaaggtgctgagcctgcagatcgccagcatccccgtggagtgcagccagagaagcgcccaggagctgccccacatcgagaagtacagcatcaacagctgcagcgtgaacggcggccacgagatggtggtgaccggcagcaacttcctgcccgagagcaagatcatcttcctggagaagggccaggacggcagaccccagtgggaggtggagggcaagatcatcagagagaagtgccagggcgcccacatcgtgctggaggtgcccccctaccacaaccccgccgtgaccgccgccgtgcaggtgcacttctacctgtgcaacggcaagagaaagaagagccagagccagagattcacctacacccccgtgctgatgaagcaggagcacagagaggagatcgacctgagcagcgtgcccagcctgcccgtgccccaccccgcccagacccagagacccagcagcgacagcggctgcagccacgacagcgtgctgagcggccagagaagcctgatctgcagcatcccccagacctacgccagcatggtgaccagcagccacctgccccagctgcagtgcagagacgagagcgtgagcaaggagcagcacatgatccccagccccatcgtgcaccagcccttccaggtgacccccaccccccccgtgggcagcagctaccagcccatgcagaccaacgtggtgtacaacggccccacctgcctgcccatcaacgccgccagcagccaggagttcgacagcgtgctgttccagcaggacgccaccctgagcggcctggtgaacctgggctgccagcccctgagcagcatccccttccacagcagcaacagcggcagcaccggccacctgctggcccacaccccccacagcgtgcacaccctgccccacctgcagagcatgggctaccactgcagcaacaccggccagagaagcctgagcagccccgtggccgaccagatcaccggccagcccagcagccagctgcagcccatcacctacggccccagccacagcggcagcgccaccaccgccagccccgccgccagccaccccctggccagcagccccctgagcggcccccccagcccccagctgcagcccatgccctaccagagccccagcagcggcaccgccagcagccccagccccgccaccagaatgcacagcggccagcacagcacccaggcccagagcaccggccagggcggcctgagcgcccccagcagcctgatctgccacagcctgtgcgaccccgccagcttcccccccgacggcgccaccgtgagcatcaagcccgagcccgaggacagagagcccaacttcgccaccatcggcctgcaggacatcaccctggacgacgaccagttcatcagcgacctggagcaccagcccagcggcagcgccgagaagtggcccaaccacagcgtgctgagctgccccgcccccttctggagaatctag

SEQ ID NO: 147481 - DNA, 1770 bp, Artificial Sequence
  derived and/or modified sequence
atgttcatcggcaccgccgacgacagatacctgagaccccacgccttctaccaggtgcacagaatcaccggcaagaccgtggccaccgccagccaggagatcatcatcgccagcaccaaggtgctggagatccccctgctgcccgagaacaacatgagcgccagcatcgactgcgccggcatcctgaagctgagaaacagcgacatcgagctgagaaagggcgagaccgacatcggcagaaagaacaccagagtgagactggtgttcagagtgcacatcccccagcccagcggcaaggtgctgagcctgcagatcgccagcatccccgtggagtgcagccagagaagcgcccaggagctgccccacatcgagaagtacagcatcaacagctgcagcgtgaacggcggccacgagatggtggtgaccggcagcaacttcctgcccgagagcaagatcatcttcctggagaagggccaggacggcagaccccagtgggaggtggagggcaagatcatcagagagaagtgccagggcgcccacatcgtgctggaggtgcccccctaccacaaccccgccgtgaccgccgccgtgcaggtgcacttctacctgtgcaacggcaagagaaagaagagccagagccagagattcacctacacccccgtgctgatgaagcaggagcacagagaggagatcgacctgagcagcgtgcccagcctgcccgtgccccaccccgcccagacccagagacccagcagcgacagcggctgcagccacgacagcgtgctgagcggccagagaagcctgatctgcagcatcccccagacctacgccagcatggtgaccagcagccacctgccccagctgcagtgcagagacgagagcgtgagcaaggagcagcacatgatccccagccccatcgtgcaccagcccttccaggtgacccccaccccccccgtgggcagcagctaccagcccatgcagaccaacgtggtgtacaacggccccacctgcctgcccatcaacgccgccagcagccaggagttcgacagcgtgctgttccagcaggacgccaccctgagcggcctggtgaacctgggctgccagcccctgagcagcatccccttccacagcagcaacagcggcagcaccggccacctgctggcccacaccccccacagcgtgcacaccctgccccacctgcagagcatgggctaccactgcagcaacaccggccagagaagcctgagcagccccgtggccgaccagatcaccggccagcccagcagccagctgcagcccatcacctacggccccagccacagcggcagcgccaccaccgccagccccgccgccagccaccccctggccagcagccccctgagcggcccccccagcccccagctgcagcccatgccctaccagagccccagcagcggcaccgccagcagccccagccccgccaccagaatgcacagcggccagcacagcacccaggcccagagcaccggccagggcggcctgagcgcccccagcagcctgatctgccacagcctgtgcgaccccgccagcttcccccccgacggcgccaccgtgagcatcaagcccgagcccgaggacagagagcccaacttcgccaccatcggcctgcaggacatcaccctggacgacgaccagttcatcagcgacctggagcaccagcccagcggcagcgccgagaagtggcccaaccacagcgtgctgagctgccccgcccccttctggagaatctag

SEQ ID NO: 147482 - DNA, 3207 bp, Artificial Sequence
  derived and/or modified sequence
atgacgacggctaactgtggagctcacgacgagttggacttcaagctcgtgttcggcgaggacggggccccagctccgcctccacctggttcccggcccgccgaccttgaacctgacgactgtgctagtatctatattttcaatgttgacccgccaccttccacactaaccacacccctgtgcctgccccaccacggcctgccctcgcattcatctgtgctcagcccatccttccagttgcagtcccacaagaattacgagggcacgtgtgagatccccgaatcaaagtattccccactgggtggtcctaagcctttcgagtgcccttccattcaaattacctctatctctccaaactgccatcaggaactcgacgcccacgaggatgatctgcaaattaacgacccggagcgggaatttctggagcgcccttcccgcgaccatctttatctgccacttgagccctcttacagggagtctagtctttcccccagcccggctagcagtatcagttccaggagttggttctcagacgctagctcatgcgaatcactgtcccacatatatgacgacgttgactccgagctgaatgaagccgcggctagattcaccctgggttcacccctgacctctcccggcggctcgcccggagggtgtccaggggaggaaacatggcatcagcagtacgggctcggacatagtctgtcccctaggcagtcaccttgtcactccccaagatcatctgttacagatgagaattggctgagccctagacctgcctcaggaccttcctcacgcccaactagcccctgcgggaagcgcaggcactcatctgcggaagtgtgttacgctgggagtctgtcacctcatcactcacctgttccctcgcccgggcattcccctcggggttccgtcacagaagatacctggttgaacgccagcgtgcacggcggttctggcctgggaccagcagtgtttccattccaatactgcgtcgagactgacataccactgaaaacaagaaagaccagtgaggaccaggctgcaatccttcccggaaagcttgagctgtgcagcgacgatcaaggctccctgtcccccgcccgggaaacgagcatcgacgacggccttggtagccaataccccctcaaaaaagactcttgtggggaccagtttctgagtgtgcctagtccttttacgtggtccaagcccaagccgggccacaccccaattttcagaaccagttcccttccccccctggactggccccttccagcccactttggtcagtgcgaactgaagatcgaggttcagccaaagacacaccacagggctcattacgaaacggaggggagtcgtggagccgtgaaggccagcacaggcggacaccccgtagtgaaactcctgggttataatgagaaacctatcaacctgcagatgtttattggtaccgccgatgataggtacttgcggcctcatgctttctatcaggtgcaccgcattacgggcaagaccgtcgcgactgcatctcaggaaattattatcgcatccacaaaggtgttggaaatccccttactgccagaaaataatatgtctgcctcaattgattgcgctggcattctaaaattaaggaacagtgacatagagttgcggaagggcgaaaccgacattggacggaagaacactcgcgttcggctagtgtttagggttcatataccccagccaagcggaaaggtgctgtctttacagattgccagcatccctgtggaatgctcccagcgcagcgcccaagaattacctcacattgagaagtattctataaactcctgttccgtaaacggaggccatgagatggtcgtgaccgggagtaatttcctgcctgagtccaagataatctttctggagaaagggcaggatgggagaccgcaatgggaagttgagggcaaaatcatccgggagaaatgccaaggtgctcacatcgtgctggaggtaccaccctaccataacccagcagtcactgcagccgttcaggtacacttttacctctgtaacggtaaaagaaagaagagccagagccagagatttacctatactcctgtgctaatgaaacaggagcaccgcgaggagattgacctgtcctcagttccctcccttccagtgccccatccagcccagacccagaggccatcctccgactccggatgttcccatgactctgtcctgtccggccaacgttcgctgatctgttccatcccgcagacatacgcctccatggttacatcctcacacttaccacagcttcaatgtagggacgaaagtgtgagtaaagagcagcacatgatcccatccccaatcgtgcatcagccgtttcaggtcacaccaacgccgccagttggctcaagctatcaacccatgcagaccaacgtggtgtacaatggcccaacctgtctgccaattaacgccgctagctcccaagagtttgatagcgtgctgttccagcaggacgcaaccctctctggcttagtgaatctcggttgccagccactttctagtatcccgttccacagttcaaactccggatccactggacatctgctggcacatacgccacactctgtccacacccttccccatttgcagtcaatgggataccactgttcaaatacaggccaacgttctctctcttccccggtggctgatcaaattaccggccagccaagctcccaactgcaacccatcacctatggaccctctcacagtggatcggcaaccacagcttcaccagctgcctcacaccctcttgctagcagccctttaagcgggcctccgtctccacaactgcagccaatgccttatcagtcgccatcctctgggaccgcaagttccccctcacccgcaaccaggatgcactcgggccaacactccacccaggctcaatctacggggcaaggaggcctttctgcaccctcctctcttatttgccattccctgtgcgatcccgcgtcatttccgcccgacggagccacagtgtccattaagcctgagcctgaagaccgcgagccaaattttgctaccatcggtctccaggacattacgcttgacgacgaccagttcatctctgaccttgaacatcagccgtccgggtcagctgagaagtggccaaaccattctgtattatcctgccctgctccgttctggaggatctag

SEQ ID NO: 147483 - DNA, 1770 bp, Artificial Sequence
  derived and/or modified sequence
atgtttattggaaccgcggatgaccgctatctgcgccctcacgccttctaccaggtgcacaggattacagggaaaaccgtcgccactgcctcgcaggagataatcatcgctagtacaaaagtgctggaaatcccacttctccctgaaaataacatgagcgcaagcattgactgtgcaggtatactcaagctgaggaatagcgatatcgagctgcgtaaaggtgagacggatattgggagaaaaaacacccgggtgcgcctggtattccgggtgcacatcccgcaaccttctggtaaggtcttgtctcttcagatcgcctccatccccgtcgagtgcagccagcggtcagcacaggagctcccacatatcgagaagtattctattaatagttgttccgtgaacgggggtcacgaaatggttgtgacaggcagcaatttcctacccgagagtaaaattatcttcctcgaaaagggacaggatggcaggccacagtgggaagtggagggcaagatcattcgcgagaaatgtcaaggcgcgcacatcgtgttggaggtgccaccataccataacccagccgtgaccgcagctgtgcaggttcacttctacctatgcaatggtaaaaggaagaagtcccagagccagcgattcacatacacccccgttctcatgaagcaagagcatcgagaagagatcgacttgtcctcagttccaagcctgcctgtcccacacccagcccagactcaaagacctagcagcgattctggctgtagccacgacagcgttctgtccggtcagagatcgctcatttgctccattccccagacctatgctagtatggttacgagctcccatttacctcaattgcagtgccgtgacgagagcgttagtaaggagcaacacatgattccttccccaattgtccaccagccatttcaggtcacacctaccccaccggtgggctcaagttatcagcccatgcagacaaatgtcgtatataacggacccacctgcttgccaataaacgcagcctcctctcaggagttcgattctgtgctgttccaacaagatgcaacactgtcaggcttggtcaatctcggttgccagcccttgagctcaatacccttccattcctccaactctggctctacaggccatctgctggcccacacaccccattcagttcatactttgccccatctccagtccatgggataccactgttcaaacacgggccagcggagtctgtctagcccagtggctgaccagataaccggccagccaagcagccagctgcaacccataacttacgggccctcacatagtggaagcgctaccaccgcctccccagcggccagccacccattggcttctagtcctctcagcggccctccatctccgcagctgcagccaatgccttatcaaagcccaagcagtggaactgcctcatcacctagccccgctacccggatgcacagtggccagcatagcacacaggcccagagcacagggcaggggggtctctcagctcctagcagcctgatctgccattctctgtgtgacccagcaagtttccccccggatggggccacagtgtccataaaacccgaaccagaagatcgtgaacctaattttgccacgatcggactgcaggatatcaccctcgatgacgaccaattcatcagtgacctggagcaccagccaagcggttctgccgagaagtggcctaaccatagtgtcctctcttgtcccgccccattctggagaatttag

SEQ ID NO: 147484 - DNA, 3207 bp, Artificial Sequence
  derived and/or modified sequence
atgaccacagccaactgtggggcccatgatgagctggacttcaagctggtgtttggagaagatggagccccagcccctcctcctcctggcagcaggcctgctgacctggagccagatgactgtgccagcatctacatcttcaacgtggaccccccacccagcaccctgaccacccccctgtgcctgccccaccacggcctgcccagccacagctctgtgctgagccccagcttccagctgcagagccacaagaactatgagggcacctgtgagatccctgagagcaagtacagccccctgggcggccccaagccctttgaatgtcccagcatccagatcaccagcatcagccccaactgccaccaggagctggatgcccatgaagatgacctgcagatcaatgaccctgagcgggagttcctggagcggcccagccgggaccacctgtacctgcccctggagcccagctaccgggagagcagcctgagccccagccctgccagcagcatcagcagccgctcctggttcagtgatgccagcagctgtgagagcctgagccacatctatgatgatgtggacagcgagctgaatgaagctgctgcccgcttcaccctgggcagccccctgaccagccctgggggcagccctgggggctgccctggagaggagacctggcaccagcagtatggcctgggccacagcctgagcccccggcagagcccctgccacagccccaggagctctgtgacagatgagaactggctgagccccaggcctgccagcggccccagcagccggcccaccagcccctgtgggaagaggaggcacagcagcgctgaggtgtgctacgccggcagcctgagcccccaccacagccctgtgcccagccctggccacagcccccggggctctgtgacagaggacacctggctgaatgcctctgtgcacggcggcagcggcctgggccctgctgtgttccccttccagtactgtgtggagacagacatccccctgaagaccaggaagaccagcgaggaccaggccgccatcctgcccgggaagctggagctgtgcagtgatgaccagggcagcctgagccctgcccgggagaccagcattgatgatggcctgggcagccagtaccccctgaagaaggacagctgtggggaccagttcctgtctgtgcccagccccttcacctggagcaagcccaagccaggccacacccccatcttccgcaccagcagcctgccccccctggactggcccctgcctgcccacttcggccagtgtgagctgaagattgaggtgcagcccaagacccaccaccgggcccactatgaaacagagggcagcagaggagctgtgaaggccagcactggaggccaccctgtggtgaagctgctgggctacaatgagaagcccatcaacctgcagatgttcatcggcacagcagatgaccgctacctgcggccccacgccttctaccaggtgcaccgcatcaccgggaagacagtggccacagccagccaggagatcatcatcgccagcaccaaggtgctggagatccccctgctgcctgagaacaacatgtctgccagcattgactgtgccggcatcctgaagctgaggaacagcgacatcgagctgaggaagggggagacagacattggaaggaagaacaccagggtgcggctggtgttccgggtgcacatcccccagcccagcggcaaggtgctgagcctgcagatcgccagcatccctgtggagtgcagccagaggtctgcccaggagctgccccacatcgagaagtacagcatcaacagctgcagcgtgaatggaggccacgagatggtggtgacaggcagcaacttcctgcctgagagcaagatcatcttcctggagaagggccaggacggccggccccagtgggaggtggagggcaagatcatccgggagaagtgccagggcgcccacatcgtgctggaggtgcccccctaccacaacccagctgtgacagctgctgtgcaggtgcacttctacctgtgcaatggcaagaggaagaagagccagagccagcgcttcacctacacccctgtgctgatgaagcaggagcaccgggaggagattgacctgagctctgtgcccagcctgcctgtgccccacccagcccagacccagaggcccagcagtgacagcggctgcagccatgattctgtgctgagcggccagaggagcctcatctgcagcatcccccagacctacgcctccatggtgaccagcagccacctgccccagctgcagtgcagagatgaatctgtgtccaaggagcagcacatgatccccagccccatcgtgcaccagcccttccaggtgacccccaccccacctgtgggcagcagctaccagcccatgcagaccaacgtggtgtacaacggccccacctgcctgcccatcaatgctgccagcagccaggagtttgattctgtgctcttccagcaggatgccaccctgagcggcctggtgaacctgggctgccagcccctgagcagcatccccttccacagcagcaacagcggcagcacaggccacctgctggcccacaccccccacagcgtgcacaccctgccccacctgcagagcatgggctaccactgcagcaacacaggccagaggagcctgagcagccctgtggccgaccagatcaccggccagcccagcagccagctgcagcccatcacctacggccccagccacagcggcagcgccaccacagccagccctgctgccagccaccccctggccagcagccccctgagcggcccccccagcccccagctgcagcccatgccctaccagagccccagcagcggcacagccagcagccccagccctgccaccaggatgcacagcggccagcacagcacccaggcccagagcacaggccagggcggcctgagcgcccccagcagcctcatctgccacagcctgtgtgaccctgccagcttccccccagatggagccaccgtgtccatcaagccagagccagaagatcgggagcccaactttgccaccatcggcctgcaggacatcaccctggatgatgaccagttcatcagtgacctggagcaccagcccagcggcagcgctgagaagtggcccaaccacagcgtgctgagctgcccagcccccttctggaggatctag

SEQ ID NO: 147485 - DNA, 1770 bp, Artificial Sequence
  derived and/or modified sequence
atgtttattggaacagcagatgaccgctacctgcggccccacgccttctaccaggtgcaccgcatcaccgggaagacagtggccacagccagccaggagatcatcatcgccagcaccaaggtgctggagatccccctgctgcctgagaacaacatgtctgccagcattgactgtgccggcatcctgaagctgaggaacagcgacatcgagctgaggaaaggagaaacagacatcggcaggaagaacaccagggtgcggctggtgttccgggtgcacatcccccagcccagcggcaaggtgctgagcctgcagatcgccagcatccctgtggagtgcagccagaggtctgcccaggagctgccccacatcgagaagtacagcatcaacagctgcagcgtgaatggaggccacgagatggtggtgacaggcagcaacttcctgcctgagagcaagatcatcttcctggagaagggccaggacggccggccccagtgggaggtggagggcaagatcatccgggagaagtgccagggcgcccacatcgtgctggaggtgcccccctaccacaacccagctgtgacagctgctgtgcaggtgcacttctacctgtgcaatggcaagaggaagaagagccagagccagcgcttcacctacacccctgtgctgatgaagcaggagcaccgggaggagattgacctgagctctgtgcccagcctgcctgtgccccacccagcccagacccagaggcccagcagtgacagcggctgcagccatgacagcgtgctgagcggccagaggagcctcatctgcagcatcccccagacctacgcctccatggtgaccagcagccacctgccccagctgcagtgcagagatgagagcgtgtccaaggagcagcacatgatccccagccccatcgtgcaccagcccttccaggtgacccccaccccacctgtgggcagcagctaccagcccatgcagaccaacgtggtgtacaacggccccacctgcctgcccatcaatgctgccagcagccaggagtttgacagcgtgctcttccagcaggatgccaccctgagcggcctggtgaacctgggctgccagcccctgagcagcatccccttccacagcagcaacagcggcagcacaggccacctgctggcccacaccccccacagcgtgcacaccctgccccacctgcagagcatgggctaccactgcagcaacacaggccagaggagcctgagcagccctgtggccgaccagatcaccggccagcccagcagccagctgcagcccatcacctacggccccagccacagcggcagcgccaccacagccagccctgctgccagccaccccctggccagcagccccctgagcggcccccccagcccccagctgcagcccatgccctaccagagccccagcagcggcacagccagcagccccagccctgccaccaggatgcacagcggccagcacagcacccaggcccagagcacaggccagggcggcctgagcgcccccagcagcctcatctgccacagcctgtgtgaccctgccagcttccccccagatggagccaccgtgtccatcaagccagagcctgaggaccgggagcccaactttgccaccatcggcctgcaggacatcaccctggatgatgaccagttcatcagtgacctggagcaccagcccagcggcagcgctgagaagtggcccaaccacagcgtgctgagctgcccagcccccttctggaggatctag

SEQ ID NO: 147486 - DNA, 3207 bp, Artificial Sequence
  derived and/or modified sequence
atgaccaccgccaactgcggcgcccacgacgagctggacttcaagctcgtttttggagaggacggagcacctgctccccccccccccggaagtagacccgctgacttggagcctgacgactgtgcttctatttacatcttcaacgtagacccccctccctccacccttacaacccccctgtgtttacctcatcacggactgccctcccactcgagcgtgttatcaccaagcttccagctgcagtcacacaagaattacgaggggacctgcgagatcccggagtcgaaatatagcccccttggtgggcccaaaccttttgagtgtccatcgatccaaatcacctctatcagtcctaattgccaccaagaactcgacgcacatgaagatgatctccaaattaacgatcctgagcgcgagttcctcgaacggccatccagggatcatctctacctaccattagaacccagctaccgagagtctagcctgagtccatctccagccagtagcatttcgagtcgctcctggttcagtgacgcatcctcatgcgagtcactgtcccatatatatgatgacgttgatagcgagctcaacgaggctgccgctagattcactctgggttctcctctcacatctcccggcgggtcccctggcggctgcccgggagaagagacttggcaccagcagtacggccttggtcattccctgtctcctcgccagtccccctgtcactcaccccggtcctccgtcacagacgagaattggttgtctcctcgccccgcttcaggcccgtccagtcggcctacaagcccatgtggtaaacggcggcactcgagcgcagaagtttgttatgctgggagtctgtctccacaccatagcccagtgccctcaccagggcactctcctagaggcagcgtaacagaagatacgtggctcaatgcgtccgtacacggcggatccggactggggccagctgtgttccctttccaatattgcgtcgagacagacattccgctgaagactcggaagacctcagaagaccaggccgctattctgccaggcaaactggaattgtgctccgatgatcaggggagcttatcacctgcaagagagacgagtattgatgatggcctaggtagccagtaccccctaaagaaggactcctgcggggatcagttcctgtctgtaccgagccccttcacttggtccaagcctaagcccggacatactcccatctttcgaacatcctcgttaccacccttggattggcccttacccgcccacttcggccagtgcgaactcaaaattgaagttcagccaaagacacatcacagggcccactacgagacagaggggtcgcggggggccgtgaaggcatctacaggaggacaccccgtggttaagctgctgggctataacgaaaagccgatcaacctgcaaatgttcattggaaccgccgacgatagatatctgagacctcacgcattctatcaggtccataggatcaccgggaaaacagtcgcgaccgctagccaggagattattattgcaagtacaaaagtgctggagatcccactgctgcctgaaaacaatatgtctgcctccatcgactgcgcaggcattctaaaattgcgaaactccgacatcgagctacgtaagggtgagacagacatcggtaggaagaataccagggtgcgcctggtattccgtgtgcacattcctcaaccatctggtaaggtcctgtccctccagatcgcttccattccagttgagtgctcacaacgctcagcccaagaacttccacacatagagaaatattccatcaattcctgctcagtgaacggaggacacgagatggtggtcacgggaagtaactttctgccggagtctaagatcattttcctggagaagggccaggacggcagacctcagtgggaagtggagggaaaaattatccgcgaaaaatgtcagggcgcccatattgtgttagaggttccaccctaccataaccccgcagtaacggccgctgttcaggtgcacttttacttatgtaacggcaaaaggaagaaatcgcagagccagcgttttacatacactcccgttctcatgaaacaggagcacagagaggaaattgacctgagtagcgtgccttcactgccagtccctcacccagctcagacccagcgcccttccagcgattccggctgttctcacgactccgtgctgtccggtcagaggtccctgatatgctccatcccccagacctacgcatcgatggtgacttcaagtcatctgccccagttgcagtgccgagacgaaagtgtgtctaaagagcagcacatgattccgtcgcccatagtgcaccagccatttcaggtgactcctaccccaccagtgggctccagttaccagccaatgcagacaaacgtagtgtataatggccccacttgcctgccgatcaatgctgcttctagtcaggagtttgacagtgtactcttccagcaagacgctactctgtcaggactcgttaacctcggatgccagcccctctcttccatcccatttcacagcagcaattccggttcaactggccacctgctcgctcacacgccccatagcgtgcataccctgcctcatctgcaaagtatgggttatcattgctcaaataccggccagcgctctctgtcatcgcccgtggctgaccagattaccggacaaccaagctcgcaactgcagcccatcacttatggaccttcccatagcggatcagctactaccgcctctcctgccgccagccaccccttggccagttcgcctctcagcggaccaccctccccgcagctccagcccatgccctaccagtcaccatcgagcgggactgcctctagtccttctccagccactcgtatgcatagtgggcagcacagcacacaagcccagtctacggggcaggggggtctgtctgcccccagtagtcttatttgccactccctctgtgatcctgcctcgtttccaccagacggcgcaacggtgagtatcaagccggagcctgaagacagagaacccaactttgctacgatcgggctccaggatatcactctagatgacgatcagtttatctcggatctggaacaccaaccctccggctccgcagaaaagtggcctaaccactcagttctgtcttgtcctgcccccttctggcggatctag

SEQ ID NO: 147487 - DNA, 1770 bp, Artificial Sequence
  derived and/or modified sequence
atgttcatcggcaccgccgacgaccggtacctgcggccccacgccttctatcaggtccaccggatcacaggcaagaccgttgctacagcctctcaagaaattatcattgcttcgacgaaagtgttagaaattcctcttctgcctgagaataacatgagcgcaagcattgactgtgctggcatcctgaagctgcgcaactcagacatcgaattacgcaagggggaaacagatatcggacgtaaaaatactcgagtccgcctggtctttagggtgcatatccctcagccctccggcaaggtgcttagcttacaaattgcatcaatcccagtcgaatgctcccagaggtccgctcaagagctcccacatattgagaaatacagcatcaactcttgcagtgttaatgggggtcacgaaatggtcgtaacgggatcaaattttttaccagagtccaaaatcatttttttagagaagggtcaggacgggagacctcagtgggaagtggaaggcaagattattagagagaaatgccagggcgctcacatagtcctcgaggtgcctccgtatcacaatccagccgtgacagccgcagtacaagttcacttttacctgtgtaacggtaagcggaaaaagagccagtcacagcgcttcacctataccccagtcctcatgaagcaggaacaccgcgaggagatcgatttgtcttcggtgccctctctgcctgttcctcaccccgcccagactcagaggcccagctccgactccggctgctcccatgattcggtactgtccgggcaacgttctctgatatgttcaattccacagacgtacgccagtatggttacttccagccatctgcctcagctgcagtgccgggatgaatccgtctccaaggagcagcacatgattcctagccctattgttcatcaaccattccaagtgacccctacgccccctgttgggtcctcctaccaacccatgcaaacgaacgtggtgtacaatgggccgacatgcctgcccatcaatgccgcttctagtcaggagttcgactccgtgttgttccaacaggacgccacgcttagtggtctagttaatctgggctgtcagccactgagctccattccatttcactcttcgaacagcggcagcaccggccacctgctggctcacactccccattctgttcatacgttaccccacctgcagagtatggggtaccattgtagcaacaccggccaacggagtctgtcttcccccgtggccgaccagattaccgggcaacctagctcacagcttcagcccatcacatatgggccatcccattccgggtctgctactacagcctctccagccgcatctcaccctctggcttccagtccgctatccgggccaccatctcctcagttacagccaatgccttatcagagtcccagctcaggcactgcttcctcaccatctcccgccacacggatgcattccggacagcatagcacccaggcccagtccactggacagggcgggctctcggccccaagtagtctcatttgtcactcactatgtgaccctgcttcgttcccaccggatggcgcgacagtatctattaaacccgagccagaagaccgcgaacccaacttcgcgaccattggtttgcaggacattactctggacgacgatcagtttatttctgatcttgagcatcagccatcagggtcagccgagaaatggcccaaccactcagtgctctcttgccctgctcctttctggagaatctag

SEQ ID NO: 147488 - DNA, 6144 bp, Artificial Sequence
  derived and/or modified sequence
gctgcagcaccctgggccacgccgatgactactgcaaactgtggcgcccacgacgagctcgacttcaaactcgtctttggcgaggacggggcgccggcgccgccgcccccgggctcgcggcctgcagatcttgagccagatgattgtgcatccatttacatctttaatgtagatccacctccatctactttaaccacaccactttgcttaccacatcatggattaccgtctcactcttctgttttgtcaccatcgtttcagctccaaagtcacaaaaactatgaaggaacttgtgagattcctgaatctaaatatagcccattaggtggtcccaaaccctttgagtgcccaagtattcaaattacatctatctctcctaactgtcatcaagaattagatgcacatgaagatgacctacagataaatgacccagaacgggaatttttggaaaggccttctagagatcatctctatcttcctcttgagccatcctaccgggagtcttctcttagtcctagtcctgccagcagcatctcttctaggagttggttctctgatgcatcttcttgtgaatcgctttcacatatttatgatgatgtggactcagagttgaatgaagctgcagcccgatttacccttggatcccctctgacttctcctggtggctctccagggggctgccctggagaagaaacttggcatcaacagtatggacttggacactcattatcacccaggcaatctccttgccactctcctagatccagtgtcactgatgagaattggctgagccccaggccagcctcaggaccctcatcaaggcccacatccccctgtgggaaacggaggcactccagtgctgaagtttgttatgctgggtccctttcaccccatcactcacctgttccttcacctggtcactcccccaggggaagtgtgacagaagatacgtggctcaatgcttctgtccatggtgggtcaggccttggccctgcagtttttccatttcagtactgtgtagagactgacatccctctcaaaacaaggaaaacttctgaagatcaagctgccatactaccaggaaaattagagctgtgttcagatgaccaagggagtttatcaccagcccgggagacttcaatagatgatggccttggatctcagtatcctttaaagaaagattcatgtggtgatcagtttctttcagttccttcaccctttacctggagcaaaccaaagcctggccacacccctatatttcgcacatcttcattacctccactagactggcctttaccagctcattttggacaatgtgaactgaaaatagaagtgcaacctaaaactcatcatcgagcccattatgaaactgaaggtagccgaggggcagtaaaagcatctactgggggacatcctgttgtgaagctcctgggctataacgaaaagccaataaatctacaaatgtttattgggacagcagatgatcgatatttacgacctcatgcattttaccaggtgcatcgaatcactgggaagacagtcgctactgcaagccaagagataataattgccagtacaaaagttctggaaattccacttcttcctgaaaataatatgtcagccagtattgattgtgcaggtattttgaaactccgcaattcagatatagaacttcgaaaaggagaaactgatattggcagaaagaatactagagtacgacttgtgtttcgtgtacacatcccacagcccagtggaaaagtcctttctctgcagatagcctctatacccgttgagtgctcccagcggtctgctcaagaacttcctcatattgagaagtacagtatcaacagttgttctgtaaatggaggtcatgaaatggttgtgactggatctaattttcttccagaatccaaaatcatttttcttgaaaaaggacaagatggacgacctcagtgggaggtagaagggaagataatcagggaaaaatgtcaaggggctcacattgtccttgaagttcctccatatcataacccagcagttacagctgcagtgcaggtgcacttttatctttgcaatggcaagaggaaaaaaagccagtctcaacgttttacttatacaccagttttgatgaagcaagaacacagagaagagattgatttgtcttcagttccatctttgcctgtgcctcatcctgctcagacccagaggccttcctctgattcagggtgttcacatgacagtgtactgtcaggacagagaagtttgatttgctccatcccacaaacatatgcatccatggtgacctcatcccatctgccacagttgcagtgtagagatgagagtgttagtaaagaacagcatatgattccttctccaattgtacaccagccttttcaagtcacaccaacacctcctgtggggtcttcctatcagcctatgcaaactaatgttgtgtacaatggaccaacttgtcttcctattaatgctgcctctagtcaagaatttgattcagttttgtttcagcaggatgcaactctttctggtttagtgaatcttggctgtcaaccactgtcatccataccatttcattcttcaaattcaggctcaacaggacatctcttagcccatacacctcattctgtgcataccctgcctcatctgcaatcaatgggatatcattgttcaaatacaggacaaagatctctttcttctccagtggctgaccagattacaggtcagccttcgtctcagttacaacctattacatatggtccttcacattcagggtctgctacaacagcttccccagcagcttctcatcccttggctagttcaccgctttctgggccaccatctcctcagcttcagcctatgccttaccaatctcctagctcaggaactgcctcatcaccgtctccagccaccagaatgcattctggacagcactcaactcaagcacaaagtacgggccaggggggtctttctgcaccttcatccttaatatgtcacagtttgtgtgatccagcgtcatttccacctgatggggcaactgtgagcattaaacctgaaccagaagatcgagagcctaactttgcaaccattggtctgcaggacatcactttagatgatgaccaatttatatctgacttggaacaccagccatcaggttcagcagagaaatggcctaaccacagtgtgctctcatgtccagctcctttctggagaatctagaggtgaacgagataattgggagagacatgtcccagatttctgtttcccaaggagcaggggtgagcaggcaggctcccctcccgagtcctgagtccctggatttaggaagatctgatgggctctaacagtgcttactgcagccttgtgtccaccaccaacttctcagcatgtttctctccttggaccttgggtttccaactctgcagccttcaggtctggggccaggagtgggacccaccatttgtggggaaagtagcattcctccacctcaggccttgggtagatttggcaaaagaacaggagcagcataggctgtttgagctttggggaaatgaactttgctttttatatttaactaggatacttttatatgatgggtgctttgagtgtgaatgcagcaggctctcttgtttccgaggtgctgcttttgcaggtgacctggttacttagctaggattggtgatttgtactgctttatggtcatttgaagggccctttagtttttatgataatttttaaaataggaacttttgataagaccttctagaagcaaaaaaaaaaaaaaaaaaaaaaaaaagaaaaaaaaagaaaagaaaaaaagaaaaagaaaaaaatatcccaagcccacacctatgcctcagaaagtcagcatgtgtcctgaagacgttcatagatttataggaaataaagccaaatgtagctcatacctctttataaaactaaactgttgttagataaaatgagaagagaccattccatcattgaagtgttggaatataaaaagacattccagagcatagccttttggtaactttctaggtaatcttgcaatctctccatactggctccatgttgaaattgctttttccctcaggaccctgggtaagatggctacatttaaggtgactctgaatggtggggttctagcttggtcactttcatttcttgccatcataaaaactagtaggctgtggagtgcgcttcctgtttgtgtcatctggtcgtagaaccttttccaaacagaagcatctgcctttggctgttctgtgacctttgaagccagtctcagtggtttaggcagctttgcagttctaactctagctagaggccaggctgtgtgcagagctaaagcacaaatgagcagtacatcagcatgggcagagaaaatacaggactccagatgggaaggttttaagagtcacactggcatggaaggcttatctgccattctatttatagcctgaaatgattctggcctaccctgtcctgtctgtatgatctaaaaaccagccttttccccagaaggctctgagcacatccagaagtgataacctgaccctccacaccaaagacaccctggtgctgctgctggtgagactggtgtccaaggcagggcccagcagaaactgcagcctgctgtctaccaaaggaggtacccgagttgggtactttaaaaaaaaaaaaaacctgcccttacccctctccctaatgggattttttttacctgttcctgggcccattacagagcctctgaagtttgcagtatgctttcaaatgaaataatatacttccattgattcaggaagcagattttttgagtgcctatatgtgagacagtgtgctggttgaaggcctgatgctgttattccaggagactgcaggcccttgatgccaggactctctctactaaggccagttcaggtctgggaaagggagctggcctattgcccaccacctgttgtcagtaggttaggagctgttgactcaggatgaggaagtatggtctttaaaaaaaacaaaatatattttagatttctcccctaaagttagttagagaaaaaggtctattcttcagcagatcactgtggcccctcttggagctgggtgttttcaaattttcttgaaaagtgagttgtgtcacagaatgtggatagtgagatttgcttctgggcctgtggttggacgcccacagcttcctttggaggggcaagaagttggcctctcggttgacattccagagaaatggccagacttgcccctacccttttgcccctggtgtagctgcctcacatgaggttattgcaagagttccccttgcaataccctttgtgccctcaagaattaaaagcctctatgatccagagttgctatgcaccaaattttgatgccttctaaataccttgatgcctgtagcactagaaatgctttcctatttaaaataaacattaaattttaaaatagagctttgtatactatgtaagcagttttatatcagctttgtaaaagctttggtgttaagagtcaatattttttggctttgtagataaagacttaaatttttgtgcaacatagtggtgttaaagcacacatccattggactatgcaaatcaatttctactagcagcactgagcaactgggcacgtgctagtacgcaccccctcctactctaactgtgctagctcttgggttgaggaatggaatgggtagccttctgcttactggagatgcacagagaaacatggctgaaaacagctttaaaaagaacatgtctttgggttcatgtgtggtgctgctgcccgggtgtaaactatccccacccagggccagccattatcaccagacctcttctgggcctggctgtgaagccctgtttttggtattcagaatggatctttaaggctcagatgggctcaaattgaaaccttgtgttttataaaatggatgtttagtaaaggaactggttctcagttatgtttacagcacttggaattgtgtgttcttgtacattttgtattttaaaaccttttatgggagtgcagtgctccttacacaaatacaaagggaagaagagccagcagttgaggctcctcagttttagtgctgaaataataaacagtgacaggtcaacagta

SEQ ID NO: 147489 - DNA, 4157 bp, Artificial Sequence
  derived and/or modified sequence
gttttgtgtttttagtagagacagagtttcaccatgttggccaggctggtctggaactcctgacctcaagggatcctcctgcctcagcctcccaaagtggtgggattacaggcatgggccactgcaccctgcccaatatatatatttttaaatagagatggaagtctcactatgttgcccaggctagtctggaactcctgggctctcctgttctggcttcccaaaatgctgggattacaggtgtgagccactgcacatagcccctatattttgttaaataagtgaataaataacacctaagttttgaatcattgctcactgctctttcgtggtagaggaaattgacgagaattgtttcagttctttggcttttattgatgagttccataaattagatcttggtaatttggggctgcagtggttttacatctctgaaggtttgggagtacttgtatcacaactaaatttccatacagtgagaagatttttgaaaaatagtgagatcttgagccagatgattgtgcatccatttacatctttaatgtagatccacctccatctactttaaccacaccactttgcttaccacatcatggattaccgtctcactcttctgttttgtcaccatcgtttcagctccaaagtcacaaaaactatgaaggaacttgtgagattcctgaatctaaatatagcccattaggtggtcccaaaccctttgagtgcccaagtattcaaattacatctatctctcctaactgtcatcaagaattagatgcacatgaagatgacctacagataaatgacccagaacgggaatttttggaaaggccttctagagatcatctctatcttcctcttgagccatcctaccgggagtcttctcttagtcctagtcctgccagcagcatctcttctaggagttggttctctgatgcatcttcttgtgaatcgctttcacatatttatgatgatgtggactcagagttgaatgaagctgcagcccgatttacccttggatcccctctgacttctcctggtggctctccagggggctgccctggagaagaaacttggcatcaacagtatggacttggacactcattatcacccaggcaatctccttgccactctcctagatccagtgtcactgatgagaattggctgagccccaggccagcctcaggaccctcatcaaggcccacatccccctgtgggaaacggaggcactccagtgctgaagtttgttatgctgggtccctttcaccccatcactcacctgttccttcacctggtcactcccccaggggaagtgtgacagaagatacgtggctcaatgcttctgtccatggtgggtcaggccttggccctgcagtttttccatttcagtactgtgtagagactgacatccctctcaaaacaaggaaaacttctgaagatcaagctgccatactaccaggaaaattagagctgtgttcagatgaccaagggagtttatcaccagcccgggagacttcaatagatgatggccttggatctcagtatcctttaaagaaagattcatgtggtgatcagtttctttcagttccttcaccctttacctggagcaaaccaaagcctggccacacccctatatttcgcacatcttcattacctccactagactggcctttaccagctcattttggacaatgtgaactgaaaatagaagtgcaacctaaaactcatcatcgagcccattatgaaactgaaggtagccgaggggcagtaaaagcatctactgggggacatcctgttgtgaagctcctgggctataacgaaaagccaataaatctacaaatgtttattgggacagcagatgatcgatatttacgacctcatgcattttaccaggtgcatcgaatcactgggaagacagtcgctactgcaagccaagagataataattgccagtacaaaagttctggaaattccacttcttcctgaaaataatatgtcagccagtattgattgtgcaggtattttgaaactccgcaattcagatatagaacttcgaaaaggagaaactgatattggcagaaagaatactagagtacgacttgtgtttcgtgtacacatcccacagcccagtggaaaagtcctttctctgcagatagcctctatacccgttgagtgctcccagcggtctgctcaagaacttcctcatattgagaagtacagtatcaacagttgttctgtaaatggaggtcatgaaatggttgtgactggatctaattttcttccagaatccaaaatcatttttcttgaaaaaggacaagatggacgacctcagtgggaggtagaagggaagataatcagggaaaaatgtcaaggggctcacattgtccttgaagttcctccatatcataacccagcagttacagctgcagtgcaggtgcacttttatctttgcaatggcaagaggaaaaaaagccagtctcaacgttttacttatacaccagttttgatgaagcaagaacacagagaagagattgatttgtcttcagttccatctttgcctgtgcctcatcctgctcagacccagaggccttcctctgattcagggtgttcacatgacagtgtactgtcaggacagagaagtttgatttgctccatcccacaaacatatgcatccatggtgacctcatcccatctgccacagttgcagtgtagagatgagagtgttagtaaagaacagcatatgattccttctccaattgtacaccagccttttcaagtcacaccaacacctcctgtggggtcttcctatcagcctatgcaaactaatgttgtgtacaatggaccaacttgtcttcctattaatgctgcctctagtcaagaatttgattcagttttgtttcagcaggatgcaactctttctggtttagtgaatcttggctgtcaaccactgtcatccataccatttcattcttcaaattcaggctcaacaggacatctcttagcccatacacctcattctgtgcataccctgcctcatctgcaatcaatgggatatcattgttcaaatacaggacaaagatctctttcttctccagtggctgaccagattacaggtcagccttcgtctcagttacaacctattacatatggtccttcacattcagggtctgctacaacagcttccccagcagcttctcatcccttggctagttcaccgctttctgggccaccatctcctcagcttcagcctatgccttaccaatctcctagctcaggaactgcctcatcaccgtctccagccaccagaatgcattctggacagcactcaactcaagcacaaagtacgggccaggggggtctttctgcaccttcatccttaatatgtcacagtttgtgtgatccagcgtcatttccacctgatggggcaactgtgagcattaaacctgaaccagaagatcgagagcctaactttgcaaccattggtctgcaggacatcactttagatgatgaccaatttatatctgacttggaacaccagccatcaggttcagcagagaaatggcctaaccacagtgtgctctcatgtccagctcctttctggagaatctagaggtgaacgagataattgggagagacatgtcccagatttctgtttcccaaggagcaggggtgagcaggcaggctcccctcccgagtcctgagtccctggatttaggaagatctgatgggctctaacagtgcttactgcagccttgtgtccaccaccaacttctcagcatgtttctctccttggaccttgggtttccaactctgcagccttcaggtctggggccaggagtgggacccaccatttgtggggaaagtagcattcctccacctcaggccttgggtagatttggcaaaagaacaggagcagcataggctgtttgagctttggggaaatgaactttgctttttatatttaactaggatacttttatatgatgggtgctttgagtgtgaatgcagcaggctctcttgtttccgaggtgctgcttttgcaggtgacctggttacttagctaggattggtgatttgtactgctttatggtcatttgaagggccctttagtttttatgataatttttaaaataggaacttttgataagaccttctagaagc

SEQ ID NO: 147490 - DNA, 3207 bp, Artificial Sequence
  derived and/or modified sequence
atgacgaccgctaactgtggtgcccacgatgaattagattttaagctggttttcggcgaagatggcgcacccgcaccccctcctccaggtagccgccctgcagatctggagcccgacgattgtgcaagcatatacattttcaacgtggacccccctccatctactttgacaactcccctgtgtctgccccaccacggactcccgtcccattcctccgtcttatcgccaagtttccagctccaatcacacaagaattatgagggcacatgcgagataccagagagcaaatactccccacttggagggccaaagccattcgagtgcccgagcattcagatcacgagcatcagtcccaattgtcaccaggagttggacgcgcatgaagacgacctgcaaatcaatgaccctgagagagaatttctggagagacccagccgcgatcacctctatttaccactagagccttcctacagagagtctagcctctctccctcacctgcatcatctatatcttcgcgtagctggttttccgacgcatcttcatgcgagtctttgtctcacatctacgatgacgtcgactccgagctgaacgaggctgcagcaaggtttacactgggatcaccactcacctctccaggcggttcccctggcggttgccctggagaagagacctggcaccagcagtacggactcggccactccttatcccctaggcaatccccctgccacagtcctcgcagtagtgttacagacgaaaactggctctcccccaggcccgcatcaggtccttcttcccgtccaactagcccgtgtggcaaaaggcgccatagtagcgccgaggtgtgctacgccggttctctcagtccccaccactcccccgtgcccagccccggtcacagtcccagggggtctgtgaccgaagatacttggttgaacgcaagcgttcatgggggatcagggttaggcccagcagtgtttccttttcagtattgtgtggaaactgatatccccttgaagacacgtaaaacctccgaagatcaagccgctattctccccggaaagctagaactgtgctcagacgaccagggcagtttatcccctgcccgagaaacttctatcgacgacggcttgggatctcaatatccgctgaagaaggattcgtgcggggatcagttcctatctgtgccaagtcctttcacctggagcaaacctaagccgggtcacacgcctattttccgtaccagctccctacctccccttgattggccccttccagctcactttgggcagtgtgagctgaagatcgaggtgcagcccaaaacccaccacagagcccactatgagaccgaggggtcccggggtgctgtgaaggcatcaaccgggggtcatcccgtagtgaagctgctgggctacaacgagaagcccatcaacctgcagatgtttattggaacggcggacgatcgctatttgagacctcatgctttctatcaggtgcaccgcattacgggcaaaacagtcgctacagcaagccaggagattataattgcttctaccaaggtgctggagatccccttgctgccggagaataatatgtcagccagcatcgattgcgccggaattctcaaactgcgaaatagtgatatagaactgcgcaagggggagacagatattggaaggaagaatactcgtgttcgcttggtgtttcgggtccatataccgcaaccctcaggcaaagtgttgagtctccagatcgctagcatccctgttgaatgtagccaaagatctgcacaggagctgccccacatcgaaaagtactccattaactcttgctccgtgaacgggggtcacgagatggtggtcacaggctcaaacttcctgcccgagtcgaagataatattcctcgagaagggccaggacggacgaccgcaatgggaggtggagggcaaaatcatcagggagaagtgtcagggtgcacacatcgtgctggaagtgcccccatatcacaaccccgctgttaccgccgctgtccaggtacatttttacctgtgtaatggcaaaaggaagaagagtcagtcacaaagatttacatacaccccagtgttaatgaagcaagagcaccgtgaggagatagatctctcctctgtccccagcctgcctgttccccatcctgctcaaacacagcggccatcaagcgacagtggttgctctcacgactcagtcttatcaggccagaggtcgttaatatgtagtattccacagacctatgccagcatggtgacctcatcccacctaccccagctgcaatgcagagacgagagcgtaagcaaggagcaacacatgatcccaagcccaatcgtccatcagccattccaggtcacacccacaccccctgtaggatccagctaccaacctatgcagacgaacgtggtgtacaacggtccgacatgcctgccaataaacgctgcctcctcacaggagtttgactcggtacttttccagcaagacgcgactcttagtggcctggtcaatctgggctgccagcccttatctagcatcccctttcattcctccaattccggcagcactggacacctgctcgctcatacaccacattctgttcacaccctcccgcatttgcagagcatgggatatcactgttccaatacgggtcagcggagtctttcttcaccagttgccgaccagattacagggcaaccctcttcccaactgcaaccaattacctacgggccatcccacagcggcagtgctaccacagcgagtcccgcagcttctcacccacttgcttcatctccactgtctggccctcccagcccacagctacagcccatgccgtaccagtcaccgtcctccgggactgcctctagcccgtctccagccacacgtatgcatagcgggcagcacagcacccaggcacagagtacaggacaagggggactctccgctcctagctcactgatctgtcacagtttgtgcgacccagccagtttcccacccgatggcgctacagtgagcattaaaccagagccagaggaccgagagccaaattttgcaactataggattgcaggatatcacactggatgatgatcaatttataagtgaccttgagcatcaacccagcggtagcgctgagaagtggcccaatcacagcgttctttcctgtcccgctcctttttggaggatatag

SEQ ID NO: 147491 - DNA, 1770 bp, Artificial Sequence
  derived and/or modified sequence
atgtttattggcaccgctgacgatagatatctgcgcccacacgccttttaccaagtacacaggatcaccggcaagactgtggcaaccgccagtcaggagattatcatagcgtctaccaaagtgttggagattcctctccttccagaaaacaatatgagtgcgagcattgactgtgctgggatactgaagctgaggaacagcgacattgagctgcgcaagggggaaactgatatcggcaggaagaacacaagggtacggctggtgtttcgggtgcacatcccccaaccttcaggaaaggtgttgtcactgcaaatcgcatctattcctgtggaatgctctcagaggtcggcccaggaactgcctcacatagaaaagtacagcataaacagttgcagcgtcaatgggggtcatgaaatggtggtaactggatccaatttcttgccagagtccaaaataatcttcctggagaagggacaggatgggcgtccccagtgggaagtggagggaaagattatccgcgagaagtgtcaaggagctcacattgtgctggaggtgcctccatatcataaccctgcagtgacagctgctgtgcaggtgcatttctatttatgcaacggcaagagaaagaaatcacagagccagcggttcacttacaccccagtactgatgaagcaagagcacagggaggagattgatctttcatcagttccctcgctgcccgtgccccaccccgctcagacgcaacggccatcttctgactccggctgctcacacgacagtgtcttgagtggccagcgctcactgatctgcagcatccctcaaacctacgcatcaatggtgacatctagtcatttaccacaactgcagtgtcgggacgagtccgttagtaaagaacaacacatgatcccatcaccaatagtgcatcagccctttcaagtaacaccaacgccacccgtggggtctagttaccagcccatgcagactaatgttgtatataacggtcctacctgtttaccgatcaacgcagccagcagccaagaattcgactcagtactgttccagcaagacgctacactcagtggcctggtgaatcttggatgccagcctctgagcagtataccattccattcttcaaatagcggatcaaccggtcacttactggcacacactccgcactccgttcacacccttccccacctccaatccatggggtatcactgcagcaataccggccagcggagtctcagctctccagtggccgatcaaatcactggccagccttcctcccagctgcagcctattacatacggtcccagccatagcggctccgctactacggcaagccccgctgcttctcatcccctagcgagctcgccactgagcggccctccatcaccccagcttcagccaatgccttaccagtccccgtccagcgggacggccagctcccccagtcccgcaacgcgtatgcacagtgggcaacattctacccaagcccaatccacaggccaggggggactgagcgccccatcctcgttaatttgtcatagcttgtgtgatccagcaagttttccccctgatggagccactgtgagcatcaaaccagaacccgaagaccgcgagcccaactttgccacaatcggcttacaggatattactctggacgacgatcagttcatttctgatctggaacatcagccgtccggctcggctgagaagtggcccaaccatagcgtactttcctgccctgccccattctggcgaatttag

SEQ ID NO: 147492 - protein, 500 aa, Artificial Sequence
  derived and/or modified sequence
MNQRRSESRPGNHRLQAYAEPGKGDSGGAGPLSGSARRGRGGGGAIRVRRPCWSGGAGRGGGPAWAVRLPTVTAGWTWPALRTLSSLRAGPSEPHSPGRRPPRAGRPLCQADPQPGKAARRSLEPDPAQTGPRPARAAGMSEARKGPDEAEESQYDSGIESLRSLRSLPESTSAPASGPSDGSPQPCTHPPGPVKEPQEKEDADGERADSTYGSSSLTYTLSLLGGPEAEDPAPRLPLPHVGALSPQQLEALTYISEDGDTLVHLAVIHEAPAVLLCCLALLPQEVLDIQNNLYQTALHLAVHLDQPGAVRALVLKGASRALQDRHGDTALHVACQRQHLACARCLLEGRPEPGRGTSHSLDLQLQNWQGLACLHIATLQKNQPLMELLLRNGADIDVQEGTSGKTALHLAVETQERGLVQFLLQAGAQVDARMLNGCTPLHLAAGRGLMGISSTLCKAGADSLLRNVEDETPQDLTEESLVLLPFDDLKISGKLLLCTD

SEQ ID NO: 147493 - protein, 101 aa, Artificial Sequence
  derived and/or modified sequence
EGTSGKTALHLAVETQERGLVQFLLQAGAQVDARMLNGCTPLHLAAGRGLMGISSTLCKAGADSLLRNVEDETPQDLTEESLVLLPFDDLKISGKLLLCTD

SEQ ID NO: 147494 - DNA, 2581 bp, Artificial Sequence
  derived and/or modified sequence
aatgaatgaatgaatgaatgagtgaatgaatcaacgaaggagtgagtcaaggcccgggaaccacagactccaagcctacgcagagcccgggaagggggattccggaggggcggggcctctttccggaagcgcccgccgggggcggggagggggcggggccatccgcgtgaggcgaccctgttggtccggaggggcggggcgaggaggaggacccgcttgggcggttcggctgcccacagtaaccgctgggtggacctggccagcgctccgaaccttgtcctcgctgcgcgccggcccctcggagccccacagcccgggaaggaggccgccgcgggccgggcgcccgctctgccaagcggacccgcaacccggaaaggcggcgcggcggagcctggagccggatcctgctcagaccgggccccggccggccagagccgcgggcatgtcggaggcgcggaaggggccggacgaggcggaggagagccagtacgactctggcattgagtctctgcgctctctgcgctccctacccgagtccacctcggctccagcctccgggccctcggacggcagcccccagccctgcacccatcctccgggacccgtcaaggaaccacaggagaaggaagacgcggatggggagcgggctgattccacctatggctcctcctcgctcacctacaccctgtccttgctggggggccccgaggctgaggacccggccccacgcctgccactcccccacgtgggggcgctgagccctcagcagctggaagcactcacttacatctccgaggacggagacacgctggtccacctggcagtgattcatgaggccccagcggtgctgctctgttgcctggctttgctgccccaggaggtcctggacattcaaaataacctttaccagacagcactccatctggctgtacatctggaccaaccgggcgcagttcgggcactggtgctgaagggggccagccgggcactacaggaccggcatggtgacacagcccttcatgtggcctgccagcgccagcacttggcctgtgcccgctgcctgctggaagggcggccagagccaggcagaggaacatctcactctctggacctccagctgcaaaactggcaaggtctggcttgtctccacattgccacccttcagaagaaccaaccactcatggaattgctgcttcggaatggagctgacattgatgtgcaggagggcaccagtggtaagacagcgctgcacctggctgtggaaacccaagagcggggcctggtacagttcctgctccaggctggtgcccaggtagatgcccgcatgctgaacgggtgcacacccctgcacctggcagctggccggggtctcatgggcatctcatccactctgtgcaaggcgggtgctgactccctgctgcggaatgtggaggatgagacgccccaggacctgactgaggaatcccttgtccttttgccctttgatgacctgaagatctcagggaaactgctgctgtgtaccgactgaagccaggcagggtctgggatcctcagggctccacctctccatctggaagccggagccataactgctgcagtttgggcccaggctatgtgctcttctggtgccctagggactgctgtggccagagcctggggccagccagtacagtcctgagccgaggaggagggactgcaagtggaagagagccagtctggaaggaagagctttccaggtggacagggcttcttggaagacccccaaagccccaggtatcctgggtgaagcctgtttgcctctcttgaaaatggcaggtgctcttgttttacccatgttgggtcagcctgaaactgccaaccagtaggaagcatggactctcctgagtgagaagagactgaaataggagcaagcagaaccctgagaggtgtcccatcttattgctgttgaggaccctgaaacaccgttgtttaaagacttcacacagaaggctctgaactgagccactggggaagggaagtttcagtaacatgacactaaaatggcagagacgttaaaaaaagtttttcccttctagagctgttttgcgcgcatgcatgtctgtgtgcattggggctttttagacaggcctgccctgtgactttgtggtagaggcagagagaaggaaattgtcccctgagcacggtagggccttgctgggtggggtcagaggccagtagttccaggcctttctctgtgtccagcacagacccttgtccttgctgtggaaatgatgagggatggagggacaagaggaagaatgagaggacacacgccctggagccctcaccactgccctgggggttgccatctggaggagcctggggataagggtaacccagggaggctgggcacgagggagctgactccacgtttttccccccgttcctcaccttcgagggccctgctaggtcacccctatgctggcatgaagagcatggggcaataaaccagcacagtctctgaccacttggagcgtctcatccagtgagagagacagccgttaaaagcataaacatccaaataaagatgcctttccaagtt

SEQ ID NO: 147495 - DNA, 399 bp, Artificial Sequence
  derived and/or modified sequence
atgacggagcaggaaaccctcgcactcctggaggtcaagagagacccaggcgtcagagcagaaccggtgatgctcttttgcccttccgccctgtggggggcaacagccggaggtggagatcccccagccatctgcggacctgtggggccagctctctactcacttctcctgcaaccaggtcgcgctttccatctacctgctccaggctatccacaaacagcaccatctgcccactggtccctgtgtaggctacccgctgaccttctagcagatctttgtagagggccacttttgccaagacttcgtctgagaccagatgttagcgcaacagccgtcgacgccgatgtggaacccctgctgcacgtcaggggcggagctggcgctcatgctcattgctag

SEQ ID NO: 147496 - DNA, 306 bp, Artificial Sequence
  derived and/or modified sequence
gagggcaccagcggcaagaccgccctgcacctggccgtggagacccaggagagaggcctggtgcagttcctgctgcaggccggcgcccaggtggacgccagaatgctgaacggctgcacccccctgcacctggccgccggcagaggcctgatgggcatcagcagcaccctgtgcaaggccggcgccgacagcctgctgagaaacgtggaggacgagaccccccaggacctgaccgaggagagcctggtgctgctgcccttcgacgacctgaagatcagcggcaagctgctgctgtgcaccgactag

SEQ ID NO: 147497 - DNA, 1503 bp, Artificial Sequence
  derived and/or modified sequence
atgaaccagcggaggtcagagtctaggcctggcaaccacaggctgcaggcctacgcggagccaggtaagggcgattccggaggtgctggtccactctcaggcagtgcacgacgcggcagaggcggcggtggcgccattcgggtccgtagaccttgctggagcggcggggcaggcagggggggggggccggcctgggccgtccgcctgcctactgtgactgccggctggacctggccagcactcaggacactgagctcactgcgcgccggcccctccgagcctcacagtcctggcaggcgaccacccagggcagggcggcctctgtgccaggctgatcctcagcctggcaaggcagcacgcaggagtctagaacccgaccctgctcagacaggaccaaggcctgccagagccgccggcatgtcagaggcacgcaaaggccctgacgaggcagaagagtctcaatatgactcaggcattgagtccttgcggagtctccgctcactacccgagtctacaagcgcccccgcctcaggccccagtgacggttcccctcagccatgcacccacccccccgggcctgtgaaagaacctcaggagaaagaggacgccgacggcgagagagcggatagcacatacgggtccagcagcctgacctacaccctctctttgctgggggggcctgaggccgaagatcctgccccccgtttgccattgccacacgtgggcgctctctccccacagcagctggaagctctgacgtacatatccgaggacggggacacacttgtgcacttggccgttattcatgaagcacccgcggtcctcctgtgctgtctggcccttctgccccaagaggtgttggacatccagaacaatctgtaccagaccgccctgcacctggccgtgcacttagatcagccaggtgcagtccgggcgctggtcctcaaaggagcgtccagagcactgcaggacaggcatggcgataccgcgcttcacgttgcctgccagcgtcagcacctggcctgtgcccgctgcttgctggagggacgcccagaaccaggcagggggactagccacagcctcgatctccagcttcagaactggcagggtctcgcctgtctgcatatagccaccctgcagaaaaatcaacccttgatggagctcctattaagaaatggcgcagacatagatgtccaagaggggacctccggaaagacggcgctccacttagcagtggaaacccaggagaggggattggtacagttcctgctacaagctggcgcccaagtcgatgctcgcatgctgaacggatgtacaccactccatctggccgcaggcaggggtctcatgggcatctcgagcactctgtgtaaagccggcgctgacagtctgctaaggaatgtggaggatgagacaccccaggacctgacagaggagagcctggtcctgctgcctttcgatgatctgaagatttccggtaaactactgttgtgtacggactag

SEQ ID NO: 147498 - DNA, 306 bp, Artificial Sequence
  derived and/or modified sequence
gaagggactagcggaaaaacagccctacatttggccgttgagacacaggaacgagggctagtgcagtttcttttgcaggcaggggcacaggtggacgctcggatgctgaatggctgcactcccctgcatttggccgccggacgtggattaatgggcatttccagtacgctatgtaaggcaggagccgactcattgcttagaaacgtggaagatgagaccccccaggacctcacagaagaatctctggtgctacttccatttgatgatctaaaaataagtggaaagctattactctgcacagactag

SEQ ID NO: 147499 - DNA, 1503 bp, Artificial Sequence
  derived and/or modified sequence
atgaaccagaggagaagtgagagccggcccggcaaccaccggctgcaggcctatgcagagcctggaaaaggagacagcggcggggccggccccctgagcggcagcgcccggcggggccggggcggcggcggggccatccgggtgagaagaccctgctggagcggcggggccggccggggcggcggccctgcctgggccgtgcggctgcccaccgtgacagctggctggacctggccagccctgcggaccctgagcagcctgcgggccggccccagcgagccccacagccctggaagaagaccaccccgggccggccggcccctgtgccaggccgacccccagcccgggaaggccgcccggcgcagcctggagccagaccctgcccagacaggccccaggcctgcccgggccgccggcatgtctgaggccaggaaaggaccagatgaggccgaggagagccagtatgattctggaattgagagcctgcggagcctgcggagcctgcctgagagcaccagcgccccagccagcggccccagtgatggcagcccccagccctgcacccaccccccaggccctgtgaaggagccccaggagaaggaggatgctgatggagagagagctgacagcacctacggcagcagcagcctgacctacaccctgagcctgctgggcggccctgaggccgaggaccctgccccccggctgcccctgccccacgtgggcgccctgagcccccagcagctggaggccctgacctacatcagtgaagatggagacaccctggtgcacctggccgtcatccacgaggccccagctgtgctgctgtgctgcctggccctgctgccccaggaggtgctggacatccagaacaacctgtaccagacagccctgcacctggccgtgcacctggaccagcctggagctgtgcgggccctggtgctgaagggggccagccgggccctgcaggacagacatggagacacagccctgcacgtggcctgccagaggcagcacctggcctgtgcccgctgcctgctggagggccggcctgagcccggccggggcaccagccacagcctggacctgcagctgcagaactggcagggcctggcctgcctgcacatcgccaccctgcagaagaaccagcccctgatggagctgctgctgagaaatggagctgacattgatgtgcaggagggcaccagcggcaagacagccctgcacctggccgtggagacccaggagcggggcctggtgcagttcctgctgcaggccggggcccaggtggatgccaggatgctgaatggctgcacccccctgcacctggccgccggccggggcctgatgggcatcagcagcaccctgtgcaaggccggggctgacagcctgctgagaaatgtggaggatgagaccccccaggacctgacagaggagagcctggtgctgctgccctttgatgacctgaagatcagcggcaagctgctgctgtgcacagactag

SEQ ID NO: 147500 - DNA, 306 bp, Artificial Sequence
  derived and/or modified sequence
gagggcaccagcggcaagacagccctgcacctggccgtggagacccaggagcggggcctggtgcagttcctgctgcaggccggggcccaggtggatgccaggatgctgaatggctgcacccccctgcacctggccgccggccggggcctgatgggcatcagcagcaccctgtgcaaggccggggctgacagcctgctgagaaatgtggaggatgagaccccccaggacctgacagaggagagcctggtgctgctgccctttgatgacctgaagatcagcggcaagctgctgctgtgcacagactag

SEQ ID NO: 147501 - DNA, 1503 bp, Artificial Sequence
  derived and/or modified sequence
atgaaccagcggcggagcgagagccggcccggcaaccaccggctgcaggcatacgctgagccagggaaaggcgattctggcggcgccgggcctctcagtggatccgcccggcggggccggggcggagggggagcgatccgcgtgcggcgtccttgctggtcagggggggcaggccgcgggggaggccccgcctgggctgtgcgtctgccgacggtcacagccgggtggacctggccagcactgaggacattgtcttctctgagagctgggccttccgaacctcacagtcctggcaggaggccacctcgggctgggagacccttatgccaggcagatccccagcccggtaaggcagctagaagatctctcgagccggacccggcacagacaggtccccggcccgcgcgcgccgccggtatgagtgaggcacggaaggggccagacgaagctgaagagtcacaatacgactcaggcattgaaagcctccgatctttaagatctcttccagagtctactagcgctccggcttcaggtcccagcgacggaagccctcagccatgcacacatccccccggccctgtaaaagagccacaagaaaaagaagacgcagacggagagcgggcggactcaacatatggcagctcttccttaacttacacactgtccttgctaggtggtccggaggcagaagacccagcacctcgactgcctttgccacacgtgggcgccttgagtcctcagcagctggaagctctgacatatatctcagaggatggtgataccctcgtacatcttgccgtgattcacgaggcaccagccgtcctgttgtgctgtttggcattgctacctcaggaagttttggatatacagaataatctgtaccaaaccgcactccatctggccgttcacctcgatcagcctggagccgtccgggctctcgtactgaagggagcgagcagagcactccaagaccggcacggggatactgcgttgcatgtggcatgccagcgccaacatctagcatgtgctagatgtcttttagaaggccggcccgagccaggtaggggaacatcacatagcttagatctgcagctccagaattggcagggactcgcttgtctacatatcgctacactacagaaaaaccagcctctcatggaactcctgcttcgcaatggggccgatattgacgtccaagaaggaacgagtgggaaaactgcactccatcttgccgtcgagactcaggaacgcggcctggtacagttcctgctgcaggccggtgctcaggtggacgcaaggatgctcaacggctgcactcctttgcatctggccgccggcaggggtctgatgggcattagttccaccctctgcaaggctggtgctgactcattactaaggaacgttgaggatgagactccacaggacttgaccgaagaatccctggtcttactcccctttgatgatttgaagattagtgggaagctgctgttgtgcaccgattag

SEQ ID NO: 147502 - DNA, 306 bp, Artificial Sequence
  derived and/or modified sequence
gagggcaccagcggcaagaccgccctgcacctggccgtggagacccaggagcggggccttgtgcagtttcttctgcaagccggcgctcaggttgatgcaaggatgctgaacgggtgtacaccactgcatctcgctgctggccggggtctcatggggattagttctacactctgcaaggcaggagctgacagcctgttacgaaacgtcgaggacgaaacgccacaggaccttactgaggagtccctagtgctgcttcccttcgatgatcttaagatatcgggaaaactgttgttatgcacggactag

SEQ ID NO: 147503 - DNA, 1503 bp, Artificial Sequence
  derived and/or modified sequence
atgaaccagcgaagatctgaaagcaggccagggaaccacaggttgcaggcgtacgccgagcctggaaaaggagacagcgggggtgccggacccctgtccggcagtgcccgacgcggacgaggagggggaggagcaattcgggttcggagaccatgttggagcgggggagcgggaaggggcggtggccctgcttgggccgtgcgccttcctaccgttacagcgggatggacgtggcctgctcttcgcacactcagcagtctgcgcgctggcccttccgaaccacatagccccggtaggaggcctccgagggcgggacgccctctctgccaggccgacccccaacccggaaaggccgcaaggcgcagtctggagccagatcccgctcagacgggtccccgtcctgctagagccgctggcatgtcagaagctaggaaagggccagatgaggcggaggagagtcaatacgatagtggaattgaaagcctacgcagcctccggagcctgccggaatcgacaagcgcgccagccagtggcccttcagatggatctccacaaccatgtactcacccaccaggtccggtcaaagaaccccaagaaaaagaagatgccgacggcgaaagggccgattccacctacggatcttcctccctaacatataccctttctttactcgggggaccagaggccgaggatccagcgcctcggctgcctctcccccacgtcggcgctcttagcccacagcagctggaggccctgacgtacatctcggaagacggagacacacttgtccacttagccgttatccatgaagccccagctgtgttactgtgttgtctagccctgcttccccaggaggttctggatattcaaaataacttgtaccagacagcccttcacttggcagtgcacctggatcagcctggcgcagtgcgcgcactggtgcttaagggcgctagtagagcacttcaagatagacatggggatacagccttgcatgtcgcgtgtcagcgccagcacctggcgtgcgccaggtgcctcctcgagggtcgccctgagccaggcagaggcacctcgcattccctcgacttgcagttgcaaaattggcagggattggcctgccttcatattgcaacactgcaaaaaaatcagcccctgatggagctgctgcttcgcaatggtgcagacattgatgttcaggagggaacctcaggcaagaccgctctgcaccttgctgttgagacgcaagaacgcggactggtgcaatttttgctccaagccggtgcacaagtggacgctcgcatgctgaacggctgcacccccctgcacctagcagcagggagagggcttatggggataagtagtacgctctgtaaggcaggcgctgattcccttctgcgaaacgttgaggatgagacgccccaagatcttacagaggagtctctggtgctgttaccattcgatgacctcaaaatctctggaaagctgctcctatgcactgattag

SEQ ID NO: 147504 - DNA, 306 bp, Artificial Sequence
  derived and/or modified sequence
gagggtaccagcggcaagaccgctctccaccttgctgtagaaacccaggaaagaggtcttgtacagttcttgctgcaagccggagcccaggtggacgctaggatgctcaatggctgtacgcctctccatttggctgcgggtagggggctgatgggaatctcctctaccctgtgcaaagcaggggcagatagcctacttagaaatgtcgaggacgagaccccccaggatctgacagaagaatcgctggttttgctaccatttgacgatctgaaaatctccggaaaactgcttctgtgtacagattag

SEQ ID NO: 147505 - DNA, 1210 bp, Artificial Sequence
  derived and/or modified sequence
gagggcaccagtggtaagacagcgctgcacctggctgtggaaacccaagagcggggcctggtacagttcctgctccaggctggtgcccaggtagatgcccgcatgctgaacgggtgcacacccctgcacctggcagctggccggggtctcatgggcatctcatccactctgtgcaaggcgggtgctgactccctgctgcggaatgtggaggatgagacgccccaggacctgactgaggaatcccttgtccttttgccctttgatgacctgaagatctcagggaaactgctgctgtgtaccgactgaagccagtacagtcctgagccgaggaggagggactgcaagtggaagagagccagtctggaaggaagagctttccaggtggacagggcttcttggaagacccccaaagccccaggtatcctgggtgaagcctgtttgcctctcttgaaaatggcaggtgctcttgttttacccatgttgggtcagcctgaaactgccaaccagtaggaagcatggactctcctgagtgagaagagactgaaataggagcaagcagaaccctgagaggtgtcccatcttattgctgttgaggaccctgaaacaccgttgtttaaagacttcacacagaaggctctgaactgagccactggggaagggaagtttcagtaacatgacactaaaatggcagagacgttaaaaaaagtttttcccttctagagctgttttgcgcgcatgcatgtctgtgtgcattggggctttttagacaggcctgccctgtgactttgtggtagaggcagagagaaggaaattgtcccctgagcacggtagggccttgctgggtggggtcagaggccagtagttccaggcctttctctgtgtccagcacagacccttgtccttgctgtggaaatgatgagggatggagggacaagaggaagaatgagaggacacacgccctggagccctcaccactgccctgggggttgccatctggaggagcctggggataagggtaacccagggaggctgggcacgagggagctgactccacgtttttccccccgttcctcaccttcgagggccctgctaggtcacccctatgctggcatgaagagcatggggcaataaaccagcacagtctctgaccacttggagcgtctcatccagtgagagagacagccgttaaaagcataaacatccaaataaa

SEQ ID NO: 147506 - DNA, 2540 bp, Artificial Sequence
  derived and/or modified sequence
atgaatcaacgaaggagtgagtcaaggcccgggaaccacagactccaagcctacgcagagcccgggaagggggattccggaggggcggggcctctttccggaagcgcccgccgggggcggggagggggcggggccatccgcgtgaggcgaccctgttggtccggaggggcggggcgaggaggaggacccgcttgggcggttcggctgcccacagtaaccgctgggtggacctggccagcgctccgaaccttgtcctcgctgcgcgccggcccctcggagccccacagcccgggaaggaggccgccgcgggccgggcgcccgctctgccaagcggacccgcaacccggaaaggcggcgcggcggagcctggagccggatcctgctcagaccgggccccggccggccagagccgcgggcatgtcggaggcgcggaaggggccggacgaggcggaggagagccagtacgactctggcattgagtctctgcgctctctgcgctccctacccgagtccacctcggctccagcctccgggccctcggacggcagcccccagccctgcacccatcctccgggacccgtcaaggaaccacaggagaaggaagacgcggatggggagcgggctgattccacctatggctcctcctcgctcacctacaccctgtccttgctggggggccccgaggctgaggacccggccccacgcctgccactcccccacgtgggggcgctgagccctcagcagctggaagcactcacttacatctccgaggacggagacacgctggtccacctggcagtgattcatgaggccccagcggtgctgctctgttgcctggctttgctgccccaggaggtcctggacattcaaaataacctttaccagacagcactccatctggctgtacatctggaccaaccgggcgcagttcgggcactggtgctgaagggggccagccgggcactacaggaccggcatggtgacacagcccttcatgtggcctgccagcgccagcacttggcctgtgcccgctgcctgctggaagggcggccagagccaggcagaggaacatctcactctctggacctccagctgcaaaactggcaaggtctggcttgtctccacattgccacccttcagaagaaccaaccactcatggaattgctgcttcggaatggagctgacattgatgtgcaggagggcaccagtggtaagacagcgctgcacctggctgtggaaacccaagagcggggcctggtacagttcctgctccaggctggtgcccaggtagatgcccgcatgctgaacgggtgcacacccctgcacctggcagctggccggggtctcatgggcatctcatccactctgtgcaaggcgggtgctgactccctgctgcggaatgtggaggatgagacgccccaggacctgactgaggaatcccttgtccttttgccctttgatgacctgaagatctcagggaaactgctgctgtgtaccgactgaagccaggcagggtctgggatcctcagggctccacctctccatctggaagccggagccataactgctgcagtttgggcccaggctatgtgctcttctggtgccctagggactgctgtggccagagcctggggccagccagtacagtcctgagccgaggaggagggactgcaagtggaagagagccagtctggaaggaagagctttccaggtggacagggcttcttggaagacccccaaagccccaggtatcctgggtgaagcctgtttgcctctcttgaaaatggcaggtgctcttgttttacccatgttgggtcagcctgaaactgccaaccagtaggaagcatggactctcctgagtgagaagagactgaaataggagcaagcagaaccctgagaggtgtcccatcttattgctgttgaggaccctgaaacaccgttgtttaaagacttcacacagaaggctctgaactgagccactggggaagggaagtttcagtaacatgacactaaaatggcagagacgttaaaaaaagtttttcccttctagagctgttttgcgcgcatgcatgtctgtgtgcattggggctttttagacaggcctgccctgtgactttgtggtagaggcagagagaaggaaattgtcccctgagcacggtagggccttgctgggtggggtcagaggccagtagttccaggcctttctctgtgtccagcacagacccttgtccttgctgtggaaatgatgagggatggagggacaagaggaagaatgagaggacacacgccctggagccctcaccactgccctgggggttgccatctggaggagcctggggataagggtaacccagggaggctgggcacgagggagctgactccacgtttttccccccgttcctcaccttcgagggccctgctaggtcacccctatgctggcatgaagagcatggggcaataaaccagcacagtctctgaccacttggagcgtctcatccagtgagagagacagccgttaaaagcataaacatccaaataaa

SEQ ID NO: 147507 - DNA, 1503 bp, Artificial Sequence
  derived and/or modified sequence
atgaaccagagaagaagcgagagcagacccggcaaccacagactgcaggcctacgccgagcccggcaagggcgacagcggcggcgccggccccctgagcggcagcgccagaagaggcagaggcggcggcggcgccatcagagtgagaagaccctgctggagcggcggcgccggcagaggcggcggccccgcctgggccgtgagactgcccaccgtgaccgccggctggacctggcccgccctgagaaccctgagcagcctgagagccggccccagcgagccccacagccccggcagaagaccccccagagccggcagacccctgtgccaggccgacccccagcccggcaaggccgccagaagaagcctggagcccgaccccgcccagaccggccccagacccgccagagccgccggcatgagcgaggccagaaagggccccgacgaggccgaggagagccagtacgacagcggcatcgagagcctgagaagcctgagaagcctgcccgagagcaccagcgcccccgccagcggccccagcgacggcagcccccagccctgcacccacccccccggccccgtgaaggagccccaggagaaggaggacgccgacggcgagagagccgacagcacctacggcagcagcagcctgacctacaccctgagcctgctgggcggccccgaggccgaggaccccgcccccagactgcccctgccccacgtgggcgccctgagcccccagcagctggaggccctgacctacatcagcgaggacggcgacaccctggtgcacctggccgtgatccacgaggcccccgccgtgctgctgtgctgcctggccctgctgccccaggaggtgctggacatccagaacaacctgtaccagaccgccctgcacctggccgtgcacctggaccagcccggcgccgtgagagccctggtgctgaagggcgccagcagagccctgcaggacagacacggcgacaccgccctgcacgtggcctgccagagacagcacctggcctgcgccagatgcctgctggagggcagacccgagcccggcagaggcaccagccacagcctggacctgcagctgcagaactggcagggcctggcctgcctgcacatcgccaccctgcagaagaaccagcccctgatggagctgctgctgagaaacggcgccgacatcgacgtgcaggagggcaccagcggcaagaccgccctgcacctggccgtggagacccaggagagaggcctggtgcagttcctgctgcaggccggcgcccaggtggacgccagaatgctgaacggctgcacccccctgcacctggccgccggcagaggcctgatgggcatcagcagcaccctgtgcaaggccggcgccgacagcctgctgagaaacgtggaggacgagaccccccaggacctgaccgaggagagcctggtgctgctgcccttcgacgacctgaagatcagcggcaagctgctgctgtgcaccgactag

SEQ ID NO: 147508 - protein, 2003 aa, Artificial Sequence
  derived and/or modified sequence
MQPPSLLLLLLLLLLLCVSVVRPRGLLCGSFPEPCANGGTCLSLSLGQGTCQCAPGFLGETCQFPDPCQNAQLCQNGGSCQALLPAPLGLPSSPSPLTPSFLCTCLPGFTGERCQAKLEDPCPPSFCSKRGRCHIQASGRPQCSCMPGWTGEQCQLRDFCSANPCVNGGVCLATYPQIQCHCPPGFEGHACERDVNECFQDPGPCPKGTSCHNTLGSFQCLCPVGQEGPRCELRAGPCPPRGCSNGGTCQLMPEKDSTFHLCLCPPGFIGPDCEVNPDNCVSHQCQNGGTCQDGLDTYTCLCPETWTGWDCSEDVDECETQGPPHCRNGGTCQNSAGSFHCVCVSGWGGTSCEENLDDCIAATCAPGSTCIDRVGSFSCLCPPGRTGLLCHLEDMCLSQPCHGDAQCSTNPLTGSTLCLCQPGYSGPTCHQDLDECLMAQQGPSPCEHGGSCLNTPGSFNCLCPPGYTGSRCEADHNECLSQPCHPGSTCLDLLATFHCLCPPGLEGQLCEVETNECASAPCLNHADCHDLLNGFQCICLPGFSGTRCEEDIDECRSSPCANGGQCQDQPGAFHCKCLPGFEGPRCQTEVDECLSDPCPVGASCLDLPGAFFCLCPSGFTGQLCEVPLCAPNLCQPKQICKDQKDKANCLCPDGSPGCAPPEDNCTCHHGHCQRSSCVCDVGWTGPECEAELGGCISAPCAHGGTCYPQPSGYNCTCPTGYTGPTCSEEMTACHSGPCLNGGSCNPSPGGYYCTCPPSHTGPQCQTSTDYCVSAPCFNGGTCVNRPGTFSCLCAMGFQGPRCEGKLRPSCADSPCRNRATCQDSPQGPRCLCPTVYTGGSCQTLMDLCAQKPCPRNSHCLQTGPSFHCLCLQGWTGPLCNLPLSSCQKAALSQGIDVSSLCHNGGLCVDSGPSYFCHCPPGFQGSLCQDHVNPCESRPCQNGATCMAQPSGYLCQCAPGYDGQNCSKELDACQSQPCHNHGTCTPKPGGFHCACPPGFVGLRCEGDVDECLDQPCHPTGTAACHSLANAFYCQCLPGHTGQWCEVEIDPCHSQPCFHGGTCEATAGSPLGFICHCPKGFEGPTCSHRAPSCGFHHCHHGGLCLPSPKPGFPPRCACLSGYGGPDCLTPPAPKGCGPPSPCLYNGSCSETTGLGGPGFRCSCPHSSPGPRCQKPGAKGCEGRSGDGACDAGCSGPGGNWDGGDCSLGVPDPWKGCPSHSRCWLLFRDGQCHPQCDSEECLFDGYDCETPPACTPAYDQYCHDHFHNGHCEKGCNTAECGWDGGDCRPEDGDPEWGPSLALLVVLSPPALDQQLFALARVLSLTLRVGLWVRKDRDGRDMVYPYPGARAEEKLGGTRDPTYQERAAPQTQPLGKETDSLSAGFVVVMGVDLSRCGPDHPASRCPWDPGLLLRFLAAMAAVGALEPLLPGPLLAVHPHAGTAPPANQLPWPVLCSPVAGVILLALGALLVLQLIRRRRREHGALWLPPGFTRRPRTQSAPHRRRPPLGEDSIGLKALKPKAEVDEDGVVMCSGPEEGEEVGQAEETGPPSTCQLWSLSGGCGALPQAAMLTPPQESEMEAPDLDTRGPDGVTPLMSAVCCGEVQSGTFQGAWLGCPEPWEPLLDGGACPQAHTVGTGETPLHLAARFSRPTAARRLLEAGANPNQPDRAGRTPLHAAVAADAREVCQLLLRSRQTAVDARTEDGTTPLMLAARLAVEDLVEELIAAQADVGARDKWGKTALHWAAAVNNARAARSLLQAGADKDAQDNREQTPLFLAAREGAVEVAQLLLGLGAARELRDQAGLAPADVAHQRNHWDLLTLLEGAGPPEARHKATPGREAGPFPRARTVSVSVPPHGGGALPRCRTLSAGAGPRGGGACLQARTWSVDLAARGGGAYSHCRSLSGVGAGGGPTPRGRRFSAGMRGPRPNPAIMRGRYGVAAGRGGRVSTDDWPCDWVALGACGSASNIPIPPPCLTPSPERGSPQLDCGPPALQEMPINQGGEGKK

SEQ ID NO: 147509 - protein, 186 aa, Artificial Sequence
  derived and/or modified sequence
MSAVCCGEVQSGTFQGAWLGCPEPWEPLLDGGACPQAHTVGTGETPLHLAARFSRPTAARRLLEAGANPNQPDRAGRTPLHAAVAADAREVCQLLLRSRQTAVDARTEDGTTPLMLAARLAVEDLVEELIAAQADVGARDKWGADAAIPGGAGRSGGSSPATAGAGGSPRAAGPGWASAGGRRSPT

SEQ ID NO: 147510 - protein, 2003 aa, Artificial Sequence
  derived and/or modified sequence
MQPPSLLLLLLLLLLLCVSVVRPRGLLCGSFPEPCANGGTCLSLSLGQGTCQCAPGFLGETCQFPDPCQNAQLCQNGGSCQALLPAPLGLPSSPSPLTPSFLCTCLPGFTGERCQAKLEDPCPPSFCSKRGRCHIQASGRPQCSCMPGWTGEQCQLRDFCSANPCVNGGVCLATYPQIQCHCPPGFEGHACERDVNECFQDPGPCPKGTSCHNTLGSFQCLCPVGQEGPRCELRAGPCPPRGCSNGGTCQLMPEKDSTFHLCLCPPGFIGPDCEVNPDNCVSHQCQNGGTCQDGLDTYTCLCPETWTGWDCSEDVDECETQGPPHCRNGGTCQNSAGSFHCVCVSGWGGTSCEENLDDCIAATCAPGSTCIDRVGSFSCLCPPGRTGLLCHLEDMCLSQPCHGDAQCSTNPLTGSTLCLCQPGYSGPTCHQDLDECLMAQQGPSPCEHGGSCLNTPGSFNCLCPPGYTGSRCEADHNECLSQPCHPGSTCLDLLATFHCLCPPGLEGQLCEVETNECASAPCLNHADCHDLLNGFQCICLPGFSGTRCEEDIDECRSSPCANGGQCQDQPGAFHCKCLPGFEGPRCQTEVDECLSDPCPVGASCLDLPGAFFCLCPSGFTGQLCEVPLCAPNLCQPKQICKDQKDKANCLCPDGSPGCAPPEDNCTCHHGHCQRSSCVCDVGWTGPECEAELGGCISAPCAHGGTCYPQPSGYNCTCPTGYTGPTCSEEMTACHSGPCLNGGSCNPSPGGYYCTCPPSHTGPQCQTSTDYCVSAPCFNGGTCVNRPGTFSCLCAMGFQGPRCEGKLRPSCADSPCRNRATCQDSPQGPRCLCPTGYTGGSCQTLMDLCAQKPCPRNSHCLQTGPSFHCLCLQGWTGPLCNLPLSSCQKAALSQGIDVSSLCHNGGLCVDSGPSYFCHCPPGFQGSLCQDHVNPCESRPCQNGATCMAQPSGYLCQCAPGYDGQNCSKELDACQSQPCHNHGTCTPKPGGFHCACPPGFVGLRCEGDVDECLDQPCHPTGTAACHSLANAFYCQCLPGHTGQWCEVEIDPCHSQPCFHGGTCEATAGSPLGFICHCPKGFEGPTCSHRAPSCGFHHCHHGGLCLPSPKPGFPPRCACLSGYGGPDCLTPPAPKGCGPPSPCLYNGSCSETTGLGGPGFRCSCPHSSPGPRCQKPGAKGCEGRSGDGACDAGCSGPGGNWDGGDCSLGVPDPWKGCPSHSRCWLLFRDGQCHPQCDSEECLFDGYDCETPPACTPAYDQYCHDHFHNGHCEKGCNTAECGWDGGDCRPEDGDPEWGPSLALLVVLSPPALDQQLFALARVLSLTLRVGLWVRKDRDGRDMVYPYPGARAEEKLGGTRDPTYQERAAPQTQPLGKETDSLSAGFVVVMGVDLSRCGPDHPASRCPWDPGLLLRFLAAMAAVGALEPLLPGPLLAVHPHAGTAPPANQLPWPVLCSPVAGVILLALGALLVLQLIRRRRREHGALWLPPGFTRRPRTQSAPHRRRPPLGEDSIGLKALKPKAEVDEDGVVMCSGPEEGEEVGQAEETGPPSTCQLWSLSGGCGALPQAAMLTPPQESEMEAPDLDTRGPDGVTPLMSAVCCGEVQSGTFQGAWLGCPEPWEPLLDGGACPQAHTVGTGETPLHLAARFSRPTAARRLLEAGANPNQPDRAGRTPLHAAVAADAREVCQLLLRSRQTAVDARTEDGTTPLMLAARLAVEDLVEELIAAQADVGARDKWGKTALHWAAAVNNARAARSLLQAGADKDAQDNREQTPLFLAAREGAVEVAQLLLGLGAARELRDQAGLAPADVAHQRNHWDLLTLLEGAGPPEARHKATPGREAGPFPRARTVSVSVPPHGGGALPRCRTLSAGAGPRGGGACLQARTWSVDLAARGGGAYSHCRSLSGVGAGGGPTPRGRRFSAGMRGPRPNPAIMRGRYGVAAGRGGRVSTDDWPCDWVALGACGSASNIPIPPPCLTPSPERGSPQLDCGPPALQEMPINQGGEGKK

SEQ ID NO: 147511 - protein, 1048 aa, Artificial Sequence
  derived and/or modified sequence
CAPGYDGQNCSKELDACQSQPCHNHGTCTPKPGGFHCACPPGFVGLRCEGDVDECLDQPCHPTGTAACHSLANAFYCQCLPGHTGQWCEVEIDPCHSQPCFHGGTCEATAGSPLGFICHCPKGFEGPTCSHRAPSCGFHHCHHGGLCLPSPKPGFPPRCACLSGYGGPDCLTPPAPKGCGPPSPCLYNGSCSETTGLGGPGFRCSCPHSSPGPRCQKPGAKGCEGRSGDGACDAGCSGPGGNWDGGDCSLGVPDPWKGCPSHSRCWLLFRDGQCHPQCDSEECLFDGYDCETPPACTPAYDQYCHDHFHNGHCEKGCNTAECGWDGGDCRPEDGDPEWGPSLALLVVLSPPALDQQLFALARVLSLTLRVGLWVRKDRDGRDMVYPYPGARAEEKLGGTRDPTYQERAAPQTQPLGKETDSLSAGFVVVMGVDLSRCGPDHPASRCPWDPGLLLRFLAAMAAVGALEPLLPGPLLAVHPHAGTAPPANQLPWPVLCSPVAGVILLALGALLVLQLIRRRRREHGALWLPPGFTRRPRTQSAPHRRRPPLGEDSIGLKALKPKAEVDEDGVVMCSGPEEGEEVGQAEETGPPSTCQLWSLSGGCGALPQAAMLTPPQESEMEAPDLDTRGPDGVTPLMSAVCCGEVQSGTFQGAWLGCPEPWEPLLDGGACPQAHTVGTGETPLHLAARFSRPTAARRLLEAGANPNQPDRAGRTPLHAAVAADAREVCQLLLRSRQTAVDARTEDGTTPLMLAARLAVEDLVEELIAAQADVGARDKWGKTALHWAAAVNNARAARSLLQAGADKDAQDNREQTPLFLAAREGAVEVAQLLLGLGAARELRDQAGLAPADVAHQRNHWDLLTLLEGAGPPEARHKATPGREAGPFPRARTVSVSVPPHGGGALPRCRTLSAGAGPRGGGACLQARTWSVDLAARGGGAYSHCRSLSGVGAGGGPTPRGRRFSAGMRGPRPNPAIMRGRYGVAAGRGGRVSTDDWPCDWVALGACGSASNIPIPPPCLTPSPERGSPQLDCGPPALQEMPINQGGEGKK

SEQ ID NO: 147512 - protein, 2005 aa, Artificial Sequence
  derived and/or modified sequence
MQPPSLLLLLLLLLLLLLCVSVVRPRGLLCGSFPEPCANGGTCLSLSLGQGTCQCAPGFLGETCQFPDPCQNAQLCQNGGSCQALLPAPLGLPSSPSPLTPSFLCTCLPGFTGERCQAQLEDPCPPSFCSKRGRCHIQASGRPQCSCMPGWTGEQCQLRDFCSANPCVNGGVCLATYPQIQCHCPPGFEGHACERDVNECFQDPGPCPKGTSCHNTLGSFQCLCPVGQEGPRCELRAGPCPPRGCSNGGTCQLMPEKDSTFHLCLCPPGFIGPDCEVNPDNCVSHQCQNGGTCQDGLDTYTCLCPETWTGWDCSEDVDECEAQGPPHCRNGGTCQNSAGSFHCVCVSGWGGTSCEENLDDCIAATCAPGSTCIDRVGSFSCLCPPGRTGLLCHLEDMCLSQPCHGDAQCSTNPLTGSTLCLCQPGYSGPTCHQDLDECLMAQQGPSPCEHGGSCLNTPGSFNCLCPPGYTGSRCEADHNECLSQPCHPGSTCLDLLATFHCLCPPGLEGQLCEVETNECASAPCLNHADCHDLLNGFQCICLPGFSGTRCEEDIDECRSSPCANGGQCQDQPGAFHCKCLPGFEGPRCQTEVDECLSDPCPVGASCLDLPGAFFCLCPSGFTGQLCEVPLCAPNLCQPKQICKDQKDKANCLCPDGSPGCAPPEDNCTCHHGHCQRSSCVCDVGWTGPECEAELGGCISAPCAHGGTCYPQPSGYNCTCPTGYTGPTCSEEMTACHSGPCLNGGSCNPSPGGYYCTCPPSHTGPQCQTSTDYCVSAPCFNGGTCVNRPGTFSCLCAMGFQGPRCEGKLRPSCADSPCRNRATCQDSPQGPRCLCPTGYTGGSCQTLMDLCAQKPCPRNSHCLQTGPSFHCLCLQGWTGPLCNLPLSSCQKAALSQGIDVSSLCHNGGLCVDSGPSYFCHCPPGFQGSLCQDHVNPCESRPCQNGATCMAQPSGYLCQCAPGYDGQNCSKELDACQSQPCHNHGTCTPKPGGFHCACPPGFVGLRCEGDVDECLDQPCHPTGTAACHSLANAFYCQCLPGHTGQWCEVEIDPCHSQPCFHGGTCEATAGSPLGFICHCPKGFEGPTCSHRAPSCGFHHCHHGGLCLPSPKPGFPPRCACLSGYGGPDCLTPPAPKGCGPPSPCLYNGSCSETTGLGGPGFRCSCPHSSPGPRCQKPGAKGCEGRSGDGACDAGCSGPGGNWDGGDCSLGVPDPWKGCPSHSRCWLLFRDGQCHPQCDSEECLFDGYDCETPPACTPAYDQYCHDHFHNGHCEKGCNTAECGWDGGDCRPEDGDPEWGPSLALLVVLSPPALDQQLFALARVLSLTLRVGLWVRKDRDGRDMVYPYPGARAEEKLGGTRDPTYQERAAPQTQPLGKETDSLSAGFVVVMGVDLSRCGPDHPASRCPWDPGLLLRFLAAMAAVGALEPLLPGPLLAVHPHAGTAPPANQLPWPVLCSPVAGVILLALGALLVLQLIRRRRREHGALWLPPGFTRRPRTQSAPHRRRPPLGEDSIGLKALKPKAEVDEDGVVMCSGPEEGEEVGQAEETGPPSTCQLWSLSGGCGALPQAAMLTPPQESEMEAPDLDTRGPDGVTPLMSAVCCGEVQSGTFQGAWLGCPEPWEPLLDGGACPQAHTVGTGETPLHLAARFSRPTAARRLLEAGANPNQPDRAGRTPLHAAVAADAREVCQLLLRSRQTAVDARTEDGTTPLMLAARLAVEDLVEELIAAQADVGARDKWGKTALHWAAAVNNARAARSLLQAGADKDAQDNREQTPLFLAAREGAVEVAQLLLGLGAARELRDQAGLAPADVAHQRNHWDLLTLLEGAGPPEARHKATPGREAGPFPRARTVSVSVPPHGGGALPRCRTLSAGAGPRGGGACLQARTWSVDLAARGGGAYSHCRSLSGVGAGGGPTPRGRRFSAGMRGPRPNPAIMRGRYGVAAGRGGRVSTDDWPCDWVALGACGSASNIPIPPPCLTPSPERGSPQLDCGPPALQEMPINQGGEGKK

SEQ ID NO: 147513 - protein, 2003 aa, Artificial Sequence
  derived and/or modified sequence
MQPPSLLLLLLLLLLLCVSVVRPRGLLCGSFPEPCANGGTCLSLSLGQGTCQCAPGFLGETCQFPDPCQNAQLCQNGGSCQALLPAPLGLPSSPSPLTPSFLCTCLPGFTGERCQAQLEDPCPPSFCSKRGRCHIQASGRPQCSCMPGWTGEQCQLRDFCSANPCVNGGVCLATYPQIQCHCPPGFEGHACERDVNECFQDPGPCPKGTSCHNTLGSFQCLCPVGQEGPRCELRAGPCPPRGCSNGGTCQLMPEKDSTFHLCLCPPGFIGPDCEVNPDNCVSHQCQNGGTCQDGLDTYTCLCPETWTGWDCSEDVDECETQGPPHCRNGGTCQNSAGSFHCVCVSGWGGTSCEENLDDCIAATCAPGSTCIDRVGSFSCLCPPGRTGLLCHLEDMCLSQPCHGDAQCSTNPLTGSTLCLCQPGYSGPTCHQDLDECLMAQQGPSPCEHGGSCLNTPGSFNCLCPPGYTGSRCEADHNECLSQPCHPGSTCLDLLATFHCLCPPGLEGQLCEVETNECASAPCLNHADCHDLLNGFQCICLPGFSGTRCEEDIDECRSSPCANGGQCQDQPGAFHCKCLPGFEGPRCQTEVDECLSDPCPVGASCLDLPGAFFCLCPSGFTGQLCEVPLCAPNLCQPKQICKDQKDKANCLCPDGSPGCAPPEDNCTCHHGHCQRSSCVCDVGWTGPECEAELGGCISAPCAHGGTCYPQPSGYNCTCPTGYTGPTCSEEMTACHSGPCLNGGSCNPSPGGYYCTCPPSHTGPQCQTSTDYCVSAPCFNGGTCVNRPGTFSCLCAMGFQGPRCEGKLRPSCADSPCRNRATCQDSPQGPRCLCPTGYTGGSCQTLMDLCAQKPCPRNSHCLQTGPSFHCLCLQGWTGPLCNLPLSSCQKAALSQGIDVSSLCHNGGLCVDSGPSYFCHCPPGFQGSLCQDHVNPCESRPCQNGATCMAQPSGYLCQCAPGYDGQNCSKELDACQSQPCHNHGTCTPKPGGFHCACPPGFVGLRCEGDVDECLDQPCHPTGTAACHSLANAFYCQCLPGHTGQWCEVEIDPCHSQPCFHGGTCEATAGSPLGFICHCPKGFEGPTCSHRAPSCGFHHCHHGGLCLPSPKPGFPPRCACLSGYGGPDCLTPPAPKGCGPPSPCLYNGSCSETTGLGGPGFRCSCPHSSPGPRCQKPGAKGCEGRSGDGACDAGCSGPGGNWDGGDCSLGVPDPWKGCPSHSRCWLLFRDGQCHPQCDSEECLFDGYDCETPPACTPAYDQYCHDHFHNGHCEKGCNTAECGWDGGDCRPEDGDPEWGPSLALLVVLSPPALDQQLFALARVLSLTLRVGLWVRKDRDGRDMVYPYPGARAEEKLGGTRDPTYQERAAPQTQPLGKETDSLSAGFVVVMGVDLSRCGPDHPASRCPWDPGLLLRFLAAMAAVGALEPLLPGPLLAVHPHAGTAPPANQLPWPVLCSPVAGVILLALGALLVLQLIRRRRREHGALWLPPGFTRRPRTQSAPHRRRPPLGEDSIGLKALKPKAEVDEDGVVMCSGPEEGEEVGQAEETGPPSTCQLWSLSGGCGALPQAAMLTPPQESEMEAPDLDTRGPDGVTPLMSAVCCGEVQSGTFQGAWLGCPEPWEPLLDGGACPQAHTVGTGETPLHLAARFSRPTAARRLLEAGANPNQPDRAGRTPLHAAVAADAREVCQLLLRSRQTAVDARTEDGTTPLMLAARLAVEDLVEELIAAQADVGARDKWGKTALHWAAAVNNARAARSLLQAGADKDAQDNREQTPLFLAAREGAVEVAQLLLGLGAARELRDQAGLAPADVAHQRNHWDLLTLLEGAGPPEARHKATPGREAGPFPRARTVSVSVPPHGGGALPRCRTLSAGAGPRGGGACLQARTWSVDLAARGGGAYSHCRSLSGVGAGGGPTPRGRRFSAGMRGPRPNPAIMRGRYGVAAGRGGRVSTDDWPCDWVALGACGSASNIPIPPPCLTPSPERGSPQLDCGPPALQEMPINQGGEGKK

SEQ ID NO: 147514 - protein, 2002 aa, Artificial Sequence
  derived and/or modified sequence
MQPPSLLLLLLLLLLCVSVVRPRGLLCGSFPEPCANGGTCLSLSLGQGTCQCAPGFLGETCQFPDPCQNAQLCQNGGSCQALLPAPLGLPSSPSPLTPSFLCTCLPGFTGERCQAQLEDPCPPSFCSKRGRCHIQASGRPQCSCMPGWTGEQCQLRDFCSANPCVNGGVCLATYPQIQCHCPPGFEGHACERDVNECFQDPGPCPKGTSCHNTLGSFQCLCPVGQEGPRCELRAGPCPPRGCSNGGTCQLMPEKDSTFHLCLCPPGFIGPDCEVNPDNCVSHQCQNGGTCQDGLDTYTCLCPETWTGWDCSEDVDECETQGPPHCRNGGTCQNSAGSFHCVCVSGWGGTSCEENLDDCIAATCAPGSTCIDRVGSFSCLCPPGRTGLLCHLEDMCLSQPCHGDAQCSTNPLTGSTLCLCQPGYSGPTCHQDLDECLMAQQGPSPCEHGGSCLNTPGSFNCLCPPGYTGSRCEADHNECLSQPCHPGSTCLDLLATFHCLCPPGLEGQLCEVETNECASAPCLNHADCHDLLNGFQCICLPGFSGTRCEEDIDECRSSPCANGGQCQDQPGAFHCKCLPGFEGPRCQTEVDECLSDPCPVGASCLDLPGAFFCLCPSGFTGQLCEVPLCAPNLCQPKQICKDQKDKANCLCPDGSPGCAPPEDNCTCHHGHCQRSSCVCDVGWTGPECEAELGGCISAPCAHGGTCYPQPSGYNCTCPTGYTGPTCSEEMTACHSGPCLNGGSCNPSPGGYYCTCPPSHTGPQCQTSTDYCVSAPCFNGGTCVNRPGTFSCLCAMGFQGPRCEGKLRPSCADSPCRNRATCQDSPQGPRCLCPTGYTGGSCQTLMDLCAQKPCPRNSHCLQTGPSFHCLCLQGWTGPLCNLPLSSCQKAALSQGIDVSSLCHNGGLCVDSGPSYFCHCPPGFQGSLCQDHVNPCESRPCQNGATCMAQPSGYLCQCAPGYDGQNCSKELDACQSQPCHNHGTCTPKPGGFHCACPPGFVGLRCEGDVDECLDQPCHPTGTAACHSLANAFYCQCLPGHTGQWCEVEIDPCHSQPCFHGGTCEATAGSPLGFICHCPKGFEGPTCSHRAPSCGFHHCHHGGLCLPSPKPGFPPRCACLSGYGGPDCLTPPAPKGCGPPSPCLYNGSCSETTGLGGPGFRCSCPHSSPGPRCQKPGAKGCEGRSGDGACDAGCSGPGGNWDGGDCSLGVPDPWKGCPSHSRCWLLFRDGQCHPQCDSEECLFDGYDCETPPACTPAYDQYCHDHFHNGHCEKGCNTAECGWDGGDCRPEDGDPEWGPSLALLVVLSPPALDQQLFALARVLSLTLRVGLWVRKDRDGRDMVYPYPGARAEEKLGGTRDPTYQERAAPQTQPLGKETDSLSAGFVVVMGVDLSRCGPDHPASRCPWDPGLLLRFLAAMAAVGALEPLLPGPLLAVHPHAGTAPPANQLPWPVLCSPVAGVILLALGALLVLQLIRRRRREHGALWLPPGFTRRPRTQSAPHRRRPPLGEDSIGLKALKPKAEVDEDGVVMCSGPEEGEEVGQAEETGPPSTCQLWSLSGGCGALPQAAMLTPPQESEMEAPDLDTRGPDGVTPLMSAVCCGEVQSGTFQGAWLGCPEPWEPLLDGGACPQAHTVGTGETPLHLAARFSRPTAARRLLEAGANPNQPDRAGRTPLHAAVAADAREVCQLLLRSRQTAVDARTEDGTTPLMLAARLAVEDLVEELIAAQADVGARDKWGKTALHWAAAVNNARAARSLLQAGADKDAQDNREQTPLFLAAREGAVEVAQLLLGLGAARELRDQAGLAPADVAHQRNHWDLLTLLEGAGPPEARHKATPGREAGPFPRARTVSVSVPPHGGGALPRCRTLSAGAGPRGGGACLQARTWSVDLAARGGGAYSHCRSLSGVGAGGGPTPRGRRFSAGMRGPRPNPAIMRGRYGVAAGRGGRVSTDDWPCDWVALGACGSASNIPIPPPCLTPSPERGSPQLDCGPPALQEMPINQGGEGKK

SEQ ID NO: 147515 - DNA, 6012 bp, Artificial Sequence
  derived and/or modified sequence
atgcagccccccagcctgctgctgctgctgctgctgctgctgctgctgtgcgtgagcgtggtgagacccagaggcctgctgtgcggcagcttccccgagccctgcgccaacggcggcacctgcctgagcctgagcctgggccagggcacctgccagtgcgcccccggcttcctgggcgagacctgccagttccccgacccctgccagaacgcccagctgtgccagaacggcggcagctgccaggccctgctgcccgcccccctgggcctgcccagcagccccagccccctgacccccagcttcctgtgcacctgcctgcccggcttcaccggcgagagatgccaggccaagctggaggacccctgcccccccagcttctgcagcaagagaggcagatgccacatccaggccagcggcagaccccagtgcagctgcatgcccggctggaccggcgagcagtgccagctgagagacttctgcagcgccaacccctgcgtgaacggcggcgtgtgcctggccacctacccccagatccagtgccactgcccccccggcttcgagggccacgcctgcgagagagacgtgaacgagtgcttccaggaccccggcccctgccccaagggcaccagctgccacaacaccctgggcagcttccagtgcctgtgccccgtgggccaggagggccccagatgcgagctgagagccggcccctgcccccccagaggctgcagcaacggcggcacctgccagctgatgcccgagaaggacagcaccttccacctgtgcctgtgcccccccggcttcatcggccccgactgcgaggtgaaccccgacaactgcgtgagccaccagtgccagaacggcggcacctgccaggacggcctggacacctacacctgcctgtgccccgagacctggaccggctgggactgcagcgaggacgtggacgagtgcgagacccagggccccccccactgcagaaacggcggcacctgccagaacagcgccggcagcttccactgcgtgtgcgtgagcggctggggcggcaccagctgcgaggagaacctggacgactgcatcgccgccacctgcgcccccggcagcacctgcatcgacagagtgggcagcttcagctgcctgtgcccccccggcagaaccggcctgctgtgccacctggaggacatgtgcctgagccagccctgccacggcgacgcccagtgcagcaccaaccccctgaccggcagcaccctgtgcctgtgccagcccggctacagcggccccacctgccaccaggacctggacgagtgcctgatggcccagcagggccccagcccctgcgagcacggcggcagctgcctgaacacccccggcagcttcaactgcctgtgcccccccggctacaccggcagcagatgcgaggccgaccacaacgagtgcctgagccagccctgccaccccggcagcacctgcctggacctgctggccaccttccactgcctgtgcccccccggcctggagggccagctgtgcgaggtggagaccaacgagtgcgccagcgccccctgcctgaaccacgccgactgccacgacctgctgaacggcttccagtgcatctgcctgcccggcttcagcggcaccagatgcgaggaggacatcgacgagtgcagaagcagcccctgcgccaacggcggccagtgccaggaccagcccggcgccttccactgcaagtgcctgcccggcttcgagggccccagatgccagaccgaggtggacgagtgcctgagcgacccctgccccgtgggcgccagctgcctggacctgcccggcgccttcttctgcctgtgccccagcggcttcaccggccagctgtgcgaggtgcccctgtgcgcccccaacctgtgccagcccaagcagatctgcaaggaccagaaggacaaggccaactgcctgtgccccgacggcagccccggctgcgccccccccgaggacaactgcacctgccaccacggccactgccagagaagcagctgcgtgtgcgacgtgggctggaccggccccgagtgcgaggccgagctgggcggctgcatcagcgccccctgcgcccacggcggcacctgctacccccagcccagcggctacaactgcacctgccccaccggctacaccggccccacctgcagcgaggagatgaccgcctgccacagcggcccctgcctgaacggcggcagctgcaaccccagccccggcggctactactgcacctgcccccccagccacaccggcccccagtgccagaccagcaccgactactgcgtgagcgccccctgcttcaacggcggcacctgcgtgaacagacccggcaccttcagctgcctgtgcgccatgggcttccagggccccagatgcgagggcaagctgagacccagctgcgccgacagcccctgcagaaacagagccacctgccaggacagcccccagggccccagatgcctgtgccccaccgtgtacaccggcggcagctgccagaccctgatggacctgtgcgcccagaagccctgccccagaaacagccactgcctgcagaccggccccagcttccactgcctgtgcctgcagggctggaccggccccctgtgcaacctgcccctgagcagctgccagaaggccgccctgagccagggcatcgacgtgagcagcctgtgccacaacggcggcctgtgcgtggacagcggccccagctacttctgccactgcccccccggcttccagggcagcctgtgccaggaccacgtgaacccctgcgagagcagaccctgccagaacggcgccacctgcatggcccagcccagcggctacctgtgccagtgcgcccccggctacgacggccagaactgcagcaaggagctggacgcctgccagagccagccctgccacaaccacggcacctgcacccccaagcccggcggcttccactgcgcctgcccccccggcttcgtgggcctgagatgcgagggcgacgtggacgagtgcctggaccagccctgccaccccaccggcaccgccgcctgccacagcctggccaacgccttctactgccagtgcctgcccggccacaccggccagtggtgcgaggtggagatcgacccctgccacagccagccctgcttccacggcggcacctgcgaggccaccgccggcagccccctgggcttcatctgccactgccccaagggcttcgagggccccacctgcagccacagagcccccagctgcggcttccaccactgccaccacggcggcctgtgcctgcccagccccaagcccggcttcccccccagatgcgcctgcctgagcggctacggcggccccgactgcctgaccccccccgcccccaagggctgcggcccccccagcccctgcctgtacaacggcagctgcagcgagaccaccggcctgggcggccccggcttcagatgcagctgcccccacagcagccccggccccagatgccagaagcccggcgccaagggctgcgagggcagaagcggcgacggcgcctgcgacgccggctgcagcggccccggcggcaactgggacggcggcgactgcagcctgggcgtgcccgacccctggaagggctgccccagccacagcagatgctggctgctgttcagagacggccagtgccacccccagtgcgacagcgaggagtgcctgttcgacggctacgactgcgagaccccccccgcctgcacccccgcctacgaccagtactgccacgaccacttccacaacggccactgcgagaagggctgcaacaccgccgagtgcggctgggacggcggcgactgcagacccgaggacggcgaccccgagtggggccccagcctggccctgctggtggtgctgagcccccccgccctggaccagcagctgttcgccctggccagagtgctgagcctgaccctgagagtgggcctgtgggtgagaaaggacagagacggcagagacatggtgtacccctaccccggcgccagagccgaggagaagctgggcggcaccagagaccccacctaccaggagagagccgccccccagacccagcccctgggcaaggagaccgacagcctgagcgccggcttcgtggtggtgatgggcgtggacctgagcagatgcggccccgaccaccccgccagcagatgcccctgggaccccggcctgctgctgagattcctggccgccatggccgccgtgggcgccctggagcccctgctgcccggccccctgctggccgtgcacccccacgccggcaccgccccccccgccaaccagctgccctggcccgtgctgtgcagccccgtggccggcgtgatcctgctggccctgggcgccctgctggtgctgcagctgatcagaagaagaagaagagagcacggcgccctgtggctgccccccggcttcaccagaagacccagaacccagagcgccccccacagaagaagaccccccctgggcgaggacagcatcggcctgaaggccctgaagcccaaggccgaggtggacgaggacggcgtggtgatgtgcagcggccccgaggagggcgaggaggtgggccaggccgaggagaccggcccccccagcacctgccagctgtggagcctgagcggcggctgcggcgccctgccccaggccgccatgctgacccccccccaggagagcgagatggaggcccccgacctggacaccagaggccccgacggcgtgacccccctgatgagcgccgtgtgctgcggcgaggtgcagagcggcaccttccagggcgcctggctgggctgccccgagccctgggagcccctgctggacggcggcgcctgcccccaggcccacaccgtgggcaccggcgagacccccctgcacctggccgccagattcagcagacccaccgccgccagaagactgctggaggccggcgccaaccccaaccagcccgacagagccggcagaacccccctgcacgccgccgtggccgccgacgccagagaggtgtgccagctgctgctgagaagcagacagaccgccgtggacgccagaaccgaggacggcaccacccccctgatgctggccgccagactggccgtggaggacctggtggaggagctgatcgccgcccaggccgacgtgggcgccagagacaagtggggcaagaccgccctgcactgggccgccgccgtgaacaacgccagagccgccagaagcctgctgcaggccggcgccgacaaggacgcccaggacaacagagagcagacccccctgttcctggccgccagagagggcgccgtggaggtggcccagctgctgctgggcctgggcgccgccagagagctgagagaccaggccggcctggcccccgccgacgtggcccaccagagaaaccactgggacctgctgaccctgctggagggcgccggcccccccgaggccagacacaaggccacccccggcagagaggccggccccttccccagagccagaaccgtgagcgtgagcgtgcccccccacggcggcggcgccctgcccagatgcagaaccctgagcgccggcgccggccccagaggcggcggcgcctgcctgcaggccagaacctggagcgtggacctggccgccagaggcggcggcgcctacagccactgcagaagcctgagcggcgtgggcgccggcggcggccccacccccagaggcagaagattcagcgccggcatgagaggccccagacccaaccccgccatcatgagaggcagatacggcgtggccgccggcagaggcggcagagtgagcaccgacgactggccctgcgactgggtggccctgggcgcctgcggcagcgccagcaacatccccatcccccccccctgcctgacccccagccccgagagaggcagcccccagctggactgcggcccccccgccctgcaggagatgcccatcaaccagggcggcgagggcaagaagtag

SEQ ID NO: 147516 - DNA, 561 bp, Artificial Sequence
  derived and/or modified sequence
atgagcgccgtgtgctgcggcgaggtgcagagcggcaccttccagggcgcctggctgggctgccccgagccctgggagcccctgctggacggcggcgcctgcccccaggcccacaccgtgggcaccggcgagacccccctgcacctggccgccagattcagcagacccaccgccgccagaagactgctggaggccggcgccaaccccaaccagcccgacagagccggcagaacccccctgcacgccgccgtggccgccgacgccagagaggtgtgccagctgctgctgagaagcagacagaccgccgtggacgccagaaccgaggacggcaccacccccctgatgctggccgccagactggccgtggaggacctggtggaggagctgatcgccgcccaggccgacgtgggcgccagagacaagtggggcgccgacgccgccatccccggcggcgccggcagaagcggcggcagcagccccgccaccgccggcgccggcggcagccccagagccgccggccccggctgggccagcgccggcggcagaagaagccccacctag

SEQ ID NO: 147517 - DNA, 6012 bp, Artificial Sequence
  derived and/or modified sequence
atgcagccaccgtctctgctgttactgttactcctgttactgctactgtgtgtttcagtggtgaggccaagaggattgctgtgcggctctttcccggagccctgtgcaaacggaggtacttgtctctctttatctttgggccagggcacctgccaatgcgcccccggcttcctgggcgagacatgccaattcccggatccttgccagaatgctcagctgtgccaaaatggggggagttgtcaagcattgctgcctgctcccctcggactgccatcttctccttcacccttaaccccttcgttcctctgcacgtgtttgccaggattcacaggcgaacgctgtcaggcaaagctggaagacccctgccccccatcattttgtagcaagcggggaagatgtcatatccaggcatctggaagaccacagtgtagctgcatgccagggtggacaggtgagcaatgccagcttcgggacttctgctccgccaatccctgtgtcaatggtggtgtgtgtctggctacataccctcagattcagtgtcattgtcctcctggttttgaaggccacgcttgcgagcgggacgtgaatgaatgtttccaggaccccggcccctgtcctaaagggacgagctgccacaatacattgggctcattccagtgtctgtgcccggtaggccaggagggccctagatgtgaactcagggccggtccatgtccgcccaggggctgttccaacggcggcacttgtcagctcatgcctgaaaaggacagcacatttcacctttgcctgtgtccacctggattcatcggacccgactgtgaggtaaacccagacaactgtgtatcccatcagtgccagaatggaggcacatgtcaggatggcctggacacctacacgtgtctatgcccagagacatggaccgggtgggactgtagtgaagacgtggacgagtgcgagactcaagggccgccccactgtcgcaatggaggaacttgccagaatagcgctggctcttttcattgcgtttgcgtgtccggatggggcgggacctcatgcgaggaaaaccttgatgactgcatcgccgccacttgcgcacctggtagtacttgcatcgatagggtgggatcatttagctgtctttgccctcctggtcgcacaggcctactgtgtcatttggaggacatgtgtctttcacaaccttgccacggcgatgctcaatgtagcactaacccacttacagggtctactctgtgcttgtgtcagccaggatactcgggacccacctgccatcaggacttggacgagtgtttaatggcccagcagggaccgagtccctgtgaacatggcggaagctgtcttaacaccccaggatcgtttaactgcctgtgccctccagggtatactggctcccgttgcgaggctgatcataacgaatgtctgagccagccatgtcatcccggctctacgtgcctggacctcctagcaacatttcactgcctctgcccccccggtctagagggacaactatgtgaggtcgaaaccaatgagtgtgcgagcgctccatgcttaaatcatgctgactgccatgatctactaaatgggtttcagtgcatttgccttccgggattctctgggactagatgtgaggaagatatcgacgaatgcagatctagtccatgcgccaatgggggtcagtgccaggatcagcctggagcgtttcattgtaagtgcttgcctggattcgaaggaccaaggtgtcagaccgaggtggacgaatgtctgtccgatccctgccccgtcggtgcttcctgcctggatctccccggcgcttttttttgcctttgccctagcggatttacaggtcagctgtgcgaagtccccctttgtgcacccaacctctgccagcctaagcagatatgtaaggatcagaaggacaaggctaattgcttgtgccctgatggcagccctggatgcgccccacccgaagataactgcacctgccatcacggacactgtcagcgctctagctgtgtgtgtgatgtgggctggacaggcccagaatgcgaggctgagcttggcgggtgtattagtgccccttgtgcccatgggggtacctgctatcctcaaccaagcggttacaattgtacctgcccgactgggtataccggcccaacttgctcggaagagatgacagcttgccactctggaccttgtttgaatggaggttcttgtaatcctagccctggagggtattattgtacctgccctccatcccacactggaccccagtgtcaaacctctacagactactgtgtctccgctccctgctttaacggcggcacatgcgtgaataggcccggtacttttagttgcttatgcgctatgggctttcaggggccccgctgcgagggcaagctccgacccagctgtgcggatagcccttgtaggaatcgggccacatgtcaggactcaccccaggggcctaggtgtttgtgtcctacggtgtatacagggggaagctgtcaaactttgatggatctgtgcgcacaaaaaccctgccccagaaattcccattgcttacagaccggtccaagttttcactgtctgtgtttgcagggatggaccggccctctgtgtaatctgccactgtctagctgccagaaggccgccctgtcccaaggtatcgacgtgagttccctgtgccacaatggagggttgtgtgtcgattctggtccaagttacttctgccattgtccgcccggatttcagggctccctatgccaggaccatgtaaacccctgcgagagcagaccatgtcagaatggcgctacctgcatggcgcagccatctggttacctctgtcagtgtgctccaggatacgacggccagaattgctcgaaggaactggacgcctgccaatcacaaccttgtcacaatcatggcacatgtacccccaaacctggaggatttcattgcgcctgcccccccggattcgttggcctccgctgcgagggcgatgtcgatgaatgcctggaccagccttgtcaccccaccggaactgctgcatgccactccctggcaaacgctttttattgccagtgcttgcctggccacacggggcagtggtgcgaggtggaaattgatccttgtcatagccagccttgcttccacggcggcacctgcgaagcaacagccggatcgccactcggcttcatttgccattgcccaaaagggttcgaaggacccacttgctcacatcgagccccgagctgtggtttccaccattgccatcacggcggactgtgccttcctagtcctaaaccagggtttcccccgcgatgcgcatgtctgagcggctatgggggcccggattgcttgacacccccggccccgaaaggctgtggccctccatcaccatgcctgtacaacgggagttgtagtgagacgaccggtttagggggcccgggattccggtgctcttgtccccacagttctccgggaccaaggtgtcagaagcccggagcgaagggttgtgaggggcgttctggagatggcgcatgtgatgccggctgctccggacctggcggaaattgggacggaggcgactgctcacttggggtgcctgatccttggaaaggctgccctagccatagcaggtgctggctactgttcagagatggtcaatgtcatccccaatgcgacagcgaggagtgcttatttgatggatatgactgcgagaccccgccagcttgtactcccgcctatgaccagtactgccacgatcacttccacaatggccattgcgaaaaagggtgcaatactgctgagtgcgggtgggatggaggcgactgtcgtccggaagacggggacccagagtgggggccatctttagcactcctcgtggtgctgtcccccccagcactcgatcagcagttattcgccctcgccagagtgctgtcactcacactacgcgtcggactgtgggtcaggaaagaccgggacggaagagatatggtttacccatatcctggagcacgcgccgaagagaagctggggggtaccagagatcctacttaccaggagagggctgctcctcaaacccagcctttaggcaaagagactgacagcctgtccgccggatttgtcgtggtgatgggagttgacctgagccgatgtggtcctgaccaccccgcgtcacggtgtccatgggatcctggactactgctcagatttctcgctgcaatggcagccgtgggggcgctagaacctcttctgcccggccccctcctggctgtacatccccatgcagggacagcaccaccggccaatcagctgccttggcctgtgttgtgctctcccgtggctggcgtaatccttctggccctcggggccctcctagtgctgcaacttataagacggcggcggcgagagcacggagctctgtggctgcccccaggctttaccagaaggcctcgtactcagtcagcaccgcataggcgtcgaccgcctctaggtgaagacagcataggactaaaggcacttaagccaaaggcagaggtggatgaggacggggttgtgatgtgcagtggaccagaggagggcgaagaggtgggacaagctgaggagactggacccccctcaacatgccaattatggagcctgagcggcggatgcggtgccttaccacaggctgctatgttaactcctccacaggagtctgaaatggaggcccccgacctggacacccgcggcccggacggagttacccctttgatgtccgcagtttgttgcggggaggtgcagtcagggactttccagggcgcttggctgggatgtcccgagccatgggaacctctactcgatggaggagcctgtccgcaggcacacaccgtcggcacaggagagacacccctgcacttggccgcccgtttttcccgtccaacagctgctcggcggctgctggaagctggcgctaatcccaatcagcccgaccgggccgggagaactccactgcatgcggctgtcgcagcggacgcaagagaggtgtgccaactcctgttgaggagcagacaaacagcggtagacgccagaacagaggacggtacaacaccactgatgctagccgctagactggcagtagaagatctggttgaggagcttatcgcggctcaggcggacgtgggagctagagataagtggggtaaaacagctttgcattgggctgcggccgtcaataatgcgagggccgccaggtccctgctgcaggccggtgcggacaaagatgcccaagacaaccgggagcagaccccactgttcctcgcggcccgagagggggccgtggaggtcgcccagctgttgttaggtctgggggcagctcgtgagctacgtgatcaggccggtctcgctcctgctgacgtggcgcaccagcgcaatcactgggatttgttaaccctgctcgaaggcgccgggccccccgaagcgcgacacaaggccacccccggcagggaggcaggcccctttcctcgagctaggactgtctcagttagcgttccgccacatggaggtggcgctctgcctagatgtcggactttgtcggccggcgccggacctcgtggcggcggcgcatgtttacaggcccgcacctggtccgtggacctcgctgcacgcggtggtggagcctactcacattgtcgctcgcttagcggcgtcggtgctgggggcggacctacccctcgaggaaggaggttcagtgcaggtatgagaggtccgagacctaatcccgccatcatgaggggcagatacggcgtcgccgctggacgggggggacgggtgagtactgacgattggccttgcgattgggtcgcactgggagcttgtggcagcgcctcaaacattccgatccctcccccctgcctcaccccaagccccgagcgtgggtccccacaactggactgtggaccgcctgctctccaggagatgcccatcaaccagggaggagagggcaagaagtag

SEQ ID NO: 147518 - DNA, 561 bp, Artificial Sequence
  derived and/or modified sequence
atgtccgctgtctgctgtggagaagtacagtctggaacctttcagggtgcttggttgggttgcccagagccatgggagcctttgctggatggcggggcatgtcctcaggcccacactgttggaaccggcgagacaccactacaccttgctgcacgcttttccaggcctaccgcggcccggcgcttactggaagcaggagccaatccaaaccagcctgaccgggccggcagaacccctttgcacgcagctgtggcagcagacgctagggaggtgtgtcaactgctgttaagaagcagacagaccgccgttgatgcgagaacagaggacggcacaacgccacttatgctggccgcccgtctggcagtggaagacctggtggaggagttgatcgcagcccaggcagacgttggagcccgcgacaaatggggcgccgatgctgcaataccaggtggtgctggtcgcagcggggggtcaagccccgcaacggccggcgccggcggctctccccgggctgcaggtccaggttgggcctcggcggggggtcgtagatcacccacttag

SEQ ID NO: 147519 - DNA, 6012 bp, Artificial Sequence
  derived and/or modified sequence
atgcagccccccagcctgctgctgctgctgctgctgctgctgctgctgtgtgtgtctgtggtgcggccccggggcctgctgtgtggcagcttccctgagccctgtgccaatggaggcacctgcctgagcctgagcctgggccagggcacctgccagtgtgcccctggcttcctgggggagacctgccagttcccagacccctgccagaatgcccagctgtgccagaatggaggcagctgccaggccctgctgcctgcccccctgggcctgcccagcagccccagccccctgacccccagcttcctgtgcacctgcctgcccggcttcaccggggagcgctgccaggccaagctggaggacccctgccccccatccttctgcagcaagaggggccgctgccacatccaggccagcggccggccccagtgcagctgcatgcctggctggacaggagagcagtgccagctgcgggacttctgcagcgccaacccctgtgtgaatggaggagtgtgcctggccacctacccccagatccagtgccactgccccccaggctttgagggccacgcctgtgaaagagatgtgaatgaatgcttccaggaccccggcccctgccccaagggcaccagctgccacaacaccctgggcagcttccagtgcctgtgccctgtgggccaggagggcccccgctgtgagctgcgggccggcccctgccccccccggggctgcagcaatggaggcacctgccagctgatgcctgagaaggacagcaccttccacctgtgcctgtgccccccaggcttcatcggccctgactgtgaggtgaacccagacaactgtgtgagccaccagtgccagaatggaggcacctgccaggacggcctggacacctacacctgcctgtgcccagagacctggacaggctgggactgcagtgaagatgtggatgaatgtgagacccagggccccccccactgcagaaatggaggcacctgccagaacagcgctggcagcttccactgtgtgtgtgtgtctggctggggcggcaccagctgtgaggagaacctggatgactgcatcgccgccacctgtgcccctggcagcacctgcatcgacagagtgggcagcttcagctgcctgtgccccccaggccgcacaggcctgctgtgccacctggaggacatgtgcctgagccagccctgccacggagatgcccagtgcagcaccaaccccctgaccggcagcaccctgtgcctgtgccagcccggctacagcggccccacctgccaccaggacctggatgaatgtctgatggcccagcagggccccagcccctgtgagcacggcggcagctgcctgaacaccccaggcagcttcaactgcctgtgccccccaggctacacaggcagccgctgtgaggccgaccacaatgaatgtctgagccagccctgccaccctggcagcacctgcctggacctgctggccaccttccactgcctgtgccccccaggcctggagggccagctgtgtgaggtggagaccaatgaatgtgccagcgccccctgcctgaaccacgccgactgccacgacctgctgaatggcttccagtgcatctgcctgcccggcttcagcggcacccgctgtgaggaggacattgatgagtgccgcagcagcccctgtgccaacggcggccagtgccaggaccagcccggggccttccactgcaagtgcctgcccggctttgagggcccccgctgccagacagaggtggatgagtgcctgagtgacccctgccctgtgggcgccagctgcctggacctgcccggggccttcttctgcctgtgccccagcggcttcaccggccagctgtgtgaggtgcccctgtgtgcccccaacctgtgccagcccaagcagatctgcaaggaccagaaggacaaggccaactgcctgtgcccagatggcagccctggctgtgcccctcctgaggacaactgcacctgccaccacggccactgccagaggagcagctgtgtgtgtgatgtgggctggacaggcccagaatgtgaggccgagctgggcggctgcatcagcgccccctgtgcccacggcggcacctgctacccccagcccagcggctacaactgcacctgccccaccggctacacaggccccacctgcagcgaggagatgacagcctgccacagcggcccctgcctgaatggaggcagctgcaaccccagccctgggggctactactgcacctgcccccccagccacacaggcccccagtgccagaccagcacagactactgtgtgtctgccccctgcttcaacggcggcacctgtgtgaaccggcccggcaccttcagctgcctgtgtgccatgggcttccagggcccccgctgtgagggcaagctgcggcccagctgtgccgacagcccctgcaggaacagagccacctgccaggacagcccccagggcccccgctgcctgtgccccaccgtgtacacaggaggcagctgccagaccctgatggacctgtgtgcccagaagccctgccccaggaacagccactgcctgcagacaggccccagcttccactgcctgtgcctgcagggctggacaggccccctgtgcaacctgcccctgagcagctgccagaaggccgccctgagccagggcattgatgtgagcagcctgtgccacaatggaggcctgtgtgtggacagcggccccagctacttctgccactgccccccaggcttccagggcagcctgtgccaggaccacgtgaacccctgtgagagccggccctgccagaatggagccacctgcatggcccagcccagcggctacctgtgccagtgtgcccctggctatgatggccagaactgcagcaaggagctggatgcctgccagagccagccctgccacaaccacggcacctgcacccccaagccaggcggcttccactgtgcctgccccccaggctttgtgggcctgcgctgtgaaggagatgtggatgaatgtctggaccagccctgccaccccaccggcacagctgcctgccacagcctggccaatgccttctactgccagtgcctgcccggccacacaggccagtggtgtgaggtggagattgacccctgccacagccagccctgcttccatggaggcacctgtgaggccacagctggcagccccctgggcttcatctgccactgccccaagggctttgagggccccacctgcagccaccgggcccccagctgtggcttccaccactgccaccacggcggcctgtgcctgcccagccccaagccaggcttccccccaagatgtgcctgcctgagcggctacggcggccctgactgcctgaccccaccagcccccaagggctgcggcccccccagcccctgcctgtacaacggcagctgcagcgagaccaccggcctgggcggccctggcttccgctgcagctgcccccacagcagccctggcccccgctgccagaagccaggggccaagggctgtgagggccgctctggagatggagcctgtgatgctggctgcagcggccctgggggcaactgggatggaggagactgcagcctgggcgtgcctgacccctggaagggctgccccagccacagccgctgctggctgctcttcagagatggccagtgccacccccagtgtgacagtgaagaatgtctgtttgatggctatgactgtgagaccccaccagcctgcaccccagcctatgaccagtactgccacgaccacttccacaacggccactgtgagaagggctgcaacacagcagaatgtggctgggatggaggagactgcaggccagaagatggagaccctgagtggggccccagcctggccctgctggtggtgctgagccccccagccctggaccagcagctgtttgccctggcccgggtgctgagcctgaccctgcgggtgggcctgtgggtgaggaaggacagagatggccgggacatggtgtacccctacccaggggcccgggcagaggagaagctgggcggcacccgggaccccacctaccaggagagagctgccccccagacccagcccctgggcaaggagacagacagcctgtctgctggctttgtggtggtgatgggcgtggacctgagccgctgtggccctgaccacccagccagccgctgcccctgggaccccggcctgctgctgcgcttcctggccgccatggctgctgtgggcgccctggagcccctgctgcccggccccctgctggccgtgcacccccacgccggcacagcccccccagccaaccagctgccctggcctgtgctgtgcagccctgtggccggggtcatcctgctggccctgggcgccctgctggtgctgcagctgatcagaagaagaagaagagagcacggggccctgtggctgcccccaggcttcacccggcggcccaggacccagagcgccccccacagaagaagaccacccctgggggaggacagcatcggcctgaaggccctgaagcccaaggccgaggtggatgaagatggagtggtgatgtgcagcggccctgaggagggggaggaggtgggccaggccgaggagactggaccacccagcacctgccagctgtggagcctgagcggcggctgtggggccctgccccaggccgccatgctgaccccaccccaggagagcgagatggaggccccagacctggacacccggggcccagatggagtgacccccctgatgtctgctgtgtgctgcggggaggtgcagagcggcaccttccagggcgcctggctgggctgcccagagccctgggagcccctgctggatggaggagcctgcccccaggcccacacagtgggcactggagagacccccctgcacctggccgcccgcttcagccggcccacagctgcccggcggctgctggaggccggggccaaccccaaccagcctgaccgggccggccgcacccccctgcatgctgctgtggccgcagatgcccgggaggtgtgccagctgctgctgcggagccggcagacagctgtggatgccaggacagaagatggcaccacccccctgatgctggccgcccggctggccgtggaggacctggtggaggagctgattgctgcccaggctgatgtgggcgcccgggacaagtggggcaagacagccctgcactgggccgctgctgtgaacaatgcccgggccgcccggagcctgctgcaggccggggctgacaaggatgcccaggacaaccgggagcagacccccctcttcctggccgcccgggagggcgctgtggaggtggcccagctgctgctgggcctgggcgccgcccgggagctgcgggaccaggccggcctggccccagcagatgtggcccaccagaggaaccactgggacctgctgaccctgctggagggcgccggccccccagaggcccggcacaaggccaccccaggccgggaggccggccccttcccccgggccaggacagtgtctgtgtctgtgccccctcatggaggaggagccctgccccgctgcaggaccctgtctgctggggccggcccccggggcggcggggcctgcctgcaggcccggacctggagcgtggacctggccgcccggggcggcggggcctacagccactgccgcagcctgtctggagtgggcgccggcggcggccccaccccccggggccgccgcttctctgctggcatgaggggcccccggcccaacccagccatcatgaggggccgctatggagtggccgccggccggggcggccgggtgtccacagatgactggccctgtgactgggtggccctgggcgcctgtggcagcgccagcaacatccccatccccccaccctgcctgacccccagccctgagcggggcagcccccagctggactgtggccccccagccctgcaggagatgcccatcaaccagggcggggagggcaagaagtag

SEQ ID NO: 147520 - DNA, 561 bp, Artificial Sequence
  derived and/or modified sequence
atgtctgctgtgtgctgcggggaggtgcagagcggcaccttccagggcgcctggctgggctgcccagagccctgggagcccctgctggatggaggagcctgcccccaggcccacacagtgggcaccggggagacccccctgcacctggccgcccgcttcagccggcccacagctgcccggcggctgctggaggccggggccaaccccaaccagcctgacagagctggccgcacccccctgcacgccgctgtggccgcagatgcccgggaggtgtgccagctgctgctgcggagccggcagacagctgtggatgccaggacagaagatggcaccacccccctgatgctggccgcccggctggccgtggaggacctggtggaggagctgattgctgcccaggctgatgtgggcgcccgggacaagtggggcgcagatgctgccatccctggaggagctggccgcagcggcggcagcagccctgccacagctggagctgggggcagccccagggctgctggccctggctgggccagcgctgggggccgccgcagccccacctag

SEQ ID NO: 147521 - DNA, 6012 bp, Artificial Sequence
  derived and/or modified sequence
atgcagccccccagcctgctgctgctgctgctgctgctgctgctgctttgtgtcagcgttgtgagaccacgcgggcttctgtgcggatcattccctgagccatgtgccaacggcggcacctgcctgagtctcagcctcggtcagggtacttgtcagtgcgccccaggctttctgggggagacatgtcagtttccagacccgtgccaaaacgcccaattatgccaaaatggcggaagctgtcaagccctgctgcctgcccccctggggctccctagcagcccaagcccgctgacaccttcttttctgtgcacctgtctccccgggtttacaggagaacgctgccaggccaagcttgaggacccatgcccgcccagcttctgcagtaagcgcgggagatgccacattcaggccagtggaaggccccagtgcagctgtatgcccggctggacaggtgagcagtgccagcttagggacttttgctctgccaatccttgtgtgaacggtggggtgtgtctcgcaacctacccacagatacagtgccattgccccccggggtttgaggggcatgcttgtgagagagatgtgaatgagtgcttccaggaccctggaccctgccccaagggaacttcctgtcacaatactctgggctcttttcagtgtttatgtccagtggggcaagagggaccccggtgcgaattgagagctggtccgtgccccccaaggggctgctcgaacggtgggacctgtcagctgatgcccgagaaagattccacatttcacctgtgcctgtgccctcccggattcatcggccccgactgcgaagtgaacccagataattgcgtgtctcaccaatgccaaaacggcggaacctgtcaggacggtcttgatacctatacatgcctctgcccagaaacatggacagggtgggattgttctgaagatgtggatgagtgcgagactcagggcccaccacattgccgaaatggaggtacctgccagaacagcgccggctccttccattgcgtctgcgtgagcgggtggggaggaacctcctgcgaagaaaatctcgacgactgtattgccgcaacttgtgcccccggctccacatgcattgatagagtcggcagcttctcttgtctttgtcctcctgggagaactggcttgctgtgtcacctggaggacatgtgcctaagccagccttgtcacggtgacgcccagtgctctacgaacccgctaacaggctctacactgtgtctgtgccagccgggttactctggccccacttgtcatcaagacctggatgaatgtctgatggcgcagcagggcccctccccgtgcgagcatggcggatcgtgtctcaacacaccaggttcatttaattgtctgtgcccacctggttacacaggcagccgttgtgaagccgaccacaatgagtgcctttcacaaccatgtcacccagggtccacctgtctagaccttctggctacctttcactgtttgtgtccccctggcctcgaaggtcagctctgtgaagtggaaaccaatgagtgcgcttcagccccatgtctcaaccatgccgactgtcacgatcttctgaatggctttcagtgtatctgtctgcctggtttcagcggaactagatgcgaagaagacatcgatgaatgtagaagctcaccatgcgcgaatgggggccaatgccaggaccagccgggtgcttttcactgtaaatgcctgccagggttcgaaggcccccgctgtcagaccgaggtggacgagtgcctgagcgacccgtgccccgtgggtgcttcatgtctcgatctgcccggagcctttttttgcttgtgcccatccggatttactggacaactctgtgaggtccctctgtgtgcgcccaacttgtgccagcctaaacagatttgcaaggaccagaaagacaaagcaaactgcttatgccccgatgggtcccccggctgcgctcctcctgaggataattgtacttgtcaccacgggcattgtcagagatcgtcatgcgtctgtgacgtgggctggacaggtcccgagtgtgaagccgaactgggcgggtgtatcagcgcaccatgcgcgcacggcggaacttgctacccacagccgagcggatacaactgcacttgtccgacaggatacacaggacccacatgctcggaagaaatgacggcttgtcactctggaccatgtctcaatggcggttcctgtaacccaagccccggaggttattactgcacctgcccaccaagccacaccggccctcagtgtcaaacaagtaccgattattgcgtgagcgcaccttgcttcaacggaggaacatgcgtgaatcgcccaggtactttctcatgtctgtgtgccatgggctttcaggggccccggtgtgagggtaagttaagacctagttgcgccgattccccttgtagaaaccgcgccacttgccaggatagtccccaggggcccaggtgtctctgtccgacagtgtacactggggggtcatgtcagactttgatggacctctgcgcccagaagccatgcccaagaaactctcactgcctccagacagggccgagtttccattgtttatgcctgcaagggtggaccggtccgctgtgcaatttacccctttcctcctgccaaaaagccgccctctcccaagggattgatgtgtcatcactgtgccacaacgggggactctgtgtggactcggggccatcctacttttgtcactgccctcctggctttcaagggagtctgtgccaagatcatgtcaatccttgtgaatcaaggccctgtcagaatggagccacctgcatggcacaaccctcaggctacctgtgccagtgcgccccaggctacgatgggcagaattgttccaaggagctggatgcctgccagtcccaaccttgccacaatcatggaacttgtactcccaagccaggtggttttcattgtgcttgccctcctggttttgtagggctgcggtgtgaaggagatgttgacgagtgcttagaccaaccttgtcaccccactgggactgcagcttgtcacagcttggccaatgccttctattgccaatgcctgccagggcatacaggtcagtggtgcgaagtggagattgacccttgtcattctcagccctgcttccatggaggtacctgcgaggcgacagccggctctccactcggattcatctgtcattgccccaagggattcgagggtccgacctgtagccaccgcgctcctagctgtggctttcatcactgccaccatggagggttatgtctcccatctcctaagcctggattccccccacgttgcgcatgtctgagtgggtacggggggcctgattgcctcacacccccagcgccaaagggttgcgggccaccaagcccttgcctgtacaacgggagctgttccgagaccacaggcctgggcggcccagggtttaggtgctcgtgccctcattcgagtcctggcccccgatgtcagaagccaggcgctaagggctgcgagggccggtcaggggacggagcctgcgatgcgggttgctccggtccaggcggcaactgggacggaggcgattgcagccttggcgtgcctgacccctggaaggggtgcccatctcactcaagatgctggctcctctttcgcgacggccagtgccacccccagtgcgattcagaggagtgcctctttgatgggtatgactgcgagacccctcccgcttgtaccccagcctatgatcagtactgccacgatcattttcacaacggacactgtgagaaaggctgtaataccgctgagtgcggctgggatggcggagattgtcgccccgaggacggcgaccctgaatgggggcccagcttggccctgcttgtagtgctttctccacccgcgctggaccaacagttgtttgccctcgcccgcgtcctaagtctaactctgcgcgtaggcctgtgggtccgcaaagacagagacggacgcgatatggtgtatccttacccgggggctcgggcagaggaaaaactagggggaaccagggaccccacctaccaggagagggctgccccacagacccagcccctgggcaaggaaactgattccttgtcagccggttttgtggttgtgatgggcgtggacctttctagatgcggcccagatcacccagcttcaagatgtccatgggatccaggcctcctgctgcgttttctcgctgcaatggccgcagtcggcgccctcgaacctttactgccagggcctctcctagccgtgcatccccacgcaggaaccgctccacccgctaaccagcttccttggccagtcctttgttcaccggtggctggggttattttgcttgcgttaggtgccttgctggtgctgcaactgattcgaagacggcggagggagcacggggctctttggctgcctcccggattcactcggcgtccccgcacacagtctgcccctcacaggaggaggcctcccctgggcgaagattccatcgggttaaaggccctgaagcctaaggcggaggtggacgaggacggagtggtgatgtgcagcggacctgaagagggcgaggaggtggggcaggccgaagagacaggccctccttcaacctgccagctttggtcactgtcggggggatgtggagctctccctcaagcagccatgttgactccgccacaggagagcgaaatggaggccccggacttagacacccgaggtcctgacggcgtcacgcctctgatgagcgcagtgtgctgtggggaagtccagtcaggcacctttcagggcgcctggttggggtgccctgagccttgggagcccctccttgacggcggtgcctgtcctcaggcacacaccgtcggaaccggcgaaacccccctccacctggcagctcgcttctcacggccaacggccgctcgaagactcctggaagctggcgcaaatccaaatcagcccgatcgagccggacggaccccactgcacgccgcagtcgcagcagacgcaagagaagtgtgtcagctgctgttgcgatccaggcagacagccgtagatgcccggacagaggacggaacaacaccactgatgctggctgctaggctcgccgtcgaagatttggtcgaggaattgatagccgctcaggccgatgtgggcgccagagacaaatggggaaagacagccctccactgggccgcagctgtcaataatgcacgagcagctagaagcctactgcaggcaggtgctgacaaggacgctcaggataacagagagcagacgcctcttttcttggccgcgcgcgagggcgccgtggaggtcgcccagctcctgctgggcctgggcgcggccagggagctacgcgaccaggctggtctggcacctgcagacgtcgctcatcagaggaaccactgggacctgctgactctcttggaaggcgccggcccccctgaggcccgtcacaaggcaactcccggtagagaggctggccctttcccccgagcccgaaccgtctcagtgtcggtccccccccacggtggaggtgccttacccaggtgcagaactctctctgcaggggcgggacctaggggtgggggggcgtgcctgcaagcacgaacgtggagcgtcgacctggctgcccgcggggggggggcatatagccactgtcgctcgctcagcggcgtgggggccggaggaggaccaacaccacgcggaaggaggttctccgctggcatgcgtggcccacggcccaaccccgccattatgaggggaagatatggcgttgccgccgggcggggaggaagagtctccaccgatgattggccatgcgactgggtggcactgggcgcctgcgggtccgcttctaatatacccatccctcctccctgtctcacgccatcccccgaacgaggaagtccacaactagattgcgggccgccggctttgcaggaaatgccaattaatcagggcggcgaggggaagaaatag

SEQ ID NO: 147522 - DNA, 561 bp, Artificial Sequence
  derived and/or modified sequence
atgagcgccgtgtgctgcggcgaggtgcagagcggcaccttccagggggcatggctgggatgtcctgagccatgggagcccctgctggatggcggggcctgcccgcaggctcacaccgtcggcactggagagacccctctgcaccttgctgcccggttttctcggcccaccgctgcacggcggctgctggaagccggagccaatcccaatcaaccagaccgtgcgggtcgcacacctctacacgctgccgtcgcggcagacgctagggaggtgtgtcagttattactgcgatctcgtcagacagctgtggatgccaggacagaagacggcactaccccactgatgctcgccgccagactggccgttgaagacttagtagaggagctgatagctgcccaggccgatgtgggcgcgcgggacaagtggggcgcagacgcggccatccctggaggcgcggggagaagtggggggtcctcaccagccacagcaggcgcaggtgggtccccacgagcagccggacccggctgggcctcagcaggtgggagaagaagcccaacttag

SEQ ID NO: 147523 - DNA, 6745 bp, Artificial Sequence
  derived and/or modified sequence
agacgtgaggcttgcagcaggccgaggaggaagaagaggggcagtgggagcagaggaggtggctcctgccccagtgagagctctgagggtccctgcctgaagagggacagggaccggggcttggagaaggggctgtggaatgcagcccccttcactgctgctgctgctgctgctgctgctgctgctatgtgtctcagtggtcagacccagagggctgctgtgtgggagtttcccagaaccctgtgccaatggaggcacctgcctgagcctgtctctgggacaagggacctgccagtgtgcccctggcttcctgggtgagacgtgccagtttcctgacccctgccagaacgcccagctctgccaaaatggaggcagctgccaagccctgcttcctgctcccctagggctccccagctctccctctccattgacacccagcttcttgtgcacttgcctccctggcttcactggtgagagatgccaggccaagcttgaagacccttgtcctccctccttctgttccaaaaggggccgctgccacatccaggcctcgggccgcccacagtgctcctgcatgcctggatggacaggtgagcagtgccagcttcgggacttctgttcagccaacccatgtgttaatggaggggtgtgtctggccacatacccccagatccagtgccactgcccaccgggcttcgagggccatgcctgtgaacgtgatgtcaacgagtgcttccaggacccaggaccctgccccaaaggcacctcctgccataacaccctgggctccttccagtgcctctgccctgtggggcaggagggtccacgttgtgagctgcgggcaggaccctgccctcctaggggctgttcgaatgggggcacctgccagctgatgccagagaaagactccacctttcacctctgcctctgtcccccaggtttcataggcccagactgtgaggtgaatccagacaactgtgtcagccaccagtgtcagaatgggggcacttgccaggatgggctggacacctacacctgcctctgcccagaaacctggacaggctgggactgctccgaagatgtggatgagtgtgagacccagggtccccctcactgcagaaacgggggcacctgccagaactctgctggtagctttcactgcgtgtgtgtgagtggctggggcggcacaagctgtgaggagaacctggatgactgtattgctgccacctgtgccccgggatccacctgcattgaccgggtgggctctttctcctgcctctgcccacctggacgcacaggactcctgtgccacttggaagacatgtgtctgagccagccgtgccatggggatgcccaatgcagcaccaaccccctcacaggctccacactctgcctgtgtcagcctggctattcggggcccacctgccaccaggacctggacgagtgtctgatggcccagcaaggcccaagtccctgtgaacatggcggttcctgcctcaacactcctggctccttcaactgcctctgtccacctggctacacaggctcccgttgtgaggctgatcacaatgagtgcctctcccagccctgccacccaggaagcacctgtctggacctacttgccaccttccactgcctctgcccgccaggcttagaagggcagctctgtgaggtggagaccaacgagtgtgcctcagctccctgcctgaaccacgcggattgccatgacctgctcaacggcttccagtgcatctgcctgcctggattctccggcacccgatgtgaggaggatatcgatgagtgcagaagctctccctgtgccaatggtgggcagtgccaggaccagcctggagccttccactgcaagtgtctcccaggctttgaagggccacgctgtcaaacagaggtggatgagtgcctgagtgacccatgtcccgttggagccagctgccttgatcttccaggagccttcttttgcctctgcccctctggtttcacaggccagctctgtgaggttcccctgtgtgctcccaacctgtgccagcccaagcagatatgtaaggaccagaaagacaaggccaactgcctctgtcctgatggaagccctggctgtgccccacctgaggacaactgcacctgccaccacgggcactgccagagatcctcatgtgtgtgtgacgtgggttggacggggccagagtgtgaggcagagctagggggctgcatctctgcaccctgtgcccatggggggacctgctacccccagccctctggctacaactgcacctgccctacaggctacacaggacccacctgtagtgaggagatgacagcttgtcactcagggccatgtctcaatggcggctcctgcaaccctagccctggaggctactactgcacctgccctccaagccacacagggccccagtgccaaaccagcactgactactgtgtgtctgccccgtgcttcaatgggggtacctgtgtgaacaggcctggcaccttctcctgcctctgtgccatgggcttccagggcccgcgctgtgagggaaagctccgccccagctgtgcagacagcccctgtaggaatagggcaacctgccaggacagccctcagggtccccgctgcctctgccccactgtctacaccggaggcagctgccagactctgatggacttatgtgcccagaagccctgcccacgcaattcccactgcctccagactgggccctccttccactgcttgtgcctccagggatggaccgggcctctctgcaaccttccactgtcctcctgccagaaggctgcactgagccaaggcatagacgtctcttccctttgccacaatggaggcctctgtgtcgacagcggcccctcctatttctgccactgcccccctggattccaaggcagcctgtgccaggatcacgtgaacccatgtgagtccaggccttgccagaacggggccacctgcatggcccagcccagtgggtatctctgccagtgtgccccaggctacgatggacagaactgctcaaaggaactcgatgcttgtcagtcccaaccctgtcacaaccatggaacctgtactcccaaacctggaggcttccactgtgcctgccctccaggctttgtggggctacgctgtgagggagacgtggacgagtgtctggaccagccctgccaccccacaggcactgcagcctgccactctctggccaatgccttctactgccagtgtctgcctggacacacaggccagtggtgtgaggtggagatagacccctgccacagccaaccctgctttcatggagggacctgtgaggccacagcaggatcacccctgggtttcatctgccactgccccaagggttttgaaggccccacctgcagccacagggccccttcctgcggcttccatcactgccaccacggaggcctgtgtctgccctcccctaagccaggcttcccaccacgctgtgcctgcctcagtggctatgggggtcctgactgcctgaccccaccagctcctaaaggctgtggccctccctccccatgcctatacaatggcagctgctcagagaccacgggcttggggggcccaggctttcgatgctcctgccctcacagctctccagggccccggtgtcagaaacccggagccaaggggtgtgagggcagaagtggagatggggcctgcgatgctggctgcagtggcccgggaggaaactgggatggaggggactgctctctgggagtcccagacccctggaagggctgcccctcccactctcggtgctggcttctcttccgggacgggcagtgccacccacagtgtgactctgaagagtgtctgtttgatggctacgactgtgagacccctccagcctgcactccagcctatgaccagtactgccatgatcacttccacaacgggcactgtgagaaaggctgcaacactgcagagtgtggctgggatggaggtgactgcaggcctgaagatggggacccagagtgggggccctccctggccctgctggtggtactgagccccccagccctagaccagcagctgtttgccctggcccgggtgctgtccctgactctgagggtaggactctgggtaaggaaggatcgtgatggcagggacatggtgtacccctatcctggggcccgggctgaagaaaagctaggaggaactcgggaccccacctatcaggagagagcagcccctcaaacgcagcccctgggcaaggagaccgactccctcagtgctgggtttgtggtggtcatgggtgtggatttgtcccgctgtggccctgaccacccggcatcccgctgtccctgggaccctgggcttctactccgcttccttgctgcgatggctgcagtgggagccctggagcccctgctgcctggaccactgctggctgtccaccctcatgcagggaccgcaccccctgccaaccagcttccctggcctgtgctgtgctccccagtggccggggtgattctcctggccctaggggctcttctcgtcctccagctcatccggcgtcgacgccgagagcatggagctctctggctgccccctggtttcactcgacggcctcggactcagtcagctccccaccgacgccggcccccactaggcgaggacagcattggtctcaaggcactgaagccaaaggcagaagttgatgaggatggagttgtgatgtgctcaggccctgaggagggagaggaggtgggccaggctgaagaaacaggcccaccctccacgtgccagctctggtctctgagtggtggctgtggggcgctccctcaggcagccatgctaactcctccccaggaatctgagatggaagcccctgacctggacacccgtggacctgatggggtgacacccctgatgtcagcagtttgctgtggggaagtacagtccgggaccttccaaggggcatggttgggatgtcctgagccctgggaacctctgctggatggaggggcctgtccccaggctcacaccgtgggcactggggagacccccctgcacctggctgcccgattctcccggccaaccgctgcccgccgcctccttgaggctggagccaaccccaaccagccagaccgggcagggcgcacaccccttcatgctgctgtggctgctgatgctcgggaggtctgccagcttctgctccgtagcagacaaactgcagtggacgctcgcacagaggacgggaccacacccttgatgctggctgccaggctggcggtggaagacctggttgaagaactgattgcagcccaagcagacgtgggggccagagataaatgggggaaaactgcgctgcactgggctgctgccgtgaacaacgcccgagccgcccgctcgcttctccaggccggagccgataaagatgcccaggacaacagggagcagacgccgctattcctggcggcgcgggaaggagcggtggaagtagcccagctactgctggggctgggggcagcccgagagctgcgggaccaggctgggctagcgccggcggacgtcgctcaccaacgtaaccactgggatctgctgacgctgctggaaggggctgggccaccagaggcccgtcacaaagccacgccgggccgcgaggctgggcccttcccgcgcgcacggacggtgtcagtaagcgtgcccccgcatgggggcggggctctgccgcgctgccggacgctgtcagccggagcaggccctcgtgggggcggagcttgtctgcaggctcggacttggtccgtagacttggctgcgcgggggggcggggcctattctcattgccggagcctctcgggagtaggagcaggaggaggcccgacccctcgcggccgtaggttttctgcaggcatgcgcgggcctcggcccaaccctgcgataatgcgaggaagatacggagtggctgccgggcgcggaggcagggtctcaacggatgactggccctgtgattgggtggccctgggagcttgcggttctgcctccaacattccgatcccgcctccttgccttactccgtccccggagcggggatcacctcaacttgactgtggtcccccagccctccaagaaatgcccataaaccaaggaggagagggtaaaaaatagaagaatacatggtagggaggaattccaaaaatgattacccattaaaaggcaggctggaaggccttcctggttttaagatggatcccccaaaatgaagggttgtgagtttagtttctctcctaaaatgaatgtatgcccaccagagcagacatcttccacgtggagaagctgcagctctggaaagagggtttaagatgctaggatgaggcaggcccagtcctcctccagaaaataagacaggccacaggagggcagagtggagtggaaatacccctaagttggaaccaagaattgcaggcatatgggatgtaagatgttctttcctatatatggtttccaaagggtgcccctatgatccattgtccccactgcccacaaatggctgacaaatatttattgggcacctactatgtgccaggcactgtgtaggtgctgaaaagtggccaagggccacccccgctgatgactccttgcattccctcccctcacaacaaagaactccactgtggggatgaagcgcttcttctagccactgctatcgctatttaagaaccctaaatctgtcacccataataaagctgatttgaagtgtta

SEQ ID NO: 147524 - DNA, 957 bp, Artificial Sequence
  derived and/or modified sequence
gatgtcagcagtttgctgtggggaagtacagtccgggaccttccaaggggcatggttgggatgtcctgagccctgggaacctctgctggatggaggggcctgtccccaggctcacaccgtgggcactggggagacccccctgcacctggctgcccgattctcccggccaaccgctgcccgccgcctccttgaggctggagccaaccccaaccagccagaccgggcagggcgcacaccccttcatgctgctgtggctgctgatgctcgggaggtctgccagcttctgctccgtagcagacaaactgcagtggacgctcgcacagaggacgggaccacacccttgatgctggctgccaggctggcggtggaagacctggttgaagaactgattgcagcccaagcagacgtgggggccagagataaatggggagcagacgccgctattcctggcggcgcgggaaggagcggtggaagtagcccagctactgctggggctgggggcagcccgagagctgcgggaccaggctgggctagcgccggcggacgtcgctcaccaacgtaaccactgggatctgctgacgctgctggaaggggctgggccaccagaggcccgtcacaaagccacgccgggccgcgaggctgggcccttcccgcgcgcacggacggtgtcagtaagcgtgcccccgcatgggggcggggctctgccgcgctgccggacgctgtcagccggagcaggccctcgtgggggcggagcttgtctgcaggctcggacttggtccgtagacttggctgcgcgggggggcggggcctattctcattgccggagcctctcgggagtaggagcaggaggaggcccgacccctcgcggccgtaggttttctgcaggcatgcgcgggcctcggcccaaccctgcgataatgcgaggaagatacggagtggctgccgggcgcggaggca

SEQ ID NO: 147525 - DNA, 6011 bp, Artificial Sequence
  derived and/or modified sequence
atgcagccaccctctctgctgcttttgctcctgctgctacttctactttgcgtcagcgtcgtgaggcctagaggactcctttgtgggtctttccctgaaccttgtgccaacgggggtacctgcctgagcttatccctgggccagggcacttgccagtgcgcacccggattcctaggggaaacctgccagtttccggacccatgtcagaacgctcagctatgccagaatgggggaagctgtcaggccctcctgccagccccactaggccttccctcttctccctccccactgactccttccttcctgtgcacctgcctacccggttttacaggagagcgctgccaggcgaagttagaggacccgtgccccccttctttctgtagcaagagaggcaggtgtcacatccaggcatctggccgacctcagtgctcatgcatgccaggatggaccggagagcagtgccaacttcgcgatttctgcagcgcaaacccctgtgtgaacgggggagtgtgcttagcaacttaccctcagattcagtgtcattgcccccctggtttcgagggtcacgcatgtgagcgtgatgtaaatgagtgtttccaggatccaggcccttgcccgaagggtacaagctgccacaacacacttggcagctttcaatgtttgtgtcccgtggggcaggaaggccctcgctgcgaattgcgagctggaccatgcccaccaaggggctgctccaacggtgggacatgccagctgatgcctgaaaaagactccacctttcatctctgcctgtgtccccctggattcatagggcctgattgtgaagtaaatccagataactgcgtcagtcatcagtgtcagaacggaggcacatgccaggatggcctggacacttacacctgcctgtgccctgagacctggactggatgggattgcagtgaagatgtcgacgagtgtgaaacacaaggccctcctcactgtcgaaatggcggtacttgccagaactctgccggatctttccactgtgtctgcgtgtctggctggggcggtacatcctgcgaggagaatctcgatgactgtattgctgcaacatgcgccccaggtagtacgtgcatcgatcgagtgggctcctttagttgtctttgccctccgggaaggacaggcctgttgtgtcatctggaggacatgtgtcttagccagccatgccatggcgatgctcagtgctcgaccaacccactgacaggcagcacgctgtgcttgtgtcaacctggatacagcggcccaacatgccatcaggatctggatgagtgcctgatggcgcagcagggaccatctccttgtgaacacggcggatcctgcttaaacacgccaggatcctttaactgcctttgccctcctgggtacactggaagtcgatgcgaggctgatcacaatgagtgtctgtcacagccatgccatcctggctcgacatgcctcgacctactggccacgtttcactgcctatgccctcctgggcttgagggtcagctgtgtgaggtggagacaaatgaatgcgcaagcgccccttgtttgaatcacgctgattgccacgatctgttgaatggctttcaatgcatttgcctgcccggattttccggtacccggtgcgaggaagatatcgatgaatgccggtcaagcccctgcgcaaacggtggccagtgccaagatcagccgggagcctttcactgcaagtgcctgccgggatttgaaggccctcggtgtcagaccgaagtggatgagtgcctgtcagacccctgtcccgtcggcgcatcatgcttagatctgcccggtgcctttttttgcctgtgtcccagtgggttcactggacagctttgtgaagtccctctatgtgcccctaacttgtgtcagccgaaacagatttgtaaggaccagaaggacaaggccaattgcttatgtccggacggctcaccgggttgcgccccacctgaggacaactgcacatgtcaccacggccattgccagcgtagctcttgcgtctgtgatgttgggtggacagggccagagtgcgaagcggagctgggaggctgtatctccgccccatgtgcacacggcggtacctgctatcctcaaccttccggctacaattgcacttgccctactggctatacaggccctacatgctctgaggagatgaccgcctgccacagcggcccttgccttaacggcggttcgtgtaatccgagccctggagggtactattgcacatgcccaccctcgcacaccggaccgcagtgccaaacaagcactgactactgtgtgtcagcaccatgcttcaatggcggtacttgtgtgaaccgcccaggcacattctcatgcctgtgcgcaatgggcttccaggggcctcggtgcgaaggcaagctgcggccaagctgcgctgactcaccatgtaggaaccgggctacctgccaggattcaccacagggtccacggtgcttgtgccctacagtgtacaccgggggaagttgccaaactctgatggacctctgcgctcagaagccgtgcccacgaaatagtcactgcctgcaaacaggacctagtttccattgcttgtgcctgcaaggttggactggaccactgtgcaatcttccactgagttcctgccagaaggctgctctatcacagggcatagacgtgagcagtctgtgccataatggcggtttgtgcgtggacagtgggccttcatatttttgccattgccccccaggttttcagggatccctgtgtcaggaccatgtgaatccttgtgagagcaggccttgccagaacggtgcaacctgcatggctcagccttccggatacctatgccaatgtgcaccgggttatgacggccagaattgttcaaaggagttggatgcttgtcagtcccagccatgtcataatcacggcacctgcacacctaaacccggagggtttcactgcgcctgcccccctgggttcgtgggcctgcggtgtgagggagatgtggacgaatgccttgatcagccttgccatcccaccggaacggcagcatgccactccttagccaacgccttctattgccagtgcctgccaggtcacacgggccagtggtgcgaggtggagatcgatccgtgtcattctcagccttgctttcatggcggtacttgcgaggcaactgccggttccccactaggattcatctgtcactgccccaaaggcttcgagggcccaacgtgctctcacagagcaccaagctgcggcttccaccactgtcatcatggaggtctgtgcctgccctctcccaagcctggatttccaccacggtgcgcatgcttatcgggctacgggggaccggactgcctgacacctccagcgccaaaaggatgcggccctccttctccttgcttgtataatggctcttgctctgagaccactgggttgggcggtcctgggttcaggtgtagctgtcctcacagttcacctgggcctaggtgtcaaaagccaggcgcaaagggctgcgaaggacggtcaggtgacggtgcctgtgatgccggatgttcaggacctggcggaaattgggacggcggagattgcagtcttggggtcccagatccttggaagggctgcccatcccactctcggtgttggctactgtttcgggatggccagtgccacccacagtgcgattcagaggaatgtctgttcgacggatatgattgtgagacccctccagcctgcaccccagcttacgatcaatattgccatgaccattttcataacggacattgtgagaaaggatgcaacacagccgaatgcggctgggatggcggagattgccgcccagaggacggggaccctgagtgggggccttcgctggctctcctggtcgtcctttcaccccctgccctcgatcagcagctgtttgccctcgctagggtcttatcgctaactctcagagttgggctatgggtgcgcaaggatagggatggacgtgatatggtgtacccatatcccggagccagagccgaagagaaactggggggaacacgcgaccccacataccaggaacgcgcagctcctcagacacaaccattggggaaggaaacagatagcctatctgcagggtttgtggtcgtgatgggcgtcgatcttagcaggtgcgggcctgaccaccccgcaagcaggtgcccctgggaccccggactcctgctccggttcctcgcagctatggccgcagtgggtgctcttgaacctctgctcccgggtccattgctcgctgttcaccctcacgccggaactgctcccccagccaaccagctgccctggcccgtgctttgctctcctgtggccggagttattctgctggctctgggcgcactgcttgtcctacagctgatcaggcggcgtagacgcgagcacggggcactgtggctgcctccaggcttcacccggaggcccagaactcaatcagcccctcataggcgacgcccacctcttggggaggattcaatcggactaaaagccttgaaacccaaagcagaagtggacgaggacggtgttgttatgtgtagtggcccagaagagggcgaggaagtgggccaggccgaagagacaggcccaccatccacctgccagctatggagcctgagtggcggatgtggtgccctcccccaagcagctatgcttaccccccctcaagagtcagagatggaagcacctgatctggatacgagaggccctgatggtgttactcccctgatgtccgcggtctgttgcggtgaagtgcagtccggaacattccagggggcatggctgggctgccctgaaccatgggaacctctacttgatgggggagcctgccctcaggcccataccgtgggaaccggagagacccctctgcacctggcagcgagattttctcgacctaccgccgcaagaagactgctggaagcgggagccaaccctaatcagcctgaccgggctggtcgcacccctctgcacgcagcagtagccgctgatgcccgtgaggtgtgccagttattattaaggtcacggcagaccgccgtggacgccagaactgaagatggcaccactcccctaatgctggccgctcgactcgctgttgaagacctagtcgaggagctgattgctgcccaagccgatgtgggcgctagagataagtggggaaagaccgccctgcattgggctgccgctgtgaataacgcaagagcggcacgctccctactgcaggcgggtgcagacaaggacgctcaggacaaccgcgagcagacacctctgtttctagccgctcgggaaggcgctgtagaagtggcgcaattgctcttgggcctgggtgctgcccgtgaattgcgggaccaggcgggtcttgcccctgccgacgtggcccatcagaggaatcattgggatcttctaactcttctggagggcgcaggacctcccgaagcacggcataaagccactcctggcagggaggccggacctttccccagggctagaaccgtgtcggtctccgtcccacctcatggcggaggcgctctgcctcgctgtagaaccctgtccgcaggagccggaccccgaggaggtggtgcctgtctgcaggccaggacatggtcagtagatttagctgctcgagggggaggagcgtactctcattgtcggtctctgagcggtgtaggcgcaggaggcggacccactcctcgcggtaggagattttcagccggtatgagggggcctaggccaaatccagccattatgagaggccgatacggcgtcgctgcaggtcgtgggggtagagtgtcgaccgacgattggccctgcgactgggtcgccctgggagcgtgtggatcagcgtctaacatccccatccctcctccatgcctgactccatcccccgaaaggggatcccctcagcttgactgcgggcctcctgcactgcaggaaatgccaatcaatcaaggaggcgaaggcaagaaata

SEQ ID NO: 147526 - DNA, 561 bp, Artificial Sequence
  derived and/or modified sequence
atgagcgccgtatgctgtggggaagtgcaatccggaacctttcagggggcatggctgggatgccctgaaccctgggagccattgctggacggcggagcctgtccacaagcccatacagtaggtacaggggaaacaccattgcacttagccgcacggttctctcggccaactgcggcacggcgtctgctggaggccggagccaaccccaaccagccagatagagctgggagaacgcctctgcacgcagctgtggccgcagacgctcgggaggtctgccagttgctactaaggagcaggcagactgctgtagatgcgagaaccgaagatggtacaacgcccttgatgttggctgccagactcgccgtagaagacctggtggaggagcttatagccgctcaggcagatgtgggcgcacgcgacaaatggggagccgatgcggctatcccaggaggcgcaggccgaagtggaggatctagtccggcaaccgccggagccggtggcagcccccgtgctgctggacccggatgggcaagcgctggagggagaaggagtccaacatag

SEQ ID NO: 147527 - DNA, 438 bp, Artificial Sequence
  derived and/or modified sequence
atgggtctgaagtcccatgtactaccagcccctaactctcagggacaaggcagcctttgtatcttcgtctacgtcacatcctacatggactacatccagttacagggcaaggaaaacctggattgttcagggctgaataaacagaaaatcgtcttcccccatagcatggactcgggagatggatggctcatggttcttgtgcagcagctgcatgagggccggggacatgtcctggatccatttgctctcatctccgtactcgtgacttcctggagtcaggacggttgctgcattcccaagaaccatgtgtgcgtgcaaggcaggcggggtgggggcagaggacgcgcaaaattagctgggcccgtaaccttctaccaaaaagtcaagcctcggcagaagtctgtttcatgcagcctaccactgcatattttcacttag

SEQ ID NO: 147528 - DNA, 6012 bp, Artificial Sequence
  derived and/or modified sequence
atgcagcccccgtcactgttgttgctgctcttgctgctgttgttactctgcgtaagtgtcgtgagaccgaggggtctgttatgtgggtcattcccagagccctgcgccaatggcggtacctgcttaagcctgtcactcggccaggggacctgccagtgtgcccctggcttccttggtgagacctgccagttcccagatccgtgccagaacgctcagttatgccagaacggaggatcatgccaagcccttctgcctgctccgcttggtctgccctccagtcctagtccactgacaccttcctttctatgtacctgtctgccaggattcaccggggaacggtgccaggctaaattggaggatccctgtcccccaagcttttgcagtaaacgcgggagatgccatatccaggcctctggccgtcctcagtgttcgtgcatgccaggatggaccggcgagcaatgccagctgcgcgacttctgctctgcaaatccttgcgtgaacggtggagtttgcctggccacatatccgcagatccagtgccactgccccccggggttcgaagggcatgcctgcgaaagggacgtaaatgaatgttttcaagatcccggaccttgccccaagggaactagctgtcataacactcttggttccttccagtgtctctgtccagtggggcaagagggcccacgctgtgaactgcgggcagggccatgcccaccaagaggctgttctaacggtggcacgtgtcagttaatgcctgagaaggattcaacctttcacctgtgcctctgtccccccgggtttattggccctgattgcgaagtgaatcccgacaattgcgtctcacaccagtgccaaaatggaggcacatgtcaagatggcttggatacgtacacctgtctttgccccgagacatggactggatgggactgcagtgaagacgtggatgaatgtgagacgcagggcccacctcattgtcgtaacgggggaacgtgccaaaattccgctgggtcatttcactgtgtatgcgtgtccggctggggaggtacgtcatgtgaggaaaatctagatgactgtattgcagcgacctgtgctcccggttcaacatgtatcgacagagtgggtagtttttcctgtttgtgccccccaggtaggacgggtttactgtgtcaccttgaggatatgtgcctctcacagccctgtcacggggatgcacagtgctcaaccaaccctctcactggttccacgctgtgtctctgtcaacctggttacagtggcccaacatgccaccaagatttagacgaatgcctgatggcccagcagggaccaagcccctgtgagcacggcgggtcttgcctgaacacaccaggctccttcaattgcttatgtccacccggctacacagggtcacgatgtgaggccgatcataacgagtgcttaagtcagccttgccacccaggttctacatgcttggacctgctcgcaacattccattgcctctgcccccccggcctagagggtcagctctgcgaggtagagaccaatgaatgcgcctcggcaccttgtctgaatcacgcagattgtcatgatttactcaacgggtttcagtgtatctgtcttcctgggttctcaggcacacggtgcgaagaggatatagatgaatgccggagttccccctgcgcaaacggtgggcagtgccaagatcagccaggggcattccattgcaaatgtttgcctggcttcgaggggccgaggtgccaaaccgaggtcgatgagtgtctctccgatccatgtccagtaggcgcaagctgccttgatcttccaggtgcctttttttgtctgtgccccagcgggtttacgggccagctctgtgaggtgccattgtgcgcacctaatttatgccagccaaagcagatatgcaaagatcagaaagacaaggccaattgtttgtgtcctgacgggagccctggatgtgccccaccagaggacaactgtacatgccaccacggtcactgccaacggtcatcatgtgtgtgcgatgtagggtggacaggacccgaatgtgaagccgagctcggtggctgtattagcgcaccttgcgcgcacggggggacctgctacccccagcctagcggatacaattgcacatgtcctaccggctacaccgggcccacatgctcagaagagatgaccgcatgtcactctggaccttgccttaacggggggagctgtaacccctcccccggcgggtactattgcacttgtccaccctcccatacaggcccacagtgccaaacgtccacagactattgcgtaagtgccccctgttttaacgggggaacatgcgttaaccggcccggcacattttcatgtctgtgcgcaatggggttccagggtccacggtgcgaaggtaagttgagaccttcctgtgcggatagtccatgccgaaatcgcgccacctgccaggatagcccacagggcccgagatgcctctgccccacaggttatacaggcggtagctgtcagacacttatggatttatgtgctcagaaaccgtgtcctcggaactctcattgtctgcaaaccggaccttcctttcattgtctttgccttcagggctggaccggaccactgtgcaacttgccgctcagctcctgtcaaaaagcagccctgtctcagggcattgatgtgtcctctctttgtcacaacggcggattatgcgtcgattctggaccaagctatttttgccactgccctcccggatttcagggctcgctttgtcaagaccatgttaatccctgtgagtcccggccctgtcagaacggcgcgacatgcatggcccagccctctggttacctttgtcaatgtgccccaggttatgatggccagaactgtagcaaagagctcgatgcatgtcagtctcagccctgccacaaccacggcacctgcacccccaagccaggcggatttcactgcgcctgtccccccggcttcgtgggacttagatgtgagggagacgtcgacgaatgtcttgatcagccctgtcaccctaccggtactgcggcctgtcattccctcgcaaatgctttctactgtcaatgcctgcctggacacaccgggcaatggtgtgaagttgagatcgacccttgtcactcccagccctgttttcacggggggacctgtgaagctacagcgggctctcctttgggcttcatctgtcattgtccaaaagggtttgagggtcctacatgttcccatcgcgcgccgagttgcgggttccatcactgtcaccacggcgggctgtgccttcctagccctaagcccggcttccctccgagatgtgcatgccttagcgggtatggcggtccagactgtctcactccacccgctccgaagggctgcggcccaccaagtccttgtctatataatggctcctgcagcgaaactaccgggctcggcggtcccggctttcggtgttcatgccctcattcctccccaggtccacgctgccagaaacctggcgcgaagggctgtgaggggagaagcggcgacggggcctgcgacgcaggctgtagcggccctggtggcaactgggacggtggggattgctccctcggggttcctgatccttggaaggggtgccccagccactccagatgttggctgctgttccgggatggccaatgccacccccagtgcgacagcgaagagtgtctctttgatgggtacgattgtgaaacaccgcccgcttgcacccccgcctacgaccagtactgtcacgatcatttccacaacggccactgtgaaaaaggctgtaacaccgctgaatgcggatgggatgggggagattgccgccccgaagatggtgacccagaatggggcccaagcctggctctgctcgtggtactttccccaccggccctggatcagcagttgttcgccctcgctcgtgtgctctcactgacattgcgcgtcggtctgtgggtaaggaaagatcgggatgggcgggatatggtgtatccttaccctggagcgagagccgaggagaagctcggtggtactcgggatccaacctatcaggaacgggcggccccacagacacagccccttggaaaggagacggacagcctttcggccggatttgtcgtcgtgatgggcgtagatttaagccgctgcggtcccgatcatccagccagcaggtgcccttgggaccctgggctcttgcttagattcttagccgccatggcagctgttggcgctttagaaccactgctgccaggccccctgctggctgtgcaccctcacgctggaacggctccacccgccaatcagctgccctggcctgtgctttgctccccagtggctggagtaattcttctggccctcggtgctctgctggtgctgcaactgatccgccgcagacgccgtgaacacggggctctgtggctgccacctggcttcactcgcagaccgcgcacccagtcagcgccacacaggcgacgaccgcccctgggagaggatagtattgggctcaaggccctcaagccaaaggccgaagtggatgaggatggtgtagtgatgtgttccggcccagaggagggcgaggaagtcggccaggccgaggaaactgggccccctagcacttgccaactgtggtcactgagtggaggctgcggggccctgccccaggccgctatgttaacacctccacaggaatctgagatggaggctccggatctcgatactagggggccggacggagtgaccccactgatgtccgctgtgtgctgcggagaggttcagagcggcactttccagggcgcatggctgggctgtccggagccctgggagccactcctggacgggggggcctgtccgcaagcccatacagtgggaactggagagacgccacttcatctggctgcaaggttcagcagacccacggccgcccggagactgctggaagctggggccaatccgaatcagccagatagagccgggaggacccccctccatgccgccgttgctgctgacgcaagggaagtgtgtcagctgctgttgcggtccaggcagacagccgtggacgcccgaacagaagacggcactactcccttgatgttagccgcccgcctggcggtcgaggacttggtggaagagctcatcgccgcacaggcagatgtgggagctagggataagtgggggaagactgccttacactgggccgcagccgtaaacaatgcgcgcgctgcccgatctctgctgcaggccggcgccgataaagacgcacaggacaaccgtgagcagactcctctttttttagcagctcgtgaaggggcagtggaggtggcccagttgctcctgggtctcggcgcagcccgggagctgcgtgatcaagcaggcctggccccagcagacgtcgctcatcagaggaaccattgggatctgctcacgctgcttgagggggccggcccccctgaggctagacataaagccacgcccggaagggaggcagggccttttcccagagcacgaacagtcagtgtaagcgttccaccccacggaggtggcgctttgccccgttgtcggaccctgtcagccggggcgggacctcgtgggggaggcgcctgccttcaagctcggacttggtcagtcgatctggccgcgcgtgggggaggagcctactcgcactgtcgttccctctctggggtgggcgccggcggcggtccaaccccacgtggccgtcgattttcagccggcatgagaggccccagacccaatcccgccatcatgcggggtcgttatggtgtggcggcaggccgcgggggtcgcgtgtccaccgacgactggccatgtgactgggtcgcccttggcgcctgtgggtcggccagtaacattccaatccctcccccatgtttaacaccgagtcctgagcgcgggtcgccgcagttggactgtggcccacccgcccttcaggagatgcctattaaccaggggggggagggcaagaaatag

SEQ ID NO: 147529 - DNA, 3147 bp, Artificial Sequence
  derived and/or modified sequence
tgtgccccaggatatgacgggcaaaactgctccaaggagctcgatgcctgccaatctcagccttgtcataaccacggcacttgtacccctaagcctggcggattccactgcgcctgtcctccaggatttgttgggctgaggtgcgaaggggacgtggacgaatgccttgaccagccctgtcacccgacgggcactgcagcctgccactccctggcgaatgctttctattgccagtgcctcccgggccatactggccagtggtgcgaggtcgagatagacccttgtcattctcagccctgcttccatggtggtacctgcgaggcaacagcggggtcccctcttggcttcatctgccactgccctaaagggttcgaggggcctacctgctctcatcgagccccttcttgcggattccaccactgtcaccacggggggctttgtctgcctagtccaaaacctggatttcccccacggtgcgcttgtctaagcggctatgggggacccgactgtttgaccccaccagcccccaagggctgtgggccacccagtccttgtctttacaatggctcatgcagcgagaccactggtttgggggggcctgggtttcggtgctcctgtcctcatagttcgcccgggcctagatgtcagaaacctggagctaaaggctgcgaaggccgatcgggggacggtgcctgcgacgcaggttgcagtggccccgggggcaactgggacgggggggattgttcattgggagttcccgacccttggaaggggtgccccagccattccaggtgttggctgctcttcagagacggacaatgccacccacagtgcgatagcgaggaatgtcttttcgatggatacgattgtgagactccccccgcctgtactcctgcctatgaccagtactgccacgaccattttcataatggacactgtgagaagggatgtaataccgctgagtgcggatgggatggtggggattgccgacccgaagacggcgaccctgagtggggtccctcccttgcattgctcgtcgtgctgagtcctcccgctttggaccagcagttattcgcactcgctcgcgtcctgtctctaacgcttcgcgtgggcttgtgggtgcgtaaggatcgtgacggacgggacatggtctacccctatcccggcgctcgcgctgaagagaaactaggaggcacacgagaccccacatatcaggaaagagccgctccccaaacccagcctttgggaaaggagaccgattccctgagcgctggatttgtcgtggtgatgggagtggacttgtcacgatgcggcccggaccatcccgcatcccggtgtccatgggaccctggcctgctcctgaggttcctggcagctatggcagcagtcggagctctagaacctctacttcctggcccactcctggcggtgcatccccacgcggggacagctcccccagcaaatcaactcccatggcccgttctctgctcccccgtggctggcgtcatcctgctcgctctaggagcgctgttggtcctgcagctgatcagacggcgccgaagggagcacggcgccctgtggttaccgcccggcttcaccagaagacccaggactcagtccgcgcctcatcgccggagacctcctctgggggaagatagcatcggtctcaaggcactgaagcctaaagccgaggtggatgaggacggagtcgtgatgtgttccggccctgaggagggcgaagaagtcggacaggctgaagagacaggccctccctcaacttgccagctgtggtcgcttagcgggggttgtggcgccctgccccaggcagcaatgttaacgccaccacaggaatcagaaatggaggcgcccgatctagatacccgcggtcccgacggggtcacacccttaatgagcgcagtgtgttgcggcgaagttcagtcaggtaccttccagggagcctggctcggctgtcccgagccatgggagccactgctggatggcggtgcgtgccctcaggctcataccgtcggcactggagagaccccactgcacctggctgccagattttccaggcctaccgctgcacgacgactcctcgaggctggggccaaccctaaccagcccgatcgcgctggacggaccccactgcacgccgcggtggccgctgatgcgcgggaagtgtgccagctacttcttcgaagccgccagacagctgtagatgctaggaccgaagacggaaccactccgctgatgctggccgcccgcctggcagttgaggacctagttgaggagctcattgccgcacaggcagatgtgggcgcgagagacaaatggggcaagaccgctcttcattgggcagcagccgtgaataatgccagggcagcaagaagcctgctgcaagctggggccgacaaagacgcacaggataacagagagcagactcccctgtttttggctgcacgtgaaggagctgtagaagtggcccagctgcttctgggtctgggggctgccagagagctgagggatcaggcgggactcgcccctgccgacgtcgcacatcagcgtaatcattgggacctcctgaccctgctggagggggctgggcctcccgaggccaggcataaggcgactccaggccgggaggcgggaccatttcccagggctagaaccgtgtccgtgtctgtcccaccacatggggggggagcgctaccgcgttgtagaacgctgagcgccggtgccgggccacgcgggggtggcgcgtgccttcaggctcgaacctggagtgtggacctcgcggcccggggtgggggcgcctactctcattgcagatccctctccggggtgggggccgggggcggtccaactccccgggggagaaggtttagtgccgggatgaggggcccccggccaaacccggcaataatgcggggtagatacggagtcgccgctggaaggggcggacgggtcagcacagatgattggccctgcgactgggtcgctctgggcgcgtgtgggtctgcgtccaacatcccaatacctcctccatgcctaacaccctccccggaaaggggaagtccacagctggattgtggtccacctgcactgcaggaaatgccaattaatcaaggcggcgaagggaagaaatag

SEQ ID NO: 147530 - DNA, 6018 bp, Artificial Sequence
  derived and/or modified sequence
atgcagccaccctccctactgctgctccttcttttgttgctgttgctgttactgtgcgtgtccgttgtgcgtcctagaggactgttgtgtggctcattcccagagccttgcgctaatggtgggacttgcctaagcttatcgctcggccagggaacctgccagtgcgcccctgggtttctcggagaaacttgtcagtttccggacccctgccagaacgcacagctgtgccagaacggcggcagctgtcaggccctgcttcccgcgccacttggactgccatccagcccttctccactgactccctcatttctgtgcacatgcctccctgggttcacaggcgaacgatgtcaagcacagcttgaggacccatgcccaccttccttttgctctaaaagagggaggtgccacatccaggcttccgggcgtccccagtgtagttgtatgccgggctggaccggtgaacagtgccagctgagagatttttgctccgcaaatccttgcgtgaacggcggagtgtgtctagccacatacccccaaatccaatgtcattgcccaccagggtttgagggacatgcttgtgagcgagatgtgaacgaatgcttccaggatccggggccctgtcctaaggggacatcctgccataatacactggggtcatttcaatgcttgtgtccggtggggcaagagggcccccggtgcgagcttcgtgccggaccttgccccccccggggctgtagcaacgggggtacttgtcaactcatgcccgaaaaagatagcactttccacctgtgcttgtgtcctcctggatttatcgggcccgattgtgaagtgaatccagataattgtgtgtcccaccagtgccagaatggggggacgtgccaagatggcctggatacctacacatgcctttgccccgaaacttggaccggctgggactgttccgaagatgtagatgaatgtgaggcacaaggaccgccccattgtagaaacggggggacctgtcaaaacagtgccgggagctttcattgtgtgtgcgtcagtggttggggagggacttcctgcgaagaaaatctcgacgattgcatcgctgctacatgtgcaccaggatccacctgtatagatagagtgggctcgttctcctgtctttgtccaccgggcagaacagggctgttatgccatctggaggacatgtgcctgtctcagccctgtcatggtgacgcacaatgtagtacaaatcccctcactgggtcgactctgtgcttgtgccagccaggatatagtggccccacatgtcaccaggacctcgacgagtgcctgatggcacagcagggacctagcccctgcgagcacgggggaagttgcctgaatactcctggttcatttaactgcctgtgcccacccgggtacaccggaagcaggtgcgaagcagaccacaatgagtgcctttcacaaccctgccaccctggttctacttgccttgacctgctcgccacattccattgtctgtgccctcccgggctcgagggccagttatgcgaagtggagacaaacgaatgcgcctccgccccctgtctaaatcatgctgactgtcacgatctgctcaatggatttcaatgtatctgtttgccagggttctccggcacgcgttgtgaagaggatattgacgaatgccggagctccccatgtgcaaacggcggccagtgccaggaccagcccggagcgttccactgtaaatgccttccagggttcgagggaccacgatgccagactgaggtagacgagtgcctgtcagatccttgtcctgtgggagcgagttgcctcgacctacctggagctttcttttgcctgtgtcctagcgggttcactgggcagctttgtgaggtgccactctgcgcccccaatctttgccagccgaaacagatctgtaaagatcagaaggacaaagctaactgtctttgtcctgacggaagtcccgggtgtgcaccgccggaagacaattgcacatgccaccacggccattgccagcgcagctcgtgtgtgtgcgacgtcggatggaccgggccagaatgtgaggctgaactgggtggctgcatcagcgctccttgtgctcacgggggtacatgttatccacaaccgtccggctacaactgcacgtgcccaactggctacaccggccctacatgctcggaagagatgacggcctgtcattctgggccttgcctcaatgggggctcctgcaacccttcaccgggggggtactattgtacctgtcctcccagccacaccggcccacaatgccagaccagcactgactattgcgtctccgccccctgtttcaatggcggtacttgcgtgaaccgtcccggcaccttctcttgtctgtgtgccatgggttttcagggccctaggtgtgagggcaagttgaggccatcatgtgccgactcaccttgtagaaatagggccacctgtcaggactctccgcagggtccacgttgtctgtgtcctacggggtacacaggaggtagttgccagacactcatggacctctgcgctcagaagccctgcccacgcaactctcactgtcttcaaacagggccctcgtttcactgcctgtgcctgcagggttggactggacccctgtgcaacttgcctctgagctcgtgtcagaaggctgccctgtcccagggcattgacgtttcctctctctgccacaacggcgggctgtgcgtggattcaggcccctcctatttctgccactgcccacctggcttccaggggtcactctgtcaagatcatgtgaacccttgtgaatcacgcccttgccagaatggtgctacttgtatggcacaaccatccggctacctctgccaatgcgcaccgggatacgatggacagaattgctccaaggagcttgatgcctgccaaagccagccgtgccacaaccacggtacctgtacgccaaaacctgggggattccattgtgcctgccctcctggtttcgtagggctgcggtgtgaaggagatgtagacgagtgccttgaccagccatgccaccctacgggcactgccgcgtgtcactctctggcaaacgcattttactgccagtgtctcccgggccatacaggacagtggtgcgaagtggagatagacccttgccactcacaaccctgtttccacggagggacatgcgaagccacagctggaagccctctgggattcatttgccactgccccaagggctttgagggcccaacttgttcacatagggctccgagttgcgggtttcaccactgtcaccacggtggactttgtttaccaagtcccaaaccaggctttccacctcgctgtgcatgcctcagtggctacgggggccccgactgcctgacccctcctgctcccaaaggctgcggccctccgtcaccttgcctgtacaatggctcctgctcggaaacaaccggcttggggggtcctggattcaggtgctcctgcccccactcatcacctggccctaggtgccagaaacctggcgctaagggttgtgagggccgcagcggcgacggagcctgcgacgccggctgctcaggaccaggcggaaactgggacgggggggactgttcccttggcgttcccgacccctggaaaggctgcccctctcattccagatgctggctgctgttcagggacgggcagtgccacccacagtgtgactctgaagaatgcctgttcgatggatacgactgcgagactcctcctgcgtgtaccccagcatacgatcagtattgccacgatcattttcacaatggtcattgcgaaaagggttgcaataccgcggagtgcgggtgggatggcggggactgtaggccggaagatggtgaccctgaatggggtccatctctggctctactcgtggttctatctcctcctgcactagaccagcagctcttcgcactagccagagtgcttagtctcaccctaagggtcgggctctgggtcagaaaggatagagacgggcgggatatggtttatccatatcctggagcgcgggccgaagagaaactagggggcacgcgtgatcctacttatcaggaacgcgcagccccacagactcagcctcttgggaaagaaacagactctctgagcgccgggtttgttgtcgttatgggggttgacctatccagatgcggacccgaccatccagccagtcgatgcccctgggatcctgggctcctacttcggttcctggcggcaatggccgctgttggggccctcgagcccctgctccccggaccgttgctcgcagttcatccccacgccggtacggctccaccagccaaccagctgccatggccagtactctgttcaccagtggccggggtgatcctgctggctctcggcgcactgctggtgctgcaactgattcggcggagacgtcgggagcatggggcgctctggctgccgcctggcttcaccagaagaccgcgcacccagagtgccccccacaggcgccggcctccattgggtgaggattccatcggcttgaaagcactaaaacctaaagcagaggtcgacgaggacggcgtagtcatgtgtagtggacctgaagagggagaggaagtcggacaggcggaggagacgggaccccccagcacctgccaactatggagtttgagcggtgggtgtggcgctctgccacaggcagccatgttgactccaccccaggagagtgaaatggaggctcccgatctagatacaagggggccagacggcgtgacgcccctcatgtccgcagtctgctgcggcgaagtgcagagcggaacctttcaaggcgcgtggttgggatgcccagaaccgtgggagccattactggacgggggagcctgtccccaagcccatactgtcggcacaggagagacccccttgcacctggctgcaagattttcgagaccaacagccgcacgaaggctccttgaagctggcgcaaatcctaatcagcctgacagagccggtcggacgccccttcatgccgctgtcgctgccgacgccagggaagtgtgtcaactccttttgaggtcgaggcagacagccgtggacgcaaggactgaagatgggaccacacctttgatgcttgcagctagactggctgtggaggacctcgtcgaagaactaatcgccgcccaggctgatgttggcgctagagataagtggggcaaaaccgctctgcattgggctgccgctgtaaataacgctagggcggcccgatctctcctgcaggcaggcgcagacaaagacgcacaggacaatagagagcagacacccctgttcttggccgccagggaaggagctgtcgaggtagcccagttgttgcttggtctcggcgccgctcgagagctgagggatcaggctggtctagctccggctgacgtagctcatcagagaaatcactgggatcttttgactctgctggaaggagcggggccaccagaggcgagacacaaggcgacaccgggacgggaggcaggtccatttccaagagctcggactgtctccgtgagcgtgcctccccacggaggcggcgccttgccaagatgcaggacactgtctgctggagctggacctagaggaggaggcgcatgcttacaagcacgcacttggagcgtcgacctggccgcccgaggcgggggcgcttattcccattgtcggtcactttctggggtaggggctggcggtggacctaccccaagaggacgcagattctcagctggtatgcggggcccaagacctaacccagcgattatgagagggaggtacggagtggccgcgggaagaggaggccgggtgtccacagacgattggccctgcgattgggtcgccttgggcgcctgcggatctgctagcaacattcctattcctcctccatgcctgaccccatcaccagagcgtgggagccctcagctggattgcggcccaccggccttgcaggagatgcctatcaaccagggcggtgagggcaagaaatag

SEQ ID NO: 147531 - DNA, 6012 bp, Artificial Sequence
  derived and/or modified sequence
atgcagcctcctagtctcctgctgctgctgctgttactgctactcttatgcgtgtccgtggtgagaccgaggggactgctctgcggttccttcccagaaccatgcgctaatggcggcacatgcttgtcactctccctgggccagggaacttgccagtgcgccccaggatttctcggggaaacttgccagtttcccgacccatgccagaatgcccaactgtgccagaacggcggttcctgccaggccttgctgcctgcaccgcttgggctgccatccagccctagcccccttactccgtcttttctctgcacgtgtctgccaggattcactggggagagatgccaggcccaacttgaagacccatgccctccttccttttgttctaagcgagggcgatgtcacatccaagctagcggccgcccccagtgctcttgtatgcctgggtggacgggcgaacagtgccagctccgggatttctgctccgccaacccatgtgtcaacgggggagtgtgtctggccacctatccacagatccagtgtcattgcccgccgggatttgagggccacgcctgtgaacgcgacgtgaacgagtgctttcaagatcccggcccttgtcccaaagggaccagttgtcacaatactctgggaagttttcagtgtctgtgtcccgtcggacaggagggcccaaggtgcgagcttagggccgggccgtgcccccccaggggctgtagtaacgggggcacctgccagcttatgccagaaaaagattccacatttcatctgtgtttgtgtccacctgggttcatcggaccggattgcgaggtcaatccagataattgtgtgtcacatcaatgtcagaatggggggacttgtcaggacgggcttgatacatacacgtgcctctgcccagagacatggactggttgggattgttcagaagacgtggacgaatgcgagacacagggtccacctcattgtcggaacgggggaacatgccagaactcggcagggtccttccattgcgtctgcgtctctggttggggcggaacctcttgcgaagagaacttggacgactgtatcgctgccacctgtgcccccggctctacttgtatagacagagtgggctcattctcttgtctgtgcccccccggccgaacaggtcttctctgtcacttagaggatatgtgcctctcccagccttgtcatggtgatgcacaatgttcgacgaacccactgaccggtagcactctctgcttgtgccagccaggatattcgggacccacctgccatcaagacctcgacgagtgtctgatggcacagcaaggcccttcaccatgcgaacatggcggaagctgcttgaatactcccggctcatttaactgcctgtgcccaccaggctataccggctctcggtgtgaggccgaccataacgagtgcctgtcccagccatgtcatcctggctcgacttgcctggaccttctggccaccttccactgcttatgtcccccagggttggagggccagctctgcgaagttgagacaaatgagtgcgcctcagcgccctgcctaaaccatgctgattgccacgatctgttgaacggatttcagtgcatctgcctcccgggcttctcaggcactcggtgtgaagaagacatagatgagtgcagaagctcaccgtgcgccaatggggggcagtgtcaggatcagccgggagcttttcattgcaaatgtcttccagggtttgaaggcccgcgctgtcagaccgaagtcgacgaatgtctgagtgatccatgccctgttggagcatcctgcctagatcttcctggtgcatttttttgtttatgtcccagtggattcaccggacagctgtgtgaagtgccactgtgcgctccaaatctgtgtcagcccaagcagatatgcaaagaccagaaggacaaagcaaactgcctgtgtccagacgggagcccaggctgtgccccaccagaagataactgtacttgccaccacggccattgccaacggagtagttgtgtgtgcgatgtcgggtggacaggacccgagtgtgaagcggaactcggcgggtgcatcagtgctccttgcgctcacggcgggacctgttacccacagccatcgggctataactgtacatgccctaccgggtatactggccctacctgcagtgaggagatgactgcatgtcactcggggccatgccttaacggcggaagttgcaatccctctccaggtggctactactgtacatgccccccttctcacaccggcccccaatgtcagactagcaccgattattgcgtgagtgcaccctgtttcaacggaggtacctgcgtgaatcggcctggtaccttctcctgtttgtgtgctatgggctttcagggaccacgctgcgagggcaagttacgtccatcttgtgccgatagcccatgcagaaacagggctacctgccaagactcccctcagggaccaaggtgcctctgtcctacaggatacacaggtggaagctgccaaacgcttatggatctttgtgctcaaaaaccttgcccacggaacagccattgcctgcagaccggccccagtttccattgtctgtgtctgcaaggatggactggtcctttatgtaaccttcctctgtcttcttgtcagaaagccgccctatcacagggcatagatgtcagtagcctctgtcacaacggcggcctttgcgtggattccggcccgtcttatttctgccactgccctccaggctttcaggggtctctgtgtcaggatcatgtaaacccctgcgagtccagaccatgccaaaatggcgcaacctgtatggctcaaccatcgggctacctctgtcagtgcgcacccggctatgatgggcaaaactgctctaaggaacttgacgcctgccaatcccagccgtgccataatcatggaacttgtaccccgaaaccaggcgggtttcattgcgcttgcccgccaggctttgtcgggcttagatgcgaaggcgacgtggacgaatgcttggatcagccttgccatcccacgggtaccgccgcttgccattcgctcgccaacgccttttactgccagtgtctgcctgggcacacgggacagtggtgtgaagtagagatagacccatgccatagccagccctgcttccatggagggacttgtgaagcgacagcggggtccccactgggcttcatttgccactgtcctaaaggcttcgagggtcctacttgtagccaccgggcaccctcctgtggctttcatcactgtcaccacggcggcctgtgccttcccagtccaaagcccgggttccctccccggtgcgcatgcctatcaggttacggcgggcctgactgtttaacacctcctgcaccgaagggctgtggcccaccctctccttgtctgtataacggatcctgctctgaaaccaccggactcggcggaccaggcttccggtgctcatgtccgcattcttcccccgggcctcggtgccagaagcccggagcaaaaggctgtgaaggtaggtccggggacggcgcctgcgacgctgggtgcagcggaccgggagggaactgggacggaggtgattgttcgcttggtgtgcctgatccttggaaaggctgcccgtcacactctcgctgctggttacttttccgggatggacaatgtcaccctcagtgtgatagcgaagagtgtctgttcgacgggtatgattgcgagacccctccagcatgtactcccgcatacgaccaatattgtcacgatcattttcacaatggccattgtgaaaaaggctgtaataccgctgagtgcggatgggatggtggggactgtcgccctgaggacggagacccagagtggggcccatcgcttgctttgctggtggtattatctccacccgccctcgaccagcaattgtttgccttggcgagagtgctttccctgactttgagggttggcctgtgggtaagaaaggaccgagacggccgggatatggtctacccttaccccggcgcccgcgccgaagagaagctcggcggaaccagggatcctacctatcaggagcgggctgccccccaaactcagccactaggaaaggagaccgatagcctttcagccggctttgtcgtcgtgatgggtgtcgacctgtcacgttgtggaccagaccaccccgcctctagatgcccatgggatccaggactacttctacgtttcttagccgctatggctgcggtgggtgcactagaacctctcttgcctggcccactcctcgctgttcacccccacgcaggaacggctccgcccgccaatcaactgccttggccagtgctgtgctctcctgttgcaggtgtaatccttctcgcactgggagcactcctcgttctgcagctcattcgcagaagaagacgggaacatggcgccctgtggctacctcccggtttcactcgacggccacgaacgcaatcagcccctcacagaagaaggccaccactcggcgaagactcaattgggcttaaggctctcaagcctaaggctgaagtggatgaggatggcgtggtcatgtgttccggcccggaagagggcgaggaagtgggacaagccgaggagactggccctccatctacctgtcagttatggtccctgagcggtgggtgtggtgctctgccacaggccgccatgctaacacccccacaagaaagtgagatggaagcccctgacctggacacgagggggccagatggcgttacccctctgatgagcgcagtctgctgcggagaagtgcaatctggcacatttcagggggcttggctcgggtgtcctgagccctgggaacccctcctagacggcggggcctgtcctcaagcacatacagttgggaccggggagaccccgctgcatctagcggcccgcttcagccgccccactgctgccaggcggttactggaagctggggccaacccaaaccagcccgaccgcgccggacggacccccttgcacgctgcagtggctgcagacgcccgagaggtttgccaactgctgttacgttctagacagactgcagttgacgctagaaccgaagacgggactacgcctctcatgctggcagcccgcctggctgtggaagacctggttgaagagctaatcgccgcccaagccgacgtgggagctcgggacaagtggggtaagaccgccctgcattgggcagccgccgtcaataacgcaagagcagcacggtctctcctgcaagctggtgccgataaggacgcccaggacaaccgagagcagacccctttgttccttgccgcaagagagggggccgtcgaggtggcccaactcctgctgggattaggtgccgctcgggagcttagagaccaggccggcctagctcccgcagatgtcgctcaccaaaggaatcactgggatcttctgactctcttagagggtgctggacccccagaggcaaggcacaaggctactccagggcgcgaagcagggccgtttccccgtgcacgtactgtgtcagtttccgtgccgccacatggaggcggagccctccccagatgtaggaccctgtcagccggggcagggccccgcgggggaggagcttgtctccaggcaaggacttggagtgtggatctagcggcaagaggcgggggagcgtatagtcattgtcgatcactttctggggtcggtgccgggggaggtccaactccgcgcggacgccgtttctcagccggcatgagaggccctcgtccaaaccccgcgattatgagaggacgttatggcgtagccgcaggtaggggaggaagggtttcaacggatgattggccctgcgactgggtcgcactcggcgcctgcggatccgctagcaacatacctatacctccaccctgtctcaccccatcccccgagagaggttctccacagttggattgcggccctccggcattgcaggagatgcccatcaaccaagggggtgagggaaaaaaatag

SEQ ID NO: 147532 - DNA, 561 bp, Artificial Sequence
  derived and/or modified sequence
atgagcgccgtatgttgcggcgaagtccaatcaggtacctttcaaggggcttggttaggatgcccagagccatgggaacccctgctggacggcggcgcttgcccccaagcccatactgtcggaacgggagaaacacccctccacctggccgcaaggttttcgagaccaaccgcagcgcgcagactgcttgaagctggcgccaatccaaatcagccagaccgtgctggtagaacaccattgcacgcagcagttgctgcagatgcgagagaggtgtgtcaactactcttgcgctcccgccaaacagcagtagatgcaaggactgaggatggaactacaccactgatgctcgccgctcgtctcgctgtggaggatttggtggaggaattgatcgccgctcaagcagatgtgggcgccagagataagtggggcgcagacgcggctattcccggaggagcaggacggtccggaggatcttctccagcaactgcgggggctggtggttctccccgggcggcaggcccagggtgggctagcgcaggtggtaggcgcagccctacatag

SEQ ID NO: 147533 - DNA, 6009 bp, Artificial Sequence
  derived and/or modified sequence
atgcagccgccttccttgctgctgttgctgctgctgctgctattgtgtgttagcgttgtacgcccaaggggactgctttgtggatcctttcccgagccctgtgcaaacggcgggacctgcttgagcctgtcgctgggccagggaacctgtcagtgtgctccaggcttcttgggcgagacctgccagtttcccgacccctgtcagaacgcacagctgtgtcagaatggcggcagctgtcaggccctcctgccagctcctttgggtttgccgagcagccctagtccactgaccccttccttcctttgcacctgcttgcccggattcacaggcgaaaggtgccaggctcagctcgaggatccctgtcccccctctttttgtagtaaacgaggtcgttgccacatccaagcgtcaggtaggccacagtgtagttgtatgcctggctggactggggagcaatgtcagctgcgcgatttctgcagcgcaaacccatgcgtgaacgggggtgtctgcctggctacctatcctcaaattcagtgccactgcccacccggctttgaaggccatgcgtgcgaacgcgacgtaaacgagtgcttccaggatccaggaccttgccccaaggggacttcctgtcacaacacattgggctctttccagtgtctttgccccgtcggccaggaaggccctcgctgtgaactgcgtgctggtccatgccccccgcgaggctgtagcaatggcggaacgtgtcagttgatgccagaaaaagattcaacattccacctgtgcctgtgccctcccgggtttataggccccgattgcgaggtgaaccccgacaattgcgtcagtcatcaatgtcagaacggtggcacttgtcaggatggcctggacacctatacatgcctctgtccagagacctggacaggatgggactgctcggaagacgtcgacgagtgtgagacacaagggcctccacactgtcgaaacggtggaacctgccagaactctgcaggatcctttcactgcgtctgcgtgtcaggatggggaggaacttcctgcgaggagaaccttgatgattgcattgccgccacgtgtgcccctgggtctacttgtatcgatagggtgggttcttttagctgcctgtgcccgccagggcgcacggggctgctgtgccatctggaagatatgtgcctgtctcagccctgtcatggggatgcccagtgttccaccaatcctttgacaggatccacactttgtctatgccaacccggctacagcgggcccacttgccatcaggatctcgatgagtgccttatggcgcaacagggaccttcaccatgcgaacatggcggctcctgcctgaatactcccggttccttcaattgcttgtgcccgcccggatatacaggatcaagatgcgaagctgaccacaatgagtgcttgtcccagccatgtcaccctggctccacatgtctggacttactcgcaaccttccactgtctgtgccctcctgggttagaaggccaactgtgcgaggttgaaaccaatgaatgtgctagcgccccctgcttgaatcacgccgattgccatgatcttctgaacggattccagtgcatatgccttcccggcttttctggcacacgctgtgaagaggatatcgatgaatgtaggtcttcaccctgtgccaacggaggacagtgtcaggatcagcctggggctttccactgtaaatgcttgcccggatttgagggccctcggtgccaaacagaggtcgatgaatgcctctcagatccgtgccctgtgggagctagctgtctcgacttaccaggcgcatttttttgtctctgccccagcgggtttaccgggcagctttgtgaggtcccactgtgtgcccccaatctttgtcagccgaaacagatctgcaaagatcaaaaggacaaggccaattgcctgtgccctgacggatcacccggctgtgccccccccgaggacaattgcacatgccaccatgggcactgccaacgctctagctgtgtttgtgacgtaggctggaccggccccgagtgtgaagcagaattgggtgggtgcatctctgcgccatgcgcccatggtgggacttgctacccccagccttcagggtacaactgtacttgccctactggttataccggcccgacgtgtagtgaggaaatgaccgcttgtcactccggaccttgtcttaatggtggatcttgcaacccatctccaggcgggtattactgtacctgtcctccgtctcacaccggcccgcagtgtcagacctccacggactattgcgtgagcgcaccctgctttaatgggggcacatgcgtgaacaggcctggcacctttagctgtctgtgcgctatgggattccaagggccaaggtgtgaagggaaactacgaccaagctgtgccgactctccctgccggaacagggccacctgtcaggattccccacaaggccccaggtgcctgtgcccgacaggctacacagggggctcctgccagactcttatggacttatgtgctcagaagccctgtccaagaaactcccactgtctacagactgggccatctttccattgcctttgtctgcagggctggaccggcccgctgtgtaacctgccgctgtcatcgtgccaaaaggccgcactgagccaaggtattgatgtgtccagcctgtgtcacaatggaggtctctgcgttgattcaggcccgtcctacttctgccattgccccccgggttttcagggctccttgtgtcaggatcatgtgaacccttgcgagagcagaccctgccagaacggcgcaacctgtatggctcagccctcaggatacctgtgccagtgtgcccccgggtacgatggccaaaattgtagcaaggagctagacgcctgccagtctcagccctgccacaaccatggaacatgtacacctaagccggggggcttccattgcgcgtgcccacccgggttcgtcggcctcagatgcgagggcgacgttgatgaatgccttgaccagccttgtcatccaacgggcacggctgcttgccattctctagctaacgccttctattgccagtgcttaccgggccacacaggccagtggtgcgaagtggaaattgacccgtgtcactcccaaccttgtttccacggaggtacctgcgaggctaccgctgggagcccactcggcttcatctgtcactgcccgaagggctttgaagggccgacatgctcccatcgtgccccatcttgtggctttcaccactgtcatcatggaggcctttgcctccccagtcctaaacctggcttcccaccccgttgtgcgtgccttagcgggtatgggggacctgactgcctcacgccccccgctccgaaggggtgtggtcctccttccccttgcctgtacaacggatcttgctcagagacaactggactggggggtcccggttttaggtgctcttgccctcatagttcccccggccctaggtgtcagaaacccggggctaaaggttgtgaaggcaggtcaggtgacggcgcttgtgacgccggatgcagtggcccaggagggaactgggacgggggcgactgttccttaggggttccagacccttggaaaggttgtccaagccatagccgctgctggctcctttttagggacggccaatgccatccacaatgtgatagcgaagaatgtctcttcgatggatatgactgtgagactccaccggcgtgcacccctgcatatgaccagtattgccatgaccattttcacaatggacattgtgagaaggggtgcaataccgctgaatgtggatgggatgggggggattgccggcccgaagatggcgatccggaatggggaccaagtctggcccttttggttgtgttatcacctcccgcccttgatcagcagctctttgcactcgctcgtgtcctgtcccttacactccgcgtgggtctgtgggtcaggaaggaccgggacggtagagacatggtatatccatacccaggcgctcgtgctgaagaaaaactcgggggaacacgagaccccacctaccaggagcgtgccgcacctcagacacagccactgggaaaggaaacagacagcctgtccgcaggcttcgtggtggtcatgggtgtcgacctgagccgctgtggaccggatcatccagcatccagatgtccgtgggaccctggcctgctgttgcggtttttagccgccatggcggccgttggtgcgctcgaacccctcctgcctggaccccttctagctgtccacccacatgcaggcaccgccccgccagccaaccaattgccgtggccagttttgtgctcccccgtggcgggggtgattcttcttgcactgggagctctgctggtacttcaattgattcggagaaggcgaagagaacacggggcactttggctccccccggggtttacccggcgacctcgtacacaatcagcaccccaccggaggcggccgcccctgggagaagattccattgggctgaaggccctgaagccgaaagccgaggtcgatgaggatggcgtggttatgtgcagcggcccagaggaaggagaggaggtgggacaagcagaggagaccggccctcccagcacttgccagctttggtccctctcagggggttgtggagccttgccacaggccgctatgctaacacctcctcaagaaagcgaaatggaagcaccggatttggacaccaggggcccggatggagtcaccccactgatgagtgccgtgtgctgcggagaagtgcagtctgggacgttccaaggggcctggctgggctgtccagagccatgggagcccctactggatggaggggcctgcccacaagctcacactgtgggcactggcgagacccccctccacctggcagctaggttttcccgccctaccgcagccagacgcctcctggaggctggggcaaatcccaaccagccagacagggctggtagaaccccactgcacgcggctgttgccgctgatgcccgggaagtctgtcaattgctcctgagaagccgtcaaaccgcagtagacgccaggacggaggatggaaccacacctctgatgttagccgccaggctggcggtggaagaccttgtggaagagctcatagctgcccaagcagacgtgggcgctcgggataaatggggaaaaaccgccctccattgggccgcagccgtcaataatgcacgcgccgccaggtccctcctacaagctggtgccgacaaggacgctcaggataacagggaacaaacaccgctgttccttgcagctcgcgaaggtgctgtcgaggtcgcccagctccttctgggactgggagcagcacgcgaactcagagaccaggccgggctggcccccgcggatgtagcgcaccagcggaatcattgggacctgctgaccttgctcgaaggggccggccctccagaggcccgtcataaggcaaccccggggagagaggcaggccctttccccagggcacgaacggtgtccgtctctgtccctccccacggcggcggtgccctgccacggtgtagaacactgtcggcgggtgccggtccgagaggcggcggggcctgcctgcaggcccgcacctggagcgtggacttggcagcccgggggggtggcgcctattcccactgcagatccctgagtggtgtaggagcgggcggaggacctacaccacgggggaggagattttccgcaggcatgagagggcctcgcccaaacccagccattatgcgaggtaggtatggcgtggcagccgggagaggtggtcgggttagtacagatgattggccttgcgattgggtcgccctgggagcttgcggcagcgcgtcaaatatcccaatacccccaccatgcctgactccttctcctgagaggggcagtcctcagcttgactgcggccctcccgccttacaggaaatgccaattaaccaaggtggggaggggaagaagtag

SEQ ID NO: 147534 - DNA, 6012 bp, Artificial Sequence
  derived and/or modified sequence
atgcaacccccctctctgttactcctgctgctcctgctgctcctcctctgtgtgagtgtcgtacggcctagggggctgctgtgcggctctttccccgaaccatgtgcaaacggggggacgtgcctgagtctgagcctaggccaggggacatgccagtgtgcccccggattccttggagagacttgccagttccctgatccttgccagaatgcacagctttgtcagaacggaggctcttgccaggcattgctgcctgctcctctcggccttccgtctagcccgagcccacttaccccatcgtttctgtgcacgtgccttccaggatttaccggggagcgttgccaggcaaagcttgaggatccttgtcctccgtctttctgctccaagagaggtcggtgccatatccaggcatcaggcaggccacagtgctcatgcatgccagggtggaccggcgaacagtgccagttgcgggatttctgtagcgcgaatccctgcgtcaacggcggcgtctgtctcgctacgtacccccagattcaatgtcactgtcctcctgggttcgagggacacgcttgcgagcgcgatgtgaacgaatgctttcaagaccctggcccgtgccccaagggcacatcttgtcacaacacacttggttcttttcaatgtctgtgtcccgtcggccaggaagggcctagatgcgagctgcgcgccggtccatgtccgccgagaggttgtagtaacggcggcacctgccagctgatgcccgaaaaggactcaacttttcatttgtgtctttgcccgcccggattcattggacccgactgtgaggtgaatccagataattgtgtaagccaccagtgccagaacgggggtacttgccaagatgggctggacacttacacatgcctctgccctgagacttggacggggtgggattgctccgaggacgttgacgaatgtgaaacccaaggtccccctcactgtaggaatggcggaacttgtcaaaattcagcaggcagctttcattgcgtatgtgtgtctggttggggtggcacatcctgcgaagagaacctggacgactgcattgctgccacctgcgcacctgggtcaacttgtatcgaccgcgtggggagtttctcatgcctgtgtccccccgggcgcacaggacttctttgccacctggaagacatgtgcctatcccagccatgtcacggcgatgctcagtgcagcactaatccactgacaggcagcacactctgtctctgccaacctggatacagcgggccaacttgccaccaagatttggatgagtgtctaatggcccagcagggcccctctccttgcgagcatggagggtcatgtttgaacaccccagggtcgttcaactgtctatgcccccccggctacacgggatcccggtgcgaggccgatcacaacgaatgtctgtcccagccctgccaccccggatctacatgcttggatttgctggcaaccttccactgtctgtgcccacctggactcgaaggccagctgtgcgaagtggaaaccaacgagtgtgcaagtgctccttgtctcaatcacgctgactgtcatgacttattaaacggctttcagtgtatctgtctcccaggattttccggcacccgttgcgaggaggatatcgacgaatgtaggtcatccccttgtgctaatggcgggcagtgccaggatcaacccggcgctttccattgtaagtgtctgcctgggtttgaaggccctcggtgtcaaactgaggttgatgaatgtctgagcgacccatgtcctgttggcgcttcatgtctggacctcccaggggccttcttctgtctgtgtccttccggtttcactgggcagctgtgcgaagttcctttgtgcgcccccaatctctgccagcccaaacagatctgcaaggatcagaaggataaggcgaactgcctgtgccctgacggaagcccgggatgtgctccacctgaagacaattgcacttgccatcatggtcactgccagagatccagctgcgtttgtgatgtcgggtggactgggcccgaatgtgaggccgaactcggcggatgcattagcgcgccttgcgcccatggcggaacttgctacccgcaacctagtggatacaactgcacgtgccctactggatacactggcccaacctgctccgaggagatgaccgcctgtcactcaggcccctgtctgaacggcggaagctgtaacccctcacctggcggctactactgcacctgcccgccctcacacacaggcccccagtgtcagacatctactgactactgcgtctccgctccatgtttcaacggcggcacctgcgtgaaccgacctgggaccttttcatgtctctgcgcaatgggcttccagggtccgaggtgtgagggcaagttgagacccagctgtgcagattccccatgtagaaacagagcgacatgtcaagactccccacaggggcctagatgcctgtgcccaactgggtatacaggcggtagctgccagacgctgatggatctctgcgctcagaaaccatgcccaagaaattcacattgcttacagacggggccctctttccattgcctgtgcttgcaggggtggacaggaccactgtgcaatctcccgttgtcgtcctgtcaaaaggccgcactcagtcaggggatcgatgttagttccttatgccacaatggtgggctttgtgttgactctggaccatcctacttttgccactgtcctcccggcttccaaggatctctgtgccaggatcacgtcaacccatgtgagagcaggccttgtcagaatggagcaacttgcatggcccagccgtccgggtatctctgccaatgcgcccccggctatgatggccagaactgctccaaagaattggacgcatgccagagccagccttgccataatcatggaacttgtacccctaaacctggaggttttcactgcgcctgtcctcccggcttcgttggtctgcgctgcgagggcgatgtcgacgagtgcctggaccaaccctgtcatccgactgggaccgcagcctgccactctctggcaaacgccttctattgccaatgcttacctggacacaccgggcaatggtgcgaagtggaaattgatccgtgccactctcaaccatgctttcatgggggtacttgcgaggcgaccgctggctcccctttaggcttcatatgccactgccccaagggatttgagggaccaacttgtagccaccgtgctccatcctgtggattccaccactgccaccacggggggctgtgcttgccatcgcctaaacccggttttcccccccgctgcgcgtgcctgagtggctacggcgggcccgactgcttgacccctcctgcccctaaaggatgcggccccccatcaccttgtctctacaacggttcgtgctctgagactaccggattaggaggaccagggtttcggtgcagctgtccacactcatccccaggtcctcggtgtcaaaaacctggagccaagggctgcgaaggcagatcaggagacggcgcatgcgatgcaggctgcagcggcccaggtggtaactgggatggcggggattgctcgctgggggtaccagatccctggaaaggctgcccctcccattctaggtgctggctcctgttcagggatgggcagtgtcaccctcaatgcgactccgaggaatgcttatttgatgggtatgactgtgaaacaccccctgcctgcacccctgcatacgatcagtactgccacgatcacttccacaatggtcattgtgaaaaaggatgtaacacggccgaatgtgggtgggatggaggggactgcaggcccgaagatggggatccagagtggggcccttccctggctctcctagtcgttctgagcccccccgcccttgaccaacagctcttcgcactggccagggtactgtcacttacacttagggtgggtctgtgggtgcggaaggaccgcgacgggagagacatggtgtatccctacccgggcgcccgtgccgaagagaagctggggggcactcgggaccctacatatcaagaaagagcagctccccagacccagcctctgggcaaggaaactgatagtctttcagcaggcttcgtcgtggtgatgggtgtggatctgagcaggtgcggccctgatcatccagccagtcgttgcccctgggaccctggccttctactgcgcttccttgcggccatggcggcagtgggggccctagagccactactgccaggcccattgctcgcagtgcacccacacgcgggtaccgccccaccagcaaaccaattgccttggccggtcctgtgcagccccgtcgccggtgttatccttctcgcactgggagccctccttgttcttcagcttattcgtaggagacggagagagcacggggcgctatggctgccccccggattcactaggcgaccacgaacacagtctgcccctcataggcgtcgcccaccgttgggtgaagactcaattggtcttaaggccctgaagcctaaggccgaagtagacgaagatggagtggtgatgtgctctggcccagaggagggcgaggaggttgggcaggccgaggagaccggtcccccctccacctgtcaactgtggtcgttgagtggtggttgtggcgccctgccccaggccgctatgcttacgccgccacaggaatctgaaatggaagctcccgatctggacacccgtggtccggatggtgtcacccctcttatgtctgctgtctgttgcggcgaggtgcagtccggcacgttccagggggcatggctgggctgtcctgaaccatgggagcccttgctcgatggtggcgcatgccctcaggcacacacggtaggtacaggggagacacccctgcacctggccgccaggtttagcaggccaactgcagctcggagactcttagaggcaggcgctaacccaaaccagcccgacagagctggccgcacccccctgcatgctgccgtggcggccgatgctcgcgaggtctgtcagcttttgctcaggagccgtcaaacggcggtggatgctcggactgaggatgggacaacacccctgatgcttgccgctaggctggcagtggaggacctggtcgaggagctgatcgcggcacaggccgatgtcggtgcccgcgataagtggggaaagaccgctctgcactgggctgcggccgtcaacaacgctcgagccgctaggtccctgcttcaagccggggctgataaagacgcccaagacaatcgcgagcagactcccctattccttgcggctagagagggcgcagtggaagtcgcccaactcttgctggggctaggggccgcacgagaacttcgcgaccaggctgggctggctcctgccgacgtggcccaccagcgtaaccactgggatttactcacgctactggaaggcgcaggtccaccagaggcgagacacaaagcaacccccggaagggaggccggtccctttccgagagcccgcaccgtaagtgtgagtgtgccacctcatggcggaggggcacttccaagatgtcgcaccctgtccgccggagccggaccgagagggggcggtgcgtgtttgcaggcacggacctggtcagtggacctggcagctcgcgggggaggtgcgtattcacattgccgcagtcttagtggggtcggcgccgggggagggcccacccccagaggcaggcgcttcagtgccggcatgagaggaccacggccaaacccagcgattatgcgcgggagatacggcgtggcggcgggtcgtggcggacgagtctcaaccgacgactggccatgtgattgggttgcactgggcgcttgcggcagcgcatccaatatcccaatccccccaccatgtctgacacctagcccagaacgaggatcaccacagttggattgcggacccccggcactgcaggaaatgccaatcaaccaggggggggaggggaagaagtag

SEQ ID NO: 147535 - DNA, 561 bp, Artificial Sequence
  derived and/or modified sequence
atgtccgccgtctgctgcggcgaagtgcagagcgggacgtttcaaggggcctggctggggtgtcccgagccatgggaacctctgctagatggaggggcatgcccacaggcccatacagtcgggaccggcgaaaccccattacatctcgccgctcgattttcgcgacccaccgcggccaggcgtcttttagaggcaggagcgaatccgaatcagccagaccgggccggtagaacccctctgcatgcggccgtcgcagctgacgccagggaagtgtgccagctgctactccgatcaagacagaccgctgtggatgctagaacggaagacggcacaaccccattaatgttggcggctcggctggctgtcgaggacctcgtggaggagctgatcgcggctcaggccgatgtgggagccagggacaaatggggcgccgacgctgccatcccaggtggagcaggtagaagcggcggttcatcacccgctaccgccggagcgggaggctcacctcgagcggctggccctggatgggctagtgccggagggaggagatcacccacatag

SEQ ID NO: 147536 - DNA, 561 bp, Artificial Sequence
  derived and/or modified sequence
atgtcggcagtgtgctgcggggaagtgcagtcagggacatttcagggcgcctggctcggatgcccagagccctgggagccactgctggacggaggcgcttgccctcaggcccacacggtaggtacaggcgaaaccccactccacctggcagcccgattcagtcggcccacagcagctcgccgcttgctagaggctggtgccaacccgaaccagcctgacagagctgggaggacaccacttcatgcagctgtagccgctgacgctcgggaggtgtgccagttactgttacgcagtcgccagacagccgtggatgctcgaaccgaagacggtaccacacccttgatgctagccgctaggctggctgtagaggacttggtggaggaactgatcgcggcacaagcagacgtgggggctcgggataagtggggcgctgatgctgccattcctggcggggccggcagaagtggcgggagctctcccgcaaccgccggggccggcgggagtcctagagccgcaggccccggctgggctagcgccggagggcggcggagccccacatag

SEQ ID NO: 147537 - DNA, 561 bp, Artificial Sequence
  derived and/or modified sequence
atgtccgctgtgtgctgcggagaggtccaaagcgggacattccaaggtgcatggttaggatgcccagagccgtgggagcccctgctcgacggtggggcctgcccccaggcgcacactgtcgggacaggagagactccacttcaccttgccgctcggttctccagacccaccgcagccaggagactgttggaagctggcgcaaacccaaatcaaccggatcgagccgggcggacccctctgcatgccgccgttgctgccgatgcacgcgaggtgtgtcagctcttgctccgcagtcggcaaactgccgtggatgcccgcaccgaggacgggacaactccactaatgttagcagcacgactcgcagtggaagacttagttgaggagctcatagcagctcaagcagatgtgggagcccgggataagtggggtgcagacgcagccatcccagggggcgcaggacgctcaggcggtagctcgccagctactgcaggtgctggggggagtcccagagccgctggtcctggctgggcatctgccggagggcggcggagtcctacatag

SEQ ID NO: 147538 - DNA, 561 bp, Artificial Sequence
  derived and/or modified sequence
atgtccgctgtttgctgcggagaggtccaaagcggaacatttcagggggcgtggctaggctgtcccgagccatgggagccactgctggacggcggcgcttgccctcaggcacacacagttggtacaggcgagacccctctccacctggcggctcgcttcagccgacccactgctgccaggagactgttagaggccggggccaatcccaatcagcccgaccgggctggccgaaccccactgcacgcggctgtcgccgctgacgccagagaggtgtgtcagctgttgttacgctcccgacaaactgcagtggacgcccggactgaagacgggacaacgccactgatgttggcagcacgactcgccgtcgaagaccttgtcgaggaactgattgctgcgcaggccgacgtcggggctcgagacaaatggggcgctgatgccgccatccccggcggcgccgggaggtctggaggcagtagccccgctactgctggggcaggcggcagtcctagggcggccggcccagggtgggctagtgccgggggccgaagatcccctacctag

SEQ ID NO: 147539 - DNA, 561 bp, Artificial Sequence
  derived and/or modified sequence
atgtctgcagtgtgttgtggcgaggtgcagtccggaaccttccagggggcgtggctcggatgtccagagccgtgggagccactacttgacggtggtgcatgtcctcaggctcataccgtaggtactggagagaccccactgcaccttgcagcacggttctctaggccgaccgccgcaagaagactgctcgaagctggcgccaacccaaaccagccagaccgggccgggcggacacccctgcacgcagccgtagccgccgacgcccgggaagtgtgtcagcttctgctgcgtagcagacagaccgctgttgatgcccgaactgaggacggcacaacgcctctgatgctcgcagcccgcttggctgtcgaagatctggttgaagaactgatagccgcacaagccgatgtgggcgctagggataagtggggagctgacgcagctataccaggtggagcaggacggtccggcggctcatcccctgctaccgccggcgccggagggtcccccagagccgccggacccgggtgggcctcagcaggaggccgcagatcgccgacttag

SEQ ID NO: 147540 - DNA, 6012 bp, Artificial Sequence
  derived and/or modified sequence
atgcagccccccagcctgctgctgctgctgctgctgctgctgctgctgtgtgtgtctgtggtgcggccccggggcctgctgtgtggcagcttccctgagccctgtgccaatggaggcacctgcctgagcctgagcctgggccagggcacctgccagtgtgcccctggcttcctgggggagacctgccagttcccagacccctgccagaatgcccagctgtgccagaatggaggcagctgccaggccctgctgcctgcccccctgggcctgcccagcagccccagccccctgacccccagcttcctgtgcacctgcctgcccggcttcaccggggagcgctgccaggccaagctggaggacccctgccccccatccttctgcagcaagaggggccgctgccacatccaggccagcggccggccccagtgcagctgcatgcctggctggacaggagagcagtgccagctgcgggacttctgcagcgccaacccctgtgtgaatggaggagtgtgcctggccacctacccccagatccagtgccactgccccccaggctttgagggccacgcctgtgaaagagatgtgaatgaatgcttccaggaccccggcccctgccccaagggcaccagctgccacaacaccctgggcagcttccagtgcctgtgccctgtgggccaggagggcccccgctgtgagctgcgggccggcccctgccccccccggggctgcagcaatggaggcacctgccagctgatgcctgagaaggacagcaccttccacctgtgcctgtgccccccaggcttcatcggccctgactgtgaggtgaacccagacaactgtgtgagccaccagtgccagaatggaggcacctgccaggacggcctggacacctacacctgcctgtgcccagagacctggacaggctgggactgcagtgaagatgtggatgaatgtgagacccagggccccccccactgcagaaatggaggcacctgccagaacagcgctggcagcttccactgtgtgtgtgtgtctggctggggcggcaccagctgtgaggagaacctggatgactgcatcgccgccacctgtgcccctggcagcacctgcatcgacagagtgggcagcttcagctgcctgtgccccccaggccgcacaggcctgctgtgccacctggaggacatgtgcctgagccagccctgccacggagatgcccagtgcagcaccaaccccctgaccggcagcaccctgtgcctgtgccagcccggctacagcggccccacctgccaccaggacctggatgaatgtctgatggcccagcagggccccagcccctgtgagcacggcggcagctgcctgaacaccccaggcagcttcaactgcctgtgccccccaggctacacaggcagccgctgtgaggccgaccacaatgaatgtctgagccagccctgccaccctggcagcacctgcctggacctgctggccaccttccactgcctgtgccccccaggcctggagggccagctgtgtgaggtggagaccaatgaatgtgccagcgccccctgcctgaaccacgccgactgccacgacctgctgaatggcttccagtgcatctgcctgcccggcttcagcggcacccgctgtgaggaggacattgatgagtgccgcagcagcccctgtgccaacggcggccagtgccaggaccagcccggggccttccactgcaagtgcctgcccggctttgagggcccccgctgccagacagaggtggatgagtgcctgagtgacccctgccctgtgggcgccagctgcctggacctgcccggggccttcttctgcctgtgccccagcggcttcaccggccagctgtgtgaggtgcccctgtgtgcccccaacctgtgccagcccaagcagatctgcaaggaccagaaggacaaggccaactgcctgtgcccagatggcagccctggctgtgcccctcctgaggacaactgcacctgccaccacggccactgccagaggagcagctgtgtgtgtgatgtgggctggacaggcccagaatgtgaggccgagctgggcggctgcatcagcgccccctgtgcccacggcggcacctgctacccccagcccagcggctacaactgcacctgccccaccggctacacaggccccacctgcagcgaggagatgacagcctgccacagcggcccctgcctgaatggaggcagctgcaaccccagccctgggggctactactgcacctgcccccccagccacacaggcccccagtgccagaccagcacagactactgtgtgtctgccccctgcttcaacggcggcacctgtgtgaaccggcccggcaccttcagctgcctgtgtgccatgggcttccagggcccccgctgtgagggcaagctgcggcccagctgtgccgacagcccctgcaggaacagagccacctgccaggacagcccccagggcccccgctgcctgtgccccaccggctacacaggaggcagctgccagaccctgatggacctgtgtgcccagaagccctgccccaggaacagccactgcctgcagacaggccccagcttccactgcctgtgcctgcagggctggacaggccccctgtgcaacctgcccctgagcagctgccagaaggccgccctgagccagggcattgatgtgagcagcctgtgccacaatggaggcctgtgtgtggacagcggccccagctacttctgccactgccccccaggcttccagggcagcctgtgccaggaccacgtgaacccctgtgagagccggccctgccagaatggagccacctgcatggcccagcccagcggctacctgtgccagtgtgcccctggctatgatggccagaactgcagcaaggagctggatgcctgccagagccagccctgccacaaccacggcacctgcacccccaagccaggcggcttccactgtgcctgccccccaggctttgtgggcctgcgctgtgaaggagatgtggatgaatgtctggaccagccctgccaccccaccggcacagctgcctgccacagcctggccaatgccttctactgccagtgcctgcccggccacacaggccagtggtgtgaggtggagattgacccctgccacagccagccctgcttccatggaggcacctgtgaggccacagctggcagccccctgggcttcatctgccactgccccaagggctttgagggccccacctgcagccaccgggcccccagctgtggcttccaccactgccaccacggcggcctgtgcctgcccagccccaagccaggcttccccccaagatgtgcctgcctgagcggctacggcggccctgactgcctgaccccaccagcccccaagggctgcggcccccccagcccctgcctgtacaacggcagctgcagcgagaccaccggcctgggcggccctggcttccgctgcagctgcccccacagcagccctggcccccgctgccagaagccaggggccaagggctgtgagggccgctctggagatggagcctgtgatgctggctgcagcggccctgggggcaactgggatggaggagactgcagcctgggcgtgcctgacccctggaagggctgccccagccacagccgctgctggctgctcttcagagatggccagtgccacccccagtgtgacagtgaagaatgtctgtttgatggctatgactgtgagaccccaccagcctgcaccccagcctatgaccagtactgccacgaccacttccacaacggccactgtgagaagggctgcaacacagcagaatgtggctgggatggaggagactgcaggccagaagatggagaccctgagtggggccccagcctggccctgctggtggtgctgagccccccagccctggaccagcagctgtttgccctggcccgggtgctgagcctgaccctgcgggtgggcctgtgggtgaggaaggacagagatggccgggacatggtgtacccctacccaggggcccgggcagaggagaagctgggcggcacccgggaccccacctaccaggagagagctgccccccagacccagcccctgggcaaggagacagacagcctgtctgctggctttgtggtggtgatgggcgtggacctgagccgctgtggccctgaccacccagccagccgctgcccctgggaccccggcctgctgctgcgcttcctggccgccatggctgctgtgggcgccctggagcccctgctgcccggccccctgctggccgtgcacccccacgccggcacagcccccccagccaaccagctgccctggcctgtgctgtgcagccctgtggccggggtcatcctgctggccctgggcgccctgctggtgctgcagctgatcagaagaagaagaagagagcacggggccctgtggctgcccccaggcttcacccggcggcccaggacccagagcgccccccacagaagaagaccacccctgggggaggacagcatcggcctgaaggccctgaagcccaaggccgaggtggatgaagatggagtggtgatgtgcagcggccctgaggagggggaggaggtgggccaggccgaggagactggaccacccagcacctgccagctgtggagcctgagcggcggctgtggggccctgccccaggccgccatgctgaccccaccccaggagagcgagatggaggccccagacctggacacccggggcccagatggagtgacccccctgatgtctgctgtgtgctgcggggaggtgcagagcggcaccttccagggcgcctggctgggctgcccagagccctgggagcccctgctggatggaggagcctgcccccaggcccacacagtgggcactggagagacccccctgcacctggccgcccgcttcagccggcccacagctgcccggcggctgctggaggccggggccaaccccaaccagcctgaccgggccggccgcacccccctgcatgctgctgtggccgcagatgcccgggaggtgtgccagctgctgctgcggagccggcagacagctgtggatgccaggacagaagatggcaccacccccctgatgctggccgcccggctggccgtggaggacctggtggaggagctgattgctgcccaggctgatgtgggcgcccgggacaagtggggcaagacagccctgcactgggccgctgctgtgaacaatgcccgggccgcccggagcctgctgcaggccggggctgacaaggatgcccaggacaaccgggagcagacccccctcttcctggccgcccgggagggcgctgtggaggtggcccagctgctgctgggcctgggcgccgcccgggagctgcgggaccaggccggcctggccccagcagatgtggcccaccagaggaaccactgggacctgctgaccctgctggagggcgccggccccccagaggcccggcacaaggccaccccaggccgggaggccggccccttcccccgggccaggacagtgtctgtgtctgtgccccctcatggaggaggagccctgccccgctgcaggaccctgtctgctggggccggcccccggggcggcggggcctgcctgcaggcccggacctggagcgtggacctggccgcccggggcggcggggcctacagccactgccgcagcctgtctggagtgggcgccggcggcggccccaccccccggggccgccgcttctctgctggcatgaggggcccccggcccaacccagccatcatgaggggccgctatggagtggccgccggccggggcggccgggtgtccacagatgactggccctgtgactgggtggccctgggcgcctgtggcagcgccagcaacatccccatccccccaccctgcctgacccccagccctgagcggggcagcccccagctggactgtggccccccagccctgcaggagatgcccatcaaccagggcggggagggcaagaagtag

SEQ ID NO: 147541 - DNA, 3147 bp, Artificial Sequence
  derived and/or modified sequence
tgtgcccctggctatgatggccagaactgcagcaaggagctggatgcctgccagagccagccctgccacaaccacggcacctgcacccccaagccaggcggcttccactgtgcctgccccccaggctttgtgggcctgcgctgtgaaggagatgtggatgagtgcctggaccagccctgccaccccactggaacagctgcctgccacagcctggccaatgccttctactgccagtgcctgcccggccacacaggccagtggtgtgaggtggagattgacccctgccacagccagccctgcttccacggcggcacctgtgaggccacagctggcagccccctgggcttcatctgccactgccccaagggctttgagggccccacctgcagccaccgggcccccagctgtggcttccaccactgccaccacggcggcctgtgcctgcccagccccaagccaggcttccccccaagatgtgcctgcctgagcggctatggaggccctgactgcctgaccccaccagcccccaagggctgcggcccccccagcccctgcctgtacaacggcagctgcagcgagaccaccggcctgggcggccctggcttccgctgcagctgcccccacagcagccctggcccccgctgccagaagccaggggccaagggctgtgagggccgctctggagatggagcctgtgatgctggctgcagcggccctgggggcaactgggatggaggagactgcagcctgggcgtgcctgacccctggaagggctgccccagccacagccgctgctggctgctcttcagagatggccagtgccacccccagtgtgacagcgaggagtgcctgtttgatggctatgactgtgagaccccaccagcctgcaccccagcctatgaccagtactgccacgaccacttccacaacggccactgtgagaagggctgcaacacagcagaatgtggctgggatggaggagactgcaggccagaagatggagaccctgagtggggccccagcctggccctgctggtggtgctgagccccccagccctggaccagcagctgtttgccctggcccgggtgctgagcctgaccctgcgggtgggcctgtgggtgaggaaggacagagatggccgggacatggtgtacccctacccaggggcccgggcagaggagaagctgggcggcacccgggaccccacctaccaggagcgggccgccccccagacccagcccctgggcaaggagacagacagcctgtctgctggctttgtggtggtgatgggcgtggacctgagccgctgtggccctgaccacccagccagccgctgcccctgggaccccggcctgctgctgcgcttcctggccgccatggctgctgtgggcgccctggagcccctgctgcccggccccctgctggccgtgcacccccatgctggaacagcccccccagccaaccagctgccctggcctgtgctgtgcagccctgtggccggggtcatcctgctggccctgggcgccctgctggtgctgcagctgatcagaagaagaagaagagaacatggagccctgtggctgcccccaggcttcacccggcggcccaggacccagagcgccccccacagaagaagaccacccctgggagaagattccatcggcctgaaggccctgaagcccaaggccgaggtggatgaagatggagtggtgatgtgcagcggccctgaggagggggaggaggtgggccaggccgaggagaccggcccccccagcacctgccagctgtggagcctgagcggcggctgtggggccctgccccaggccgccatgctgaccccaccccaggagagcgagatggaggccccagacctggacacccggggcccagatggagtgacccccctgatgtctgctgtgtgctgcggggaggtgcagagcggcaccttccagggcgcctggctgggctgcccagagccctgggagcccctgctggatggaggagcctgcccccaggcccacacagtgggcaccggggagacccccctgcacctggccgcccgcttcagccggcccacagctgcccggcggctgctggaggccggggccaaccccaaccagcctgacagagctggccgcacccccctgcacgccgctgtggccgcagatgcccgggaggtgtgccagctgctgctgcggagccggcagacagctgtggatgccaggacagaagatggcaccacccccctgatgctggccgcccggctggccgtggaggacctggtggaggagctgattgctgcccaggctgatgtgggcgcccgggacaagtggggcaagacagccctgcactgggccgctgctgtgaacaatgcccgggccgcccggagcctgctgcaggccggggctgacaaggatgcccaggacaaccgggagcagacccccctcttcctggccgcccgggagggcgctgtggaggtggcccagctgctgctgggcctgggcgccgcccgggagctgcgggaccaggccggcctggccccagcagatgtggcccaccagaggaaccactgggacctgctgaccctgctggagggcgccggccccccagaggcccggcacaaggccaccccaggccgggaggccggccccttcccccgggccaggacagtgtctgtgtctgtgcccccccacggcggcggggccctgccccgctgcaggaccctgtctgctggagctggcccccggggcggcggggcctgcctgcaggcccggacctggagcgtggacctggccgcccggggcggcggggcctacagccactgccgcagcctgagcggcgtgggcgctgggggcggccccaccccccggggccgccgcttctctgctggcatgaggggcccccggcccaacccagccatcatgaggggccgctatggagtggccgccggccggggcggccgggtgtccacagatgactggccctgtgactgggtggccctgggcgcctgtggcagcgccagcaacatccccatccccccaccctgcctgacccccagccctgagcggggcagcccccagctggactgtggccccccagccctgcaggagatgcccatcaaccagggcggggagggcaagaagtag

SEQ ID NO: 147542 - DNA, 6018 bp, Artificial Sequence
  derived and/or modified sequence
atgcagccccccagcctgctgctgctgctgctgctgctgctgctgctgctgctgtgtgtgtctgtggtgcggccccggggcctgctgtgtggcagcttccctgagccctgtgccaatggaggcacctgcctgagcctgagcctgggccagggcacctgccagtgtgcccctggcttcctgggggagacctgccagttcccagacccctgccagaatgcccagctgtgccagaatggaggcagctgccaggccctgctgcctgcccccctgggcctgcccagcagccccagccccctgacccccagcttcctgtgcacctgcctgcccggcttcaccggggagcgctgccaggcccagctggaggacccctgccccccatccttctgcagcaagaggggccgctgccacatccaggccagcggccggccccagtgcagctgcatgcctggctggacaggagagcagtgccagctgcgggacttctgcagcgccaacccctgtgtgaatggaggagtgtgcctggccacctacccccagatccagtgccactgccccccaggctttgagggccacgcctgtgaaagagatgtgaatgaatgcttccaggaccccggcccctgccccaagggcaccagctgccacaacaccctgggcagcttccagtgcctgtgccctgtgggccaggagggcccccgctgtgagctgcgggccggcccctgccccccccggggctgcagcaatggaggcacctgccagctgatgcctgagaaggacagcaccttccacctgtgcctgtgccccccaggcttcatcggccctgactgtgaggtgaacccagacaactgtgtgagccaccagtgccagaatggaggcacctgccaggacggcctggacacctacacctgcctgtgcccagagacctggacaggctgggactgcagtgaagatgtggatgaatgtgaggcccagggccccccccactgcagaaatggaggcacctgccagaacagcgctggcagcttccactgtgtgtgtgtgtctggctggggcggcaccagctgtgaggagaacctggatgactgcatcgccgccacctgtgcccctggcagcacctgcatcgacagagtgggcagcttcagctgcctgtgccccccaggccgcacaggcctgctgtgccacctggaggacatgtgcctgagccagccctgccacggagatgcccagtgcagcaccaaccccctgaccggcagcaccctgtgcctgtgccagcccggctacagcggccccacctgccaccaggacctggatgaatgtctgatggcccagcagggccccagcccctgtgagcacggcggcagctgcctgaacaccccaggcagcttcaactgcctgtgccccccaggctacacaggcagccgctgtgaggccgaccacaatgaatgtctgagccagccctgccaccctggcagcacctgcctggacctgctggccaccttccactgcctgtgccccccaggcctggagggccagctgtgtgaggtggagaccaatgaatgtgccagcgccccctgcctgaaccacgccgactgccacgacctgctgaatggcttccagtgcatctgcctgcccggcttcagcggcacccgctgtgaggaggacattgatgagtgccgcagcagcccctgtgccaacggcggccagtgccaggaccagcccggggccttccactgcaagtgcctgcccggctttgagggcccccgctgccagacagaggtggatgagtgcctgagtgacccctgccctgtgggcgccagctgcctggacctgcccggggccttcttctgcctgtgccccagcggcttcaccggccagctgtgtgaggtgcccctgtgtgcccccaacctgtgccagcccaagcagatctgcaaggaccagaaggacaaggccaactgcctgtgcccagatggcagccctggctgtgcccctcctgaggacaactgcacctgccaccacggccactgccagaggagcagctgtgtgtgtgatgtgggctggacaggcccagaatgtgaggccgagctgggcggctgcatcagcgccccctgtgcccacggcggcacctgctacccccagcccagcggctacaactgcacctgccccaccggctacacaggccccacctgcagcgaggagatgacagcctgccacagcggcccctgcctgaatggaggcagctgcaaccccagccctgggggctactactgcacctgcccccccagccacacaggcccccagtgccagaccagcacagactactgtgtgtctgccccctgcttcaacggcggcacctgtgtgaaccggcccggcaccttcagctgcctgtgtgccatgggcttccagggcccccgctgtgagggcaagctgcggcccagctgtgccgacagcccctgcaggaacagagccacctgccaggacagcccccagggcccccgctgcctgtgccccaccggctacacaggaggcagctgccagaccctgatggacctgtgtgcccagaagccctgccccaggaacagccactgcctgcagacaggccccagcttccactgcctgtgcctgcagggctggacaggccccctgtgcaacctgcccctgagcagctgccagaaggccgccctgagccagggcattgatgtgagcagcctgtgccacaatggaggcctgtgtgtggacagcggccccagctacttctgccactgccccccaggcttccagggcagcctgtgccaggaccacgtgaacccctgtgagagccggccctgccagaatggagccacctgcatggcccagcccagcggctacctgtgccagtgtgcccctggctatgatggccagaactgcagcaaggagctggatgcctgccagagccagccctgccacaaccacggcacctgcacccccaagccaggcggcttccactgtgcctgccccccaggctttgtgggcctgcgctgtgaaggagatgtggatgaatgtctggaccagccctgccaccccaccggcacagctgcctgccacagcctggccaatgccttctactgccagtgcctgcccggccacacaggccagtggtgtgaggtggagattgacccctgccacagccagccctgcttccatggaggcacctgtgaggccacagctggcagccccctgggcttcatctgccactgccccaagggctttgagggccccacctgcagccaccgggcccccagctgtggcttccaccactgccaccacggcggcctgtgcctgcccagccccaagccaggcttccccccaagatgtgcctgcctgagcggctacggcggccctgactgcctgaccccaccagcccccaagggctgcggcccccccagcccctgcctgtacaacggcagctgcagcgagaccaccggcctgggcggccctggcttccgctgcagctgcccccacagcagccctggcccccgctgccagaagccaggggccaagggctgtgagggccgctctggagatggagcctgtgatgctggctgcagcggccctgggggcaactgggatggaggagactgcagcctgggcgtgcctgacccctggaagggctgccccagccacagccgctgctggctgctcttcagagatggccagtgccacccccagtgtgacagtgaagaatgtctgtttgatggctatgactgtgagaccccaccagcctgcaccccagcctatgaccagtactgccacgaccacttccacaacggccactgtgagaagggctgcaacacagcagaatgtggctgggatggaggagactgcaggccagaagatggagaccctgagtggggccccagcctggccctgctggtggtgctgagccccccagccctggaccagcagctgtttgccctggcccgggtgctgagcctgaccctgcgggtgggcctgtgggtgaggaaggacagagatggccgggacatggtgtacccctacccaggggcccgggcagaggagaagctgggcggcacccgggaccccacctaccaggagagagctgccccccagacccagcccctgggcaaggagacagacagcctgtctgctggctttgtggtggtgatgggcgtggacctgagccgctgtggccctgaccacccagccagccgctgcccctgggaccccggcctgctgctgcgcttcctggccgccatggctgctgtgggcgccctggagcccctgctgcccggccccctgctggccgtgcacccccacgccggcacagcccccccagccaaccagctgccctggcctgtgctgtgcagccctgtggccggggtcatcctgctggccctgggcgccctgctggtgctgcagctgatcagaagaagaagaagagagcacggggccctgtggctgcccccaggcttcacccggcggcccaggacccagagcgccccccacagaagaagaccacccctgggggaggacagcatcggcctgaaggccctgaagcccaaggccgaggtggatgaagatggagtggtgatgtgcagcggccctgaggagggggaggaggtgggccaggccgaggagactggaccacccagcacctgccagctgtggagcctgagcggcggctgtggggccctgccccaggccgccatgctgaccccaccccaggagagcgagatggaggccccagacctggacacccggggcccagatggagtgacccccctgatgtctgctgtgtgctgcggggaggtgcagagcggcaccttccagggcgcctggctgggctgcccagagccctgggagcccctgctggatggaggagcctgcccccaggcccacacagtgggcactggagagacccccctgcacctggccgcccgcttcagccggcccacagctgcccggcggctgctggaggccggggccaaccccaaccagcctgaccgggccggccgcacccccctgcatgctgctgtggccgcagatgcccgggaggtgtgccagctgctgctgcggagccggcagacagctgtggatgccaggacagaagatggcaccacccccctgatgctggccgcccggctggccgtggaggacctggtggaggagctgattgctgcccaggctgatgtgggcgcccgggacaagtggggcaagacagccctgcactgggccgctgctgtgaacaatgcccgggccgcccggagcctgctgcaggccggggctgacaaggatgcccaggacaaccgggagcagacccccctcttcctggccgcccgggagggcgctgtggaggtggcccagctgctgctgggcctgggcgccgcccgggagctgcgggaccaggccggcctggccccagcagatgtggcccaccagaggaaccactgggacctgctgaccctgctggagggcgccggccccccagaggcccggcacaaggccaccccaggccgggaggccggccccttcccccgggccaggacagtgtctgtgtctgtgccccctcatggaggaggagccctgccccgctgcaggaccctgtctgctggggccggcccccggggcggcggggcctgcctgcaggcccggacctggagcgtggacctggccgcccggggcggcggggcctacagccactgccgcagcctgtctggagtgggcgccggcggcggccccaccccccggggccgccgcttctctgctggcatgaggggcccccggcccaacccagccatcatgaggggccgctatggagtggccgccggccggggcggccgggtgtccacagatgactggccctgtgactgggtggccctgggcgcctgtggcagcgccagcaacatccccatccccccaccctgcctgacccccagccctgagcggggcagcccccagctggactgtggccccccagccctgcaggagatgcccatcaaccagggcggggagggcaagaagtag

SEQ ID NO: 147543 - DNA, 6012 bp, Artificial Sequence
  derived and/or modified sequence
atgcagccccccagcctgctgctgctgctgctgctgctgctgctgctgtgtgtgtctgtggtgcggccccggggcctgctgtgtggcagcttccctgagccctgtgccaatggaggcacctgcctgagcctgagcctgggccagggcacctgccagtgtgcccctggcttcctgggggagacctgccagttcccagacccctgccagaatgcccagctgtgccagaatggaggcagctgccaggccctgctgcctgcccccctgggcctgcccagcagccccagccccctgacccccagcttcctgtgcacctgcctgcccggcttcaccggggagcgctgccaggcccagctggaggacccctgccccccatccttctgcagcaagaggggccgctgccacatccaggccagcggccggccccagtgcagctgcatgcctggctggacaggagagcagtgccagctgcgggacttctgcagcgccaacccctgtgtgaatggaggagtgtgcctggccacctacccccagatccagtgccactgccccccaggctttgagggccacgcctgtgaaagagatgtgaatgaatgcttccaggaccccggcccctgccccaagggcaccagctgccacaacaccctgggcagcttccagtgcctgtgccctgtgggccaggagggcccccgctgtgagctgcgggccggcccctgccccccccggggctgcagcaatggaggcacctgccagctgatgcctgagaaggacagcaccttccacctgtgcctgtgccccccaggcttcatcggccctgactgtgaggtgaacccagacaactgtgtgagccaccagtgccagaatggaggcacctgccaggacggcctggacacctacacctgcctgtgcccagagacctggacaggctgggactgcagtgaagatgtggatgaatgtgagacccagggccccccccactgcagaaatggaggcacctgccagaacagcgctggcagcttccactgtgtgtgtgtgtctggctggggcggcaccagctgtgaggagaacctggatgactgcatcgccgccacctgtgcccctggcagcacctgcatcgacagagtgggcagcttcagctgcctgtgccccccaggccgcacaggcctgctgtgccacctggaggacatgtgcctgagccagccctgccacggagatgcccagtgcagcaccaaccccctgaccggcagcaccctgtgcctgtgccagcccggctacagcggccccacctgccaccaggacctggatgaatgtctgatggcccagcagggccccagcccctgtgagcacggcggcagctgcctgaacaccccaggcagcttcaactgcctgtgccccccaggctacacaggcagccgctgtgaggccgaccacaatgaatgtctgagccagccctgccaccctggcagcacctgcctggacctgctggccaccttccactgcctgtgccccccaggcctggagggccagctgtgtgaggtggagaccaatgaatgtgccagcgccccctgcctgaaccacgccgactgccacgacctgctgaatggcttccagtgcatctgcctgcccggcttcagcggcacccgctgtgaggaggacattgatgagtgccgcagcagcccctgtgccaacggcggccagtgccaggaccagcccggggccttccactgcaagtgcctgcccggctttgagggcccccgctgccagacagaggtggatgagtgcctgagtgacccctgccctgtgggcgccagctgcctggacctgcccggggccttcttctgcctgtgccccagcggcttcaccggccagctgtgtgaggtgcccctgtgtgcccccaacctgtgccagcccaagcagatctgcaaggaccagaaggacaaggccaactgcctgtgcccagatggcagccctggctgtgcccctcctgaggacaactgcacctgccaccacggccactgccagaggagcagctgtgtgtgtgatgtgggctggacaggcccagaatgtgaggccgagctgggcggctgcatcagcgccccctgtgcccacggcggcacctgctacccccagcccagcggctacaactgcacctgccccaccggctacacaggccccacctgcagcgaggagatgacagcctgccacagcggcccctgcctgaatggaggcagctgcaaccccagccctgggggctactactgcacctgcccccccagccacacaggcccccagtgccagaccagcacagactactgtgtgtctgccccctgcttcaacggcggcacctgtgtgaaccggcccggcaccttcagctgcctgtgtgccatgggcttccagggcccccgctgtgagggcaagctgcggcccagctgtgccgacagcccctgcaggaacagagccacctgccaggacagcccccagggcccccgctgcctgtgccccaccggctacacaggaggcagctgccagaccctgatggacctgtgtgcccagaagccctgccccaggaacagccactgcctgcagacaggccccagcttccactgcctgtgcctgcagggctggacaggccccctgtgcaacctgcccctgagcagctgccagaaggccgccctgagccagggcattgatgtgagcagcctgtgccacaatggaggcctgtgtgtggacagcggccccagctacttctgccactgccccccaggcttccagggcagcctgtgccaggaccacgtgaacccctgtgagagccggccctgccagaatggagccacctgcatggcccagcccagcggctacctgtgccagtgtgcccctggctatgatggccagaactgcagcaaggagctggatgcctgccagagccagccctgccacaaccacggcacctgcacccccaagccaggcggcttccactgtgcctgccccccaggctttgtgggcctgcgctgtgaaggagatgtggatgaatgtctggaccagccctgccaccccaccggcacagctgcctgccacagcctggccaatgccttctactgccagtgcctgcccggccacacaggccagtggtgtgaggtggagattgacccctgccacagccagccctgcttccatggaggcacctgtgaggccacagctggcagccccctgggcttcatctgccactgccccaagggctttgagggccccacctgcagccaccgggcccccagctgtggcttccaccactgccaccacggcggcctgtgcctgcccagccccaagccaggcttccccccaagatgtgcctgcctgagcggctacggcggccctgactgcctgaccccaccagcccccaagggctgcggcccccccagcccctgcctgtacaacggcagctgcagcgagaccaccggcctgggcggccctggcttccgctgcagctgcccccacagcagccctggcccccgctgccagaagccaggggccaagggctgtgagggccgctctggagatggagcctgtgatgctggctgcagcggccctgggggcaactgggatggaggagactgcagcctgggcgtgcctgacccctggaagggctgccccagccacagccgctgctggctgctcttcagagatggccagtgccacccccagtgtgacagtgaagaatgtctgtttgatggctatgactgtgagaccccaccagcctgcaccccagcctatgaccagtactgccacgaccacttccacaacggccactgtgagaagggctgcaacacagcagaatgtggctgggatggaggagactgcaggccagaagatggagaccctgagtggggccccagcctggccctgctggtggtgctgagccccccagccctggaccagcagctgtttgccctggcccgggtgctgagcctgaccctgcgggtgggcctgtgggtgaggaaggacagagatggccgggacatggtgtacccctacccaggggcccgggcagaggagaagctgggcggcacccgggaccccacctaccaggagagagctgccccccagacccagcccctgggcaaggagacagacagcctgtctgctggctttgtggtggtgatgggcgtggacctgagccgctgtggccctgaccacccagccagccgctgcccctgggaccccggcctgctgctgcgcttcctggccgccatggctgctgtgggcgccctggagcccctgctgcccggccccctgctggccgtgcacccccacgccggcacagcccccccagccaaccagctgccctggcctgtgctgtgcagccctgtggccggggtcatcctgctggccctgggcgccctgctggtgctgcagctgatcagaagaagaagaagagagcacggggccctgtggctgcccccaggcttcacccggcggcccaggacccagagcgccccccacagaagaagaccacccctgggggaggacagcatcggcctgaaggccctgaagcccaaggccgaggtggatgaagatggagtggtgatgtgcagcggccctgaggagggggaggaggtgggccaggccgaggagactggaccacccagcacctgccagctgtggagcctgagcggcggctgtggggccctgccccaggccgccatgctgaccccaccccaggagagcgagatggaggccccagacctggacacccggggcccagatggagtgacccccctgatgtctgctgtgtgctgcggggaggtgcagagcggcaccttccagggcgcctggctgggctgcccagagccctgggagcccctgctggatggaggagcctgcccccaggcccacacagtgggcactggagagacccccctgcacctggccgcccgcttcagccggcccacagctgcccggcggctgctggaggccggggccaaccccaaccagcctgaccgggccggccgcacccccctgcatgctgctgtggccgcagatgcccgggaggtgtgccagctgctgctgcggagccggcagacagctgtggatgccaggacagaagatggcaccacccccctgatgctggccgcccggctggccgtggaggacctggtggaggagctgattgctgcccaggctgatgtgggcgcccgggacaagtggggcaagacagccctgcactgggccgctgctgtgaacaatgcccgggccgcccggagcctgctgcaggccggggctgacaaggatgcccaggacaaccgggagcagacccccctcttcctggccgcccgggagggcgctgtggaggtggcccagctgctgctgggcctgggcgccgcccgggagctgcgggaccaggccggcctggccccagcagatgtggcccaccagaggaaccactgggacctgctgaccctgctggagggcgccggccccccagaggcccggcacaaggccaccccaggccgggaggccggccccttcccccgggccaggacagtgtctgtgtctgtgccccctcatggaggaggagccctgccccgctgcaggaccctgtctgctggggccggcccccggggcggcggggcctgcctgcaggcccggacctggagcgtggacctggccgcccggggcggcggggcctacagccactgccgcagcctgtctggagtgggcgccggcggcggccccaccccccggggccgccgcttctctgctggcatgaggggcccccggcccaacccagccatcatgaggggccgctatggagtggccgccggccggggcggccgggtgtccacagatgactggccctgtgactgggtggccctgggcgcctgtggcagcgccagcaacatccccatccccccaccctgcctgacccccagccctgagcggggcagcccccagctggactgtggccccccagccctgcaggagatgcccatcaaccagggcggggagggcaagaagtag

SEQ ID NO: 147544 - DNA, 6009 bp, Artificial Sequence
  derived and/or modified sequence
atgcagccccccagcctgctgctgctgctgctgctgctgctgctgtgtgtgtctgtggtgcggccccggggcctgctgtgtggcagcttccctgagccctgtgccaacggcggcacctgcctgagcctgagcctgggccagggcacctgccagtgtgcccctggcttcctgggggagacctgccagttcccagacccctgccagaatgcccagctgtgccagaatggaggcagctgccaggccctgctgcctgcccccctgggcctgcccagcagccccagccccctgacccccagcttcctgtgcacctgcctgcccggcttcaccggggagcgctgccaggcccagctggaggacccctgcccccccagcttctgcagcaagaggggccgctgccacatccaggccagcggccggccccagtgcagctgcatgcctggctggacaggagagcagtgccagctgcgggacttctgcagcgccaacccctgtgtgaatggaggagtgtgcctggccacctacccccagatccagtgccactgccccccaggctttgagggccacgcctgtgaaagagatgtgaatgaatgcttccaggaccccggcccctgccccaagggcaccagctgccacaacaccctgggcagcttccagtgcctgtgccctgtgggccaggagggcccccgctgtgagctgcgggccggcccctgccccccccggggctgcagcaatggaggcacctgccagctgatgcctgagaaggacagcaccttccacctgtgcctgtgccccccaggcttcatcggccctgactgtgaggtgaacccagacaactgtgtgagccaccagtgccagaatggaggcacctgccaggacggcctggacacctacacctgcctgtgcccagagacctggacaggctgggactgcagtgaagatgtggatgaatgtgagacccagggccccccccactgcagaaatggaggcacctgccagaacagcgctggcagcttccactgtgtgtgtgtgtctggctggggcggcaccagctgtgaggagaacctggatgactgcatcgccgccacctgtgcccctggcagcacctgcatcgacagagtgggcagcttcagctgcctgtgccccccaggccgcacaggcctgctgtgccacctggaggacatgtgcctgagccagccctgccacggagatgcccagtgcagcaccaaccccctgaccggcagcaccctgtgcctgtgccagcccggctacagcggccccacctgccaccaggacctggatgagtgcctgatggcccagcagggccccagcccctgtgaacatggaggcagctgcctgaacaccccaggcagcttcaactgcctgtgccccccaggctacacaggcagccgctgtgaggccgaccacaatgaatgtctgagccagccctgccaccctggcagcacctgcctggacctgctggccaccttccactgcctgtgccccccaggcctggagggccagctgtgtgaggtggagaccaatgaatgtgccagcgccccctgcctgaaccacgccgactgccacgacctgctgaatggcttccagtgcatctgcctgcccggcttcagcggcacccgctgtgaagaagatattgatgaatgtcgcagcagcccctgtgccaatggaggccagtgccaggaccagcccggggccttccactgcaagtgcctgcccggctttgagggcccccgctgccagacagaggtggatgaatgtctgagtgacccctgccctgtgggcgccagctgcctggacctgcccggggccttcttctgcctgtgccccagcggcttcaccggccagctgtgtgaggtgcccctgtgtgcccccaacctgtgccagcccaagcagatctgcaaggaccagaaggacaaggccaactgcctgtgcccagatggcagccctggctgtgcccccccagaggacaactgcacctgccaccacggccactgccagaggagcagctgtgtgtgtgatgtgggctggacaggcccagaatgtgaggccgagctgggcggctgcatcagcgccccctgtgcccatggaggcacctgctacccccagcccagcggctacaactgcacctgccccaccggctacacaggccccacctgcagcgaggagatgacagcctgccacagcggcccctgcctgaatggaggcagctgcaaccccagccctgggggctactactgcacctgcccccccagccacacaggcccccagtgccagaccagcacagactactgtgtgtctgccccctgcttcaatggaggcacctgtgtgaacagacctggcaccttcagctgcctgtgtgccatgggcttccagggcccccgctgtgagggcaagctgcggcccagctgtgccgacagcccctgcaggaacagagccacctgccaggacagcccccagggcccccgctgcctgtgccccaccggctacacaggaggcagctgccagaccctgatggacctgtgtgcccagaagccctgccccaggaacagccactgcctgcagacaggccccagcttccactgcctgtgcctgcagggctggacaggccccctgtgcaacctgcccctgagcagctgccagaaggccgccctgagccagggcattgatgtgagcagcctgtgccacaacggcggcctgtgtgtggacagcggccccagctacttctgccactgccccccaggcttccagggcagcctgtgccaggaccacgtgaacccctgtgagagccggccctgccagaatggagccacctgcatggcccagcccagcggctacctgtgccagtgtgcccctggctatgatggccagaactgcagcaaggagctggatgcctgccagagccagccctgccacaaccacggcacctgcacccccaagccaggcggcttccactgtgcctgccccccaggctttgtgggcctgcgctgtgaaggagatgtggatgagtgcctggaccagccctgccaccccactggaacagctgcctgccacagcctggccaatgccttctactgccagtgcctgcccggccacacaggccagtggtgtgaggtggagattgacccctgccacagccagccctgcttccacggcggcacctgtgaggccacagctggcagccccctgggcttcatctgccactgccccaagggctttgagggccccacctgcagccaccgggcccccagctgtggcttccaccactgccaccacggcggcctgtgcctgcccagccccaagccaggcttccccccaagatgtgcctgcctgagcggctatggaggccctgactgcctgaccccaccagcccccaagggctgcggcccccccagcccctgcctgtacaacggcagctgcagcgagaccaccggcctgggcggccctggcttccgctgcagctgcccccacagcagccctggcccccgctgccagaagccaggggccaagggctgtgagggccgctctggagatggagcctgtgatgctggctgcagcggccctgggggcaactgggatggaggagactgcagcctgggcgtgcctgacccctggaagggctgccccagccacagccgctgctggctgctcttcagagatggccagtgccacccccagtgtgacagcgaggagtgcctgtttgatggctatgactgtgagaccccaccagcctgcaccccagcctatgaccagtactgccacgaccacttccacaacggccactgtgagaagggctgcaacacagcagaatgtggctgggatggaggagactgcaggccagaagatggagaccctgagtggggccccagcctggccctgctggtggtgctgagccccccagccctggaccagcagctgtttgccctggcccgggtgctgagcctgaccctgcgggtgggcctgtgggtgaggaaggacagagatggccgggacatggtgtacccctacccaggggcccgggcagaggagaagctgggcggcacccgggaccccacctaccaggagcgggccgccccccagacccagcccctgggcaaggagacagacagcctgtctgctggctttgtggtggtgatgggcgtggacctgagccgctgtggccctgaccacccagccagccgctgcccctgggaccccggcctgctgctgcgcttcctggccgccatggctgctgtgggcgccctggagcccctgctgcccggccccctgctggccgtgcacccccatgctggaacagcccccccagccaaccagctgccctggcctgtgctgtgcagccctgtggccggggtcatcctgctggccctgggcgccctgctggtgctgcagctgatcagaagaagaagaagagaacatggagccctgtggctgcccccaggcttcacccggcggcccaggacccagagcgccccccacagaagaagaccacccctgggagaagattccatcggcctgaaggccctgaagcccaaggccgaggtggatgaagatggagtggtgatgtgcagcggccctgaggagggggaggaggtgggccaggccgaggagaccggcccccccagcacctgccagctgtggagcctgagcggcggctgtggggccctgccccaggccgccatgctgaccccaccccaggagagcgagatggaggccccagacctggacacccggggcccagatggagtgacccccctgatgtctgctgtgtgctgcggggaggtgcagagcggcaccttccagggcgcctggctgggctgcccagagccctgggagcccctgctggatggaggagcctgcccccaggcccacacagtgggcaccggggagacccccctgcacctggccgcccgcttcagccggcccacagctgcccggcggctgctggaggccggggccaaccccaaccagcctgacagagctggccgcacccccctgcacgccgctgtggccgcagatgcccgggaggtgtgccagctgctgctgcggagccggcagacagctgtggatgccaggacagaagatggcaccacccccctgatgctggccgcccggctggccgtggaggacctggtggaggagctgattgctgcccaggctgatgtgggcgcccgggacaagtggggcaagacagccctgcactgggccgctgctgtgaacaatgcccgggccgcccggagcctgctgcaggccggggctgacaaggatgcccaggacaaccgggagcagacccccctcttcctggccgcccgggagggcgctgtggaggtggcccagctgctgctgggcctgggcgccgcccgggagctgcgggaccaggccggcctggccccagcagatgtggcccaccagaggaaccactgggacctgctgaccctgctggagggcgccggccccccagaggcccggcacaaggccaccccaggccgggaggccggccccttcccccgggccaggacagtgtctgtgtctgtgcccccccacggcggcggggccctgccccgctgcaggaccctgtctgctggagctggcccccggggcggcggggcctgcctgcaggcccggacctggagcgtggacctggccgcccggggcggcggggcctacagccactgccgcagcctgagcggcgtgggcgctgggggcggccccaccccccggggccgccgcttctctgctggcatgaggggcccccggcccaacccagccatcatgaggggccgctatggagtggccgccggccggggcggccgggtgtccacagatgactggccctgtgactgggtggccctgggcgcctgtggcagcgccagcaacatccccatccccccaccctgcctgacccccagccctgagcggggcagcccccagctggactgtggccccccagccctgcaggagatgcccatcaaccagggcggggagggcaagaagtag

SEQ ID NO: 147545 - DNA, 6012 bp, Artificial Sequence
  derived and/or modified sequence
atgcagccccccagcctgctgctgctgctgctgctgctgctgctgctgtgcgtttccgtagtgagacctcgcggattactgtgcggatctttccccgaaccctgtgccaacgggggcacatgcctctctctgagcctcgggcagggaacctgccagtgcgcgccgggatttctgggcgagacctgtcagttcccagatccatgccagaatgctcagctgtgccaaaacggcggatcctgccaggccctcctgcccgcccccttgggcctaccatcaagtcccagccccttgactcccagtttcttgtgtacatgccttccaggattcaccggggaacgatgccaggccaaattagaagatccctgtccaccctcgttttgttcgaaacgcggacggtgccacatacaggccagcggcagaccgcagtgcagctgcatgccaggatggactggagagcagtgtcagttaagagatttctgttcagcgaatccttgtgtgaatggcggggtctgccttgcgacctacccgcagatccaatgtcattgcccacccggcttcgagggccacgcgtgcgagcgggacgtgaacgaatgtttccaagaccccgggccctgtcccaaaggaacttcctgccacaacaccttgggaagtttccagtgcctgtgtcccgtcggccaggagggccctcgttgcgagctacgggctggaccctgtccgccccgaggttgcagcaatggcggcacgtgccaactaatgccagagaaagactctacctttcatttatgcctgtgccctcctggcttcatcggccccgactgcgaggttaacccagataactgcgttagccatcagtgccaaaacggagggacatgccaggacgggctcgatacctatacatgtttatgccccgagacgtggacaggttgggattgctcagaggatgtcgatgaatgcgaaacccaaggaccccctcattgcaggaacggcggcacctgtcagaattctgctggctcattccactgcgtgtgtgtttccggttggggaggcacctcctgcgaagaaaacttagatgattgtattgctgccacctgcgctccaggatccacctgtattgatagagtcggctccttcagctgtctgtgcccacctggcagaaccgggctgctttgtcacctggaggatatgtgtctaagtcagccctgccatggggacgcccaatgctcgacgaaccctttgaccggaagtactctctgtctatgtcagcccgggtactccgggcccacatgccatcaagatttagacgagtgcctcatggcacaacagggaccctctccctgcgagcacggagggtcatgcctgaatacgccagggagctttaattgcctctgtccacccggctacaccggctcccgctgcgaagccgatcataacgagtgcctgtcccagccatgtcatcccggcagcacctgcttggaccttctggctacatttcattgtctttgcccacccgggttggaagggcagctctgcgaagtcgagacgaacgaatgcgctagtgcaccgtgtttgaatcacgccgactgccacgatttgttgaacggcttccaatgcatctgtctccctgggttctccggtaccaggtgcgaggaagacattgatgagtgccgaagcagcccgtgtgctaatggcggccagtgtcaagatcagcccggcgccttccattgcaagtgcctgccaggcttcgaggggccccgctgccagacggaggtggacgagtgtttaagcgatccatgcccagtcggagcttcctgtctcgatctcccgggcgcttttttctgtctgtgtccgtccgggtttaccggccagctgtgcgaggtgcctctatgtgccccgaacttgtgtcagccgaagcaaatatgcaaagaccagaaggacaaggcaaactgcctgtgccctgatggttctcccggatgcgcacctcctgaggacaactgcacgtgtcaccacggtcactgtcagagatcctcctgcgtttgtgacgtcgggtggacaggccctgaatgcgaggctgagctcggcgggtgcatatcagctccctgcgcgcacgggggaacatgctatcctcagccatcgggctacaattgcacatgccctactggctatacaggtcctacttgttccgaagaaatgacagcctgtcatagcggcccatgcctgaacgggggttcatgcaatccctctcctggcggttactactgcacctgtcctccctcacataccgggcctcagtgtcagacgagtacagattactgcgtctccgccccctgctttaatggcggcacgtgtgtaaaccgccccgggaccttttcatgcttgtgtgcaatgggcttccagggccccaggtgtgagggtaaactccgcccatcttgcgcagacagcccatgtaggaatagggccacttgccaagatagccctcaagggcctcggtgtttgtgcccaactggatacactggtggatcctgccaaaccctgatggacctgtgcgcgcagaagccctgcccaagaaatagtcactgcctgcagactgggccctcattccattgcctgtgtttacaaggatggaccggccccctttgcaacctgccactgtcttcttgccagaaggccgcactatcccagggtatcgatgtcagcagtctgtgccataatgggggcctgtgtgttgatagtggaccttcatatttttgtcactgtccgcctggtttccaaggtagcctttgtcaggatcatgtaaacccttgtgaaagtcgtccgtgtcaaaacggagcaacttgtatggctcaaccaagcggttatctttgccagtgcgcgccagggtacgatggccagaactgttcgaaggaactggacgcatgccaaagccaaccctgccataatcatggtacctgcacacctaaacctggtggattccactgcgcctgcccccctggatttgtcggcctcaggtgtgagggtgacgtcgatgagtgtttggaccaaccgtgccacccaactggaactgctgcttgccatagtttagctaacgcattctattgtcagtgcctgcccggccataccggacaatggtgcgaggtggaaattgacccctgtcattcacagccttgtttccacggcggaacgtgcgaggccacagcaggaagcccactagggttcatctgccactgtcctaaggggtttgagggccccacctgtagccatagagcccccagctgtggcttccaccactgccaccatggcggattgtgtttgccttctcctaaacccgggtttccaccacgctgtgcctgccttagcggttacggcggcccagattgcctcactcctcctgcccccaaaggctgcgggccaccatctccctgtctgtacaatggttcctgttctgaaacgaccgggctggggggccctgggttcaggtgcagctgtccgcactccagccccggacctagatgccagaaacctggcgcaaagggatgcgagggacgttccggagatggcgcctgtgatgctgggtgttctggacccggtggaaattgggatgggggtgattgctctctcggtgtgccagatccctggaagggctgcccgtcacattccagatgttggttgcttttccgtgacggacagtgccacccccagtgtgattcggaggagtgcttgtttgatggctacgattgtgagacaccccccgcttgcactcctgcatatgatcagtattgtcacgatcatttccataatggccattgcgaaaaggggtgcaacacggcagagtgcgggtgggatggcggtgattgccggcccgaagacggtgatcccgaatggggaccatcccttgctcttctcgtggtcctctcaccacctgccctggatcaacagctgtttgccctcgcccgcgtcctgtccttaactttacgggttggcctttgggtgagaaaagatagagacgggcgtgacatggtgtatccctacccaggagcgcgcgccgaagaaaaactgggtgggacaagggatcctacctaccaggagagggcagcgccgcaaacacagccactgggcaaggaaaccgattccctgtctgctggctttgtggtggtgatgggtgtcgatttatcgcggtgcggaccagatcatcccgcatctaggtgcccatgggaccctggccttctattgaggttcctcgctgccatggctgctgtaggagcccttgaaccgctgctgcctggccccctgctcgctgtccacccccacgctgggacagcccccccggccaatcagttgccctggcctgttctctgtagtcccgtcgccggtgtaatactattggcactgggggccctgctggtcctgcaactgattcgccgtaggcggagggaacatggtgccctgtggttgccccctggctttactagaaggccccggactcaatccgccccgcataggcggcgaccacccctgggggaagactcaattgggttgaaggctctgaagcccaaggccgaggtggacgaagacggggtagttatgtgctctggacctgaggagggagaagaagtggggcaagccgaggaaacgggcccaccctcaacctgtcagctctggtcgctgtctggaggatgtggtgccttgccccaggctgcaatgctgacccctcctcaagagtccgagatggaagctcccgacctggatactagaggtccagatggtgtgaccccactgatgtctgccgtttgttgcggcgaggtccaatccggaaccttccagggtgcttggctgggttgtcccgagccatgggagccgctgctggatggtggggcctgtcctcaagcacataccgttggcacaggagagacacctctccacctagcggcacggttttctcgtcctactgccgctagacgtctacttgaggcgggagccaatccgaaccagccagaccgggccggccgaacaccacttcacgccgcggtggccgccgatgctagggaggtgtgccagcttctccttcgctctagacaaactgccgtcgatgcaaggacggaagacggtaccacacccctgatgctggccgctaggctggccgtggaagatctcgtcgaggaactgatagccgcacaggcggatgtcggagccagagacaagtggggcaagacggcgcttcactgggccgccgctgttaataacgcaagggccgcacgatccctcctgcaggctggcgctgacaaggacgcccaggataaccgtgagcagactccgctgtttctggcagcaagagagggggctgtggaggtcgctcagctacttcttggcctgggcgccgcgcgcgaactgagggaccaggctgggcttgcacctgcggatgtggcgcatcagcgaaaccactgggaccttctgactctgctcgagggcgctggtccacccgaagcacggcacaaagctacacctggaagagaagccggccctttccctagggctcgcaccgtctctgtgagtgttcctccgcatggtggcggagctctccctcgttgtagaacattatctgccggagcaggacccagaggaggaggcgcatgtctccaggccagaacatggtcagtagatctggccgccagaggtggcggcgcgtacagtcattgtagatccttgtctggtgtgggcgctggcggcggacctacaccccgaggtcgcagattctccgccggcatgcgtggccctagacccaatcccgccatcatgagggggcggtatggggtggccgcaggccggggagggagagttagcactgatgactggccatgcgattgggtggcactcggcgcgtgcggcagtgccagtaatatcccaatccctcctccgtgtcttacgccaagtcctgagagaggttcaccacagctggattgtggccccccagctctccaggaaatgcctattaaccaggggggcgaaggtaagaagtag

SEQ ID NO: 147546 - DNA, 3147 bp, Artificial Sequence
  derived and/or modified sequence
tgcgcccccggctacgacggccagaactgcagcaaggagctggacgcctgtcagagccagccctgtcacaaccacgggacctgtactcctaagccgggcgggtttcactgcgcttgcccaccgggattcgtaggtctgcgctgcgaaggtgacgtcgatgagtgtctggatcagccgtgccatcctacaggcaccgccgcatgtcattccttggccaacgctttttactgccagtgcctgcccgggcacactggccagtggtgtgaggtcgagattgatccctgtcatagccagccatgtttccatggtggcacttgtgaagcgactgctggatctcccctcgggttcatatgccactgccccaaaggattcgaaggtccaacatgcagtcatagagccccgagctgcggctttcatcattgccatcatggaggactgtgtttaccttccccaaaacccgggttcccccccagatgcgcctgtttgagtgggtacgggggcccagattgccttaccccacctgctccaaaaggctgtggccctccttcaccatgcctctataatgggtcttgttccgaaactaccgggctgggcggccctgggttccgttgttcatgtccacattcttcacctggaccccggtgccagaaacctggcgctaaaggatgtgagggccggtcaggggatggagcctgtgatgccggatgttctggccccggcgggaactgggacggtggagactgctccctgggcgtaccggacccatggaaaggctgcccatcccacagccggtgctggttgctgtttagagacggacagtgtcatccgcaatgcgattcggaagagtgcctgtttgacggctacgattgtgagacgccacccgcgtgtacgccggcatacgaccagtattgtcatgatcatttccataacggccattgtgagaagggctgtaacaccgccgagtgcgggtgggacggtggagattgtcgacctgaggacggtgaccccgaatggggtccttctctagcactcttggtcgtgctcagcccccccgcccttgaccagcagctatttgccctggcgagagtgctgagcctcacactgcgcgtgggactgtgggtccggaaagaccgagatggccgggatatggtctatccttaccccggtgctcgagctgaggagaaactcggcggcacaagagaccccacctatcaggaacgggctgcaccgcagacccagccacttgggaaagagactgatagcttgtccgccgggtttgtggtggtcatgggcgtggacctctctagatgtggccccgaccaccctgcatcaaggtgcccttgggacccgggcctgctgttaagatttctggccgctatggccgccgttggtgccctcgagccactgctacccggccccctgttggcggtgcacccacacgccggaactgccccacccgcaaaccagctcccgtggccagtgctctgctccccagtggccggtgttatcttgctggcgctgggagcgctgttggtgctgcaactcattcgacgtcgccggcgtgagcacggggccctctggctacctcccggtttcacccgtcgcccacggacccagtctgcgccacataggcggagaccccccctgggtgaggactcgattggacttaaagccctgaagccaaaggctgaggtagatgaggatggcgttgtgatgtgcagcggaccagaggagggtgaggaggttgggcaagcagaggagacaggcccacctagtacgtgtcaattatggtctctctctggtggctgcggtgcattacctcaagcagccatgcttacacctcctcaggaaagtgaaatggaggccccagacttagataccaggggcccagatggagtgacccccttgatgagcgcagtgtgttgcggggaggttcagtctggcactttccagggtgcatggctcgggtgcccagagccctgggaaccgctcctagacggcggagcttgccctcaggcacatactgtgggaaccggcgaaacgcccttgcaccttgccgcccgattttcacgccctaccgcagcccgccgcttgttggaagcaggcgcaaatcctaaccagcccgatagggccggacgaacacccctgcatgccgctgtggcagccgatgcacgagaggtgtgccagctgttactaaggagccggcagaccgccgtagatgcccgaacggaggacggtaccactcccctgatgctggctgcccgccttgcggtggaagacctggttgaggaacttattgcagcccaggccgatgtgggagcaagagacaaatggggcaagactgctctacactgggccgccgccgtcaataacgccagagcagcccggagtttgctgcaggccggggccgacaaggacgcccaggataatcgcgaacagacaccattgttcctggcggctcgagagggagccgtggaggtcgcccagcttctcttgggcctcggagccgcccgcgagctgagggatcaagcagggcttgcacctgccgacgtcgcccatcagaggaatcactgggacttactcactcttctggagggagccggcccaccggaggcccgacataaggctacgcccggccgcgaagcggggccttttccaagggccagaaccgtttccgtgtctgtgccaccacacggcgggggcgccctccccaggtgtagaacactctcggctggggctgggcctagaggagggggcgcttgcttgcaggcacgaacttggtctgtagatctcgccgctcggggaggaggagcctatagccactgcagaagtctgtcaggagtgggcgccggaggcggaccgacgccacggggtcgccgtttctccgcgggcatgcgcggcccacgccccaaccccgccattatgcgcggccgctatggggtagccgcagggagggggggaagagtatcaacggatgactggccttgtgattgggtggctctaggagcatgtggatccgcgagcaatattcctattccccctccatgcttgacaccttcccctgagaggggctcaccccagctggactgtgggccccctgccttgcaggagatgccaatcaaccaaggaggcgaaggaaaaaagtag

SEQ ID NO: 147547 - DNA, 6018 bp, Artificial Sequence
  derived and/or modified sequence
atgcagccccccagcctgctgctgctgctgctgctgctgctgctgctgctgctctgtgttagtgtggtacggccaaggggcctgctgtgcggcagcttcccagaaccttgcgccaatggggggacctgccttagcctctctctgggccagggcacctgccagtgtgcacctggtttcctgggggagacttgccaattcccagacccctgccaaaacgcccaactgtgccagaatggaggcagctgccaagctttgctgccggctcccctgggtttgccgagctccccttctccgctgactccctccttcctgtgtacctgtcttcctggctttacgggtgaacgttgccaggctcaactagaggacccatgtcctccaagcttttgctcaaagagagggcgttgccacatccaggccagcggaaggcctcaatgcagctgcatgcccgggtggacgggagagcagtgtcagctgagagacttctgtagtgccaatccttgtgtaaacggcggtgtgtgtctggccacatacccacagatccagtgccattgccctccagggtttgaaggccacgcctgcgagagagatgttaacgaatgctttcaagaccctgggccatgtcctaagggaacctcctgccataacaccctgggctctttccagtgtctatgcccagtcgggcaggaggggccacgatgcgagcttcgcgctgggccttgcccccccaggggctgcagtaacggaggaacgtgccagctcatgcccgagaaggactccacatttcacctttgcttatgcccccccggttttatcggcccagactgcgaagtgaaccccgataattgtgtgagccaccagtgtcagaacgggggcacctgtcaagacggcttggacacctacacatgcctctgccctgagacctggacaggatgggattgtagtgaagacgtggacgagtgtgaagcacaaggccctccccactgccgcaacggcggcacctgtcagaatagcgctgggagcttccactgcgtatgtgtctcagggtggggcggtacttcctgtgaggaaaacctggatgactgtatagctgctacttgcgctccgggatccacctgtattgacagagtggggagcttcagttgtttgtgcccccctggcaggactgggttgctgtgtcatctcgaagacatgtgcttgagccagccttgtcatggggacgcccagtgctcaaccaacccactgacaggcagtaccctttgcctatgccagcccggctactccgggcccacttgtcaccaggatttggatgaatgtcttatggcacaacaggggccatccccttgcgagcatgggggctcctgtctgaacactcccggttcctttaattgtctgtgtcctcccgggtacaccggctcacgctgcgaggcggaccacaatgaatgcctgtcgcagccctgtcatccgggctcgacctgtctcgaccttctggccacgtttcattgtttgtgcccccccggattggaaggtcagctatgtgaagtggaaaccaatgagtgcgcctcagccccttgtttgaaccacgccgattgtcacgaccttttgaacggcttccagtgtatctgtctgcctgggttctctggtacccgttgcgaagaggacatcgacgagtgccggtccagcccatgtgccaatggcggtcaatgtcaagaccagccgggggcatttcattgtaagtgcctgcccggatttgaagggccccgttgccaaacggaagttgacgagtgcctctctgatccctgccccgttggcgcctcatgcttggacctgcccggagcattcttctgtctctgcccatctgggtttacaggacagctctgcgaggtgcctctttgcgcacccaacctgtgccagccaaagcagatctgcaaggaccagaaagataaggcaaattgtttgtgtccagacggctccccgggctgtgcacctcccgaggacaattgtacctgtcaccacggacactgccaaaggtcctcgtgtgtgtgcgatgtcggatggacaggtcccgagtgcgaagccgagctcggcgggtgtatcagcgcgccttgtgcccacggggggacatgttatcctcagccctccggctacaactgcacctgtcctaccggctataccggacccacatgctctgaggaaatgactgcctgtcattccggcccgtgtttgaatgggggcagctgtaacccctctcccggcgggtactattgtacatgccccccaagccacactggccctcaatgtcaaacgtccacagattattgcgtgtctgccccctgtttcaatggtggcacctgcgtgaatcggccagggactttcagctgcttgtgtgcaatgggattccaaggtccccgatgtgagggtaaactcagaccatcatgtgcagatagcccatgtaggaacagggcaacgtgccaggatagcccacaggggcctcgatgcctctgtccgaccgggtacactggcggctcatgtcagaccctcatggacctatgtgcccaaaagccctgcccccgcaacagtcattgtctgcagacaggtccaagcttccactgcctgtgcctccagggctggacgggtcctctgtgcaatctgccattgtcatcctgccagaaagccgcattgtcccagggaatcgacgtaagttctctatgccacaacgggggcctatgtgtggattccgggccttcctatttctgtcactgtccccccggctttcaaggatcactgtgccaagaccacgttaacccctgtgaatcaagaccatgtcagaacggtgccacatgtatggcacagccatccggttacctctgtcaatgtgcccccggctacgacgggcagaactgtagtaaggagttagatgcttgtcagtcacagccctgccataatcacgggacttgtacaccaaaacctgggggcttccattgtgcgtgtccccctggattcgtgggtttgaggtgcgagggtgatgtcgacgaatgcctggaccagccttgtcacccgaccgggacagcagcctgccattccctcgccaacgcattttattgtcagtgccttcctggccacaccggccagtggtgcgaagtcgaaatcgatccttgtcatagccagccatgcttccatggcggcacctgcgaagccaccgccgggagtccactcggattcatctgtcactgtccaaaaggattcgagggtccaacctgctcgcacagggcaccttcatgcggattccaccactgccaccatggcggtctctgtctcccgtcccccaagccgggtttccctcctagatgcgcgtgtctctcgggctacggtggtcccgattgccttaccccacccgctcccaagggttgtgggcccccgtcaccctgtctgtacaacggcagctgtagcgagacaacaggtctggggggacctggtttccgttgcagttgcccccattcaagcccaggaccgaggtgtcagaaacccggcgccaaggggtgcgaagggcgatcaggcgatggcgcgtgtgatgctgggtgttccggtccaggcggtaattgggacggtggcgattgttccctcggcgtgccagatccgtggaagggatgccctagtcacagccgatgctggctgctgtttagggatgggcagtgccacccccagtgcgactcagaggagtgcctgttcgatggatacgactgcgaaactcccccagcttgcacgccagcctacgatcagtactgccatgaccacttccataacggacattgtgagaaaggttgcaacaccgctgagtgcgggtgggatgggggagactgccgcccggaggacggtgacccggagtgggggccatccctagcactcttggtggtcctgtctcctcccgccctggaccagcaactgttcgcgcttgctcgcgttctgtctttaacactgcgggtgggcctgtgggtccggaaggacagggacggcagggacatggtgtacccttatcctggagcgcgtgcggaggagaaactcggcggaaccagagatccaacataccaagagcgtgctgcaccccagacgcagcccttaggcaaagaaaccgattcgctctcagcaggatttgtggtggtgatgggtgtcgatctgtcccgctgtggaccagatcatcccgcaagccggtgtccctgggatccaggtttgttgctccgcttcctggctgccatggctgcagtaggtgctctggagcctcttctcccagggcctctgctggcggttcaccctcatgcaggtactgccccccctgctaaccaattgccttggcctgtgctttgcagcccagtggccggcgtgattctcctcgcattaggagccctgctggtgctccagctcattcggcgccgccggagggaacatggagccttatggctgcccccaggatttacccgtagacctcggacccagtctgcccctcaccgccgaagaccacctctgggcgaggatagtattggtttgaaagccctgaagcctaaggcggaagtggacgaagacggggtagttatgtgctccggccctgaggagggagaggaggtcgggcaagcagaggagaccggccctccatctacctgtcaactgtggtcattatcaggtggatgtggagccctcccccaggctgctatgttgacccccccgcaggaaagcgaaatggaggccccagaccttgatacccggggacctgatggcgtgacccccttgatgtccgccgtgtgttgcggcgaagtccagtcaggcacattccaaggtgcctggctgggctgcccagagccctgggagccactgctcgacgggggagcttgcccccaggcccataccgtcgggactggcgaaacgccgttgcacctggcggcgcgattcagcaggccaaccgccgcccgacgtctgttagaggcaggcgccaaccctaatcagcccgaccgcgccggtaggacacccttacacgctgccgtggcagcggacgcccgggaggtgtgtcagttactgctgcggagccgtcagacggccgtggatgccagaacagaggacggtacaactcccctgatgctggccgctcgattggcagtggaagacctcgtggaagagctcatagcggcccaggccgatgtgggagccagagataaatggggtaagactgcactccactgggcagccgcggtgaataacgctcgagcggcccgaagccttttgcaagcaggcgccgacaaggatgcgcaggataatagggagcagactcccctgtttctcgccgccagggagggtgcagtggaggttgcccagttgctcttaggattgggcgctgcccgggagctgagggatcaagccggcctggcccccgccgatgtcgcccatcagagaaaccattgggatctgcttaccctcctggaaggtgctgggcctcccgaagcccgccacaaagctaccccgggacgggaagccggacccttcccacgggccagaacggttagtgtctctgtccccccacacggcgggggcgctctgccccgttgtaggacgctttctgccggcgccgggcctcgcggcggaggtgcatgtcttcaggcccggacatggagtgtcgacttggcagctcgtggcggcggagcgtactcgcactgtagatcgctgtctggcgttggggccggtggtggacccactcctcggggcaggcggtttagtgccgggatgagagggcctcggcccaatccagccatcatgagggggcgttacggggttgctgccggaaggggcgggcgggtcagtacagacgattggccatgcgattgggtggcgctcggagcatgcggcagtgcctctaacatccctatcccacccccatgtctgacgccttcccctgagcgaggctcccctcagctggattgtgggccccccgccttgcaagagatgccaatcaatcaaggaggggagggaaagaagtag

SEQ ID NO: 147548 - DNA, 6012 bp, Artificial Sequence
  derived and/or modified sequence
atgcagccccccagcctgctgctgctgctgctgctgctgctgctgctttgtgtgagcgtcgtgcgaccaagaggcctactttgcggctcatttcctgagccctgcgcgaacggcggaacgtgcctgagcctaagcctcggtcagggaacatgtcagtgtgccccagggttcctaggggaaacatgccagtttccagacccgtgccagaacgcccagctgtgtcaaaatggtggcagctgccaggccttactacctgctcccctgggacttccctcgtctccctcgcctcttactccatccttcttatgtacgtgcctccccggtttcacaggtgagcggtgccaggctcagctagaggatccctgccctccttcattctgctcaaaacgtggcaggtgccacattcaagcttccggcagacctcaatgctcatgtatgcctggctggactggggaacagtgtcagctccgggatttctgctccgccaatccatgtgttaacgggggagtgtgcctggccacctaccctcagatccagtgtcactgtccccccggcttcgaagggcacgcatgtgaacgggacgtcaacgagtgcttccaggaccctgggccatgtccgaaaggaacctcctgccacaatacacttggctcattccaatgcctgtgccctgtcggccaggagggcccacggtgcgagctgcgcgccggaccgtgccctcccaggggctgtagcaatgggggcacgtgtcaacttatgcccgagaaagactcaacttttcatctctgcctatgtcctccaggatttatagggcccgactgcgaggtgaatccagacaattgtgtttcgcaccagtgtcaaaacggagggacttgtcaggacggcctggacacctacacctgcttgtgtccagaaacgtggacgggctgggactgtagcgaagatgtggacgagtgcgaaacacaaggtccgccacattgtaggaatggggggacttgccagaattcagcaggcagtttccactgtgtgtgtgtctccggctgggggggcactagctgtgaagagaacctggatgactgtatagccgccacctgtgctcctggtagcacctgtattgacagagtgggttcatttagttgtttgtgccctcccgggcgaaccggcctgttatgccacctggaggacatgtgtttgagccaaccttgccacggggatgcccagtgctccacaaacccacttacagggtctacgctgtgtttgtgtcagcctgggtatagcgggcctacctgtcaccaagacttggatgagtgtctgatggcccagcagggcccctcaccttgtgaacacggtggctcttgtttaaatactcctggaagttttaattgtctgtgcccccccggatatactggctcacgatgcgaagccgaccacaacgagtgtttaagccaaccctgccatcctggctcaacctgtttagacctgctcgccacttttcactgcctttgccctccagggcttgagggccagctctgcgaagtggagactaatgagtgtgcttctgcaccatgcctgaatcatgctgactgtcacgacctcctcaatgggtttcagtgcatttgcctccccggattctctggaacacgttgcgaggaggacattgacgaatgccgaagttctccctgtgccaatggcggacagtgccaggatcaacctggagcttttcactgtaaatgccttcctggttttgaaggccctagatgccagaccgaagttgatgagtgtctgagcgatccttgtcccgtaggcgcttcttgcttagacctgcccggagcattcttctgtctctgccctagtggcttcaccggccagctctgcgaagtgcctctgtgcgctccaaatctgtgccaacccaagcagatctgtaaagaccagaaagacaaggccaactgtctctgtcccgacggttcacccggttgcgctcctcccgaggataactgtacgtgtcatcacgggcattgccagcggagctcttgcgtctgcgatgtggggtggacaggcccagaatgcgaagcggagctgggaggctgtatctcagccccctgcgcgcacgggggtacgtgttatcctcagccatcagggtataattgtacttgtcctacaggatacaccggcccgacatgctccgaggagatgaccgcttgccactctggaccatgtctgaacggtgggtcttgcaacccatctcctgggggctattattgcacctgcccccctagccatacgggtccgcagtgccaaacctccaccgattactgtgtatccgctccatgcttcaatgggggcacatgcgtgaataggccgggaacattctcttgtctatgtgccatgggattccagggacctcgctgtgagggcaaactgaggccgagctgtgcagacagtccgtgcagaaacagagctacttgccaggactcacctcagggccctcgttgcctctgtcctactggttatacaggaggaagctgtcaaactctgatggacctgtgcgcccagaagccttgtcccaggaacagtcactgtctgcagacaggaccaagcttccactgcctgtgcctgcaaggttggaccgggcctttgtgtaaccttcctctctctagctgccagaaggccgctctctcccaagggatagacgtatcttccctctgtcacaatggcggcctctgtgtcgatagtggcccctcctatttttgtcactgtccccccggcttccagggctctctgtgccaggaccacgtgaatccctgcgaatctaggccgtgccagaatggtgccacttgtatggcccagccttcaggctacctgtgtcagtgcgcacccggatatgacggacagaactgtagcaaggagctggacgcctgtcagtcacagccatgccacaaccatggcacatgtacgcctaagcctgggggattccactgtgcatgtcctccaggatttgtgggcctgagatgtgaaggtgacgtagacgaatgtttggaccagccgtgccaccctacggggacggccgcgtgtcatagtcttgctaatgcattttattgccagtgtctaccaggccacactggtcagtggtgtgaggtggaaatcgacccctgtcatagccaaccttgcttccacggcggcacatgcgaagccaccgccggtagcccattggggttcatttgtcactgtccaaaaggctttgaaggaccaacgtgttcccaccgcgcacccagctgcggtttccaccattgccatcatggcgggctctgtctgccatctcctaagcccggcttccctccgaggtgtgcctgtcttagtggatatggcgggcctgattgcctcacccccccagctccaaaaggctgcggcccaccgtctccttgcttatacaatggttcgtgttccgagacgacaggactgggtggccccggcttccgctgcagctgcccccactcttcccccggaccacggtgtcagaaacccggtgctaaaggctgtgagggccgcagtggtgatggcgcttgcgatgccgggtgttccggtccaggtggcaattgggacggaggagactgttctctgggcgtccctgacccttggaagggctgcccctctcactctcgctgttggctcctttttcgggacggacaatgtcacccgcagtgcgatagcgaggaatgcctcttcgatggctacgattgtgaaacccctcccgcctgtacacctgcgtacgatcagtactgccacgaccacttccataacgggcattgcgagaaaggctgtaatacagcggagtgcggatgggacggtggggactgcaggcccgaggacggcgatcctgagtgggggcccagcctcgcactgctagtggtgttgtcgccaccagctctggaccaacagctgtttgctctggcaagggtcctgtctttgaccctgcgggtgggactgtgggtgcgcaaggacagggacgggcgcgacatggtctacccttatcctggagcccgggcagaagaaaagttgggcggcacccgtgaccccacttatcaggagagggcggccccccaaacacagcctctcggaaaagagaccgactccctaagtgccggtttcgtggtcgtaatgggcgtggacctttcccggtgcggccccgaccaccccgccagccggtgtccctgggatccaggtcttttactacgctttcttgctgctatggctgcggtgggagcgctggaacccttgctccccggaccgctcctagccgtgcacccgcacgccggaacagcacctccagcaaaccagctgccgtggccggtgctctgtagccccgtggcaggagtcattctgctggctttaggcgcactgcttgtactacaactcattagacggagacgtagagaacacggtgctctctggctgccacccgggttcacacgaagaccccgaacccagagcgcacctcatcggagacgccccccactgggagaagatagtatcggcctgaaggctctgaaaccaaaggcggaggtcgatgaggatggtgtggttatgtgtagcggaccagaagagggcgaagaagtgggccaggcagaagaaaccggccctccaagcacgtgtcaactatggtccctgtccggtggctgtggcgctctgccgcaggctgctatgctgacccctccccaagaaagcgagatggaggcgcccgacctagatactcgtggacccgatggggtaactcccttgatgtcagccgtctgctgcggggaagtccaaagtggcacttttcaaggggcctggctggggtgccccgaaccctgggagcccctgttagacggaggtgcatgcccgcaagcacacaccgtggggaccggggagacaccgctgcatcttgccgccaggttttctcgtcccaccgctgcaaggcggctgctggaagcaggagctaaccccaaccaacccgaccgtgcgggaagaacacccctgcacgccgccgtagccgctgatgctagagaggtgtgtcagctcttactgcgatcaaggcagacagctgttgatgctagaaccgaggacggtacaaccccgcttatgctggcagcacggctggcggttgaggatctcgtagaagaactgattgccgcccaggcagacgtcggagcccgtgacaagtggggaaaaactgcactccactgggccgccgcggtcaataacgcccgcgccgctcgttctctgctgcaggctggtgccgataaagatgcacaagacaatcgcgagcagactccgctgtttcttgcagcccgcgaaggcgcagtcgaagtagcccagcttctgcttggccttggagccgcgcgcgagctgagagatcaggctggcctcgcacctgccgatgtggcacaccagaggaatcactgggatctgctcactttgcttgaaggagctggcccacccgaggcaaggcacaaggcaactcccggccgtgaagcgggtccttttccccgagctcgtacagtgtcagtcagcgtccctccccacggcggaggagccttgccacgatgcagaacccttagtgccggcgctggaccaagggggggaggcgcatgcctgcaagctcggacctggagtgtcgaccttgccgcccgcggaggcggtgcttatagtcactgcaggtcattgagcggagtgggggccggaggtggtcctacaccaaggggcaggagattctcagccggtatgcgcggccctaggcccaaccccgctatcatgcgtggcagatacggcgtcgcagcgggacggggcgggagagtctccaccgatgattggccgtgcgattgggtcgcccttggggcatgtggctccgccagtaatatccccattccacccccctgtctgacaccgtcccccgagcgcggaagcccccagttggactgtggcccacctgcactgcaggagatgcccattaatcagggcggagagggcaaaaaatag

SEQ ID NO: 147549 - DNA, 561 bp, Artificial Sequence
  derived and/or modified sequence
atgagcgccgtgtgctgcggcgaggtgcagagcggcaccttccagggggcatggctcggatgccccgaaccctgggagccactgttggacggcggagcatgcccgcaagctcataccgttgggaccggcgagactccgcttcaccttgccgcccgcttctcaagacccacagcggccaggcggctgctggaagccggcgcgaaccctaatcaacccgatcgggctggtcgcaccccacttcacgctgctgtggccgctgatgctagagaggtctgccagctgctgctcagatccaggcagacagccgtcgacgcgaggacggaggatggcactaccccacttatgctagccgcccgcctcgcagtggaggacctggtggaagagctgattgccgcccaagctgacgtgggcgctcgtgacaaatggggtgccgacgctgccattccaggaggagctggtcgctcaggcgggagtagccccgcaaccgctggtgccggtggcagcccaagagccgctggtccgggatgggcttctgctgggggacgtaggtcgcctacgtag

SEQ ID NO: 147550 - DNA, 6009 bp, Artificial Sequence
  derived and/or modified sequence
atgcagccccccagcctgctgctgctgctgctgctgctgctgctgtgcgtgtcagtagtgcgaccacgcggacttctgtgcggttcatttccggaaccttgcgcaaacggcggaacatgtttgtctctttccttaggtcaggggacgtgccagtgcgcccccggcttcctgggggagacctgccagttccctgacccttgccagaatgctcaactctgccagaacggaggaagctgccaggccctcctgccagccccgctgggcttgccatcgtccccaagtcccctcaccccaagttttttgtgcacatgtctacccggcttcaccggggagagatgtcaggcccagctcgaggatccatgtccaccaagcttttgtagtaagcgcggtcggtgtcacatacaagccagtggacgtcctcagtgcagctgtatgccagggtggacaggtgagcagtgtcaactgcgagacttttgctcggccaacccatgtgtcaatggcggagtctgcctggctacctatcctcagatccagtgccattgccccccaggattcgagggacatgcctgcgaacgggacgtaaatgaatgtttccaggacccaggcccttgtcctaaaggaacgtcgtgtcacaacaccctgggatcttttcagtgcctgtgtcccgtcgggcaagagggtcctcgctgtgaactccgcgcgggcccgtgtccaccccggggctgtagtaatgggggaacttgtcagctcatgcctgagaaagattctaccttccacctctgcctatgtccaccaggctttatcggtcctgactgcgaggttaatcctgacaactgcgtctctcatcagtgccagaacggagggacctgtcaggatgggctagacacctacacatgcctttgccccgagacctggactggctgggattgtagcgaggacgttgacgagtgtgaaacacagggtccaccgcattgcagaaacggaggaacctgtcagaacagcgcgggctcatttcactgtgtgtgtgtgagtggatggggcgggacctcatgcgaggagaacctggacgactgtattgcagctacctgtgcaccgggaagtacctgcatcgatagagtgggtagcttttcatgcttgtgtccgcccggtagaactggcctgctgtgtcatcttgaggatatgtgtcttagtcaaccctgtcatggagacgcccagtgttcaacaaaccccctcaccgggagcaccctttgcctgtgccagcccggatattctggacctacatgtcatcaggacctcgacgagtgcctaatggcacagcaaggaccaagcccctgcgaacatggcggcagctgcctgaacaccccaggaagcttcaactgcctctgcccccctggatacacaggatcccgttgcgaggcagaccataatgagtgtttgagtcaaccctgccaccctgggtctacctgcctggatctcttggccacatttcactgcctatgtcctccgggacttgaaggacagctctgtgaggtcgagacaaatgagtgtgcaagcgccccatgcctcaaccatgcagactgccacgatctgttaaacggctttcaatgtatctgtctgcccggcttcagcggcacccgctgtgaagaggacatcgacgaatgtcgctcctctccatgcgctaatggcggacagtgtcaggaccagccaggggcttttcattgtaaatgcctaccggggttcgagggccccagatgccagacagaggtagatgaatgtctctccgacccctgccccgtgggggccagttgcctggacctccctggtgccttcttctgcctgtgtccaagtgggttcacgggtcagctgtgtgaggtccctctctgcgctccgaacttgtgtcagcctaagcaaatctgcaaagaccaaaaggacaaggctaattgcctctgtccggacggaagccccggctgcgcgcctcccgaggacaactgcacctgccaccacggacactgccagcgcagctcctgcgtctgcgatgttggctggacaggtccagaatgcgaagctgagctcggcggatgtatcagcgcaccttgcgcgcatggcggaacgtgttatcctcagccctccggctataattgtacttgccccacaggctacacaggccccacctgctccgaggaaatgaccgcctgccactcagggccatgcctgaacggaggcagttgtaacccctctcctggtggatattactgtacatgtcccccttcacatacaggcccccagtgccaaaccagtacggactactgcgtcagtgctccttgcttcaacggagggacatgcgttaacagacctggcactttctcttgcctgtgtgcaatgggattccagggccctcgctgcgagggtaaattacgcccttcctgtgccgatagcccatgccgcaaccgcgctacttgtcaagacagcccacaaggtcctagatgtctgtgcccaactggctacaccggaggctcttgccagactctgatggacctgtgtgctcagaagccatgtcctcggaatagtcactgtctgcagaccggcccctccttccattgtctttgccttcaagggtggaccggcccactatgcaacctgccgctgtcttcttgtcaaaaagctgccctttcacagggaatcgacgtgagctcactttgccataatgggggcctctgcgttgacagcggcccatcttatttctgccactgcccccctggatttcaggggagcctgtgtcaggatcatgtgaatccttgcgaatcacgaccctgtcaaaacggagctacctgcatggcacaaccttccggttatctttgtcaatgcgctcccggttacgacggtcagaactgctctaaagagctggatgcatgccagtcccagccttgccacaatcatgggacctgcacccctaaacccggcgggttccactgcgcctgccctcctgggtttgtggggctgcgctgcgagggtgatgttgacgagtgtctcgatcagccctgtcatcccacaggcaccgctgcctgtcattctctcgccaacgccttttattgccagtgcctgccgggtcacaccgggcagtggtgcgaagtcgaaattgacccatgtcactcccagccctgcttccacggcgggacctgcgaggctacagcgggcagcccacttggatttatttgtcattgccccaaaggttttgaggggccaacttgctctcaccgagctccatcctgcggatttcatcactgtcaccatggcggactgtgcctgccctcccccaaaccaggttttccacccaggtgcgcttgtttgtctgggtacggaggccccgattgtttgacccctcccgctccaaaggggtgtggccctccaagcccttgcctctacaacggttcctgttcagaaacaacaggcttaggcggtcctggcttccgctgttcttgtccccacagctcgccgggcccccgctgtcaaaagcccggcgctaagggatgcgaggggcgcagcggggacggagcttgtgatgctggttgttctggcccagggggtaattgggatggcggtgattgtagcctgggagtccctgatccatggaagggctgcccctcccactcaaggtgttggctactcttcagagatggacaatgtcacccacaatgcgacagtgaggagtgtttgtttgacggatatgactgcgagaccccccccgcgtgcacacccgcctacgaccaatactgccatgatcatttccacaatggtcactgcgagaaggggtgtaacacggccgagtgtggctgggacggcggggactgccggccggaagacggcgatcctgagtggggtcccagcttagcactactcgtggttctgtcccctcctgccctggaccaacagctctttgccctcgccagggtattatcgctgacattgagggtgggtctgtgggtgagaaaggaccgtgatggcagagacatggtgtatccttacccgggagcgcgggcagaggagaagctgggcggtacccgggatcctacctaccaggagcgggcggcacctcagacccaaccattgggcaaagaaacagacagtctctcagccggtttcgtcgtggtgatgggagtagacctgtcaaggtgtggccctgatcatcccgcctcccgttgcccttgggatcccggtctcctgctacgtttcctggccgccatggctgcagtcggggccctggaacctctactgccgggtcccctgctggctgtgcatccccatgctgggacggcacctccggccaaccagctaccgtggccagtgctctgttcccccgttgccggcgtgatcctattggcactgggcgccttactagtgcttcagttgataaggagaaggaggcgggaacatggcgctctatggctgccacccggcttcacaagaaggccccggacgcaatcagcaccacatcggcggagaccaccactgggagaggacagcatcggcttaaaggccttaaagcccaaagcagaagtggatgaggacggggtcgtgatgtgctcaggacccgaagagggagaggaagtcggccaggccgaagaaacggggccaccttccacgtgccagctctggagcctctccggcggttgtggcgccctgcctcaggccgccatgctgacaccgccccaggagagtgaaatggaagcccctgatctggataccaggggtccagacggcgtcactcctttgatgagcgcggtgtgctgtggagaagtccagtccggcacctttcagggggcctggctaggctgtcccgaaccctgggagcctttgttagacggcggcgcatgccctcaggcccataccgtggggacaggcgagactcctctgcacctcgctgccagatttagcaggcccacagctgcaagacgcttgctggaagcgggagcgaaccccaatcagccggatagagctggacgcacccctctccacgccgctgttgctgctgacgcgagagaggtgtgccaattgttgctgagatcaaggcagactgcagtggacgctaggacagaggatggcaccactcccctgatgctggcggctaggctggcagtcgaggacttagtcgaagaactaatcgcagctcaggccgacgtgggtgctcgcgataagtgggggaagacggctctccattgggcagcagcagtgaacaatgcacgggcggctagaagcctgctgcaggctggcgccgacaaagatgcccaggacaaccgcgaacagactccactgtttctggctgctagggagggtgccgtcgaggttgcacagttgcttctgggtctgggagctgccagggaactcagggaccaagcgggattagcccctgccgacgttgcacatcaaagaaaccactgggatctccttacattactcgagggcgccgggccccctgaagccagacacaaggccacgccaggacgcgaagctggcccatttcccagggccaggacagtctccgttagtgtcccaccccacgggggaggtgctctcccccggtgtcgcaccctctccgctggcgcaggacccagaggcggaggagcctgcctgcaagctagaacatggagcgttgatctggctgcccggggtggcggtgcttattctcattgcagatctctgtctggcgtcggcgccggcggtgggcccacgcctcggggacgaagattttctgccgggatgaggggcccccggccgaaccctgctattatgcggggcaggtacggcgtggcagccggccgagggggccgggtctccacagatgactggccctgcgactgggttgcactgggtgcctgcgggtccgcaagtaacattcccatcccccctccttgtttgaccccgagtcctgagcgcgggtccccacagttggattgcgggccgcctgccctacaggaaatgcccatcaaccaggggggagaaggtaagaagtag

SEQ ID NO: 147551 - DNA, 6012 bp, Artificial Sequence
  derived and/or modified sequence
atgcagccccccagcctgctgctgctgctgctgctgctgctgctgctctgcgtgtccgttgtgcgtccgagaggtctgctgtgtggttcatttcccgaaccctgcgccaacggcggaacatgtctctccctgtcgctcggccagggcacctgtcagtgtgctcctgggtttttgggggaaacatgtcagttccccgacccatgtcagaatgctcagctctgccagaacgggggttcctgccaagcactcctacctgcgcccttgggtctgccgtcgtcaccatcccccctcaccccctctttcctctgcacttgcttacccggctttacaggggaaaggtgccaggctaaactggaagatccttgccctccttctttttgttccaaacgcgggaggtgtcatatccaggccagcgggcgcccccagtgtagttgtatgcccgggtggaccggcgagcaatgtcaactcagggatttttgcagcgccaatccctgtgtgaacggaggcgtgtgtctggccacttatcctcagatccagtgccattgtccaccaggttttgaagggcacgcatgtgaacgcgacgtcaacgaatgctttcaagatcccggaccatgcccgaaaggaacttcatgccacaatacacttggttcattccagtgcctgtgtccagtcggacaggagggaccgcggtgcgagttgcgggccgggccgtgcccgcctcgcggctgctccaacggtggcacctgccaactaatgcccgagaaggacagtacattccatttgtgtttatgcccccctggatttatcggcccagattgtgaggtgaaccccgacaattgcgtttcacatcaatgtcagaatggaggaacttgccaggacggcctcgacacatacacttgtctttgtcccgagacatggactggctgggactgttctgaagatgtggacgaatgcgaaacccagggtcctccgcactgtcgcaacgggggcacatgccagaatagtgcaggatccttccattgcgtgtgtgtttctggatggggtggcacctcttgcgaggagaatctggacgattgtatagccgcgacctgtgcacctgggagcacctgtatcgatagagttgggagcttttcttgtctttgccctcccggccggactggacttctgtgccacctcgaagatatgtgcctgtcccaaccttgtcacggcgatgcgcagtgttcaacaaatccgctcacaggttctactttgtgtctgtgccaaccagggtattctggccccacatgccatcaggacctggatgaatgtctgatggcccaacagggcccgagcccttgcgagcatggtggcagctgcctgaacactcctggttccttcaattgtttgtgcccacccggatataccgggtctaggtgcgaggcggatcataatgaatgtcttagtcagccatgccatccaggcagcacatgcttggacctgctcgcaaccttccattgtctctgcccacctggactggagggccagctgtgtgaggtggagacaaacgagtgcgccagcgctccatgccttaaccacgccgactgccatgatcttctcaacgggttccaatgtatatgtctccctggcttttccggaacgagatgtgaggaggatatcgatgagtgtcgctcttctccttgcgcaaatgggggacagtgccaagatcagcccggtgcctttcactgtaagtgcctgcctggcttcgagggcccaaggtgccagacggaagtggacgagtgcctgtctgatccatgccccgtgggtgcatcatgtctcgatttgcctggggcatttttctgtctgtgtccgagtggtttcacaggacagttgtgcgaggtccccctgtgtgcccctaacctctgccaacccaagcagatatgtaaagatcaaaaggacaaagcgaactgtctgtgtcccgacgggtcacccggctgcgctcctcctgaagataattgcacatgtcaccacggacactgtcagcggagctcttgcgtatgtgacgtggggtggacgggcccggaatgtgaagctgaactgggcggctgtatctctgccccctgtgctcacgggggcacctgctacccccagccatccggatacaattgtacgtgcccaacaggatacactggacccacttgcagcgaagaaatgacagcctgccattccggtccctgtctcaatgggggatcatgtaacccaagcccaggtgggtactactgcacctgtcctcctagtcacaccggacctcaatgccaaacatccacggactactgcgtgtctgccccatgcttcaacggtggcacctgcgtaaaccggccaggcaccttctcctgcctctgcgccatgggttttcaaggtcccaggtgcgaagggaagctgcggccttcctgcgcagactccccctgccgaaaccgggctacttgtcaggacagcccacagggacctcggtgtctctgcccgacgggatatactggcgggagctgccagactttaatggacctgtgtgcccaaaagccctgtcctcgaaactcccattgtctgcaaactgggccctctttccattgtctatgcttacagggctggacagggccactctgcaatctgccactgtcttcctgccaaaaggccgccctctcccaggggatagacgtgtcaagtctttgtcacaatggaggactctgcgttgacagcggaccgtcgtatttttgccactgcccaccgggattccagggttctctgtgccaggatcatgtcaacccctgtgaatctaggccatgtcagaacggcgcaacttgtatggctcagccttctggttatttgtgtcaatgtgctccaggatatgatgggcaaaactgctccaaggagttagacgcatgtcagagtcagccctgtcacaaccacggcacttgtaccccaaaacctggaggtttccactgcgcctgcccccccggttttgtgggcttgcgatgtgagggggacgttgatgagtgcctggaccagccctgccatcccacagggacggctgcctgccatagcctcgctaacgccttctattgccagtgtctgccaggccatactggtcagtggtgcgaggtggagatcgatccttgccattcccaaccctgtttccacggaggcacctgtgaggcaaccgcaggaagtcctctagggttcatctgccattgtcccaagggatttgagggccccacttgtagccacagggcaccatcatgtgggttccatcactgccaccacggaggcctatgcttaccttcgcccaagccgggatttccaccacgttgtgcttgcctgtccggttacggcggacccgattgcctaaccccgcctgcccctaaaggctgtggaccccctagcccgtgcctgtataatgggtcctgttccgagacaacaggtctgggtggacccggtttccggtgctcttgcccccatagcagccccggaccacgctgtcagaaacccggggctaagggatgcgagggccgaagcggcgacggtgcatgtgacgccggctgttcaggcccaggcggcaattgggatggcggcgactgtagtctgggtgtgccggacccatggaaagggtgccctagccactcaagatgctggttactgttccgagatggacagtgtcaccctcagtgcgactctgaggagtgtctgtttgacggatacgactgtgagacaccccccgcctgcacccccgcctatgatcagtattgtcatgatcatttccataatggccactgcgagaaaggatgcaacaccgccgagtgcggatgggacgggggggattgtcggcccgaggacggagatccagaatggggaccgagtctggccttactggtggttcttagccccccagctttagatcagcagctttttgccctggccagggtgttgtccctcactctccgggtcgggctgtgggtgcggaaggaccgcgacgggagggacatggtatatccgtacccaggcgcccgtgccgaagaaaagctgggagggacacgcgatccaacctaccaagagcgagccgcccctcagacacaacccctcgggaaagagacagattccttgtctgctggattcgtcgtagtgatgggcgttgatttgagccgctgtggaccagaccatccagcttcaagatgtccttgggacccggggctgttgctgagattcctggccgcgatggctgctgttggggccctcgagccactcctccccgggcctctcctcgccgtgcatccccatgctgggaccgcccctccggctaaccaattgccatggccagttctatgttccccagtggccggggttatcctcttggctttgggggccctgctggttctgcaacttattcgtaggcgaagacgggaacacggcgccctgtggcttccccccggttttacacggagaccacgcacccaaagtgctccacatcgtcggcgaccacccttaggcgaggatagtattggattgaaagctctcaaacccaaagcggaggttgacgaagacggagttgtgatgtgcagtggcccagaagagggcgaggaggtggggcaggcagaagagactgggccccccagcacatgtcaactgtggtccttgagtgggggttgcggagccctgccccaggccgccatgttaacaccaccacaggaatccgaaatggaggcgcctgatctggacactcgaggacccgatggtgtcactccactgatgtctgccgtgtgttgcggggaggtccaaagtggtactttccaaggcgcatggctcggctgcccggagccctgggaacctctgctggatggtggcgcttgtccacaggctcatactgttggaactggagaaactcctctgcatttggccgctcggttttctaggccaactgctgcccggcggctgttagaagcaggagcaaatcctaaccagcccgatcgggctgggagaacccctctacacgccgctgtcgctgcagatgctcgggaagtctgccagctgctgctgcgcagtcggcagacagcggtggatgcccgtacggaggatggaacaactcccttaatgctggccgcaaggcttgcagtcgaggacttggttgaggaactgattgctgcacaagctgacgtcggagcacgcgataaatggggtaaaactgccctgcattgggctgctgctgtgaacaatgctcgcgccgcccgttcactgttgcaggccggtgccgataaagacgcccaagataatagggaacaaacaccactgttcctcgccgctcgggagggcgcagtagaggtggctcaactgctactaggcctgggagcagctcgcgaactgagagatcaggctggtttagcccccgctgacgtggcccatcagcggaatcattgggacttgctcacgctgcttgaaggcgctggtccaccggaggctagacacaaggcaacacccggacgcgaggcaggaccttttcccagagcccgcaccgtttcagtgagtgtcccaccccacggcggcggtgcccttcctaggtgccgcactctctccgcaggagcaggccctagggggggcggagcctgtctgcaggctcgcacatggtctgtggatctcgcagcccgcggaggtggggcatacagtcattgcagatctctctctggggtgggggcgggcgggggacccacaccccgagggcgacggttctcagccggaatgaggggaccaaggccgaacccagcaatcatgagaggacggtacggggtagccgccgggagaggcggccgtgtcagtactgatgactggccttgcgactgggtagctctgggagcttgcggatctgcaagtaatatccctatcccgcctccatgtctcacaccaagccccgagcggggaagccctcaactcgactgcggcccccccgcactgcaagagatgccaatcaatcaggggggcgaaggtaaaaaatag

SEQ ID NO: 147552 - DNA, 561 bp, Artificial Sequence
  derived and/or modified sequence
atgagcgccgtgtgctgcggcgaggtgcagagcggcaccttccagggtgcttggctgggatgtcctgaaccttgggaacctctgttggacgggggcgcttgcccacaggcccacaccgttggtaccggtgaaactcctctgcacctggctgcacgtttttcccgtcccactgccgcgaggagattacttgaggccggcgcgaatcctaatcagcctgatagagccggacgcactcctctgcacgccgccgttgcggccgatgctcgcgaggtctgccagcttctgctgaggagccgacaaaccgccgttgatgcgcgaacagaggatggaacaacccctctgatgctggcagcacggctggcagtggaggacctggtcgaagagctgatcgcggcgcaagctgacgtgggcgctcgcgacaagtggggagctgatgccgctattcccggcggcgccggccgaagcgggggaagcagccccgcgactgcaggagccggtggctcaccccgcgcagctggaccagggtgggccagcgctggcggcaggcgcagcccaacctag

SEQ ID NO: 147553 - DNA, 561 bp, Artificial Sequence
  derived and/or modified sequence
atgagcgccgtgtgctgcggcgaggtgcagagcggcaccttccagggcgcttggcttggttgccctgagccgtgggaacctctgctggacggtggggcttgccctcaggcgcacacagtaggcacaggggagactccgctgcacctggccgctagatttagccggcccacagccgcccgacgcctgctcgaggccggagccaacccaaaccagccagatcgagccgggaggactcctctccatgccgccgtggcagctgatgcccgagaggtgtgtcagttacttttgcgaagccggcagactgccgtggatgcacgcaccgaagacggaaccacaccgctgatgcttgcagctcggcttgcagtggaggatctcgttgaagagctcatcgccgcacaagctgatgtgggggcacgggataagtggggggccgatgccgccataccaggaggagccggccgttcaggtggtagctccccagccacagccggagcaggcgggagtccaagagcggccgggcccgggtgggcttccgccgggggacgaaggtcccctacatag

SEQ ID NO: 147554 - DNA, 561 bp, Artificial Sequence
  derived and/or modified sequence
atgagcgccgtgtgctgcggcgaggtgcagagcggcaccttccagggcgcttggctcggatgccctgagccctgggagcccctgctggatggaggggcatgtccccaggcgcacaccgtgggcacaggggagacccccttacacctggcagcccggtttagtagaccaaccgcagctaggcgacttttggaagcaggcgctaatcccaatcaacctgatcgggctggtcggaccccgttgcacgctgccgttgctgcagacgctagggaggtgtgccagttgttactcaggtctcgccagactgcagtggacgcccggacagaggacggtacaaccccattaatgcttgctgccagattggccgtggaagatctggtggaagagcttatcgccgcccaggccgacgtgggggctcgtgacaaatggggggctgatgcagctatccccggcggcgctggtcggagcggaggctcgagccccgccaccgctggcgccggaggctctcccagagccgcggggcccggttgggcctccgccggcggaaggaggtccccaacatag

SEQ ID NO: 147555 - DNA, 561 bp, Artificial Sequence
  derived and/or modified sequence
atgagcgccgtgtgctgcggcgaggtgcagagcggcaccttccagggggcttggctggggtgccctgaaccgtgggagcccttgctggatgggggagcgtgtcctcaggcccacactgtcggaaccggtgaaactcccctccatttggcagcaaggttttctcgccccactgcagcaagacgattactggaggccggcgccaaccccaatcagccagatcgggccggtcggactccactccacgcagccgtggctgccgatgccagggaagtgtgtcagctgctgctcaggtctagacagacggctgtagacgctcggactgaagatggcaccacacccctgatgttagcagctagactcgctgtcgaggatttggtcgaagaattaatcgcggctcaggcagatgtgggcgcacgggataaatggggagcagatgccgcaatccctggaggcgccgggcgaagcggcggatcttctccggccactgctggagcgggaggatctccccgggcagccggtcctgggtgggcttccgctggaggacggcgctcgccaacctag

SEQ ID NO: 147556 - DNA, 561 bp, Artificial Sequence
  derived and/or modified sequence
atgagcgccgtgtgctgcggcgaggtgcagagcggcaccttccagggtgcttggctggggtgtcccgaaccctgggagccgctgctcgacgggggtgcctgtccccaggctcacacagtgggcacaggtgagacacctctacatctggctgcacggttttcgaggccaaccgccgctcggcggctgttagaagcaggagccaatccaaatcagccagacagagctgggagaacgccactgcacgctgccgtggccgccgacgcacgcgaggtgtgccagttgctcctccgcagcaggcaaaccgccgtagacgcccgcacagaggatgggacaacccccctgatgctggctgccagacttgccgtcgaggatttggtggaggagttgatcgccgcccaagctgatgtgggagcacgtgataagtggggagcggatgccgctatcccaggtggcgccggacggtccgggggaagctcaccggccactgccggggccggtgggagccccagggctgcaggacctggatgggcttccgctggcggacggcggagccctacatag

SEQ ID NO: 147557 - DNA, 6745 bp, Artificial Sequence
  derived and/or modified sequence
agacgtgaggcttgcagcaggccgaggaggaagaagaggggcagtgggagcagaggaggtggctcctgccccagtgagagctctgagggtccctgcctgaagagggacagggaccggggcttggagaaggggctgtggaatgcagcccccttcactgctgctgctgctgctgctgctgctgctgctatgtgtctcagtggtcagacccagagggctgctgtgtgggagtttcccagaaccctgtgccaatggaggcacctgcctgagcctgtctctgggacaagggacctgccagtgtgcccctggcttcctgggtgagacgtgccagtttcctgacccctgccagaacgcccagctctgccaaaatggaggcagctgccaagccctgcttcccgctcccctagggctccccagctctccctctccattgacacccagcttcttgtgcacttgcctccctggcttcactggtgagagatgccaggccaagcttgaagacccttgtcctccctccttctgttccaaaaggggccgctgccacatccaggcctcgggccgcccacagtgctcctgcatgcctggatggacaggtgagcagtgccagcttcgggacttctgttcagccaacccatgtgttaatggaggggtgtgtctggccacatacccccagatccagtgccactgcccaccgggcttcgagggccatgcctgtgaacgtgatgtcaacgagtgcttccaggacccaggaccctgccccaaaggcacctcctgccataacaccctgggctccttccagtgcctctgccctgtggggcaggagggtccacgttgtgagctgcgggcaggaccctgccctcctaggggctgttcgaatgggggcacctgccagctgatgccagagaaagactccacctttcacctctgcctctgtcccccaggtttcataggcccagactgtgaggtgaatccagacaactgtgtcagccaccagtgtcagaatgggggcacttgccaggatgggctggacacctacacctgcctctgcccagaaacctggacaggctgggactgctccgaagatgtggatgagtgtgagacccagggtccccctcactgcagaaacgggggcacctgccagaactctgctggtagctttcactgcgtgtgtgtgagtggctggggcggcacaagctgtgaggagaacctggatgactgtattgctgccacctgtgccccgggatccacctgcattgaccgggtgggctctttctcctgcctctgcccacctggacgcacaggactcctgtgccacttggaagacatgtgtctgagccagccgtgccatggggatgcccaatgcagcaccaaccccctcacaggctccacactctgcctgtgtcagcctggctattcggggcccacctgccaccaggacctggacgagtgtctgatggcccagcaaggcccaagtccctgtgaacatggcggttcctgcctcaacactcctggctccttcaactgcctctgtccacctggctacacaggctcccgttgtgaggctgatcacaatgagtgcctctcccagccctgccacccaggaagcacctgtctggacctacttgccaccttccactgcctctgcccgccaggcttagaagggcagctctgtgaggtggagaccaacgagtgtgcctcagctccctgcctgaaccacgcggattgccatgacctgctcaacggcttccagtgcatctgcctgcctggattctccggcacccgatgtgaggaggatatcgatgagtgcagaagctctccctgtgccaatggtgggcagtgccaggaccagcctggagccttccactgcaagtgtctcccaggctttgaagggccacgctgtcaaacagaggtggatgagtgcctgagtgacccatgtcccgttggagccagctgccttgatcttccaggagccttcttttgcctctgcccctctggtttcacaggccagctctgtgaggttcccctgtgtgctcccaacctgtgccagcccaagcagatatgtaaggaccagaaagacaaggccaactgcctctgtcctgatggaagccctggctgtgccccacctgaggacaactgcacctgccaccacgggcactgccagagatcctcatgtgtgtgtgacgtgggttggacggggccagagtgtgaggcagagctagggggctgcatctctgcaccctgtgcccatggggggacctgctacccccagccctctggctacaactgcacctgccctacaggctacacaggacccacctgtagtgaggagatgacagcttgtcactcagggccatgtctcaatggcggctcctgcaaccctagccctggaggctactactgcacctgccctccaagccacacagggccccagtgccaaaccagcactgactactgtgtgtctgccccgtgcttcaatgggggtacctgtgtgaacaggcctggcaccttctcctgcctctgtgccatgggcttccagggcccgcgctgtgagggaaagctccgccccagctgtgcagacagcccctgtaggaatagggcaacctgccaggacagccctcagggtccccgctgcctctgccccactggctacaccggaggcagctgccagactctgatggacttatgtgcccagaagccctgcccacgcaattcccactgcctccagactgggccctccttccactgcttgtgcctccagggatggaccgggcctctctgcaaccttccactgtcctcctgccagaaggctgcactgagccaaggcatagacgtctcttccctttgccacaatggaggcctctgtgtcgacagcggcccctcctatttctgccactgcccccctggattccaaggcagcctgtgccaggatcacgtgaacccatgtgagtccaggccttgccagaacggggccacctgcatggcccagcccagtgggtatctctgccagtgtgccccaggctacgatggacagaactgctcaaaggaactcgatgcttgtcagtcccaaccctgtcacaaccatggaacctgtactcccaaacctggaggattccactgtgcctgccctccaggctttgtggggctacgctgtgagggagacgtggacgagtgtctggaccagccctgccaccccacaggcactgcagcctgccactctctggccaatgccttctactgccagtgtctgcctggacacacaggccagtggtgtgaggtggagatagacccctgccacagccaaccctgctttcatggagggacctgtgaggccacagcaggatcacccctgggtttcatctgccactgccccaagggttttgaaggccccacctgcagccacagggccccttcctgcggcttccatcactgccaccacggaggcctgtgtctgccctcccctaagccaggcttcccaccacgctgtgcctgcctcagtggctatgggggtcctgactgcctgaccccaccagctcctaaaggctgtggccctccctccccatgcctatacaatggcagctgctcagagaccacgggcttggggggcccaggctttcgatgctcctgccctcacagctctccagggccccggtgtcagaaacccggagccaaggggtgtgagggcagaagtggagatggggcctgcgatgctggctgcagtggcccgggaggaaactgggatggaggggactgctctctgggagtcccagacccctggaagggctgcccctcccactctcggtgctggcttctcttccgggacgggcagtgccacccacagtgtgactctgaagagtgtctgtttgatggctacgactgtgagacccctccagcctgcactccagcctatgaccagtactgccatgatcacttccacaacgggcactgtgagaaaggctgcaacactgcagagtgtggctgggatggaggtgactgcaggcctgaagatggggacccagagtgggggccctccctggccctgctggtggtactgagccccccagccctagaccagcagctgtttgccctggcccgggtgctgtccctgactctgagggtaggactctgggtaaggaaggatcgtgatggcagggacatggtgtacccctatcctggggcccgggctgaagaaaagctaggaggaactcgggaccccacctatcaggagagagcagcccctcaaacgcagcccctgggcaaggagaccgactccctcagtgctgggtttgtggtggtcatgggtgtggatttgtcccgctgtggccctgaccacccggcatcccgctgtccctgggaccctgggcttctactccgcttccttgctgcgatggctgcagtgggagccctggagcccctgctgcctggaccactgctggctgtccaccctcatgcagggaccgcaccccctgccaaccagcttccctggcctgtgctgtgctccccagtggccggggtgattctcctggccctaggggctcttctcgtcctccagctcatccggcgtcgacgccgagagcatggagctctctggctgccccctggtttcactcgacggcctcggactcagtcagctccccaccgacgccggcccccactaggcgaggacagcattggtctcaaggcactgaagccaaaggcagaagttgatgaggatggagttgtgatgtgctcaggccctgaggagggagaggaggtgggccaggctgaagaaacaggcccaccctccacgtgccagctctggtctctgagtggtggctgtggggcgctccctcaggcagccatgctaactcctccccaggaatctgagatggaagcccctgacctggacacccgtggacctgatggggtgacacccctgatgtcagcagtttgctgtggggaagtacagtccgggaccttccaaggggcatggttgggatgtcctgagccctgggaacctctgctggatggaggggcctgtccccaggctcacaccgtgggcactggggagacccccctgcacctggctgcccgattctcccggccaaccgctgcccgccgcctccttgaggctggagccaaccccaaccagccagaccgggcagggcgcacaccccttcatgctgctgtggctgctgatgctcgggaggtctgccagcttctgctccgtagcagacaaactgcagtggacgctcgcacagaggacgggaccacacccttgatgctggctgccaggctggcggtggaagacctggttgaagaactgattgcagcccaagcagacgtgggggccagagataaatgggggaaaactgcgctgcactgggctgctgccgtgaacaacgcccgagccgcccgctcgcttctccaggccggagccgataaagatgcccaggacaacagggagcagacgccgctattcctggcggcgcgggaaggagcggtggaagtagcccagctactgctggggctgggggcagcccgagagctgcgggaccaggctgggctagcgccggcggacgtcgctcaccaacgtaaccactgggatctgctgacgctgctggaaggggctgggccaccagaggcccgtcacaaagccacgccgggccgcgaggctgggcccttcccgcgcgcacggacggtgtcagtaagcgtgcccccgcatgggggcggggctctgccgcgctgccggacgctgtcagccggagcaggccctcgtgggggcggagcttgtctgcaggctcggacttggtccgtagacttggctgcgcgggggggcggggcctattctcattgccggagcctctcgggagtaggagcaggaggaggcccgacccctcgcggccgtaggttttctgcaggcatgcgcgggcctcggcccaaccctgcgataatgcgaggaagatacggagtggctgccgggcgcggaggcagggtctcaacggatgactggccctgtgattgggtggccctgggagcttgcggttctgcctccaacattccgatcccgcctccttgccttactccgtccccggagcggggatcacctcaacttgactgtggtcccccagccctccaagaaatgcccataaaccaaggaggagagggtaaaaaatagaagaatacatggtagggaggaattccaaaaatgattacccattaaaaggcaggctggaaggccttcctggttttaagatggatcccccaaaatgaagggttgtgagtttagtttctctcctaaaatgaatgtatgcccaccagagcagacatcttccacgtggagaagctgcagctctggaaagagggtttaagatgctaggatgaggcaggcccagtcctcctccagaaaataagacaggccacaggagggcagagtggagtggaaatacccctaagttggaaccaagaattgcaggcatatgggatgtaagatgttctttcctatatatggtttccaaagggtgcccctatgatccattgtccccactgcccacaaatggctgacaaatatttattgggcacctactatgtgccaggcactgtgtaggtgctgaaaagtggccaagggccacccccgctgatgactccttgcattccctcccctcacaacaaagaactccactgtggggatgaagcgcttcttctagccactgctatcgctatttaagaaccctaaatctgtcacccataataaagctgatttgaagtgtta

SEQ ID NO: 147558 - DNA, 3741 bp, Artificial Sequence
  derived and/or modified sequence
tgtgccccaggctacgatggacagaactgctcaaaggaactcgatgcttgtcagtcccaaccctgtcacaaccatggaacctgtactcccaaacctggaggcttccactgtgcctgccctccaggctttgtggggctacgctgtgagggagacgtggacgagtgtctggaccagccctgccaccccacaggcactgcagcctgccactctctggccaatgccttctactgccagtgtctgcctggacacacaggccagtggtgtgaggtggagatagacccctgccacagccaaccctgctttcatggagggacctgtgaggccacagcaggatcacccctgggtttcatctgccactgccccaagggttttgaaggccccacctgcagccacagggccccttcctgcggcttccatcactgccaccacggaggcctgtgtctgccctcccctaagccaggcttcccaccacgctgtgcctgcctcagtggctatgggggtcctgactgcctgaccccaccagctcctaaaggctgtggccctccctccccatgcctatacaatggcagctgctcagagaccacgggcttggggggcccaggctttcgatgctcctgccctcacagctctccagggccccggtgtcagaaacccggagccaaggggtgtgagggcagaagtggagatggggcctgcgatgctggctgcagtggcccgggaggaaactgggatggaggggactgctctctgggagtcccagacccctggaagggctgcccctcccactctcggtgctggcttctcttccgggacgggcagtgccacccacagtgtgactctgaagagtgtctgtttgatggctacgactgtgagacccctccagcctgcactccagcctatgaccagtactgccatgatcacttccacaacgggcactgtgagaaaggctgcaacactgcagagtgtggctgggatggaggtgactgcaggcctgaagatggggacccagagtgggggccctccctggccctgctggtggtactgagccccccagccctagaccagcagctgtttgccctggcccgggtgctgtccctgactctgagggtaggactctgggtaaggaaggatcgtgatggcagggacatggtgtacccctatcctggggcccgggctgaagaaaagctaggaggaactcgggaccccacctatcaggagagagcagcccctcaaacgcagcccctgggcaaggagaccgactccctcagtgctgggtttgtggtggtcatgggtgtggatttgtcccgctgtggccctgaccacccggcatcccgctgtccctgggaccctgggcttctactccgcttccttgctgcgatggctgcagtgggagccctggagcccctgctgcctggaccactgctggctgtccaccctcatgcagggaccgcaccccctgccaaccagcttccctggcctgtgctgtgctccccagtggccggggtgattctcctggccctaggggctcttctcgtcctccagctcatccggcgtcgacgccgagagcatggagctctctggctgccccctggtttcactcgacggcctcggactcagtcagctccccaccgacgccggcccccactaggcgaggacagcattggtctcaaggcactgaagccaaaggcagaagttgatgaggatggagttgtgatgtgctcaggccctgaggagggagaggaggtgggccaggctgaagaaacaggcccaccctccacgtgccagctctggtctctgagtggtggctgtggggcgctccctcaggcagccatgctaactcctccccaggaatctgagatggaagcccctgacctggacacccgtggacctgatggggtgacacccctgatgtcagcagtttgctgtggggaagtacagtccgggaccttccaaggggcatggttgggatgtcctgagccctgggaacctctgctggatggaggggcctgtccccaggctcacaccgtgggcactggggagacccccctgcacctggctgcccgattctcccggccaaccgctgcccgccgcctccttgaggctggagccaaccccaaccagccagaccgggcagggcgcacaccccttcatgctgctgtggctgctgatgctcgggaggtctgccagcttctgctccgtagcagacaaactgcagtggacgctcgcacagaggacgggaccacacccttgatgctggctgccaggctggcggtggaagacctggttgaagaactgattgcagcccaagcagacgtgggggccagagataaatgggggaaaactgcgctgcactgggctgctgccgtgaacaacgcccgagccgcccgctcgcttctccaggccggagccgataaagatgcccaggacaacagggagcagacgccgctattcctggcggcgcgggaaggagcggtggaagtagcccagctactgctggggctgggggcagcccgagagctgcgggaccaggctgggctagcgccggcggacgtcgctcaccaacgtaaccactgggatctgctgacgctgctggaaggggctgggccaccagaggcccgtcacaaagccacgccgggccgcgaggctgggcccttcccgcgcgcacggacggtgtcagtaagcgtgcccccgcatgggggcggggctctgccgcgctgccggacgctgtcagccggagcaggccctcgtgggggcggagcttgtctgcaggctcggacttggtccgtagacttggctgcgcgggggggcggggcctattctcattgccggagcctctcgggagtaggagcaggaggaggcccgacccctcgcggccgtaggttttctgcaggcatgcgcgggcctcggcccaaccctgcgataatgcgaggaagatacggagtggctgccgggcgcggaggcagggtctcaacggatgactggccctgtgattgggtggccctgggagcttgcggttctgcctccaacattccgatcccgcctccttgccttactccgtccccggagcggggatcacctcaacttgactgtggtcccccagccctccaagaaatgcccataaaccaaggaggagagggtaaaaaatagaagaatacatggtagggaggaattccaaaaatgattacccattaaaaggcaggctggaaggccttcctggttttaagatggatcccccaaaatgaagggttgtgagtttagtttctctcctaaaatgaatgtatgcccaccagagcagacatcttccacgtggagaagctgcagctctggaaagagggtttaagatgctaggatgaggcaggcccagtcctcctccagaaaataagacaggccacaggagggcagagtggagtggaaatacccctaagttggaaccaagaattgcaggcatatgggatgtaagatgttctttcctatatatggtttccaaagggtgcccctatgatccattgtccccactgcccacaaatggctgacaaatatttattgggcacctactatgtgccaggcactgtgtaggtgctgaaaagtggccaagggccacccccgctgatgactccttgcattccctcccctcacaacaaagaactccactgtggggatgaagcgcttcttctagccactgctatcgctatttaagaaccctaaatctgtcacccataataaagctgatttgaagtgtta

SEQ ID NO: 147559 - DNA, 6751 bp, Artificial Sequence
  derived and/or modified sequence
agacgtgaggcttgcagcaggccgaggaggaagaagaggggcagtgggagcagaggaggtggctcctgccccagtgagagctctgagggtccctgcctgaagagggacagggaccggggcttggagaaggggctgtggaatgcagcccccttcactgctgctgctgctgctgctgctgctgctgctgctgctatgtgtctcagtggtcagacccagagggctgctgtgtgggagtttcccagaaccctgtgccaatggaggcacctgcctgagcctgtctctgggacaagggacctgccagtgtgcccctggcttcctgggtgagacgtgccagtttcctgacccctgccagaacgcccagctctgccaaaatggaggcagctgccaagccctgcttcccgctcccctagggctccccagctctccctctccattgacacccagcttcttgtgcacttgcctccctggcttcactggcgagagatgccaggcccagcttgaagacccttgtcctccctccttctgttccaaaaggggccgctgccacatccaggcctcgggccgcccacagtgctcctgcatgcctggatggacaggtgagcagtgccagcttcgggacttctgttcagccaacccatgtgttaatggaggggtgtgtctggccacatacccccagatccagtgccactgcccaccgggcttcgagggccatgcctgtgaacgtgatgtcaacgagtgcttccaggacccaggaccctgccccaaaggcacctcctgccataacaccctgggctccttccagtgcctctgccctgtggggcaggagggtccacgttgtgagctgcgggcaggaccctgccctcctaggggctgttcgaatgggggcacctgccagctgatgccagagaaagactccacctttcacctctgcctctgtcccccaggtttcataggcccagactgtgaggtgaatccagacaactgtgtcagccaccagtgtcagaatgggggcacttgccaggatgggctggacacctacacctgcctctgcccagaaacctggacaggctgggactgctccgaagatgtggatgagtgtgaggcccagggtccccctcactgcagaaacgggggcacctgccagaactctgctggtagctttcactgcgtgtgtgtgagtggctggggcggcacaagctgtgaggagaacctggatgactgtattgctgccacctgtgccccgggatccacctgcattgaccgggtgggctctttctcctgcctctgcccacctggacgcacaggactcctgtgccacttggaagacatgtgtctgagccagccgtgccatggggatgcccaatgcagcaccaaccccctcacaggctccacactctgcctgtgtcagcctggctattcggggcccacctgccaccaggacctggacgagtgtctgatggcccagcaaggcccaagtccctgtgaacatggcggttcctgcctcaacactcctggctccttcaactgcctctgtccacctggctacacaggctcccgttgtgaggctgatcacaatgagtgcctctcccagccctgccacccaggaagcacctgtctggacctacttgccaccttccactgcctctgcccgccaggcttagaagggcagctctgtgaggtggagaccaacgagtgtgcctcagctccctgcctgaaccacgcggattgccatgacctgctcaacggcttccagtgcatctgcctgcctggattctccggcacccgatgtgaggaggatatcgatgagtgcagaagctctccctgtgccaatggtgggcagtgccaggaccagcctggagccttccactgcaagtgtctcccaggctttgaagggccacgctgtcaaacagaggtggatgagtgcctgagtgacccatgtcccgttggagccagctgccttgatcttccaggagccttcttttgcctctgcccctctggtttcacaggccagctctgtgaggttcccctgtgtgctcccaacctgtgccagcccaagcagatatgtaaggaccagaaagacaaggccaactgcctctgtcctgatggaagccctggctgtgccccacctgaggacaactgcacctgccaccacgggcactgccagagatcctcatgtgtgtgtgacgtgggttggacggggccagagtgtgaggcagagctagggggctgcatctctgcaccctgtgcccatggggggacctgctacccccagccctctggctacaactgcacctgccctacaggctacacaggacccacctgtagtgaggagatgacagcttgtcactcagggccatgtctcaatggcggctcctgcaaccctagccctggaggctactactgcacctgccctccaagccacacagggccccagtgccaaaccagcactgactactgtgtgtctgccccgtgcttcaatgggggtacctgtgtgaacaggcctggcaccttctcctgcctctgtgccatgggcttccagggcccgcgctgtgagggaaagctccgccccagctgtgcagacagcccctgtaggaatagggcaacctgccaggacagccctcagggtccccgctgcctctgccccactggctacaccggaggcagctgccagactctgatggacttatgtgcccagaagccctgcccacgcaattcccactgcctccagactgggccctccttccactgcttgtgcctccagggatggaccgggcctctctgcaaccttccactgtcctcctgccagaaggctgcactgagccaaggcatagacgtctcttccctttgccacaatggaggcctctgtgtcgacagcggcccctcctatttctgccactgcccccctggattccaaggcagcctgtgccaggatcacgtgaacccatgtgagtccaggccttgccagaacggggccacctgcatggcccagcccagtgggtatctctgccagtgtgccccaggctacgatggacagaactgctcaaaggaactcgatgcttgtcagtcccaaccctgtcacaaccatggaacctgtactcccaaacctggaggcttccactgtgcctgccctccaggctttgtggggctacgctgtgagggagacgtggacgagtgtctggaccagccctgccaccccacaggcactgcagcctgccactctctggccaatgccttctactgccagtgtctgcctggacacacaggccagtggtgtgaggtggagatagacccctgccacagccaaccctgctttcatggagggacctgtgaggccacagcaggatcacccctgggtttcatctgccactgccccaagggttttgaaggccccacctgcagccacagggccccttcctgcggcttccatcactgccaccacggaggcctgtgtctgccctcccctaagccaggcttcccaccacgctgtgcctgcctcagtggctatgggggtcctgactgcctgaccccaccagctcctaaaggctgtggccctccctccccatgcctatacaatggcagctgctcagagaccacgggcttggggggcccaggctttcgatgctcctgccctcacagctctccagggccccggtgtcagaaacccggagccaaggggtgtgagggcagaagtggagatggggcctgcgatgctggctgcagtggcccgggaggaaactgggatggaggggactgctctctgggagtcccagacccctggaagggctgcccctcccactctcggtgctggcttctcttccgggacgggcagtgccacccacagtgtgactctgaagagtgtctgtttgatggctacgactgtgagacccctccagcctgcactccagcctatgaccagtactgccatgatcacttccacaacgggcactgtgagaaaggctgcaacactgcagagtgtggctgggatggaggtgactgcaggcctgaagatggggacccagagtgggggccctccctggccctgctggtggtactgagccccccagccctagaccagcagctgtttgccctggcccgggtgctgtccctgactctgagggtaggactctgggtaaggaaggatcgtgatggcagggacatggtgtacccctatcctggggcccgggctgaagaaaagctaggaggaactcgggaccccacctatcaggagagagcagcccctcaaacgcagcccctgggcaaggagaccgactccctcagtgctgggtttgtggtggtaatgggtgtggatttgtcccgctgtggccctgaccacccggcatcccgctgtccctgggaccctgggcttctactccgcttccttgctgcgatggctgcagtgggagccctggagcccctgctgcctggaccactgctggctgtccaccctcatgcagggaccgcaccccctgccaaccagcttccctggcctgtgctgtgctccccagtggccggggtgattctcctggccctaggggctcttctcgtcctccagctcatccggcgtcgacgccgagagcatggagctctctggctgccccctggtttcactcgacggcctcggactcagtcagctccccaccgacgccggcccccactaggcgaggacagcattggtctcaaggcactgaagccaaaggcagaagttgatgaggatggagttgtgatgtgctcaggccctgaggagggagaggaggtgggccaggctgaagaaacaggcccaccctccacgtgccagctctggtctctgagtggtggctgtggggcgctccctcaggcagccatgctaactcctccccaggaatctgagatggaagcccctgacctggacacccgtggacctgatggggtgacacccctgatgtcagcagtttgctgtggggaagtacagtccgggaccttccaaggggcatggttgggatgtcctgagccctgggaacctctgctggatggaggggcctgtccccaggctcacaccgtgggcactggggagacccccctgcacctggctgcccgattctcccggccaaccgctgcccgccgcctccttgaggctggagccaaccccaaccagccagaccgggcagggcgcacaccccttcatgctgctgtggctgctgatgctcgggaggtctgccagcttctgctccgtagcagacaaactgcagtggacgctcgcacagaggacgggaccacacccttgatgctggctgccaggctggcggtggaagacctggttgaagaactgattgcagcccaagcagacgtgggggccagagataaatgggggaaaactgcgctgcactgggctgctgccgtgaacaacgcccgagccgcccgctcgcttctccaggccggagccgataaagatgcccaggacaacagggagcagacgccgctattcctggcggcgcgggaaggagcggtggaagtagcccagctactgctggggctgggggcagcccgagagctgcgggaccaggctgggctagcgccggcggacgtcgctcaccaacgtaaccactgggatctgctgacgctgctggaaggggctgggccaccagaggcccgtcacaaagccacgccgggccgcgaggctgggcccttcccgcgcgcacggacggtgtcagtaagcgtgcccccgcatgggggcggggctctgccgcgctgccggacgctgtcagccggagcaggccctcgtgggggcggagcttgtctgcaggctcggacttggtccgtagacttggctgcgcgggggggcggggcctattctcattgccggagcctctcgggagtaggagcaggaggaggcccgacccctcgcggccgtaggttttctgcaggcatgcgcgggcctcggcccaaccctgcgataatgcgaggaagatacggagtggctgccgggcgcggaggcagggtctcaacggatgactggccctgtgattgggtggccctgggagcttgcggttctgcctccaacattccgatcccgcctccttgccttactccgtccccggagcggggatcacctcaacttgactgtggtcccccagccctccaagaaatgcccataaaccaaggaggagagggtaaaaaatagaagaatacatggtagggaggaattccaaaaatgattacccattaaaaggcaggctggaaggccttcctggttttaagatggatcccccaaaatgaagggttgtgagtttagtttctctcctaaaatgaatgtatgcccaccagagcagacatcttccacgtggagaagctgcagctctggaaagagggtttaagatgctaggatgaggcaggcccagtcctcctccagaaaataagacaggccacaggagggcagagtggagtggaaatacccctaagttggaaccaagaattgcaggcatatgggatgtaagatgttctttcctatatatggtttccaaagggtgcccctatgatccattgtccccactgcccacaaatggctgacaaatatttattgggcacctactatgtgccaggcactgtgtaggtgctgaaaagtggccaagggccacccccgctgatgactccttgcattccctcccctcacaacaaagaactccactgtggggatgaagcgcttcttctagccactgctatcgctatttaagaaccctaaatctgtcacccataataaagctgatttgaagtgtta

SEQ ID NO: 147560 - DNA, 6745 bp, Artificial Sequence
  derived and/or modified sequence
agacgtgaggcttgcagcaggccgaggaggaagaagaggggcagtgggagcagaggaggtggctcctgccccagtgagagctctgagggtccctgcctgaagagggacagggaccggggcttggagaaggggctgtggaatgcagcccccttcactgctgctgctgctgctgctgctgctgctgctatgtgtctcagtggtcagacccagagggctgctgtgtgggagtttcccagaaccctgtgccaatggaggcacctgcctgagcctgtctctgggacaagggacctgccagtgtgcccctggcttcctgggtgagacgtgccagtttcctgacccctgccagaacgcccagctctgccaaaatggaggcagctgccaagccctgcttcccgctcccctagggctccccagctctccctctccattgacacccagcttcttgtgcacttgcctccctggcttcactggcgagagatgccaggcccagcttgaagacccttgtcctccctccttctgttccaaaaggggccgctgccacatccaggcctcgggccgcccacagtgctcctgcatgcctggatggacaggtgagcagtgccagcttcgggacttctgttcagccaacccatgtgttaatggaggggtgtgtctggccacatacccccagatccagtgccactgcccaccgggcttcgagggccatgcctgtgaacgtgatgtcaacgagtgcttccaggacccaggaccctgccccaaaggcacctcctgccataacaccctgggctccttccagtgcctctgccctgtggggcaggagggtccacgttgtgagctgcgggcaggaccctgccctcctaggggctgttcgaatgggggcacctgccagctgatgccagagaaagactccacctttcacctctgcctctgtcccccaggtttcataggcccagactgtgaggtgaatccagacaactgtgtcagccaccagtgtcagaatgggggcacttgccaggatgggctggacacctacacctgcctctgcccagaaacctggacaggctgggactgctccgaagatgtggatgagtgtgagacccagggtccccctcactgcagaaacgggggcacctgccagaactctgctggtagctttcactgcgtgtgtgtgagtggctggggcggcacaagctgtgaggagaacctggatgactgtattgctgccacctgtgccccgggatccacctgcattgaccgggtgggctctttctcctgcctctgcccacctggacgcacaggactcctgtgccacttggaagacatgtgtctgagccagccgtgccatggggatgcccaatgcagcaccaaccccctcacaggctccacactctgcctgtgtcagcctggctattcggggcccacctgccaccaggacctggacgagtgtctgatggcccagcaaggcccaagtccctgtgaacatggcggttcctgcctcaacactcctggctccttcaactgcctctgtccacctggctacacaggctcccgttgtgaggctgatcacaatgagtgcctctcccagccctgccacccaggaagcacctgtctggacctacttgccaccttccactgcctctgcccgccaggcttagaagggcagctctgtgaggtggagaccaacgagtgtgcctcagctccctgcctgaaccacgcggattgccatgacctgctcaacggcttccagtgcatctgcctgcctggattctccggcacccgatgtgaggaggatatcgatgagtgcagaagctctccctgtgccaatggtgggcagtgccaggaccagcctggagccttccactgcaagtgtctcccaggctttgaagggccacgctgtcaaacagaggtggatgagtgcctgagtgacccatgtcccgttggagccagctgccttgatcttccaggagccttcttttgcctctgcccctctggtttcacaggccagctctgtgaggttcccctgtgtgctcccaacctgtgccagcccaagcagatatgtaaggaccagaaagacaaggccaactgcctctgtcctgatggaagccctggctgtgccccacctgaggacaactgcacctgccaccacgggcactgccagagatcctcatgtgtgtgtgacgtgggttggacggggccagagtgtgaggcagagctagggggctgcatctctgcaccctgtgcccatggggggacctgctacccccagccctctggctacaactgcacctgccctacaggctacacaggacccacctgtagtgaggagatgacagcttgtcactcagggccatgtctcaatggcggctcctgcaaccctagccctggaggctactactgcacctgccctccaagccacacagggccccagtgccaaaccagcactgactactgtgtgtctgccccgtgcttcaatgggggtacctgtgtgaacaggcctggcaccttctcctgcctctgtgccatgggcttccagggcccgcgctgtgagggaaagctccgccccagctgtgcagacagcccctgtaggaatagggcaacctgccaggacagccctcagggtccccgctgcctctgccccactggctacaccggaggcagctgccagactctgatggacttatgtgcccagaagccctgcccacgcaattcccactgcctccagactgggccctccttccactgcttgtgcctccagggatggaccgggcctctctgcaaccttccactgtcctcctgccagaaggctgcactgagccaaggcatagacgtctcttccctttgccacaatggaggcctctgtgtcgacagcggcccctcctatttctgccactgcccccctggattccaaggcagcctgtgccaggatcacgtgaacccatgtgagtccaggccttgccagaacggggccacctgcatggcccagcccagtgggtatctctgccagtgtgccccaggctacgatggacagaactgctcaaaggaactcgatgcttgtcagtcccaaccctgtcacaaccatggaacctgtactcccaaacctggaggcttccactgtgcctgccctccaggctttgtggggctacgctgtgagggagacgtggacgagtgtctggaccagccctgccaccccacaggcactgcagcctgccactctctggccaatgccttctactgccagtgtctgcctggacacacaggccagtggtgtgaggtggagatagacccctgccacagccaaccctgctttcatggagggacctgtgaggccacagcaggatcacccctgggtttcatctgccactgccccaagggttttgaaggccccacctgcagccacagggccccttcctgcggcttccatcactgccaccacggaggcctgtgtctgccctcccctaagccaggcttcccaccacgctgtgcctgcctcagtggctatgggggtcctgactgcctgaccccaccagctcctaaaggctgtggccctccctccccatgcctatacaatggcagctgctcagagaccacgggcttggggggcccaggctttcgatgctcctgccctcacagctctccagggccccggtgtcagaaacccggagccaaggggtgtgagggcagaagtggagatggggcctgcgatgctggctgcagtggcccgggaggaaactgggatggaggggactgctctctgggagtcccagacccctggaagggctgcccctcccactctcggtgctggcttctcttccgggacgggcagtgccacccacagtgtgactctgaagagtgtctgtttgatggctacgactgtgagacccctccagcctgcactccagcctatgaccagtactgccatgatcacttccacaacgggcactgtgagaaaggctgcaacactgcagagtgtggctgggatggaggtgactgcaggcctgaagatggggacccagagtgggggccctctctggccctgctggtggtactgagccccccagccctagaccagcagctgtttgccctggcccgggtgctgtccctgactctgagggtaggactctgggtaaggaaggatcgtgatggcagggacatggtgtacccctatcctggggcccgggctgaagaaaagctaggaggaactcgggaccccacctatcaggagagagcagcccctcaaacgcagcccctgggcaaggagaccgactccctcagtgctgggtttgtggtggtcatgggtgtggatttgtcccgctgtggccctgaccacccggcatcccgctgtccctgggaccctgggcttctactccgcttccttgctgcgatggctgcagtgggagccctggagcccctgctgcctggaccactgctggctgtccaccctcatgcagggaccgcaccccctgccaaccagcttccctggcctgtgctgtgctccccagtggccggggtgattctcctggccctaggggctcttctcgtcctccagctcatccggcgtcgacgccgagagcatggagctctctggctgccccctggtttcactcgacggcctcggactcagtcagctccccaccgacgccggcccccactaggcgaggacagcattggtctcaaggcactgaagccaaaggcagaagttgatgaggatggagttgtgatgtgctcaggccctgaggagggagaggaggtgggccaggctgaagaaacaggcccaccctccacgtgccagctctggtctctgagtggtggctgtggggcgctccctcaggcagccatgctaactcctccccaggaatctgagatggaagcccctgacctggacacccgtggacctgatggggtgacacccctgatgtcagcagtttgctgtggggaagtacagtccgggaccttccaaggggcatggttgggatgtcctgagccctgggaacctctgctggatggaggggcctgtccccaggctcacaccgtgggcactggggagacccccctgcacctggctgcccgattctcccggccaaccgctgcccgccgcctccttgaggctggagccaaccccaaccagccagaccgggcagggcgcacaccccttcatgctgctgtggctgctgatgctcgggaggtctgccagcttctgctccgtagcagacaaactgcagtggacgctcgcacagaggacgggaccacacccttgatgctggctgccaggctggcggtggaagacctggttgaagaactgattgcagcccaagcagacgtgggggccagagataaatgggggaaaactgcgctgcactgggctgctgccgtgaacaacgcccgagccgcccgctcgcttctccaggccggagccgataaagatgcccaggacaacagggagcagacgccgctattcctggcggcgcgggaaggagcggtggaagtagcccagctactgctggggctgggggcagcccgagagctgcgggaccaggctgggctagcgccggcggacgtcgctcaccaacgtaaccactgggatctgctgacgctgctggaaggggctgggccaccagaggcccgtcacaaagccacgccgggccgcgaggctgggcccttcccgcgcgcacggacggtgtcagtaagcgtgcccccgcatgggggcggggctctgccgcgctgccggacgctgtcagccggagcaggccctcgtgggggcggagcttgtctgcaggctcggacttggtccgtagacttggctgcgcgggggggcggggcctattctcattgccggagcctctcgggagtaggagcaggaggaggcccgacccctcgcggccgtaggttttctgcaggcatgcgcgggcctcggcccaaccctgcgataatgcgaggaagatacggagtggctgccgggcgcggaggcagggtctcaacggatgactggccctgtgattgggtggccctgggagcttgcggttctgcctccaacattccgatcccgcctccttgccttactccgtccccggagcggggatcacctcaacttgactgtggtcccccagccctccaagaaatgcccataaaccaaggaggagagggtaaaaaatagaagaatacatggtagggaggaattccaaaaatgattacccattaaaaggcaggctggaaggccttcctggttttaagatggatcccccaaaatgaagggttgtgagtttagtttctctcctaaaatgaatgtatgcccaccagagcagacatcttccacgtggagaagctgcagctctggaaagagggtttaagatgctaggatgaggcaggcccagtcctcctccagaaaataagacaggccacaggagggcagagtggagtggaaatacccctaagttggaaccaagaattgcaggcatatgggatgtaagatgttctttcctatatatggtttccaaagggtgcccctatgatccattgtccccactgcccacaaatggctgacaaatatttattgggcacctactatgtgccaggcactgtgtaggtgctgaaaagtggccaagggccacccccgctgatgactccttgcattccctcccctcacaacaaagaactccactgtggggatgaagcgcttcttctagccactgctatcgctatttaagaaccctaaatctgtcacccataataaagctgatttgaagtgtta

SEQ ID NO: 147561 - DNA, 6742 bp, Artificial Sequence
  derived and/or modified sequence
agacgtgaggcttgcagcaggccgaggaggaagaagaggggcagtgggagcagaggaggtggctcctgccccagtgagagctctgagggtccctgcctgaagagggacagggactggggcttggagaaggggctgtggaatgcagcccccttcactgctgctgctgctgctgctgctgctgctatgtgtctcagtggtcagacccagagggctgctgtgtgggagtttcccagaaccctgtgccaatggaggcacctgcctgagcctgtctctgggacaagggacctgccagtgtgcccctggcttcctgggtgagacgtgccagtttcctgacccctgccagaacgcccagctctgccaaaatggaggcagctgccaagccctgcttcccgctcccctagggctccccagctctccctctccattgacacccagcttcttgtgcacttgcctccctggcttcactggcgagagatgccaggcccagcttgaagacccttgtcctccctccttctgttccaaaaggggccgctgccacatccaggcctcgggccgcccacagtgctcctgcatgcctggatggacaggtgagcagtgccagcttcgggacttctgttcagccaacccatgtgttaatggaggggtgtgtctggccacatacccccagatccagtgccactgcccaccgggcttcgagggccatgcctgtgaacgtgatgtcaacgagtgcttccaggacccaggaccctgccccaaaggcacctcctgccataacaccctgggctccttccagtgcctctgccctgtggggcaggagggtccacgttgtgagctgcgggcaggaccctgccctcctaggggctgttcgaatgggggcacctgccagctgatgccagagaaagactccacctttcacctctgcctctgtcccccaggtttcataggcccagactgtgaggtgaatccagacaactgtgtcagccaccagtgtcagaatgggggcacttgccaggatgggctggacacctacacctgcctctgcccagaaacctggacaggctgggactgctccgaagatgtggatgagtgtgagacccagggtccccctcactgcagaaacgggggcacctgccagaactctgctggtagctttcactgcgtgtgtgtgagtggctggggcggcacaagctgtgaggagaacctggatgactgtattgctgccacctgtgccccgggatccacctgcattgaccgggtgggctctttctcctgcctctgcccacctggacgcacaggactcctgtgccacttggaagacatgtgtctgagccagccgtgccatggggatgcccaatgcagcaccaaccccctcacaggctccacactctgcctgtgtcagcctggctattcggggcccacctgccaccaggacctggacgagtgtctgatggcccagcaaggcccaagtccctgtgaacatggcggttcctgcctcaacactcctggctccttcaactgcctctgtccacctggctacacaggctcccgttgtgaggctgatcacaatgagtgcctctcccagccctgccacccaggaagcacctgtctggacctacttgccaccttccactgcctctgcccgccaggcttagaagggcagctctgtgaggtggagaccaacgagtgtgcctcagctccctgcctgaaccacgcggattgccatgacctgctcaacggcttccagtgcatctgcctgcctggattctccggcacccgatgtgaggaggatatcgatgagtgcagaagctctccctgtgccaatggtgggcagtgccaggaccagcctggagccttccactgcaagtgtctcccaggctttgaagggccacgctgtcaaacagaggtggatgagtgcctgagtgacccatgtcccgttggagccagctgccttgatcttccaggagccttcttttgcctctgcccctctggtttcacaggccagctctgtgaggttcccctgtgtgctcccaacctgtgccagcccaagcagatatgtaaggaccagaaagacaaggccaactgcctctgtcctgatggaagccctggctgtgccccacctgaggacaactgcacctgccaccacgggcactgccagagatcctcatgtgtgtgtgacgtgggttggacggggccagagtgtgaggcagagctagggggctgcatctctgcaccctgtgcccatggggggacctgctacccccagccctctggctacaactgcacctgccctacaggctacacaggacccacctgtagtgaggagatgacagcttgtcactcagggccatgtctcaatggcggctcctgcaaccctagccctggaggctactactgcacctgccctccaagccacacagggccccagtgccaaaccagcactgactactgtgtgtctgccccgtgcttcaatgggggtacctgtgtgaacaggcctggcaccttctcctgcctctgtgccatgggcttccagggcccgcgctgtgagggaaagctccgccccagctgtgcagacagcccctgtaggaatagggcaacctgccaggacagccctcagggtccccgctgcctctgccccactggctacaccggaggcagctgccagactctgatggacttatgtgcccagaagccctgcccacgcaattcccactgcctccagactgggccctccttccactgcttgtgcctccagggatggaccgggcctctctgcaaccttccactgtcctcctgccagaaggctgcactgagccaaggcatagacgtctcttccctttgccacaatggaggcctctgtgtcgacagcggcccctcctatttctgccactgcccccctggattccaaggcagcctgtgccaggatcacgtgaacccatgtgagtccaggccttgccagaacggggccacctgcatggcccagcccagtgggtatctctgccagtgtgccccaggctacgatggacagaactgctcaaaggaactcgatgcttgtcagtcccaaccctgtcacaaccatggaacctgtactcccaaacctggaggcttccactgtgcctgccctccaggctttgtggggctacgctgtgagggagacgtggacgagtgtctggaccagccctgccaccccacaggcactgcagcctgccactctctggccaatgccttctactgccagtgtctgcctggacacacaggccagtggtgtgaggtggagatagacccctgccacagccaaccctgctttcatggagggacctgtgaggccacagcaggatcacccctgggtttcatctgccactgccccaagggttttgaaggccccacctgcagccacagggccccttcctgcggcttccatcactgccaccacggaggcctgtgtctgccctcccctaagccaggcttcccaccacgctgtgcctgcctcagtggctatgggggtcctgactgcctgaccccaccagctcctaaaggctgtggccctccctccccatgcctatacaatggcagctgctcagagaccacgggcttggggggcccaggctttcgatgctcctgccctcacagctctccagggccccggtgtcagaaacccggagccaaggggtgtgagggcagaagtggagatggggcctgcgatgctggctgcagtggcccgggaggaaactgggatggaggggactgctctctgggagtcccagacccctggaagggctgcccctcccactctcggtgctggcttctcttccgggacgggcagtgccacccacagtgtgactctgaagagtgtctgtttgatggctacgactgtgagacccctccagcctgcactccagcctatgaccagtactgccatgatcacttccacaacgggcactgtgagaaaggctgcaacactgcagagtgtggctgggatggaggtgactgcaggcctgaagatggggacccagagtgggggccctccctggccctgctggtggtactgagccccccagccctagaccagcagctgtttgccctggcccgggtgctgtccctgactctgagggtaggactctgggtaaggaaggatcgtgatggcagggacatggtgtacccctatcctggggcccgggctgaagaaaagctaggaggaactcgggaccccacctatcaggagagagcagcccctcaaacacagcccctgggcaaggagaccgactccctcagtgctgggtttgtggtggtcatgggtgtggatttgtcccgctgtggccctgaccacccggcatcccgctgtccctgggaccctgggcttctactccgcttccttgctgcgatggctgcagtgggagccctggagcccctgctgcctggaccactgctggctgtccaccctcatgcagggaccgcaccccctgccaaccagcttccctggcctgtgctgtgctccccagtggccggggtgattctcctggccctaggggctcttctcgtcctccagctcatccggcgtcgacgccgagagcatggagctctctggctgccccctggtttcactcgacggcctcggactcagtcagctccccaccgacgccggcccccactaggcgaggacagcattggtctcaaggcactgaagccaaaggcagaagttgatgaggatggagttgtgatgtgctcaggccctgaggagggagaggaggtgggccaggctgaagaaacaggcccaccctccacgtgccagctctggtctctgagtggtggctgtggggcgctccctcaggcagccatgctaactcctccccaggaatctgagatggaagcccctgacctggacacccgtggacctgatggggtgacacccctgatgtcagcagtttgctgtggggaagtacagtccgggaccttccaaggggcatggttgggatgtcctgagccctgggaacctctgctggatggaggggcctgtccccaggctcacaccgtgggcactggggagacccccctgcacctggctgcccgattctcccggccaaccgctgcccgccgcctccttgaggctggagccaaccccaaccagccagaccgggcagggcgcacaccccttcatgctgctgtggctgctgatgctcgggaggtctgccagcttctgctccgtagcagacaaactgcagtggacgctcgcacagaggacgggaccacacccttgatgctggctgccaggctggcggtggaagacctggttgaagaactgattgcagcccaagcagacgtgggggccagagataaatgggggaaaactgcgctgcactgggctgctgccgtgaacaacgcccgagccgcccgctcgcttctccaggccggagccgataaagatgcccaggacaacagggagcagacgccgctattcctggcggcgcgggaaggagcggtggaagtagcccagctactgctggggctgggggcagcccgagagctgcgggaccaggctgggctagcgccggcggacgtcgctcaccaacgtaaccactgggatctgctgacgctgctggaaggggctgggccaccagaggcccgtcacaaagccacgccgggccgcgaggctgggcccttcccgcgcgcacggacggtgtcagtaagcgtgcccccgcatgggggcggggctctgccgcgctgccggacgctgtcagccggagcaggccctcgtgggggcggagcttgtctgcaggctcggacttggtccgtagacttggctgcgcgggggggcggggcctattctcattgccggagcctctcgggagtaggagcaggaggaggcccgacccctcgcggccgtaggttttctgcaggcatgcgcgggcctcggcccaaccctgcgataatgcgaggaagatacggagtggctgccgggcgcggaggcagggtctcaacggatgactggccctgtgattgggtggccctgggagcttgcggttctgcctccaacattccgatcccgcctccttgccttactccgtccccggagcggggatcacctcaacttgactgtggtcccccagccctccaagaaatgcccataaaccaaggaggagagggtaaaaaatagaagaatacatggtagggaggaattccaaaaatgattacccattaaaaggcaggctggaaggccttcctggttttaagatggatcccccaaaatgaagggttgtgagtttagtttctctcctaaaatgaatgtatgcccaccagagcagacatcttccacgtggagaagctgcagctctggaaagagggtttaagatgctaggatgaggcaggcccagtcctcctccagaaaataagacaggccacaggagggcagagtggagtggaaatacccctaagttggaaccaagaattgcaggcatatgggatgtaagatgttctttcctatatatggtttccaaagggtgcccctatgatccattgtccccactgcccacaaatggctgacaaatatttattgggcacctactatgtgccaggcactgtgtaggtgctgaaaagtggccaagggccacccccgctgatgactccttgcattccctcccctcacaacaaagaactccactgtggggatgaagcgcttcttctagccactgctatcgctatttaagaaccctaaatctgtcacccataataaagctgatttgaagtgtta

SEQ ID NO: 147562 - DNA, 6745 bp, Artificial Sequence
  derived and/or modified sequence
agacgtgaggcttgcagcaggccgaggaggaagaagaggggcagtgggagcagaggaggtggctcctgccccagtgagagctctgagggtccctgcctgaagagggacagggaccggggcttggagaaggggctgtggaatgcagcccccttcactgctgctgctgctgctgctgctgctgctgctatgtgtctcagtggtcagacccagagggctgctgtgtgggagtttcccagaaccctgtgccaatggaggcacctgcctgagcctgtctctgggacaagggacctgccagtgtgcccctggcttcctgggtgagacgtgccagtttcctgacccctgccagaacgcccagctctgccaaaatggaggcagctgccaagccctgcttcccgctcccctagggctccccagctctccctctccattgacacccagcttcttgtgcacttgcctccctggcttcactggtgagagatgccaggccaagcttgaagacccttgtcctccctccttctgttccaaaaggggccgctgccacatccaggcctcgggccgcccacagtgctcctgcatgcctggatggacaggtgagcagtgccagcttcgggacttctgttcagccaacccatgtgttaatggaggggtgtgtctggccacatacccccagatccagtgccactgcccaccgggcttcgagggccatgcctgtgaacgtgatgtcaacgagtgcttccaggacccaggaccctgccccaaaggcacctcctgccataacaccctgggctccttccagtgcctctgccctgtggggcaggagggtccacgttgtgagctgcgggcaggaccctgccctcctaggggctgttcgaatgggggcacctgccagctgatgccagagaaagactccacctttcacctctgcctctgtcccccaggtttcataggcccagactgtgaggtgaatccagacaactgtgtcagccaccagtgtcagaatgggggcacttgccaggatgggctggacacctacacctgcctctgcccagaaacctggacaggctgggactgctccgaagatgtggatgagtgtgagacccagggtccccctcactgcagaaacgggggcacctgccagaactctgctggtagctttcactgcgtgtgtgtgagtggctggggcggcacaagctgtgaggagaacctggatgactgtattgctgccacctgtgccccgggatccacctgcattgaccgggtgggctctttctcctgcctctgcccacctggacgcacaggactcctgtgccacttggaagacatgtgtctgagccagccgtgccatggggatgcccaatgcagcaccaaccccctcacaggctccacactctgcctgtgtcagcctggctattcggggcccacctgccaccaggacctggacgagtgtctgatggcccagcaaggcccaagtccctgtgaacatggcggttcctgcctcaacactcctggctccttcaactgcctctgtccacctggctacacaggctcccgttgtgaggctgatcacaatgagtgcctctcccagccctgccacccaggaagcacctgtctggacctacttgccaccttccactgcctctgcccgccaggcttagaagggcagctctgtgaggtggagaccaacgagtgtgcctcagctccctgcctgaaccacgcggattgccatgacctgctcaacggcttccagtgcatctgcctgcctggattctccggcacccgatgtgaggaggatatcgatgagtgcagaagctctccctgtgccaatggtgggcagtgccaggaccagcctggagccttccactgcaagtgtctcccaggctttgaagggccacgctgtcaaacagaggtggatgagtgcctgagtgacccatgtcccgttggagccagctgccttgatcttccaggagccttcttttgcctctgcccctctggtttcacaggccagctctgtgaggttcccctgtgtgctcccaacctgtgccagcccaagcagatatgtaaggaccagaaagacaaggccaactgcctctgtcctgatggaagccctggctgtgccccacctgaggacaactgcacctgccaccacgggcactgccagagatcctcatgtgtgtgtgacgtgggttggacggggccagagtgtgaggcagagctagggggctgcatctctgcaccctgtgcccatggggggacctgctacccccagccctctggctacaactgcacctgccctacaggctacacaggacccacctgtagtgaggagatgacagcttgtcactcagggccatgtctcaatggcggctcctgcaaccctagccctggaggctactactgcacctgccctccaagccacacagggccccagtgccaaaccagcactgactactgtgtgtctgccccgtgcttcaatgggggtacctgtgtgaacaggcctggcaccttctcctgcctctgtgccatgggcttccagggcccgcgctgtgagggaaagctccgccccagctgtgcagacagcccctgtaggaatagggcaacctgccaggacagccctcagggtccccgctgcctctgccccactggctacaccggaggcagctgccagactctgatggacttatgtgcccagaagccctgcccacgcaattcccactgcctccagactgggccctccttccactgcttgtgcctccagggatggaccgggcctctctgcaaccttccactgtcctcctgccagaaggctgcactgagccaaggcatagacgtctcttccctttgccacaatggaggcctctgtgtcgacagcggcccctcctatttctgccactgcccccctggattccaaggcagcctgtgccaggatcacgtgaacccatgtgagtccaggccttgccagaacggggccacctgcatggcccagcccagtgggtatctctgccagtgtgccccaggctacgatggacagaactgctcaaaggaactcgatgcttgtcagtcccaaccctgtcacaaccatggaacctgtactcccaaacctggaggcttccactgtgcctgccctccaggctttgtggggctacgctgtgagggagacgtggacgagtgtctggaccagccctgccaccccacaggcactgcagcctgccactctctggccaatgccttctactgccagtgtctgcctggacacacaggccagtggtgtgaggtggagatagacccctgccacagccaaccctgctttcatggagggacctgtgaggccacagcaggatcacccctgggtttcatctgccactgccccaagggttttgaaggccccacctgcagccacagggccccttcctgcggcttccatcactgccaccacggaggcctgtgtctgccctcccctaagccaggcttcccaccacgctgtgcctgcctcagtggctatgggggtcctgactgcctgaccccaccagctcctaaaggctgtggccctccctccccatgcctatacaatggcagctgctcagagaccacgggcttggggggcccaggctttcgatgctcctgccctcacagctctccagggccccggtgtcagaaacccggagccaaggggtgtgagggcagaagtggagatggggcctgcgatgctggctgcagtggcccgggaggaaactgggatggaggggactgctctctgggagtcccagacccctggaagggctgcccctcccactctcggtgctggcttctcttccgggacgggcagtgccacccacagtgtgactctgaagagtgtctgtttgatggctacgactgtgagacccctccagcctgcactccagcctatgaccagtactgccatgatcacttccacaacgggcactgtgagaaaggctgcaacactgcagagtgtggctgggatggaggtgactgcaggcctgaagatggggacccagagtgggggccctccctggccctgctggtggtactgagccccccagccctagaccagcagctgtttgccctggcccgggtgctgtccctgactctgagggtaggactctgggtaaggaaggatcgtgatggcagggacatggtgtacccctatcctggggcccgggctgaagaaaagctaggaggaactcgggaccccacctatcaggagagagcagcccctcaaacgcagcccctgggcaaggagaccgactccctcagtgctgggtttgtggtggtcatgggtgtggatttgtcccgctgtggccctgaccacccggcatcccgctgtccctgggaccctgggcttctactccgcttccttgctgcgatggctgcagtgggagccctggagcccctgctgcctggaccactgctggctgtccaccctcatgcagggaccgcaccccctgccaaccagcttccctggcctgtgctgtgctccccagtggccggggtgattctcctggccctaggggctcttctcgtcctccagctcatccggcgtcgacgccgagagcatggagctctctggctgccccctggtttcactcgacggcctcggactcagtcagctccccaccgacgccggcccccactaggcgaggacagcattggtctcaaggcactgaagccaaaggcagaagttgatgaggatggagttgtgatgtgctcaggccctgaggagggagaggaggtgggccaggctgaagaaacaggcccaccctccacgtgccagctctggtctctgagtggtggctgtggggcgctccctcaggcagccatgctaactcctccccaggaatctgagatggaagcccctgacctggacacccgtggacctgatggggtgacacccctgatgtcagcagtttgctgtggggaagtacagtccgggaccttccaaggggcatggttgggatgtcctgagccctgggaacctctgctggatggaggggcctgtccccaggctcacaccgtgggcactggggagacccccctgcacctggctgcccgattctcccggccaaccgctgcccgccgcctccttgaggctggagccaaccccaaccagccagaccgggcagggcgcacaccccttcatgctgctgtggctgctgatgctcgggaggtctgccagcttctgctccgtagcagacaaactgcagtggacgctcgcacagaggacgggaccacacccttgatgctggctgccaggctggcggtggaagacctggttgaagaactgattgcagcccaagcagacgtgggggccagagataaatgggggaaaactgcgctgcactgggctgctgccgtgaacaacgcccgagccgcccgctcgcttctccaggccggagccgataaagatgcccaggacaacagggagcagacgccgctattcctggcggcgcgggaaggagcggtggaagtagcccagctactgctggggctgggggcagcccgagagctgcgggaccaggctgggctagcgccggcggacgtcgctcaccaacgtaaccactgggatctgctgacgctgctggaaggggctgggccaccagaggcccgtcacaaagccacgccgggccgcgaggctgggcccttcccgcgcgcacggacggtgtcagtaagcgtgcccccgcatgggggcggggctctgccgcgctgccggacgctgtcagccggagcaggccctcgtgggggcggagcttgtctgcaggctcggacttggtccgtagacttggctgcgcgggggggcggggcctattctcattgccggagcctctcgggagtaggagcaggaggaggcccgacccctcgcggccgtaggttttctgcaggcatgcgcgggcctcggcccaaccctgcgataatgcgaggaagatacggagtggctgccgggcgcggaggcagggtctcaacggatgactggccctgtgattgggtggccctgggagcttgcggttctgcctccaacattccgatcccgcctccttgccttactccgtccccggagcggggatcacctcaacttgactgtggtcccccagccctccaagaaatgcccataaaccaaggaggagagggtaaaaaatagaagaatacatggtagggaggaattccaaaaatgattacccattaaaaggcaggctggaaggccttcctggttttaagatggatcccccaaaatgaagggttgtgagtttagtttctctcctaaaatgaatgtatgcccaccagagcagacatcttccacgtggagaagctgcagctctggaaagagggtttaagatgctaggatgaggcaggcccagtcctcctccagaaaataagacaggccacaggagggcagagtggagtggaaatacccctaagttggaaccaagaattgcaggcatatgggatgtaagatgttctttcctatatatggtttccaaagggtgcccctatgatccattgtccccactgcccacaaatggctgacaaatatttattgggcacctactatgtgccaggcactgtgtaggtgctgaaaagtggccaagggccacccccgctgatgactccttgcattccctcccctcacaacaaagaactccactgtggggatgaagcgcttcttctagccactgctatcgctatttaagaaccctaaatctgtcacccataataaagctgatttgaagtgtta

SEQ ID NO: 147563 - DNA, 6011 bp, Artificial Sequence
  derived and/or modified sequence
atgcagcctccatcgctgctcctgctgcttctgcttcttctgctgctgtgtgtgtctgtcgtgagacccaggggccttctgtgcgggtctttccccgaaccctgcgctaacgggggaacatgtctatcgttatccctgggccagggcacttgtcagtgcgcccctggctttctgggagaaacgtgccagtttcccgatccctgtcagaacgctcagctttgccagaacggtggcagttgtcaggcactccttcccgcacctttgggtcttccttccagtccttctccgctgaccccgagcttcctgtgcacgtgcctccccggattcactggcgaacgatgccaggctaaacttgaggacccatgtccaccatcattttgttctaaaagggggcgatgtcacatacaggccagcggcaggccccagtgctcctgtatgcctgggtggaccggcgaacaatgccagctgcgggacttttgcagtgccaacccatgcgtgaacggaggtgtgtgtctggcgacttaccctcagatccagtgccattgtcccccaggatttgagggccatgcctgtgaacgggatgtgaatgaatgttttcaagatcccggaccttgccctaaggggacctcatgtcataacacccttggttctttccaatgcctctgtcccgtgggccaggaagggcctagatgcgagctgcgtgcaggcccttgccctcccagggggtgttcaaatgggggtacgtgccagctcatgccggagaaagattccacattccatctctgtctttgcccgcctggatttatcggacccgattgcgaagtgaaccctgataattgcgtatcccaccagtgtcagaacgggggtacttgtcaggacggcctggatacttacacttgcctgtgtccagaaacctggaccggatgggactgctctgaagacgtggacgagtgcgaaacacaggggcctcctcactgccgaaatgggggtacctgccagaatagcgctggctctttccactgcgtgtgcgtgtctggatggggaggtacgtcttgtgaagaaaacctggacgactgcatcgcagccacctgcgccccaggttcaacttgcatcgatcgagtcggcagcttcagctgtctatgtccgcctggcagaaccgggcttctgtgccatctggaggacatgtgcctgtcacagccctgtcatggcgatgcccagtgctctaccaaccctctgactggaagcaccctctgcttgtgccagccgggttacagtggacctacatgtcaccaggaccttgacgagtgtctgatggctcaacagggaccatcgccctgcgagcacggcggaagttgtttaaacacacctgggtccttcaactgcctttgcccacctggatatacaggcagcagatgcgaagccgatcacaacgagtgtctaagtcagccatgtcacccaggcagtacatgccttgacctgctagccacgttccactgcctctgcccacccggattggagggacagctatgcgaggtcgaaaccaacgaatgcgcctccgcaccttgcctgaaccacgccgactgtcatgacttgctgaacggctttcagtgcatctgtctccctggtttctcaggcactagatgcgaggaggacattgatgaatgccggagctccccttgtgccaacggaggacaatgccaggatcagcccggtgcgttccactgcaagtgtctacccggtttcgagggacctcgatgtcagacagaagtggacgagtgcttaagtgacccttgccctgtcggcgcttcttgcctcgatctccctggtgccttcttttgtttatgcccgtccggctttaccggtcagctgtgtgaagtgccactgtgtgctcccaatctgtgccagcctaagcagatctgcaaggaccagaaggacaaggcaaactgcctctgcccagacggaagccccggttgcgcccctccagaggataattgtacctgccaccatggccactgccaacgatccagttgtgtctgcgacgtaggttggaccggaccagagtgtgaggccgaacttggcggatgtataagcgccccttgtgcccatggcggtacgtgttacccccagccatccggttataattgcacctgtcctacgggttacacagggcctacgtgttcagaagagatgaccgcatgccactctgggccttgcctgaacggaggttcctgtaacccatcccctggtggctactactgcacttgtcccccttcccacactggccctcaatgccagaccagtacagactactgcgtaagcgcaccatgctttaacggcggaacatgtgtgaaccggcctggcaccttctcctgcctgtgcgcaatgggattccagggccctagatgtgaggggaaactgcgaccaagttgcgcggactccccctgcagaaaccgagccacttgccaggattccccacagggaccgaggtgcttatgtcccacaggctacactgggggatcttgccaaaccctgatggatttatgcgcacaaaagccgtgcccaagaaatagtcattgcctgcagacaggcccatcctttcactgtttatgcctccaaggctggacgggaccactctgcaacctgcctctgtcatcctgtcagaaagccgcattgagccagggcattgacgtcagtagcctgtgtcacaatgggggactgtgcgtggattctggtccgtcctacttttgccactgtccgcctggatttcagggaagcctgtgtcaggaccacgtcaatccttgcgagtcaagaccatgccagaatggagccacatgtatggcccagccgtccggttatctgtgccagtgcgctcccggatacgacggccagaattgtagtaaagagcttgacgcctgccagagccagccctgtcataatcacgggacatgtacaccgaaacccggaggctttcattgcgcctgcccaccaggattcgtgggtctgaggtgcgagggcgatgtggatgaatgcctggatcagccttgccatcctacagggacagctgcctgccacagcctggccaatgctttctactgtcagtgtctgccgggacataccggacagtggtgcgaggtggagattgacccatgccacagtcaaccatgcttccatggaggcacttgcgaggccactgccggttctccactgggctttatctgccactgcccaaagggcttcgagggaccaacatgttcccaccgcgcaccgtcctgtggtttccatcactgccatcacgggggactgtgtctaccctcccccaaacccggattccccccaaggtgtgcttgcctctccggctacggcggaccagactgtctgacacctccagcaccaaaaggctgtgggcctccctctccttgtctctacaatgggagctgcagtgagaccaccggactgggcggtcccggattccggtgtagctgtcctcatagctcgccaggccctaggtgccagaaaccaggtgctaaagggtgtgagggcaggtcaggcgatggcgcttgcgacgcaggctgttcaggccctggaggcaactgggacgggggtgactgctccctgggagtaccagacccgtggaaaggctgtccttctcacagtcgctgctggctgctgtttagggatggccaatgccatcctcaatgcgactcagaagagtgcttatttgatggatacgattgcgaaacacccccagcctgtaccccggcttatgaccagtattgtcacgaccactttcacaacggacactgcgagaaagggtgtaacactgctgagtgcgggtgggatggcggagattgcagacctgaagatggcgaccctgagtggggcccttctcttgccctactcgtggttttgtcaccacccgcactggaccaacagctgtttgcattagcgagagttctttccctcaccctgcgagtgggattgtgggtccggaaagatcgcgacggacgggacatggtgtacccttaccccggagccagagctgaggaaaaactggggggtacccgcgaccccacctatcaagagcgggcagctccccagactcagcccctcggtaaggagaccgattctctgtccgcaggctttgtggtcgtaatgggcgtcgatttgtcacgctgcggacccgaccaccccgcaagccgatgtccatgggatcccggactgttgcttcggttcttggccgctatggccgctgtgggggcactggaacctttattgcccggaccactgctcgccgtgcatccacatgccggtactgccccacccgcaaaccaactaccctggccagtgctgtgtagcccagtggccggtgttatcctcctggcgttaggcgctctactggttcttcagttgatcagaagaaggcggcgagaacatggggctctctggttgcctccaggatttaccaggcgcccaaggacccagtccgctccccacagaagacgccctccccttggcgaggattccattgggctcaaagcgctgaaaccaaaagcagaagtggacgaagacggggtggtgatgtgtagtggtcctgaagagggggaagaggttggccaggctgaagagactggacccccatccacctgccaactgtggtcactgagcggtgggtgcggagcccttccacaggccgcaatgctgacaccccctcaggagtccgaaatggaagcccctgacctggatactaggggaccggacggggttacacctcttatgtccgctgtttgctgcggcgaggtccaatccgggacttttcagggagcttggctcggctgtcctgagccttgggaaccactcctcgacggaggcgcttgtccccaagcccatacagtgggtaccggcgagacacctttgcatctggctgccagattctcccgcccaactgccgcacggaggctgttagaagccggagcaaatccaaatcagccagacagggccggaaggacccccctccatgctgccgtggctgctgacgctagggaggtgtgccaactgctgctgaggtctcgtcagaccgccgttgatgcgagaacagaggatggcacgacaccgctgatgctggcggcacgcctggccgtcgaagatcttgtggaggagcttatagccgctcaggccgacgttggggcaagagacaagtggggcaagactgcactccattgggccgcagccgtgaataacgctcgggctgctcgatccctgctgcaggcgggagccgataaagatgcccaggataatcgggaacagacacccctgtttctggccgcacgcgagggcgcagtggaggtcgcacaactccttcttgggctgggagctgcaagagagctgcgcgatcaggctggcctcgcccctgcagatgtggcccaccagcgtaaccattgggatctactgacccttctggagggggcaggccctcccgaggccaggcacaaagctacgcctggccgagaagctggaccctttccacgggcacggaccgtgagtgtgtctgtgcctccacatggtggaggggcactacctcgatgcaggacacttagtgcaggggctggcccaagaggaggtggagcctgcctgcaggctcggacttggagcgtggacctggctgctcgagggggtggtgcttattcacactgtcggagcctgtccggagtaggcgctgggggtggcccaacccctagggggcgacgttttagtgcgggtatgcgaggaccaagacctaatccagctattatgcggggtcgctatggggtcgcggctggcagggggggtcgagtcagtactgatgactggccctgtgactgggtggcgctcggagcttgcgggtcagcctccaacatcccaatcccacccccttgtctcactccatcaccagagcgaggaagccctcagctggattgcggacctcctgcccttcaggagatgcctatcaaccagggtggtgagggaaaaaagta

SEQ ID NO: 147564 - DNA, 3147 bp, Artificial Sequence
  derived and/or modified sequence
tgcgcacctgggtacgatgggcaaaattgctccaaggagctggatgcatgccaaagccaaccctgtcataatcacggaacatgcacccccaaaccaggtggatttcattgcgcgtgtccgcctggcttcgttgggctgcggtgtgaaggggacgtggatgagtgcctggaccagccctgtcatcccaccggcacagcagcatgccatagccttgctaatgctttttattgccagtgccttccagggcacaccggacaatggtgtgaagtcgaaatagacccctgccacagtcagccgtgttttcacggtggcacctgcgaagcaactgctggatctcctcttggctttatatgccattgtcccaagggattcgaagggcctacctgcagtcaccgtgctcccagctgtgggttccaccactgccaccatggaggtttgtgtctgccatcccccaaacctgggttcccccctcggtgcgcctgtctgtccggatacgggggacccgattgtctgaccccacctgctcctaagggttgcggcccaccctcgccctgcctgtacaatgggagctgtagcgagaccaccggcttggggggaccaggctttcggtgttcttgtccccatagcagccccggtccaagatgtcagaaaccgggtgcgaagggatgcgaggggagaagtggggatggtgcatgtgacgccggatgtagtgggcctggcggtaattgggatggaggcgattgtagtcttggagtgcccgatccttggaagggctgtccatctcatagtcgctgttggctgctgttcagggacggccagtgccatccgcagtgcgattccgaggaatgcctctttgacggctacgattgtgagacaccccctgcatgcaccccagcatatgatcagtactgccacgaccacttccacaacgggcattgcgagaagggctgcaatacggccgagtgtggttgggacggtggagactgtagacccgaagacggggatccagagtggggcccatcactggctttattagtagtgctgagtccaccagccctggatcagcagctgtttgcactggccagggtcttgtccctaacactccgggtcggcctgtgggttcgcaaggaccgggatggcagggatatggtgtatccataccctggcgctagagcagaggagaagcttggcggtacccgcgaccctacgtaccaagaacgggctgctccgcagactcaacctctcgggaaagagaccgactccctatcagctggatttgtggtggtgatgggagtagacctgagccgctgcggtcctgatcaccctgccagtcgctgcccgtgggatccaggacttctgctgcggttccttgctgcaatggcggcagtcggggctctcgaaccactcctccctggaccattactggccgtgcatcctcacgccggaacggcccctcccgctaaccagttaccatggcctgtactttgttccccagtggccggagtgatattgctcgctctgggcgcactccttgtgttgcagttgatcaggcgccgacggcgtgaacacggggctctctggttgccacctggatttaccagacgacctcggacgcaaagtgccccacatagacgtcgccctcccctaggggaggatagcatcggtttgaaagctcttaaaccaaaggcggaggtggatgaggatggcgtcgtaatgtgcagcggccctgaggagggagaagaggtgggacaagccgaagaaactggaccgccttccacttgtcagctctggagcctctcaggagggtgcggggctctgccacaggctgcgatgcttacaccccctcaggagtcagaaatggaggcacctgatctcgatactcgaggccctgacggcgtcacgcctctcatgtccgccgtctgttgcggcgaagtccagtctggcactttccaaggcgcttggttaggttgcccagagccgtgggagcctctgttggacggcggtgcctgcccccaggcacacactgtcggcactggtgagacccctcttcatctcgctgcgagattcagcagaccaacagccgcaagaaggctcctggaggccggtgcaaaccctaaccagccggaccgcgcaggtagaactccattgcatgcagccgtcgctgcggatgctagggaagtgtgccaactgttgctgcgaagccggcagactgctgttgacgcgagaactgaagacggaaccacaccattaatgctggccgctaggctcgccgtcgaggacctcgtggaggaactgatcgccgcacaagccgatgtaggcgcaagggataagtggggcaagactgcgcttcattgggccgcagcagtgaacaacgcgagggcggctaggagcctgctgcaagctggggcagataaggatgcacaggataaccgggaacagacacctctgttcctcgccgctcgcgagggagcagttgaggtggcgcagctgctgctagggctcggagctgcaagggaattgcgggaccaagccggactggctccagcggacgtggctcaccagaggaaccactgggatttgctgaccttgttagaaggagcaggcccacctgaagctcggcataaggcgacgcctgggagggaagctggccctttccctcgcgctcggacggtgtccgtgagcgtcccccctcatggcggaggagccctgcccaggtgtaggacactaagcgccggtgcgggaccccgtgggggaggagcctgtctacaggctagaacctggtctgtcgacctagccgctagaggtggcggagcatactctcattgccgcagtctgtcaggggtgggagcgggaggtggccctacccccaggggtagaagatttagtgccggaatgcggggaccaaggcccaatcctgcaattatgagaggcagatacggtgtcgctgccggtaggggtggccgagtgagcacagatgattggccctgcgactgggtggccttgggcgcatgtgggtcagcatccaatattccgatacccccaccatgcctaacccccagccctgagcgcggaagtccacaactggattgtggccctcctgccctacaggaaatgcctatcaaccagggtggagaaggcaagaagtag

SEQ ID NO: 147565 - DNA, 6017 bp, Artificial Sequence
  derived and/or modified sequence
atgcagccccctagccttctcttacttctcttattgctcctgctcctcttattgtgtgtgagcgtagttcggcctagaggcctgctgtgtggcagtttccccgagccatgtgctaacggcggtacctgcctttctttatctctcggacaggggacctgccaatgtgcgcctggcttcctgggcgagacgtgtcagtttcctgacccctgtcagaatgctcagctttgccagaacggcggaagctgtcaggcactcctgcctgcacccctgggcttgccatcctcgccgagccccctgacacccagtttcctctgtacttgcctgcccggtttcactggtgagcgctgtcaagcccaactggaggacccttgccccccttctttctgctctaagaggggcaggtgtcacatacaggcatctgggcgaccccagtgttcctgtatgcctgggtggacaggagagcagtgccagcttagagacttttgcagtgccaacccctgcgtgaacggcggtgtatgcctcgctacgtatcctcagatccagtgccattgtccgcctgggttcgaggggcatgcgtgtgagcgcgacgttaacgagtgcttccaggatccagggccttgtccgaaaggcactagttgtcacaacacactgggaagcttccagtgtctatgcccagtgggccaggaaggaccgcgttgcgagctccgagcagggccttgcccaccaaggggctgctcgaatgggggaacttgccagctgatgcccgagaaagattccacgtttcacctgtgtctgtgcccacccggattcatcggcccagactgtgaggtgaaccctgataattgtgtgtcacaccagtgccaaaatggcggtacttgccaagacggactggatacatacacatgtttatgtcccgagacgtggacaggttgggattgtagcgaggacgtggatgagtgtgaggctcaggggcctcctcattgtcgcaacggaggcacctgccagaattcggctggaagctttcactgtgtctgtgtctctggatggggaggcacctcatgcgaagagaatttagacgactgcatagccgctacatgcgctccgggatcgacctgcatcgacagagtaggctcctttagttgtttgtgcccaccaggacgtaccggactactgtgccacctggaagatatgtgtctgagccagccctgtcatggagatgcccagtgttcaacgaatcccttgactgggagcaccctctgtctgtgtcagcctggatattctggccctacctgccaccaggacctcgatgagtgcctcatggcccagcagggaccttccccgtgcgagcatgggggatcttgccttaacacccctggttcatttaattgcctctgccctcctgggtataccggatctcgttgtgaagcagatcataatgagtgcctctcacagccgtgccaccccggtagcacatgcctggacctcctggccacttttcactgtctgtgccccccaggtctagaaggccagctgtgtgaagtcgaaacgaatgagtgcgcgagcgctccatgtctcaaccacgccgactgccacgacttactgaacggtttccaatgcatttgtttgcccggattctcaggtactaggtgtgaggaagatatcgacgagtgccgctcgagcccgtgcgccaatgggggtcagtgccaggaccaacccggtgccttccactgtaaatgcctgccagggtttgagggcccacgttgccagacggaggtggacgagtgtcttagcgatccctgccccgtgggcgcatcctgtctggatctcccaggcgcttttttctgcttgtgccccagcggctttacaggtcagctgtgcgaggtacccctctgcgctcccaacctgtgtcagcccaaacagatttgtaaggaccagaaggacaaagcaaactgcttatgccccgacggttcccctgggtgcgcgcctccggaggacaattgtacatgccatcatgggcactgccagcgctcgtcctgcgtttgcgatgtgggctggaccggccctgagtgtgaagccgagctgggaggttgtatcagcgctccttgtgctcacggtgggacttgttatccccagcccagcggctacaactgcacctgccccaccggatatacggggccaacgtgctcagaggaaatgacagcttgtcactccggcccttgtctgaacggcggaagctgcaaccccagtcccggaggttattactgcacatgcccgccaagccacacggggccacagtgccaaacaagcaccgattattgcgtcagtgcaccatgctttaatgggggaacctgcgtgaaccgacccggaaccttctcttgcctgtgcgcaatggggttccagggacctcggtgcgaaggcaagctgagaccatcctgcgctgattctccgtgcaggaacagagccacctgccaggactcaccacaaggacccagatgtctttgccccacaggttatactgggggttcctgccagaccctgatggacctttgcgctcagaagccatgccctcgcaacagccattgcctgcagaccgggcctagtttccactgtttatgtctgcagggttggacaggtcccctttgcaatctgcctctatcatcatgtcaaaaagccgcactgagccaggggatagacgtttcttctctgtgtcacaatggcggactctgcgttgactccgggccttcctacttctgtcactgccctcctggcttccagggctccctgtgtcaggaccacgtaaatccctgtgaaagccggccttgccagaatggagccacgtgtatggctcagccaagtggttacctttgccagtgtgcccctggctatgatggccagaattgctccaaggagcttgacgcttgtcagagccagccatgtcacaatcacggcacctgcacacccaaaccagggggatttcactgtgcctgtccccctggttttgttggccttagatgtgagggcgacgtcgatgagtgcctcgatcagccctgccaccctactgggacagcggcttgtcattcactggcaaacgccttctattgccagtgcctgcccggacacacgggccagtggtgtgaggtggaaatcgatccttgccactctcagccttgttttcatggaggaacatgcgaggccacggccggttctcctctggggtttatctgtcactgccccaaagggtttgagggccctacatgctcgcaccgtgcaccttcctgtgggtttcatcactgccaccacggcggtctgtgtttgcctagtcctaaaccaggctttccccctcgctgtgcatgtctgagtggatatggcggaccagattgtctgactccaccagcccctaaaggctgtgggccacctagcccctgtttgtacaacgggtcatgctctgaaaccactggccttggcggtcctggattccgatgttcatgccctcactcctcacctggccctagatgtcagaagcccggagcaaaaggctgtgaaggaagatctggtgatggcgcatgcgacgctggatgctccggacccggaggcaattgggacggtggtgactgctctctcggggtgccggacccttggaagggatgtccgtcccactctaggtgctggctgctgtttagagatgggcaatgtcacccccagtgcgacagcgaagagtgcttgtttgacgggtatgattgtgagaccccccctgcatgtacaccagcttacgaccagtattgccacgatcattttcacaacggccattgtgaaaaaggctgcaacacagctgagtgcggctgggatggcggagactgtaggcccgaggatggagatcccgagtgggggccttcactcgctctcctggtggtgctgtccccgccagctctggaccaacagttattcgctttagcaagagtgctgagtcttacactgcgggtcgggctctgggtaaggaaggatcgggacggcagggacatggtgtatccctatcccggtgctcgggctgaagagaaactcgggggaactcgcgaccctacatatcaggagagagcagcacctcaaacccagcctttagggaaggaaactgattccctttccgccggattcgtggtggttatgggcgtggatctgtcacgctgcggaccggatcacccagcatccagatgtccctgggacccgggactgctcttgagattccttgcagccatggcagccgttggggctttagaacctctgctgcctggcccactccttgctgtacatcctcacgctggcaccgcccctcccgctaatcagctcccgtggccggtgttatgcagccctgtggcaggagtcattctacttgcactcggcgcactactcgtcctgcagctgatacgcaggcgacggagggaacatggagccctatggttacctcctggctttaccaggagacccaggacccagagtgcgccacacaggaggaggccgccattgggcgaggactccatcggtttgaaagcattaaaaccaaaggccgaagttgacgaggatggagtggtcatgtgctcgggccctgaagaaggagaagaggttgggcaggccgaagaaacaggcccaccatcaacttgtcagctctggtctctgagcggaggctgcggcgctctgccacaagccgcaatgctaacgcccccacaagagtcagaaatggaggcaccagacctggacacccggggtccagacggcgtgacacccctaatgagtgctgtttgctgcggcgaagtgcagtcgggcacttttcaaggtgcatggttaggctgtcccgaaccgtgggagccactgctcgacggaggtgcttgcccccaggcgcacacagtcggcactggcgagactcccctacaccttgccgctcggttcagccgacctacagccgcacggagactccttgaggctggcgctaaccctaaccagccagatcgcgctgggaggacaccgctccacgcggcagttgcagccgatgccagggaagtgtgccaactactgttgcggagtcggcagaccgccgttgacgctcgtaccgaggatgggacaactccactgatgctggccgcaagactggcagtcgaagacttagtagaggaactgatcgccgctcaggcagatgtcggagctcgggataagtgggggaaaaccgccctgcactgggccgcagcggttaataatgccagggccgctaggagcctcttgcaggcaggagccgataaggatgcccaggataatcgcgagcagacccccctgttcctcgctgccagagagggagccgttgaagttgctcagcttcttctgggattgggcgctgctagggaactgcgagatcaagccggactggccccagctgacgttgctcaccagagaaaccactgggacctactgaccctgcttgagggggctggtccccctgaagccagacataaagctactcccggacgtgaggctgggccttttccaagggctcgtacggtgtctgtcagtgtgcctcctcatgggggaggcgcactacctaggtgccgcactctgagcgccggagccggtccccgtggaggcggtgcttgtctgcaagctcgtacatggtcggttgatttagccgctagaggagggggtgcttactctcactgtcggagtttatccggggtcggcgctggcggtggcccaacacctaggggcaggaggtttagcgctggcatgcgcggtcccagacctaatcctgctatcatgagagggaggtatggcgttgcagccggacggggtgggagagtgagcacggacgattggccttgtgactgggtggccctgggtgcatgcggaagcgcttccaacatccccattccaccaccctgtctgactcccagcccagagaggggcagtccccagcttgactgcggcccaccagctctccaggaaatgcccatcaaccagggcggagaggggaagaagta

SEQ ID NO: 147566 - DNA, 6011 bp, Artificial Sequence
  derived and/or modified sequence
atgcagccaccttctctactcctgctcctgttacttctcttgctcctttgtgtgagtgtcgtgcggcctcgtggcttgctgtgtggctcttttcctgagccatgtgcgaatggaggaacctgcctgtcattgtccctcggacaaggtacctgccagtgtgcacccggtttccttggcgaaacctgccagtttccagacccctgccagaatgcccagctctgtcaaaatggtggtagttgtcaggccctcctgccagccccattaggtttaccatcctctccaagccccctcacgccgagcttcctgtgtacttgcctacccggatttacaggtgagcggtgccaggcccagttagaagacccatgccccccttccttttgttccaaacgtgggcgttgtcatattcaggccagtggcagacctcagtgttcctgtatgcccggttggaccggggaacagtgccaactgagagatttctgcagtgccaatccctgcgtcaacggcggagtctgccttgccacttatccgcagatccagtgtcactgtccgccaggttttgaaggtcatgcttgcgagcgtgacgtcaacgagtgcttccaggatccgggtccctgtccaaaaggtacctcttgtcacaacaccttgggctcctttcagtgtttgtgtcccgttggccaggaggggcctaggtgtgaattgagagccggaccatgccctccaaggggatgtagcaatggcggtacatgccagctgatgcccgagaaggattccaccttccatctatgcctctgtcctcctggattcattggacctgactgcgaggtaaatcctgacaattgtgtgtcccaccagtgccaaaatggcggaacctgccaggacggcctggacacatatacctgcctctgcccagaaacctggacgggatgggattgcagtgaggacgtggacgaatgcgaaacacaagggccaccgcattgcagaaacggaggtacctgtcagaatagcgctggcagcttccactgcgtgtgtgtgagcggttggggtggcacaagctgtgaggaaaatctcgatgactgcatcgccgcaacttgtgcaccaggttcaacttgcatcgaccgcgtaggatcttttagctgcctctgcccccctggtcggacaggcctcctgtgccacctggaggacatgtgtctgtctcagccgtgccacggagacgcccagtgcagcactaatccattaaccgggtccaccctgtgcctctgtcagcctggctatagcgggcctacttgccatcaagatctcgacgagtgtcttatggctcagcaaggacctagcccatgtgagcacggcggttcatgccttaacacgcccggtagtttcaattgcctttgtcctcctggctataccgggagtcgatgtgaggccgaccataacgagtgcctgtctcagccctgtcaccccggaagcacttgcctcgatctgctggcaacctttcattgcctgtgccctcctgggctggaagggcagctgtgtgaagtcgagactaatgagtgcgcttccgccccatgcctgaatcacgccgactgtcatgacctcctgaacggatttcagtgtatttgcctgcctggcttctcagggactcgctgtgaggaggacatagacgaatgcaggagcagcccttgtgccaacggtggccagtgccaggatcagccaggcgctttccattgcaagtgcctgcctgggttcgaagggcctaggtgtcaaactgaagtagatgagtgcttgtctgacccctgccccgtgggtgctagttgcttggatttgcccggtgcatttttctgtctgtgcccttccggattcaccggacaactatgtgaagtgccgctttgtgcacccaatctctgccagcccaaacagatctgcaaggaccaaaaagacaaagcaaattgcttgtgtcctgatgggtcccccggatgcgcaccaccggaggacaactgcacatgccaccacggacactgccagcggagttcgtgtgtttgcgatgttggctggactggaccagaatgtgaagcagagctgggcggatgtatctccgctccatgtgcgcacgggggaacatgttaccctcagccctctggctataattgcacctgccctacaggctataccgggccaacatgctccgaagaaatgactgcatgccacagcgggccatgcctcaacggcggaagttgcaacccgagtccaggaggatactattgtacctgcccaccttctcacaccggcccacaatgtcaaacaagcacagattactgcgtctcagcaccgtgtttcaacgggggtacatgcgtgaatcggcctggtacctttagctgtctgtgcgcgatgggtttccagggcccaagatgtgagggtaagttaagaccgtcctgcgccgactccccctgcaggaacagagcgacatgccaggattccccacagggacccagatgcctctgtccaaccgggtacacaggcggtagctgccagaccctgatggacctgtgtgcccagaagccttgtcctcgaaattcacactgtctgcagacaggcccttcttttcactgtctgtgtctgcaggggtggacaggcccactgtgtaacctgccgctcagcagctgccagaaagccgctctatcccagggtatcgacgtctcatctctctgccacaatggtggtttgtgtgtggattctggtcccagttacttctgccattgccctcccggattccagggctcactttgccaggaccatgttaatccttgtgaatccagaccatgtcagaatggtgctacctgtatggctcagccaagcgggtatctatgccaatgcgcacccggatacgacggtcagaactgttccaaggagctggatgcctgccagtcccagccgtgtcataatcacggcacgtgcacccctaagcccggagggttccactgtgcctgtccgcctggattcgtcggcctcaggtgtgagggtgatgtcgacgaatgcctggaccagccatgccacccgaccggaactgccgcatgtcacagtcttgccaacgccttctattgtcaatgccttccagggcatacggggcaatggtgcgaagtggagatcgacccttgccactcccaaccttgcttccacggcggaacatgtgaagccacggctgggtcccccctgggatttatctgccactgccccaaaggatttgaaggtccaacttgctcccacagagccccttcttgtggcttccatcactgccaccatggagggctgtgtttaccttcacccaagcctggattcccacctaggtgcgcctgtctgagcggttacggcggaccagattgcctgactcctcctgccccaaaggggtgcggaccgccttcaccctgcctgtacaacgggagctgctccgaaaccacaggcctgggtgggccaggttttaggtgcagttgtccacactccagcccgggaccacgttgtcagaagccaggcgctaaggggtgcgaaggcaggagcggggacggagcctgcgacgccggttgcagcggccctgggggtaactgggacgggggagattgttcgctgggggttcctgatccttggaaaggctgcccgagccacagccgatgttggcttttgtttagggacggccagtgtcacccacaatgtgattcagaggaatgtctgttcgatggatatgactgtgagacgcctcccgcatgtacccctgcgtacgaccaatattgtcacgaccatttccataacgggcactgtgagaagggttgcaacaccgctgagtgcggttgggacggaggcgactgtaggcctgaagacggagatccggagtggggccctagtctagctttgctggtggtgttgtcccctcccgcactggaccaacagctgttcgccctcgctagggttttgtcacttaccttaagggtgggtctttgggttcgcaaagacagagatggtagagacatggtatacccttatcccggtgcccgagccgaggaaaagctgggaggcaccagagaccccacttaccaagaaagggccgcaccacaaactcaacctctgggtaaggaaacagacagcttgagtgctgggttcgttgttgtgatgggagttgacctgtctaggtgtgggcctgatcacccagcttctcgttgtccgtgggatccagggctgctactcagatttttggccgcaatggctgccgtcggcgctctggaaccattactgcctggccctcttctggctgtgcatccgcacgccggaaccgcccctcccgctaaccagttaccatggcctgtcctctgtagtccagtggctggagtgatcttactcgctctgggagcactgctagttctgcaactcatcagaaggcggaggcgcgaacacggcgcactttggctcccgcctggattcactcgcagaccaaggacccagagcgctccccaccgccgacgccctcctttgggagaggactccattggattgaaggccctgaaaccaaaggccgaggtggatgaggatggagtcgttatgtgctccggcccagaggaaggcgaggaagtgggtcaggccgaggagactggtcccccttctacctgccagctatggtctctgtccggcggatgcggcgcactgccacaagccgcaatgttgacccctccacaggagtccgagatggaagctcccgacctggataccagaggccctgatggcgtaacccccctgatgtcagcagtttgttgcggcgaggtccagtcaggcacttttcagggtgcctggcttggatgtcctgagccttgggaaccactccttgatgggggagcttgtccccaggcgcatactgtgggtacaggagaaacccccctgcaccttgcagcgaggttttcccgtcctacagccgcacggaggctgctggaggcaggagccaatcctaatcaaccagatcgggctggtcggaccccattgcatgccgctgtggccgctgatgccagagaggtgtgtcaactcctgcttcggagccgccagacagccgttgatgctaggaccgaagacggtaccacacccctgatgttggcagcgaggctagctgtagaggaccttgtggaagagctcatcgctgctcaagctgacgtgggcgctcgagacaagtggggcaagacagctcttcactgggctgccgcagtgaataatgcccgtgcagctcgctctttgctgcaggccggagccgacaaggatgcgcaagataatcgggaacagacaccattattcctcgctgcgagggaaggagccgtcgaagtggctcagctgctcctgggcctgggagcagccagagaattacgagaccaagccggtcttgccccagccgatgtggcacatcaaagaaatcactgggatttgttaacccttttagagggcgcaggtccgccagaagcaaggcacaaagcgacgccaggcagagaggcaggcccatttccaagggcaaggacggtcagtgtgtctgtcccccctcacggaggcggagcactcccgagatgcaggacccttagtgctggcgcagggccaaggggaggcggagcctgcttgcaggcgcgaacatggtcagtcgacttggccgcacggggtggcggagcctactctcactgtcgatccctttcgggagtgggagcaggagggggacccacgcctagaggcagacgtttttccgctggcatgagaggacccaggcctaatcctgccattatgcgcggacgatacggcgtggccgctgggaggggtgggagagtaagcacagatgactggccatgcgattgggttgcattgggagcctgcggatcagcttccaacattcccatccctcccccttgtttgacgccctcacccgaacgcggaagcccccagctggattgcggccctcctgccctgcaggaaatgcctattaaccaggggggtgaggggaaaaaata

SEQ ID NO: 147567 - DNA, 561 bp, Artificial Sequence
  derived and/or modified sequence
atgtctgccgtgtgctgtggcgaggtgcaaagcggtacctttcagggcgcatggctgggctgcccagaaccatgggagccactcctcgatgggggtgcttgccctcaggctcatacagtcggcacaggcgaaacaccacttcacctggcggctcggttttcccggccaactgccgcaagacgtctgctcgaagctggtgccaatcctaaccagcccgacagagccggtcggacacccctgcacgcagccgtcgctgccgacgcacgtgaggtttgccagctcttgctgcgttctagacagacagccgtggacgctagaactgaagatggcacgacaccactgatgctggcggctcggctggccgttgaggacctcgtggaagaactgattgccgctcaggcagacgtgggcgcacgagataaatggggtgccgacgccgctattccaggtggcgctggcagatcagggggaagtagtccggctacagccggagccggaggctcccctcgcgctgccggacccggttgggcaagcgccggtggaagaagatcacccacatag

SEQ ID NO: 147568 - DNA, 6008 bp, Artificial Sequence
  derived and/or modified sequence
atgcagccacccagcctgttactccttctgttgctactgctgctctgcgttagcgtcgtgcgccctcggggtctgctgtgtggaagttttcctgaaccctgcgccaatggagggacgtgcctgagcctgagtctcgggcagggcacttgtcaatgcgcgccagggttcctgggcgaaacatgtcagtttcctgatccatgccaaaatgctcagctatgtcaaaatggtgggagttgccaggctctgctgcctgcacctctcggactgcccagttccccatcccccctgaccccttcttttctatgcacatgcctgcctggcttcacaggagaacgctgccaagcacagttggaagatccttgccctccctctttttgttccaaaagagggcgatgccacatccaggcaagcggccgaccgcagtgcagttgcatgccaggatggaccggcgaacaatgccagctgagagatttctgctcagcaaacccatgtgttaacggcggagtttgcctggcgacctatccccagattcagtgccactgccctcctggatttgagggccacgcctgtgaaagagacgttaatgagtgttttcaggaccctggcccatgtccaaaggggaccagctgtcacaacacactgggtagctttcagtgtttgtgccctgttgggcaagaggggcctcgttgtgagctcagggccggaccgtgcccccctcggggttgctccaatggagggacgtgccagctgatgcctgaaaaagactcaacttttcacttgtgcttgtgcccccctggcttcatcgggcctgactgtgaggtcaatcccgacaattgcgtttcccaccaatgccagaacgggggaacctgccaggatggcttggatacatacacctgcttatgtccagaaacatggacagggtgggactgctcagaggacgtagatgaatgtgaaactcagggccctccccactgccggaatggcggaacatgtcaaaactccgcaggatcctttcactgtgtctgcgtgagcggatggggcggtacttcctgcgaagaaaacctggatgattgcatcgctgccacttgtgcccctggcagtacttgtatcgatcgagtggggtctttcagttgcctctgcccccctgggagaactggactcttatgccatctcgaagatatgtgtctaagccaaccctgccatggcgacgctcagtgttccaccaatcccctcacgggctctacactgtgcctgtgccagcccggatacagcggaccaacctgccaccaagacttggacgaatgtcttatggcacaacaggggccatccccctgtgaacatggaggtagctgtctcaatacacccggttcttttaactgcctgtgtccccctgggtatactgggtccaggtgcgaagctgatcacaatgaatgcctgtcccagccgtgccatcccggatccacttgtcttgaccttcttgcgacattccattgcctctgcccacctggtctggagggtcagctgtgcgaagtggagaccaacgagtgcgcgtctgccccttgtttgaatcacgcagattgtcatgacctcctgaacggctttcaatgtatatgtctgcctggcttttccgggacccgctgcgaagaagacattgacgaatgccggagctctccttgtgcaaacggaggccagtgccaagatcagcccggagcgttccattgtaagtgcctccctggcttcgaagggccaagatgtcaaacagaggtggatgaatgcctgagcgacccatgcccagtgggtgcttcttgtctggacctgcctggggcatttttttgcctgtgtcccagcgggttcaccggccagctctgcgaggtgccgttgtgtgcgccaaatctttgccagccaaaacagatttgcaaagaccagaaggataaggcaaactgtctgtgccccgacggctctcccggttgtgccccaccagaagacaactgcacatgccaccatggacactgccagcgcagtagctgcgtctgcgatgtcggctggacaggccctgagtgcgaagcagaactggggggatgtattagcgctccgtgtgcacacggtggcacctgctatccccagccttccggttacaattgtacttgcccaaccgggtacaccggccctacctgcagtgaggagatgaccgcatgccatagtggcccttgcctaaacgggggaagctgcaatccttctcctgggggttactactgcacctgcccccctagccatactgggcctcagtgccaaacctcgacagactactgtgtgtccgctccgtgcttcaatggaggcacctgtgtcaacaggcctggcaccttctcctgtctctgtgctatgggctttcagggacccagatgcgaaggtaagctgcggccttcttgtgccgattctccgtgcagaaacagggcgacatgccaggacagtccacagggcccacggtgtctgtgtcccacaggctatacaggtggcagttgtcagaccttaatggatttgtgcgcgcagaaaccctgtcctaggaactcccattgtttgcaaactggaccttctttccattgtctctgcctgcagggatggaccgggccactgtgcaatctgcctttatcatcctgtcagaaagccgctctgagccaggggattgacgtgtcatctttgtgccacaacggcggactgtgcgtagactcaggaccgagctatttctgtcactgcccccctggattccaaggtagtctgtgccaggatcacgtgaacccctgtgaatctagaccttgtcagaatggcgctacctgcatggctcagccctccggctatctctgtcagtgtgctcccggttacgacggacagaactgcagcaaagaactggacgcatgtcagtcccagccatgtcacaaccacggcacctgtacgcctaagcctgggggatttcattgcgcatgcccacctggctttgtgggcctgaggtgcgagggggatgtggacgaatgtctggatcagccatgccaccctaccgggacagccgcatgtcacagcctcgctaacgcattctactgccaatgcctgcctggccacacggggcagtggtgcgaagttgaaatcgacccctgtcacagccagccttgctttcacggtggcacatgtgaagccactgctggcagcccattgggctttatctgccactgcccaaagggatttgagggaccaacctgttcacatcgggctccatcctgcggcttccaccattgccaccatgggggactgtgtttaccatctccaaagcctggatttccccctcgctgtgcttgtctgtctggttacggcggacccgactgcctgacccctcctgctccaaagggctgtgggcctccatccccctgcttatataatggttcctgctctgagacaacaggactgggcggaccaggctttagatgtagctgccctcacagtagtccgggaccgaggtgccaaaaaccaggtgccaagggttgcgagggccgtagtggggacggagcatgtgatgctggctgttcaggcccaggaggaaactgggatggaggagactgctccctgggcgtgccagacccctggaagggatgtcccagccattcccgatgttggctcctgttccgcgacgggcagtgtcacccacagtgcgattcagaagaatgcctgttcgatggctacgactgcgagacgcctcccgcatgtacgccggcttacgaccagtattgtcacgatcacttccataacggccactgtgaaaaagggtgcaataccgcggagtgtgggtgggatgggggagattgcaggcccgaggacggagacccagaatggggacccagcctcgctctgctggtggtgctgagcccaccggctctagaccagcaattatttgccctggcacgggtcttatcattaactctgagagttggcctctgggttcggaaagatagggacggaagggatatggtgtatccttaccccggagcccgagccgaggagaaactgggagggactcgggaccctacctaccaagaacgcgcagctccacagacccagccactaggtaaggagacagattccctgagcgcaggctttgtcgtcgttatgggtgtcgatctgtccagatgtgggcctgatcaccccgctagtcgttgcccctgggatcccggactgttactgcgattccttgccgctatggccgctgtaggcgcacttgaaccgctgcttccagggccactcctggcagtccaccctcacgccggaacagcgccacctgcaaaccagctgccctggcctgttctctgttcccccgtggctggggtcattttactggctctaggtgcacttctcgtgctgcagctgatcaggcgtcgccgtcgtgaacacggggcattatggcttccacctggcttcacaaggcggccacgtacacagtctgccccacaccggaggaggccaccgttaggcgaggatagcattgggttaaaggcactcaaaccaaaggccgaggttgatgaggacggtgtcgttatgtgtagcggtcctgaggagggagaggaggtgggccaggccgaagaaacaggaccaccaagtacatgccagctctggtctctgtcaggcggatgcggggcattgccgcaggcagccatgttaacccctccacaggaaagcgagatggaagcaccagacctggacaccaggggcccagacggagtgactcctttgatgtccgctgtttgctgcggagaagtgcagtcgggcactttccagggcgcttggctggggtgtcccgagccctgggagccgttactggatggcggagcctgtccccaggcacatacagtaggaactggagaaacccccctccatctcgctgcacgctttagtaggcctacagctgccagacggctgctcgaagcaggagccaaccctaaccaacccgacagagcagggcgtacccccctccacgctgcagtcgccgctgacgccagggaggtgtgccagttgctcctccggtcacgtcagaccgctgtagacgcccgaaccgaggacggcacaacgcccctgatgcttgctgcaagactcgccgtggaagatctggtggaggagctcattgccgctcaggccgacgtgggggcacgtgacaagtggggcaagactgctttgcattgggcagcagctgtgaataacgccagagccgcacgctctcttttgcaggccggtgccgataaggacgcccaggataatagagaacagaccccgctgtttctggctgcgcgagaaggcgcagtggaagtggctcagcttctgctggggctgggcgcagccagggagcttagggaccaggccggactggctccagccgacgtggcacatcaacgaaaccattgggacctcctgacactcctagagggcgcagggccacctgaagctcgccacaaggccacacccggacgtgaggctggtccattccctagggcacgaactgtttccgtctctgtgccccctcatggtggcggagcattaccacggtgtagaacgctgagcgccggagccggacccagggggggtggtgcttgcctccaagctagaacatggtccgtcgacctggcagcgaggggcggaggagcatactcccactgcagatcactcagcggagtgggcgcaggtggcggtccaacaccacggggaagacgattcagcgcgggaatgcgagggcctcgccctaacccagccatcatgcgcggacgatacggagtggcagccggtaggggcggtcgtgtcagtaccgatgactggccatgcgactgggttgcactgggtgcttgtgggtcagcctcgaatattcccatccctccaccatgcttgacgcctagccccgaacgcggatcccctcagctggactgtggcccacccgcactgcaggagatgcctatcaaccagggcggtgaaggaaagaagta

SEQ ID NO: 147569 - DNA, 6011 bp, Artificial Sequence
  derived and/or modified sequence
atgcaacccccatcactactcttactccttttattactattgctgctgtgtgttagtgtggtccgtcctaggggcttactatgtggttctttccctgagccttgcgccaatggcggtacttgtctctcactatctctcggccagggaacatgccagtgcgcacctgggtttctaggagagacctgccagtttcccgatccatgccaaaacgcacaactgtgccaaaatggaggcagctgccaggcgcttcttccagcaccgctgggcttgcccagttcgccaagccccctcacacccagcttcctctgcacgtgtctgcctgggttcactggtgagcggtgccaagctaagctagaggacccgtgccctccatctttttgttccaaaagagggcgttgccatatacaggcatcgggacgtccccaatgtagctgcatgcctggatggacaggtgaacaatgccagctaagagacttttgttcagccaacccttgcgtgaacggaggcgtatgtttggcgacctacccccagatccagtgccattgtcccccaggttttgaaggtcacgcgtgtgagagggatgtgaatgagtgcttccaggacccagggccatgtcccaagggaacctcatgccacaacacattaggctctttccagtgtctgtgtcctgtcggacaggaggggccacgatgcgagctcagggccggaccttgtcctccgcgaggttgctccaacggaggaacatgccagcttatgcctgaaaaggatagtacgttccacttatgcctgtgtccgcctggctttatcggacccgactgtgaggtcaaccccgacaattgcgtctctcaccagtgtcagaacggcggaacctgccaggatggtcttgacacatacacatgtttgtgtcctgagacctggaccggatgggactgttccgaggacgtggacgagtgtgaaactcagggacccccacattgccgaaacggcggaacatgtcagaactccgcgggtagcttccattgtgtatgcgtgtctggatggggcggtacttcctgcgaggagaacttggacgactgcatcgcggctacatgcgcacccggatctacgtgtattgatagagtcggatcattttcctgtctgtgccccccagggaggactggactactttgtcatctggaagatatgtgtctttcccaaccatgccatggggacgcccaatgctctaccaacccattaacgggatccacgttgtgcctgtgtcagcctggttacagtggacccacctgccatcaagatctggatgaatgtctgatggcgcagcagggcccttctccatgtgagcatgggggttcatgtctcaatacacctggcagctttaattgtctctgtcctcctgggtacacaggttcccgatgtgaggcagatcacaatgagtgcctcagtcagccatgtcacccaggcagcacctgcctagatcttttggcgacctttcactgcttgtgcccgcctgggctagagggccagctgtgtgaggtggagacaaatgagtgcgccagtgctccatgcctgaaccatgccgactgtcatgatctcttgaacggctttcagtgtatctgtctgcctggcttcagcggcaccagatgcgaggaagacatcgatgaatgcagatcctccccgtgcgccaatggaggtcagtgtcaagatcagccaggcgctttccattgcaagtgcctcccaggcttcgaaggccctaggtgccaaaccgaggtggacgagtgcctgagcgacccttgtcccgttggagccagctgcttggacctgcctggcgcttttttttgcctgtgcccctcaggtttcactggccagttgtgcgaagtgcccctctgtgcgcctaatttatgtcagcctaagcaaatatgtaaggatcagaaggacaaggccaattgcctgtgtcctgacggtagcccagggtgcgcccctccagaggacaactgtacatgccaccatggtcactgtcaacggagctcttgcgtctgcgatgtcgggtggacaggacccgagtgcgaagccgagctgggtggttgcataagcgctccttgcgcacacggcggtacttgctacccacagccctcaggttataactgcacatgcccaaccggttatacaggccctacatgcagcgaagagatgacggcctgccatagtggcccatgcctgaacgggggatcatgtaaccccagccccggaggctactattgcacctgccccccttcacacactggccctcagtgccagacctccacagattactgcgtctctgcgccttgctttaacggcggaacgtgcgtcaacaggcctggaacattcagctgtctttgcgcgatggggttccagggcccacggtgtgaaggaaaactgcggccatcttgtgcggattccccctgtcgcaacagggccacatgtcaggactcccctcagggaccacggtgcctgtgtccgactggatataccggcggatcttgccagacactaatggacctgtgtgcccaaaagccctgtcctagaaatagccattgccttcagacgggcccttcctttcattgtttgtgtctgcagggctggactggacccctgtgtaatttgcctctcagttcctgtcagaaagctgctctttctcagggaatagacgtctcatcactgtgccacaacggaggcctgtgtgtggattcaggaccttcctatttttgccactgcccaccgggattccaaggcagtctgtgtcaggatcacgtcaacccgtgtgagtcccggccatgtcaaaacggagcgacatgcatggcacaacccagcggctacctctgccaatgcgcgccagggtacgatggccaaaattgttcgaaagagctagatgcttgccaatctcaaccatgtcataatcacggtacttgtacgcccaaaccgggagggtttcactgtgcctgtccaccagggttcgtgggactcaggtgtgagggcgatgtcgacgaatgcctggatcaaccctgccatcctacaggcactgcggcatgtcacagcctggccaacgcattctattgccagtgcctcccaggccacaccgggcagtggtgtgaggtggagattgatccttgccattcccagccttgcttccatggtggaacttgcgaggccactgccggttcacctttgggatttatctgccactgccctaaaggctttgagggtcccacttgctcacacagagctccaagctgtgggttccatcattgtcaccacggcggactatgcctccctagccctaagcccggattccctccacgatgtgcctgtctgtcaggttatggtggtcctgactgtctcacaccccctgcaccgaaaggatgcggtcccccaagcccctgcctctacaatgggtcctgttccgagacgactggtctgggcggacctgggttccgctgttcatgccctcattcatcccccggaccccgatgtcaaaagccgggagcgaagggatgcgagggcagatccggggatggagcctgcgatgccggatgttccggccctggcggaaattgggatggcggagactgcagcctgggagtgccagacccgtggaaaggctgccccagtcactcacggtgctggctcctctttcgagacggccagtgtcatccacaatgtgatagtgaggaatgtctcttcgatgggtacgattgtgaaaccccacctgcttgcactccagcctacgaccagtattgccacgaccactttcacaatggccattgcgagaagggatgtaataccgctgagtgtggctgggacggcggagattgccgccctgaggacggcgatcctgagtgggggccttccctggcgctgctcgtggtgctgagcccccctgcgcttgatcagcaactgttcgcccttgccagggtactctcgctcactctccgtgtgggcctttgggtcagaaaggaccgcgatggtagagacatggtgtatccttaccctggcgcacgggctgaggagaaattagggggtacacgggaccctacctaccaagaaagagcggcaccacagacgcaaccactgggcaaggaaacagattctcttagtgcagggttcgtggtggtcatgggcgtggacctgtcacgctgcggcccagaccacccagcctcaaggtgcccctgggaccccggactgctccttcgattcttggctgcgatggcggcagtaggggctctggagccgctgctgcctgggccattactggcggtccatccccacgccggaaccgccccacccgctaaccaactgccgtggccggttttatgcagccctgtggccggtgtcattttgttggcactgggggcattgctagtgttgcagctgatcagacgtaggaggcgcgaacatggagcactgtggctgccaccgggattcacacggaggcccagaacgcagagcgccccacaccggaggcgccctcctttgggcgaggattccatcggcctcaaagctttgaagccaaaggctgaggtggatgaagatggggtagttatgtgtagtggtcccgaggagggcgaagaagtcggtcaggcagaagaaactggcccaccttcaacatgtcagttgtggtcgctctctggcggatgtggtgcactgccacaggccgctatgctaactccaccccaggaatctgaaatggaggcgcctgatcttgacactagaggtcctgacggcgtgaccccgcttatgagcgctgtgtgttgcggggaggtacagtcgggaacgttccagggcgcatggttgggatgtcccgagccctgggagcccttgttggacggcggagcttgtccacaggcgcataccgtgggaacaggtgaaactccacttcacttagcggcacggttttctaggcctacagcggcaaggaggttactcgaagccggagccaaccccaaccagcccgacagggccggtaggacccccctacatgccgctgtcgccgctgatgcgagggaagtgtgccagctactgcttcggtcaagacagaccgcagtcgatgcccgtaccgaagacggaacaacacctctgatgttagctgccagactggccgtagaggatctcgtcgaggagctcattgctgcccaggccgacgtaggggcaagagacaaatgggggaagaccgccctgcactgggcagccgctgtgaataatgccagagctgccaggtctctcttgcaggcgggtgctgataaggatgcacaggataaccgagagcaaaccccactctttctggcggcaagggagggcgctgtggaggttgcacagttactgctgggcctcggagctgcccgagagctgagagaccaggcaggacttgctcccgcagacgtagctcaccagagaaatcattgggatctgctgactttactcgagggcgcaggacctccagaagcccgacataaagcaactccgggtcgggaggccggaccttttccacgagccaggaccgtgtctgttagcgtgccacctcatggaggaggcgcattgccacgctgccggacgctgtcagccggagctggacctcggggaggaggagcctgcttacaggcgaggacttggtccgtcgaccttgctgcacgcggaggaggcgcatattctcactgcagaagcctcagtggtgtgggcgctggaggcggtcctacccccagaggcagacgattcagcgctggtatgagaggccctcggcctaatccagcgattatgcgcggacggtacggtgtggccgctggcaggggcggtagggtgtccaccgacgactggccctgtgattgggtggcactcggcgcatgtggctccgcatcaaacataccaatccctccaccttgccttacgccttcaccagaacgaggtagtccccaacttgactgtggaccccctgcactacaagagatgcctattaatcagggcggagagggaaagaaata

SEQ ID NO: 147570 - DNA, 561 bp, Artificial Sequence
  derived and/or modified sequence
atgtccgcggtgtgctgcggggaggtccaaagtgggacattccagggagcctggcttggttgccctgaaccctgggaacctctcctggatgggggtgcctgtccacaggcccataccgtagggacaggtgaaacccctctgcatttggctgccagattctcacgcccaactgccgcacgcagactactcgaagctggcgcaaatcccaatcaacccgatcgggctgggagaacgcctctgcacgctgcggtggccgctgacgctagggaggtgtgtcaacttttgctgagaagtaggcagactgcagtcgatgccagaaccgaggatggtactacacctctgatgctggctgcacgcctggctgtggaggatctcgtagaggaattgatcgccgctcaggctgatgtgggggctcgcgataaatggggcgctgacgcagctatccccggaggtgccggtcgctcaggtggcagctccccagcaaccgcaggcgctggagggtcccctagggcagctggacctgggtgggctagcgccggtggacgcagaagccccacttag

SEQ ID NO: 147571 - DNA, 561 bp, Artificial Sequence
  derived and/or modified sequence
atgtcagctgtttgctgtggtgaggtacagagtgggacatttcagggcgcttggttgggttgtcccgaaccatgggagcctctgctggatgggggagcttgtcctcaagctcataccgtgggaaccggcgagactccactccatctcgcagctagattctctaggcccacagcagctaggaggctgctcgaagcaggcgctaacccaaaccagccagaccgggcagggcgtactccgctccacgctgccgttgcggcagatgccagagaggtatgtcagctgttgctaagatctagacagacagcggtggatgccagaacagaggacgggaccaccccactgatgttggccgcacgactcgctgttgaggacctcgtggaggagctcatcgctgcgcaggcggacgtgggggcacgagacaagtggggagccgacgccgctataccgggaggagctgggagatctggcggatcttccccagcaaccgctggcgctggcggatctccaagagctgcaggtccgggatgggcctctgcaggcggaagacggtctccgacctag

SEQ ID NO: 147572 - DNA, 561 bp, Artificial Sequence
  derived and/or modified sequence
atgagcgcagtttgctgcggtgaggtccagtccgggactttccaaggagcgtggcttggatgtccggagccctgggagcccttactggatggtggagcctgcccacaggctcacactgttgggaccggagagactcctctgcatctggctgcacgattctcaagacccacagcagcaaggcggctgctggaggccggagcaaatccgaatcaacctgaccgagctggtcggaccccgctgcatgccgcagtggctgcagacgcccgagaggtgtgccagttgcttctaagaagcagacagacggctgtagacgccaggactgaagatggtactacaccattgatgctggcggctcggctggccgtggaagatcttgtagaggaactgatcgccgctcaggcagacgtgggggcacgcgataagtggggggcagatgcggctattcctggaggcgcaggtcgcagtgggggtagttcccccgcaacggctggtgccggaggatcgccgagggccgcaggcccaggatgggcttcggccggaggaaggcgaagtccaacctag

SEQ ID NO: 147573 - DNA, 561 bp, Artificial Sequence
  derived and/or modified sequence
atgtccgcagtgtgttgtggtgaagtacagtccggaacctttcaaggcgcttggctgggatgccccgaaccgtgggaaccgctgctggacgggggtgcgtgccctcaggctcataccgtgggaactggggagactccactccatctggctgcacggttctcacgcccaactgcggctcgcaggctgctcgaggccggagccaatccgaaccagcctgatagggctggaagaactcccctacacgcagcagtagccgctgacgctagggaggtgtgtcaattgttgctacggtccaggcagactgctgtggacgcacgaacagaagatgggacaacaccgcttatgttggcagctaggctggctgtagaagatctggtggaggagctaatagcagctcaagccgacgtcggagcaagggacaagtggggagcagacgcagcgataccaggaggagccggacggtccggcggatcttcacccgctacggctggggctggcggaagccccagagctgccggtccaggatgggcatccgctggcggacgtagatcccccacatag

SEQ ID NO: 147574 - DNA, 561 bp, Artificial Sequence
  derived and/or modified sequence
atgagtgccgtgtgctgcggtgaagtgcaaagtggaacattccaaggggcttggctaggctgcccggaaccatgggagcccctgctagacggcggtgcttgtccacaggcccatacagtggggacaggcgagaccccactccacctcgcagccagattttcacgtcccactgcagcacggaggcttctcgaggccggagctaatcccaaccaaccagatcgggcagggaggactccattgcacgctgccgtcgcggctgatgctagggaagtctgccagttgctgctcagatcaagacagaccgccgtggatgcgcgtactgaagatggaacaactccccttatgttggctgccaggctggccgtggaggacctggtggaagagctcatcgctgcacaggccgacgttggagctagggacaagtggggcgcagacgcggcaattccaggcggagcagggcgtagtggcggatcttctcctgccaccgcaggggctgggggatctcctcgcgctgccggacctggatgggcatccgcagggggaaggaggtctcccacctag

SEQ ID NO: 147575 - DNA, 6012 bp, Artificial Sequence
  derived and/or modified sequence
atgcagccccccagcctgctgctgctgctgctgctgctgctgctgctgtgcgtgagcgtggtgagacccagaggcctgctgtgcggcagcttccccgagccctgcgccaacggcggcacctgcctgagcctgagcctgggccagggcacctgccagtgcgcccccggcttcctgggcgagacctgccagttccccgacccctgccagaacgcccagctgtgccagaacggcggcagctgccaggccctgctgcccgcccccctgggcctgcccagcagccccagccccctgacccccagcttcctgtgcacctgcctgcccggcttcaccggcgagagatgccaggccaagctggaggacccctgcccccccagcttctgcagcaagagaggcagatgccacatccaggccagcggcagaccccagtgcagctgcatgcccggctggaccggcgagcagtgccagctgagagacttctgcagcgccaacccctgcgtgaacggcggcgtgtgcctggccacctacccccagatccagtgccactgcccccccggcttcgagggccacgcctgcgagagagacgtgaacgagtgcttccaggaccccggcccctgccccaagggcaccagctgccacaacaccctgggcagcttccagtgcctgtgccccgtgggccaggagggccccagatgcgagctgagagccggcccctgcccccccagaggctgcagcaacggcggcacctgccagctgatgcccgagaaggacagcaccttccacctgtgcctgtgcccccccggcttcatcggccccgactgcgaggtgaaccccgacaactgcgtgagccaccagtgccagaacggcggcacctgccaggacggcctggacacctacacctgcctgtgccccgagacctggaccggctgggactgcagcgaggacgtggacgagtgcgagacccagggccccccccactgcagaaacggcggcacctgccagaacagcgccggcagcttccactgcgtgtgcgtgagcggctggggcggcaccagctgcgaggagaacctggacgactgcatcgccgccacctgcgcccccggcagcacctgcatcgacagagtgggcagcttcagctgcctgtgcccccccggcagaaccggcctgctgtgccacctggaggacatgtgcctgagccagccctgccacggcgacgcccagtgcagcaccaaccccctgaccggcagcaccctgtgcctgtgccagcccggctacagcggccccacctgccaccaggacctggacgagtgcctgatggcccagcagggccccagcccctgcgagcacggcggcagctgcctgaacacccccggcagcttcaactgcctgtgcccccccggctacaccggcagcagatgcgaggccgaccacaacgagtgcctgagccagccctgccaccccggcagcacctgcctggacctgctggccaccttccactgcctgtgcccccccggcctggagggccagctgtgcgaggtggagaccaacgagtgcgccagcgccccctgcctgaaccacgccgactgccacgacctgctgaacggcttccagtgcatctgcctgcccggcttcagcggcaccagatgcgaggaggacatcgacgagtgcagaagcagcccctgcgccaacggcggccagtgccaggaccagcccggcgccttccactgcaagtgcctgcccggcttcgagggccccagatgccagaccgaggtggacgagtgcctgagcgacccctgccccgtgggcgccagctgcctggacctgcccggcgccttcttctgcctgtgccccagcggcttcaccggccagctgtgcgaggtgcccctgtgcgcccccaacctgtgccagcccaagcagatctgcaaggaccagaaggacaaggccaactgcctgtgccccgacggcagccccggctgcgccccccccgaggacaactgcacctgccaccacggccactgccagagaagcagctgcgtgtgcgacgtgggctggaccggccccgagtgcgaggccgagctgggcggctgcatcagcgccccctgcgcccacggcggcacctgctacccccagcccagcggctacaactgcacctgccccaccggctacaccggccccacctgcagcgaggagatgaccgcctgccacagcggcccctgcctgaacggcggcagctgcaaccccagccccggcggctactactgcacctgcccccccagccacaccggcccccagtgccagaccagcaccgactactgcgtgagcgccccctgcttcaacggcggcacctgcgtgaacagacccggcaccttcagctgcctgtgcgccatgggcttccagggccccagatgcgagggcaagctgagacccagctgcgccgacagcccctgcagaaacagagccacctgccaggacagcccccagggccccagatgcctgtgccccaccggctacaccggcggcagctgccagaccctgatggacctgtgcgcccagaagccctgccccagaaacagccactgcctgcagaccggccccagcttccactgcctgtgcctgcagggctggaccggccccctgtgcaacctgcccctgagcagctgccagaaggccgccctgagccagggcatcgacgtgagcagcctgtgccacaacggcggcctgtgcgtggacagcggccccagctacttctgccactgcccccccggcttccagggcagcctgtgccaggaccacgtgaacccctgcgagagcagaccctgccagaacggcgccacctgcatggcccagcccagcggctacctgtgccagtgcgcccccggctacgacggccagaactgcagcaaggagctggacgcctgccagagccagccctgccacaaccacggcacctgcacccccaagcccggcggcttccactgcgcctgcccccccggcttcgtgggcctgagatgcgagggcgacgtggacgagtgcctggaccagccctgccaccccaccggcaccgccgcctgccacagcctggccaacgccttctactgccagtgcctgcccggccacaccggccagtggtgcgaggtggagatcgacccctgccacagccagccctgcttccacggcggcacctgcgaggccaccgccggcagccccctgggcttcatctgccactgccccaagggcttcgagggccccacctgcagccacagagcccccagctgcggcttccaccactgccaccacggcggcctgtgcctgcccagccccaagcccggcttcccccccagatgcgcctgcctgagcggctacggcggccccgactgcctgaccccccccgcccccaagggctgcggcccccccagcccctgcctgtacaacggcagctgcagcgagaccaccggcctgggcggccccggcttcagatgcagctgcccccacagcagccccggccccagatgccagaagcccggcgccaagggctgcgagggcagaagcggcgacggcgcctgcgacgccggctgcagcggccccggcggcaactgggacggcggcgactgcagcctgggcgtgcccgacccctggaagggctgccccagccacagcagatgctggctgctgttcagagacggccagtgccacccccagtgcgacagcgaggagtgcctgttcgacggctacgactgcgagaccccccccgcctgcacccccgcctacgaccagtactgccacgaccacttccacaacggccactgcgagaagggctgcaacaccgccgagtgcggctgggacggcggcgactgcagacccgaggacggcgaccccgagtggggccccagcctggccctgctggtggtgctgagcccccccgccctggaccagcagctgttcgccctggccagagtgctgagcctgaccctgagagtgggcctgtgggtgagaaaggacagagacggcagagacatggtgtacccctaccccggcgccagagccgaggagaagctgggcggcaccagagaccccacctaccaggagagagccgccccccagacccagcccctgggcaaggagaccgacagcctgagcgccggcttcgtggtggtgatgggcgtggacctgagcagatgcggccccgaccaccccgccagcagatgcccctgggaccccggcctgctgctgagattcctggccgccatggccgccgtgggcgccctggagcccctgctgcccggccccctgctggccgtgcacccccacgccggcaccgccccccccgccaaccagctgccctggcccgtgctgtgcagccccgtggccggcgtgatcctgctggccctgggcgccctgctggtgctgcagctgatcagaagaagaagaagagagcacggcgccctgtggctgccccccggcttcaccagaagacccagaacccagagcgccccccacagaagaagaccccccctgggcgaggacagcatcggcctgaaggccctgaagcccaaggccgaggtggacgaggacggcgtggtgatgtgcagcggccccgaggagggcgaggaggtgggccaggccgaggagaccggcccccccagcacctgccagctgtggagcctgagcggcggctgcggcgccctgccccaggccgccatgctgacccccccccaggagagcgagatggaggcccccgacctggacaccagaggccccgacggcgtgacccccctgatgagcgccgtgtgctgcggcgaggtgcagagcggcaccttccagggcgcctggctgggctgccccgagccctgggagcccctgctggacggcggcgcctgcccccaggcccacaccgtgggcaccggcgagacccccctgcacctggccgccagattcagcagacccaccgccgccagaagactgctggaggccggcgccaaccccaaccagcccgacagagccggcagaacccccctgcacgccgccgtggccgccgacgccagagaggtgtgccagctgctgctgagaagcagacagaccgccgtggacgccagaaccgaggacggcaccacccccctgatgctggccgccagactggccgtggaggacctggtggaggagctgatcgccgcccaggccgacgtgggcgccagagacaagtggggcaagaccgccctgcactgggccgccgccgtgaacaacgccagagccgccagaagcctgctgcaggccggcgccgacaaggacgcccaggacaacagagagcagacccccctgttcctggccgccagagagggcgccgtggaggtggcccagctgctgctgggcctgggcgccgccagagagctgagagaccaggccggcctggcccccgccgacgtggcccaccagagaaaccactgggacctgctgaccctgctggagggcgccggcccccccgaggccagacacaaggccacccccggcagagaggccggccccttccccagagccagaaccgtgagcgtgagcgtgcccccccacggcggcggcgccctgcccagatgcagaaccctgagcgccggcgccggccccagaggcggcggcgcctgcctgcaggccagaacctggagcgtggacctggccgccagaggcggcggcgcctacagccactgcagaagcctgagcggcgtgggcgccggcggcggccccacccccagaggcagaagattcagcgccggcatgagaggccccagacccaaccccgccatcatgagaggcagatacggcgtggccgccggcagaggcggcagagtgagcaccgacgactggccctgcgactgggtggccctgggcgcctgcggcagcgccagcaacatccccatcccccccccctgcctgacccccagccccgagagaggcagcccccagctggactgcggcccccccgccctgcaggagatgcccatcaaccagggcggcgagggcaagaagtag

SEQ ID NO: 147576 - DNA, 3147 bp, Artificial Sequence
  derived and/or modified sequence
tgcgcccccggctacgacggccagaactgcagcaaggagctggacgcctgccagagccagccctgccacaaccacggcacctgcacccccaagcccggcggcttccactgcgcctgcccccccggcttcgtgggcctgagatgcgagggcgacgtggacgagtgcctggaccagccctgccaccccaccggcaccgccgcctgccacagcctggccaacgccttctactgccagtgcctgcccggccacaccggccagtggtgcgaggtggagatcgacccctgccacagccagccctgcttccacggcggcacctgcgaggccaccgccggcagccccctgggcttcatctgccactgccccaagggcttcgagggccccacctgcagccacagagcccccagctgcggcttccaccactgccaccacggcggcctgtgcctgcccagccccaagcccggcttcccccccagatgcgcctgcctgagcggctacggcggccccgactgcctgaccccccccgcccccaagggctgcggcccccccagcccctgcctgtacaacggcagctgcagcgagaccaccggcctgggcggccccggcttcagatgcagctgcccccacagcagccccggccccagatgccagaagcccggcgccaagggctgcgagggcagaagcggcgacggcgcctgcgacgccggctgcagcggccccggcggcaactgggacggcggcgactgcagcctgggcgtgcccgacccctggaagggctgccccagccacagcagatgctggctgctgttcagagacggccagtgccacccccagtgcgacagcgaggagtgcctgttcgacggctacgactgcgagaccccccccgcctgcacccccgcctacgaccagtactgccacgaccacttccacaacggccactgcgagaagggctgcaacaccgccgagtgcggctgggacggcggcgactgcagacccgaggacggcgaccccgagtggggccccagcctggccctgctggtggtgctgagcccccccgccctggaccagcagctgttcgccctggccagagtgctgagcctgaccctgagagtgggcctgtgggtgagaaaggacagagacggcagagacatggtgtacccctaccccggcgccagagccgaggagaagctgggcggcaccagagaccccacctaccaggagagagccgccccccagacccagcccctgggcaaggagaccgacagcctgagcgccggcttcgtggtggtgatgggcgtggacctgagcagatgcggccccgaccaccccgccagcagatgcccctgggaccccggcctgctgctgagattcctggccgccatggccgccgtgggcgccctggagcccctgctgcccggccccctgctggccgtgcacccccacgccggcaccgccccccccgccaaccagctgccctggcccgtgctgtgcagccccgtggccggcgtgatcctgctggccctgggcgccctgctggtgctgcagctgatcagaagaagaagaagagagcacggcgccctgtggctgccccccggcttcaccagaagacccagaacccagagcgccccccacagaagaagaccccccctgggcgaggacagcatcggcctgaaggccctgaagcccaaggccgaggtggacgaggacggcgtggtgatgtgcagcggccccgaggagggcgaggaggtgggccaggccgaggagaccggcccccccagcacctgccagctgtggagcctgagcggcggctgcggcgccctgccccaggccgccatgctgacccccccccaggagagcgagatggaggcccccgacctggacaccagaggccccgacggcgtgacccccctgatgagcgccgtgtgctgcggcgaggtgcagagcggcaccttccagggcgcctggctgggctgccccgagccctgggagcccctgctggacggcggcgcctgcccccaggcccacaccgtgggcaccggcgagacccccctgcacctggccgccagattcagcagacccaccgccgccagaagactgctggaggccggcgccaaccccaaccagcccgacagagccggcagaacccccctgcacgccgccgtggccgccgacgccagagaggtgtgccagctgctgctgagaagcagacagaccgccgtggacgccagaaccgaggacggcaccacccccctgatgctggccgccagactggccgtggaggacctggtggaggagctgatcgccgcccaggccgacgtgggcgccagagacaagtggggcaagaccgccctgcactgggccgccgccgtgaacaacgccagagccgccagaagcctgctgcaggccggcgccgacaaggacgcccaggacaacagagagcagacccccctgttcctggccgccagagagggcgccgtggaggtggcccagctgctgctgggcctgggcgccgccagagagctgagagaccaggccggcctggcccccgccgacgtggcccaccagagaaaccactgggacctgctgaccctgctggagggcgccggcccccccgaggccagacacaaggccacccccggcagagaggccggccccttccccagagccagaaccgtgagcgtgagcgtgcccccccacggcggcggcgccctgcccagatgcagaaccctgagcgccggcgccggccccagaggcggcggcgcctgcctgcaggccagaacctggagcgtggacctggccgccagaggcggcggcgcctacagccactgcagaagcctgagcggcgtgggcgccggcggcggccccacccccagaggcagaagattcagcgccggcatgagaggccccagacccaaccccgccatcatgagaggcagatacggcgtggccgccggcagaggcggcagagtgagcaccgacgactggccctgcgactgggtggccctgggcgcctgcggcagcgccagcaacatccccatcccccccccctgcctgacccccagccccgagagaggcagcccccagctggactgcggcccccccgccctgcaggagatgcccatcaaccagggcggcgagggcaagaagtag

SEQ ID NO: 147577 - DNA, 6018 bp, Artificial Sequence
  derived and/or modified sequence
atgcagccccccagcctgctgctgctgctgctgctgctgctgctgctgctgctgtgcgtgagcgtggtgagacccagaggcctgctgtgcggcagcttccccgagccctgcgccaacggcggcacctgcctgagcctgagcctgggccagggcacctgccagtgcgcccccggcttcctgggcgagacctgccagttccccgacccctgccagaacgcccagctgtgccagaacggcggcagctgccaggccctgctgcccgcccccctgggcctgcccagcagccccagccccctgacccccagcttcctgtgcacctgcctgcccggcttcaccggcgagagatgccaggcccagctggaggacccctgcccccccagcttctgcagcaagagaggcagatgccacatccaggccagcggcagaccccagtgcagctgcatgcccggctggaccggcgagcagtgccagctgagagacttctgcagcgccaacccctgcgtgaacggcggcgtgtgcctggccacctacccccagatccagtgccactgcccccccggcttcgagggccacgcctgcgagagagacgtgaacgagtgcttccaggaccccggcccctgccccaagggcaccagctgccacaacaccctgggcagcttccagtgcctgtgccccgtgggccaggagggccccagatgcgagctgagagccggcccctgcccccccagaggctgcagcaacggcggcacctgccagctgatgcccgagaaggacagcaccttccacctgtgcctgtgcccccccggcttcatcggccccgactgcgaggtgaaccccgacaactgcgtgagccaccagtgccagaacggcggcacctgccaggacggcctggacacctacacctgcctgtgccccgagacctggaccggctgggactgcagcgaggacgtggacgagtgcgaggcccagggccccccccactgcagaaacggcggcacctgccagaacagcgccggcagcttccactgcgtgtgcgtgagcggctggggcggcaccagctgcgaggagaacctggacgactgcatcgccgccacctgcgcccccggcagcacctgcatcgacagagtgggcagcttcagctgcctgtgcccccccggcagaaccggcctgctgtgccacctggaggacatgtgcctgagccagccctgccacggcgacgcccagtgcagcaccaaccccctgaccggcagcaccctgtgcctgtgccagcccggctacagcggccccacctgccaccaggacctggacgagtgcctgatggcccagcagggccccagcccctgcgagcacggcggcagctgcctgaacacccccggcagcttcaactgcctgtgcccccccggctacaccggcagcagatgcgaggccgaccacaacgagtgcctgagccagccctgccaccccggcagcacctgcctggacctgctggccaccttccactgcctgtgcccccccggcctggagggccagctgtgcgaggtggagaccaacgagtgcgccagcgccccctgcctgaaccacgccgactgccacgacctgctgaacggcttccagtgcatctgcctgcccggcttcagcggcaccagatgcgaggaggacatcgacgagtgcagaagcagcccctgcgccaacggcggccagtgccaggaccagcccggcgccttccactgcaagtgcctgcccggcttcgagggccccagatgccagaccgaggtggacgagtgcctgagcgacccctgccccgtgggcgccagctgcctggacctgcccggcgccttcttctgcctgtgccccagcggcttcaccggccagctgtgcgaggtgcccctgtgcgcccccaacctgtgccagcccaagcagatctgcaaggaccagaaggacaaggccaactgcctgtgccccgacggcagccccggctgcgccccccccgaggacaactgcacctgccaccacggccactgccagagaagcagctgcgtgtgcgacgtgggctggaccggccccgagtgcgaggccgagctgggcggctgcatcagcgccccctgcgcccacggcggcacctgctacccccagcccagcggctacaactgcacctgccccaccggctacaccggccccacctgcagcgaggagatgaccgcctgccacagcggcccctgcctgaacggcggcagctgcaaccccagccccggcggctactactgcacctgcccccccagccacaccggcccccagtgccagaccagcaccgactactgcgtgagcgccccctgcttcaacggcggcacctgcgtgaacagacccggcaccttcagctgcctgtgcgccatgggcttccagggccccagatgcgagggcaagctgagacccagctgcgccgacagcccctgcagaaacagagccacctgccaggacagcccccagggccccagatgcctgtgccccaccggctacaccggcggcagctgccagaccctgatggacctgtgcgcccagaagccctgccccagaaacagccactgcctgcagaccggccccagcttccactgcctgtgcctgcagggctggaccggccccctgtgcaacctgcccctgagcagctgccagaaggccgccctgagccagggcatcgacgtgagcagcctgtgccacaacggcggcctgtgcgtggacagcggccccagctacttctgccactgcccccccggcttccagggcagcctgtgccaggaccacgtgaacccctgcgagagcagaccctgccagaacggcgccacctgcatggcccagcccagcggctacctgtgccagtgcgcccccggctacgacggccagaactgcagcaaggagctggacgcctgccagagccagccctgccacaaccacggcacctgcacccccaagcccggcggcttccactgcgcctgcccccccggcttcgtgggcctgagatgcgagggcgacgtggacgagtgcctggaccagccctgccaccccaccggcaccgccgcctgccacagcctggccaacgccttctactgccagtgcctgcccggccacaccggccagtggtgcgaggtggagatcgacccctgccacagccagccctgcttccacggcggcacctgcgaggccaccgccggcagccccctgggcttcatctgccactgccccaagggcttcgagggccccacctgcagccacagagcccccagctgcggcttccaccactgccaccacggcggcctgtgcctgcccagccccaagcccggcttcccccccagatgcgcctgcctgagcggctacggcggccccgactgcctgaccccccccgcccccaagggctgcggcccccccagcccctgcctgtacaacggcagctgcagcgagaccaccggcctgggcggccccggcttcagatgcagctgcccccacagcagccccggccccagatgccagaagcccggcgccaagggctgcgagggcagaagcggcgacggcgcctgcgacgccggctgcagcggccccggcggcaactgggacggcggcgactgcagcctgggcgtgcccgacccctggaagggctgccccagccacagcagatgctggctgctgttcagagacggccagtgccacccccagtgcgacagcgaggagtgcctgttcgacggctacgactgcgagaccccccccgcctgcacccccgcctacgaccagtactgccacgaccacttccacaacggccactgcgagaagggctgcaacaccgccgagtgcggctgggacggcggcgactgcagacccgaggacggcgaccccgagtggggccccagcctggccctgctggtggtgctgagcccccccgccctggaccagcagctgttcgccctggccagagtgctgagcctgaccctgagagtgggcctgtgggtgagaaaggacagagacggcagagacatggtgtacccctaccccggcgccagagccgaggagaagctgggcggcaccagagaccccacctaccaggagagagccgccccccagacccagcccctgggcaaggagaccgacagcctgagcgccggcttcgtggtggtgatgggcgtggacctgagcagatgcggccccgaccaccccgccagcagatgcccctgggaccccggcctgctgctgagattcctggccgccatggccgccgtgggcgccctggagcccctgctgcccggccccctgctggccgtgcacccccacgccggcaccgccccccccgccaaccagctgccctggcccgtgctgtgcagccccgtggccggcgtgatcctgctggccctgggcgccctgctggtgctgcagctgatcagaagaagaagaagagagcacggcgccctgtggctgccccccggcttcaccagaagacccagaacccagagcgccccccacagaagaagaccccccctgggcgaggacagcatcggcctgaaggccctgaagcccaaggccgaggtggacgaggacggcgtggtgatgtgcagcggccccgaggagggcgaggaggtgggccaggccgaggagaccggcccccccagcacctgccagctgtggagcctgagcggcggctgcggcgccctgccccaggccgccatgctgacccccccccaggagagcgagatggaggcccccgacctggacaccagaggccccgacggcgtgacccccctgatgagcgccgtgtgctgcggcgaggtgcagagcggcaccttccagggcgcctggctgggctgccccgagccctgggagcccctgctggacggcggcgcctgcccccaggcccacaccgtgggcaccggcgagacccccctgcacctggccgccagattcagcagacccaccgccgccagaagactgctggaggccggcgccaaccccaaccagcccgacagagccggcagaacccccctgcacgccgccgtggccgccgacgccagagaggtgtgccagctgctgctgagaagcagacagaccgccgtggacgccagaaccgaggacggcaccacccccctgatgctggccgccagactggccgtggaggacctggtggaggagctgatcgccgcccaggccgacgtgggcgccagagacaagtggggcaagaccgccctgcactgggccgccgccgtgaacaacgccagagccgccagaagcctgctgcaggccggcgccgacaaggacgcccaggacaacagagagcagacccccctgttcctggccgccagagagggcgccgtggaggtggcccagctgctgctgggcctgggcgccgccagagagctgagagaccaggccggcctggcccccgccgacgtggcccaccagagaaaccactgggacctgctgaccctgctggagggcgccggcccccccgaggccagacacaaggccacccccggcagagaggccggccccttccccagagccagaaccgtgagcgtgagcgtgcccccccacggcggcggcgccctgcccagatgcagaaccctgagcgccggcgccggccccagaggcggcggcgcctgcctgcaggccagaacctggagcgtggacctggccgccagaggcggcggcgcctacagccactgcagaagcctgagcggcgtgggcgccggcggcggccccacccccagaggcagaagattcagcgccggcatgagaggccccagacccaaccccgccatcatgagaggcagatacggcgtggccgccggcagaggcggcagagtgagcaccgacgactggccctgcgactgggtggccctgggcgcctgcggcagcgccagcaacatccccatcccccccccctgcctgacccccagccccgagagaggcagcccccagctggactgcggcccccccgccctgcaggagatgcccatcaaccagggcggcgagggcaagaagtag

SEQ ID NO: 147578 - DNA, 6012 bp, Artificial Sequence
  derived and/or modified sequence
atgcagccccccagcctgctgctgctgctgctgctgctgctgctgctgtgcgtgagcgtggtgagacccagaggcctgctgtgcggcagcttccccgagccctgcgccaacggcggcacctgcctgagcctgagcctgggccagggcacctgccagtgcgcccccggcttcctgggcgagacctgccagttccccgacccctgccagaacgcccagctgtgccagaacggcggcagctgccaggccctgctgcccgcccccctgggcctgcccagcagccccagccccctgacccccagcttcctgtgcacctgcctgcccggcttcaccggcgagagatgccaggcccagctggaggacccctgcccccccagcttctgcagcaagagaggcagatgccacatccaggccagcggcagaccccagtgcagctgcatgcccggctggaccggcgagcagtgccagctgagagacttctgcagcgccaacccctgcgtgaacggcggcgtgtgcctggccacctacccccagatccagtgccactgcccccccggcttcgagggccacgcctgcgagagagacgtgaacgagtgcttccaggaccccggcccctgccccaagggcaccagctgccacaacaccctgggcagcttccagtgcctgtgccccgtgggccaggagggccccagatgcgagctgagagccggcccctgcccccccagaggctgcagcaacggcggcacctgccagctgatgcccgagaaggacagcaccttccacctgtgcctgtgcccccccggcttcatcggccccgactgcgaggtgaaccccgacaactgcgtgagccaccagtgccagaacggcggcacctgccaggacggcctggacacctacacctgcctgtgccccgagacctggaccggctgggactgcagcgaggacgtggacgagtgcgagacccagggccccccccactgcagaaacggcggcacctgccagaacagcgccggcagcttccactgcgtgtgcgtgagcggctggggcggcaccagctgcgaggagaacctggacgactgcatcgccgccacctgcgcccccggcagcacctgcatcgacagagtgggcagcttcagctgcctgtgcccccccggcagaaccggcctgctgtgccacctggaggacatgtgcctgagccagccctgccacggcgacgcccagtgcagcaccaaccccctgaccggcagcaccctgtgcctgtgccagcccggctacagcggccccacctgccaccaggacctggacgagtgcctgatggcccagcagggccccagcccctgcgagcacggcggcagctgcctgaacacccccggcagcttcaactgcctgtgcccccccggctacaccggcagcagatgcgaggccgaccacaacgagtgcctgagccagccctgccaccccggcagcacctgcctggacctgctggccaccttccactgcctgtgcccccccggcctggagggccagctgtgcgaggtggagaccaacgagtgcgccagcgccccctgcctgaaccacgccgactgccacgacctgctgaacggcttccagtgcatctgcctgcccggcttcagcggcaccagatgcgaggaggacatcgacgagtgcagaagcagcccctgcgccaacggcggccagtgccaggaccagcccggcgccttccactgcaagtgcctgcccggcttcgagggccccagatgccagaccgaggtggacgagtgcctgagcgacccctgccccgtgggcgccagctgcctggacctgcccggcgccttcttctgcctgtgccccagcggcttcaccggccagctgtgcgaggtgcccctgtgcgcccccaacctgtgccagcccaagcagatctgcaaggaccagaaggacaaggccaactgcctgtgccccgacggcagccccggctgcgccccccccgaggacaactgcacctgccaccacggccactgccagagaagcagctgcgtgtgcgacgtgggctggaccggccccgagtgcgaggccgagctgggcggctgcatcagcgccccctgcgcccacggcggcacctgctacccccagcccagcggctacaactgcacctgccccaccggctacaccggccccacctgcagcgaggagatgaccgcctgccacagcggcccctgcctgaacggcggcagctgcaaccccagccccggcggctactactgcacctgcccccccagccacaccggcccccagtgccagaccagcaccgactactgcgtgagcgccccctgcttcaacggcggcacctgcgtgaacagacccggcaccttcagctgcctgtgcgccatgggcttccagggccccagatgcgagggcaagctgagacccagctgcgccgacagcccctgcagaaacagagccacctgccaggacagcccccagggccccagatgcctgtgccccaccggctacaccggcggcagctgccagaccctgatggacctgtgcgcccagaagccctgccccagaaacagccactgcctgcagaccggccccagcttccactgcctgtgcctgcagggctggaccggccccctgtgcaacctgcccctgagcagctgccagaaggccgccctgagccagggcatcgacgtgagcagcctgtgccacaacggcggcctgtgcgtggacagcggccccagctacttctgccactgcccccccggcttccagggcagcctgtgccaggaccacgtgaacccctgcgagagcagaccctgccagaacggcgccacctgcatggcccagcccagcggctacctgtgccagtgcgcccccggctacgacggccagaactgcagcaaggagctggacgcctgccagagccagccctgccacaaccacggcacctgcacccccaagcccggcggcttccactgcgcctgcccccccggcttcgtgggcctgagatgcgagggcgacgtggacgagtgcctggaccagccctgccaccccaccggcaccgccgcctgccacagcctggccaacgccttctactgccagtgcctgcccggccacaccggccagtggtgcgaggtggagatcgacccctgccacagccagccctgcttccacggcggcacctgcgaggccaccgccggcagccccctgggcttcatctgccactgccccaagggcttcgagggccccacctgcagccacagagcccccagctgcggcttccaccactgccaccacggcggcctgtgcctgcccagccccaagcccggcttcccccccagatgcgcctgcctgagcggctacggcggccccgactgcctgaccccccccgcccccaagggctgcggcccccccagcccctgcctgtacaacggcagctgcagcgagaccaccggcctgggcggccccggcttcagatgcagctgcccccacagcagccccggccccagatgccagaagcccggcgccaagggctgcgagggcagaagcggcgacggcgcctgcgacgccggctgcagcggccccggcggcaactgggacggcggcgactgcagcctgggcgtgcccgacccctggaagggctgccccagccacagcagatgctggctgctgttcagagacggccagtgccacccccagtgcgacagcgaggagtgcctgttcgacggctacgactgcgagaccccccccgcctgcacccccgcctacgaccagtactgccacgaccacttccacaacggccactgcgagaagggctgcaacaccgccgagtgcggctgggacggcggcgactgcagacccgaggacggcgaccccgagtggggccccagcctggccctgctggtggtgctgagcccccccgccctggaccagcagctgttcgccctggccagagtgctgagcctgaccctgagagtgggcctgtgggtgagaaaggacagagacggcagagacatggtgtacccctaccccggcgccagagccgaggagaagctgggcggcaccagagaccccacctaccaggagagagccgccccccagacccagcccctgggcaaggagaccgacagcctgagcgccggcttcgtggtggtgatgggcgtggacctgagcagatgcggccccgaccaccccgccagcagatgcccctgggaccccggcctgctgctgagattcctggccgccatggccgccgtgggcgccctggagcccctgctgcccggccccctgctggccgtgcacccccacgccggcaccgccccccccgccaaccagctgccctggcccgtgctgtgcagccccgtggccggcgtgatcctgctggccctgggcgccctgctggtgctgcagctgatcagaagaagaagaagagagcacggcgccctgtggctgccccccggcttcaccagaagacccagaacccagagcgccccccacagaagaagaccccccctgggcgaggacagcatcggcctgaaggccctgaagcccaaggccgaggtggacgaggacggcgtggtgatgtgcagcggccccgaggagggcgaggaggtgggccaggccgaggagaccggcccccccagcacctgccagctgtggagcctgagcggcggctgcggcgccctgccccaggccgccatgctgacccccccccaggagagcgagatggaggcccccgacctggacaccagaggccccgacggcgtgacccccctgatgagcgccgtgtgctgcggcgaggtgcagagcggcaccttccagggcgcctggctgggctgccccgagccctgggagcccctgctggacggcggcgcctgcccccaggcccacaccgtgggcaccggcgagacccccctgcacctggccgccagattcagcagacccaccgccgccagaagactgctggaggccggcgccaaccccaaccagcccgacagagccggcagaacccccctgcacgccgccgtggccgccgacgccagagaggtgtgccagctgctgctgagaagcagacagaccgccgtggacgccagaaccgaggacggcaccacccccctgatgctggccgccagactggccgtggaggacctggtggaggagctgatcgccgcccaggccgacgtgggcgccagagacaagtggggcaagaccgccctgcactgggccgccgccgtgaacaacgccagagccgccagaagcctgctgcaggccggcgccgacaaggacgcccaggacaacagagagcagacccccctgttcctggccgccagagagggcgccgtggaggtggcccagctgctgctgggcctgggcgccgccagagagctgagagaccaggccggcctggcccccgccgacgtggcccaccagagaaaccactgggacctgctgaccctgctggagggcgccggcccccccgaggccagacacaaggccacccccggcagagaggccggccccttccccagagccagaaccgtgagcgtgagcgtgcccccccacggcggcggcgccctgcccagatgcagaaccctgagcgccggcgccggccccagaggcggcggcgcctgcctgcaggccagaacctggagcgtggacctggccgccagaggcggcggcgcctacagccactgcagaagcctgagcggcgtgggcgccggcggcggccccacccccagaggcagaagattcagcgccggcatgagaggccccagacccaaccccgccatcatgagaggcagatacggcgtggccgccggcagaggcggcagagtgagcaccgacgactggccctgcgactgggtggccctgggcgcctgcggcagcgccagcaacatccccatcccccccccctgcctgacccccagccccgagagaggcagcccccagctggactgcggcccccccgccctgcaggagatgcccatcaaccagggcggcgagggcaagaagtag

SEQ ID NO: 147579 - DNA, 6009 bp, Artificial Sequence
  derived and/or modified sequence
atgcagccccccagcctgctgctgctgctgctgctgctgctgctgtgcgtgagcgtggtgagacccagaggcctgctgtgcggcagcttccccgagccctgcgccaacggcggcacctgcctgagcctgagcctgggccagggcacctgccagtgcgcccccggcttcctgggcgagacctgccagttccccgacccctgccagaacgcccagctgtgccagaacggcggcagctgccaggccctgctgcccgcccccctgggcctgcccagcagccccagccccctgacccccagcttcctgtgcacctgcctgcccggcttcaccggcgagagatgccaggcccagctggaggacccctgcccccccagcttctgcagcaagagaggcagatgccacatccaggccagcggcagaccccagtgcagctgcatgcccggctggaccggcgagcagtgccagctgagagacttctgcagcgccaacccctgcgtgaacggcggcgtgtgcctggccacctacccccagatccagtgccactgcccccccggcttcgagggccacgcctgcgagagagacgtgaacgagtgcttccaggaccccggcccctgccccaagggcaccagctgccacaacaccctgggcagcttccagtgcctgtgccccgtgggccaggagggccccagatgcgagctgagagccggcccctgcccccccagaggctgcagcaacggcggcacctgccagctgatgcccgagaaggacagcaccttccacctgtgcctgtgcccccccggcttcatcggccccgactgcgaggtgaaccccgacaactgcgtgagccaccagtgccagaacggcggcacctgccaggacggcctggacacctacacctgcctgtgccccgagacctggaccggctgggactgcagcgaggacgtggacgagtgcgagacccagggccccccccactgcagaaacggcggcacctgccagaacagcgccggcagcttccactgcgtgtgcgtgagcggctggggcggcaccagctgcgaggagaacctggacgactgcatcgccgccacctgcgcccccggcagcacctgcatcgacagagtgggcagcttcagctgcctgtgcccccccggcagaaccggcctgctgtgccacctggaggacatgtgcctgagccagccctgccacggcgacgcccagtgcagcaccaaccccctgaccggcagcaccctgtgcctgtgccagcccggctacagcggccccacctgccaccaggacctggacgagtgcctgatggcccagcagggccccagcccctgcgagcacggcggcagctgcctgaacacccccggcagcttcaactgcctgtgcccccccggctacaccggcagcagatgcgaggccgaccacaacgagtgcctgagccagccctgccaccccggcagcacctgcctggacctgctggccaccttccactgcctgtgcccccccggcctggagggccagctgtgcgaggtggagaccaacgagtgcgccagcgccccctgcctgaaccacgccgactgccacgacctgctgaacggcttccagtgcatctgcctgcccggcttcagcggcaccagatgcgaggaggacatcgacgagtgcagaagcagcccctgcgccaacggcggccagtgccaggaccagcccggcgccttccactgcaagtgcctgcccggcttcgagggccccagatgccagaccgaggtggacgagtgcctgagcgacccctgccccgtgggcgccagctgcctggacctgcccggcgccttcttctgcctgtgccccagcggcttcaccggccagctgtgcgaggtgcccctgtgcgcccccaacctgtgccagcccaagcagatctgcaaggaccagaaggacaaggccaactgcctgtgccccgacggcagccccggctgcgccccccccgaggacaactgcacctgccaccacggccactgccagagaagcagctgcgtgtgcgacgtgggctggaccggccccgagtgcgaggccgagctgggcggctgcatcagcgccccctgcgcccacggcggcacctgctacccccagcccagcggctacaactgcacctgccccaccggctacaccggccccacctgcagcgaggagatgaccgcctgccacagcggcccctgcctgaacggcggcagctgcaaccccagccccggcggctactactgcacctgcccccccagccacaccggcccccagtgccagaccagcaccgactactgcgtgagcgccccctgcttcaacggcggcacctgcgtgaacagacccggcaccttcagctgcctgtgcgccatgggcttccagggccccagatgcgagggcaagctgagacccagctgcgccgacagcccctgcagaaacagagccacctgccaggacagcccccagggccccagatgcctgtgccccaccggctacaccggcggcagctgccagaccctgatggacctgtgcgcccagaagccctgccccagaaacagccactgcctgcagaccggccccagcttccactgcctgtgcctgcagggctggaccggccccctgtgcaacctgcccctgagcagctgccagaaggccgccctgagccagggcatcgacgtgagcagcctgtgccacaacggcggcctgtgcgtggacagcggccccagctacttctgccactgcccccccggcttccagggcagcctgtgccaggaccacgtgaacccctgcgagagcagaccctgccagaacggcgccacctgcatggcccagcccagcggctacctgtgccagtgcgcccccggctacgacggccagaactgcagcaaggagctggacgcctgccagagccagccctgccacaaccacggcacctgcacccccaagcccggcggcttccactgcgcctgcccccccggcttcgtgggcctgagatgcgagggcgacgtggacgagtgcctggaccagccctgccaccccaccggcaccgccgcctgccacagcctggccaacgccttctactgccagtgcctgcccggccacaccggccagtggtgcgaggtggagatcgacccctgccacagccagccctgcttccacggcggcacctgcgaggccaccgccggcagccccctgggcttcatctgccactgccccaagggcttcgagggccccacctgcagccacagagcccccagctgcggcttccaccactgccaccacggcggcctgtgcctgcccagccccaagcccggcttcccccccagatgcgcctgcctgagcggctacggcggccccgactgcctgaccccccccgcccccaagggctgcggcccccccagcccctgcctgtacaacggcagctgcagcgagaccaccggcctgggcggccccggcttcagatgcagctgcccccacagcagccccggccccagatgccagaagcccggcgccaagggctgcgagggcagaagcggcgacggcgcctgcgacgccggctgcagcggccccggcggcaactgggacggcggcgactgcagcctgggcgtgcccgacccctggaagggctgccccagccacagcagatgctggctgctgttcagagacggccagtgccacccccagtgcgacagcgaggagtgcctgttcgacggctacgactgcgagaccccccccgcctgcacccccgcctacgaccagtactgccacgaccacttccacaacggccactgcgagaagggctgcaacaccgccgagtgcggctgggacggcggcgactgcagacccgaggacggcgaccccgagtggggccccagcctggccctgctggtggtgctgagcccccccgccctggaccagcagctgttcgccctggccagagtgctgagcctgaccctgagagtgggcctgtgggtgagaaaggacagagacggcagagacatggtgtacccctaccccggcgccagagccgaggagaagctgggcggcaccagagaccccacctaccaggagagagccgccccccagacccagcccctgggcaaggagaccgacagcctgagcgccggcttcgtggtggtgatgggcgtggacctgagcagatgcggccccgaccaccccgccagcagatgcccctgggaccccggcctgctgctgagattcctggccgccatggccgccgtgggcgccctggagcccctgctgcccggccccctgctggccgtgcacccccacgccggcaccgccccccccgccaaccagctgccctggcccgtgctgtgcagccccgtggccggcgtgatcctgctggccctgggcgccctgctggtgctgcagctgatcagaagaagaagaagagagcacggcgccctgtggctgccccccggcttcaccagaagacccagaacccagagcgccccccacagaagaagaccccccctgggcgaggacagcatcggcctgaaggccctgaagcccaaggccgaggtggacgaggacggcgtggtgatgtgcagcggccccgaggagggcgaggaggtgggccaggccgaggagaccggcccccccagcacctgccagctgtggagcctgagcggcggctgcggcgccctgccccaggccgccatgctgacccccccccaggagagcgagatggaggcccccgacctggacaccagaggccccgacggcgtgacccccctgatgagcgccgtgtgctgcggcgaggtgcagagcggcaccttccagggcgcctggctgggctgccccgagccctgggagcccctgctggacggcggcgcctgcccccaggcccacaccgtgggcaccggcgagacccccctgcacctggccgccagattcagcagacccaccgccgccagaagactgctggaggccggcgccaaccccaaccagcccgacagagccggcagaacccccctgcacgccgccgtggccgccgacgccagagaggtgtgccagctgctgctgagaagcagacagaccgccgtggacgccagaaccgaggacggcaccacccccctgatgctggccgccagactggccgtggaggacctggtggaggagctgatcgccgcccaggccgacgtgggcgccagagacaagtggggcaagaccgccctgcactgggccgccgccgtgaacaacgccagagccgccagaagcctgctgcaggccggcgccgacaaggacgcccaggacaacagagagcagacccccctgttcctggccgccagagagggcgccgtggaggtggcccagctgctgctgggcctgggcgccgccagagagctgagagaccaggccggcctggcccccgccgacgtggcccaccagagaaaccactgggacctgctgaccctgctggagggcgccggcccccccgaggccagacacaaggccacccccggcagagaggccggccccttccccagagccagaaccgtgagcgtgagcgtgcccccccacggcggcggcgccctgcccagatgcagaaccctgagcgccggcgccggccccagaggcggcggcgcctgcctgcaggccagaacctggagcgtggacctggccgccagaggcggcggcgcctacagccactgcagaagcctgagcggcgtgggcgccggcggcggccccacccccagaggcagaagattcagcgccggcatgagaggccccagacccaaccccgccatcatgagaggcagatacggcgtggccgccggcagaggcggcagagtgagcaccgacgactggccctgcgactgggtggccctgggcgcctgcggcagcgccagcaacatccccatcccccccccctgcctgacccccagccccgagagaggcagcccccagctggactgcggcccccccgccctgcaggagatgcccatcaaccagggcggcgagggcaagaagtag

SEQ ID NO: 147580 - protein, 943 aa, Artificial Sequence
  derived and/or modified sequence
MARGSALPRRPLLCIPAVWAAAALLLSVSRTSGEVEVLDPNDPLGPLDGQDGPIPTLKGYFLNFLEPVNNITIVQGQTAILHCKVAGNPPPNVRWLKNDAPVVQEPRRIIIRKTEYGSRLRIQDLDTTDTGYYQCVATNGMKTITATGVLFVRLGPTHSPNHNFQDDYHEDGFCQPYRGIACARFIGNRTIYVDSLQMQGEIENRITAAFTMIGTSTHLSDQCSQFAIPSFCHFVFPLCDARSRTPKPRELCRDECEVLESDLCRQEYTIARSNPLILMRLQLPKCEALPMPESPDAANCMRIGIPAERLGRYHQCYNGSGMDYRGTASTTKSGHQCQPWALQHPHSHHLSSTDFPELGGGHAYCRNPGGQMEGPWCFTQNKNVRMELCDVPSCSPRDSSKMGILYILVPSIAIPLVIACLFFLVCMCRNKQKASASTPQRRQLMASPSQDMEMPLINQHKQAKLKEISLSAVRFMEELGEDRFGKVYKGHLFGPAPGEQTQAVAIKTLKDKAEGPLREEFRHEAMLRARLQHPNVVCLLGVVTKDQPLSMIFSYCSHGDLHEFLVMRSPHSDVGSTDDDRTVKSALEPPDFVHLVAQIAAGMEYLSSHHVVHKDLATRNVLVYDKLNVKISDLGLFREVYAADYYKLLGNSLLPIRWMAPEAIMYGKFSIDSDIWSYGVVLWEVFSYGLQPYCGYSNQDVVEMIRNRQVLPCPDDCPAWVYALMIECWNEFPSRRPRFKDIHSRLRAWGNLSNYNSSAQTSGASNTTQTSSLSTSPVSNVSNARYVGPKQKAPPFPQPQFIPMKGQIRPMVPPPQLYVPVNGYQPVPAYGAYLPNFYPVQIPMQMAPQQVPPQMVPKPSSHHSGSGSTSTGYVTTAPSNTSMADRAALLSEGADDTQNAPEDGAQSTVQEAEEEEEGSVPETELLGDCDTLQVDEAQVQLEA

SEQ ID NO: 147581 - DNA, 2832 bp, Artificial Sequence
  derived and/or modified sequence
atggccaggggaagtgccctgccacgccggccgctgctgtgtatccccgcagtatgggcagccgctgccctcctcctgagtgtcagccggacatccggggaggtggaagtgttggatccaaacgatcctctcggtccacttgatggccaggacggacccatccccacccttaaaggttattttctcaatttcttagagcccgtaaacaacataacgatcgtgcagggtcagacagccattctgcactgtaaagtggccggaaacccgcccccaaatgtgcgctggcttaaaaatgatgcccccgtggtgcaagaaccccgtcgcatcatcataagaaagaccgagtatggaagcaggctccgcatccaagatctggatacgactgacactgggtactaccagtgtgtggccacaaacgggatgaaaaccattaccgccactggggtcctttttgtcaggctgggccctacccacagcccaaaccacaactttcaagatgattatcatgaggacggattttgtcagccataccgcggtatcgcctgtgctcgttttataggcaatagaaccatatatgtggactccttgcagatgcagggggaaatagaaaaccggataacggccgcttttacgatgatcgggacatcaactcacctgtcagaccagtgtagccaattcgctataccgtcattttgccatttcgtctttcctttgtgcgatgccaggtcccggacccccaaacctagggagctgtgccgagatgagtgcgaggttctggagtctgatttatgcaggcaagaatacaccattgcacgcagcaaccctctcattctgatgcgcctgcaattacctaaatgtgaggctctccccatgcccgagagtcctgacgcagccaactgcatgcggattgggatcccggccgaaagacttggccgctaccaccagtgttacaacggaagcggaatggattacagaggcaccgcctccaccaccaaatctggacatcaatgtcaaccatgggccctccagcacccccattctcaccacctgtcttccaccgattttcccgagctcggtggtgggcatgcatactgccggaacccagggggccagatggagggaccttggtgtttcacacaaaataaaaatgtgcgaatggagttgtgcgatgtccctagctgctcaccacgcgactcctctaaaatggggattctgtacatcctggtccctagtattgccataccactggttattgcctgcctgttcttcctggtgtgcatgtgccgtaacaaacagaaggcaagtgcgagtactcctcaacgccgccaattgatggcatctcctagccaggacatggagatgccattaatcaaccagcacaaacaggccaaactcaaagaaatctccttgtctgccgtgcgattcatggaggagttgggagaagacaggtttggcaaggtgtataaggggcatctcttcggccccgcccctggggagcagacgcaggcggtggccatcaaaacactcaaggataaggcggagggccctctgagggaagagttccgccacgaggcaatgctgcgagcccggctgcagcaccccaacgtggtgtgtttattgggagtagttacaaaagaccagccactttctatgattttttcttattgttcccacggagatctccacgaattcctagtcatgagaagcccgcattctgacgtgggatctacggatgatgaccggactgtgaagtcagccctggagcctccagatttcgtgcatctggtcgcccagatcgccgccggaatggaatacctgtccagccaccatgtcgttcacaaggatcttgcaacaagaaatgtgctggtatatgacaagctgaacgtgaagatttccgacctgggactcttcagagaggtttatgctgccgattattataaactgctggggaacagcttactacccattagatggatggcccccgaggccataatgtacggaaagttctctatcgactctgatatttggagttatggagttgttctgtgggaggtatttagctatgggctccagccatactgcggttactctaaccaggatgtggtggaaatgataaggaaccgtcaagtgcttccgtgtcccgacgactgcccagcctgggtgtacgccctgatgatcgagtgctggaatgaattcccgagtcggagacctaggttcaaggatatccatagtcggctaagggcctggggaaatctgtctaattacaattcttcagcacagactagtggggcttccaataccacccagacatcatccctatcaacctcaccagtgagcaacgttagtaacgctcggtatgtcgggccaaagcagaaagccccccccttcccacaacctcagttcatacccatgaaagggcagatcagacccatggtgcctccaccgcagctctatgttccagtaaacggataccagcctgtgcctgcttacggggcctatctgcccaacttctatcctgtgcagattcctatgcagatggccccccagcaagtccccccacagatggtgcccaagccctcgtctcaccacagcggatcaggctccaccagcaccggctacgttacaactgcacctagcaacacttctatggccgacagagccgctcttttgtctgagggcgctgatgacacacagaatgcccctgaagatggggcgcagagcaccgtgcaggaagcggaagaagaagaagaaggaagtgtccccgaaactgaactcctcggagactgcgacaccctgcaggtggatgaggcccaggttcagctggaggcctag

SEQ ID NO: 147582 - DNA, 2832 bp, Artificial Sequence
  derived and/or modified sequence
atggcccggggcagcgccctgccccggcggcccctgctgtgcatcccagctgtgtgggccgccgccgccctgctgctgtctgtgtccaggaccagcggggaggtggaggtgctggaccccaatgaccccctgggccccctggatggccaggacggccccatccccaccctgaagggctacttcctgaacttcctggagcctgtgaacaacatcaccatcgtgcagggccagacagccatcctgcactgcaaggtggccggcaaccccccacccaacgtgcgctggctgaagaatgatgcccctgtggtgcaggagccccggcgcatcatcatcaggaagacagaatatggcagccggctgcgcatccaggacctggacaccacagacaccggctactaccagtgtgtggccaccaacggcatgaagaccatcacagccactggagtgctgtttgtgcggctgggccccacccacagccccaaccacaacttccaggatgactaccatgaagatggcttctgccagccctaccggggcatcgcctgtgcccgcttcatcggcaacagaaccatctacgtggacagcctgcagatgcagggcgagattgaaaatcgcatcacagctgccttcaccatgattggcaccagcacccacctgagtgaccagtgcagccagtttgccatccccagcttctgccactttgtgttccccctgtgtgatgcccggagcaggacccccaagccccgggagctgtgcagagatgaatgtgaggtgctggagagtgacctgtgccggcaggagtacaccatcgcccggagcaaccccctcatcctgatgaggctgcagctgcccaagtgtgaggccctgcccatgcctgagagcccagatgctgccaactgcatgagaattggcatcccagctgagcggctgggccgctaccaccagtgctacaacggcagcggcatggactaccggggcacagccagcaccaccaagagcggccaccagtgccagccctgggccctgcagcacccccacagccaccacctgagcagcacagacttccctgagctgggcggcggccacgcctactgcaggaaccctgggggccagatggagggcccctggtgcttcacccagaacaagaatgtgaggatggagctgtgtgatgtgcccagctgcagcccccgggacagcagcaagatgggcatcctgtacatcctggtgcccagcatcgccatccccctggtgattgcctgcctcttcttcctggtgtgcatgtgcaggaacaagcagaaggccagcgccagcaccccccagaggcggcagctgatggccagccccagccaggacatggagatgcccctcatcaaccagcacaagcaggccaagctgaaggagatcagcctgtctgctgtgcgcttcatggaggagctgggagaagatagatttgggaaggtgtacaagggccacctgtttggacctgcccctggagagcagacccaggccgtggccatcaagaccctgaaggacaaggccgagggccccctgcgggaggagttcagacatgaggccatgctgcgggcccggctgcagcaccccaacgtggtgtgcctgctgggcgtggtgaccaaggaccagcccctgtccatgatcttctcctactgcagccacggggacctgcacgagttcctggtgatgaggagcccccacagtgatgtgggcagcacagatgatgacagaacagtgaagagcgccctggagcccccagactttgtgcacctggtggcccagattgctgctggcatggagtacctgagcagccaccacgtggtgcacaaggacctggccaccagaaatgtgctggtgtatgacaagctgaatgtgaagatcagtgacctgggcctcttccgggaggtgtatgctgctgactactacaagctgctgggcaacagcctgctgcccatccgctggatggcccctgaggccatcatgtatggcaagttcagcattgacagcgacatctggagctatggagtggtgctgtgggaggtgttctcctatggcctgcagccctactgcggctacagcaaccaggatgtggtggagatgatccggaaccggcaggtgctgccctgcccagatgactgcccagcctgggtgtatgccctgatgattgagtgctggaatgagttccccagcagaagaccccgcttcaaggacatccacagccggctgcgggcctggggcaacctgagcaactacaacagcagcgcccagaccagcggggccagcaacaccacccagaccagcagcctgagcaccagccctgtgtccaatgtgtccaatgcccgctacgtgggccccaagcagaaggccccacccttcccccagccccagttcatccccatgaagggccagatccggcccatggtgcccccaccccagctgtatgtgcctgtgaatggctaccagcctgtgcctgcctacggggcctacctgcccaacttctaccctgtgcagatccccatgcagatggccccccagcaggtgcccccccagatggtgcccaagcccagcagccaccacagcggcagcggcagcaccagcacaggctacgtgaccacagcccccagcaacacctccatggctgacagagctgccctgctgtctgagggcgcagatgacacccagaatgccccagaagatggagcccagagcacagtgcaggaggccgaggaggaggaggagggctctgtgcctgagacagagctgctgggggactgtgacaccctgcaggtggatgaggcccaggtgcagctggaggcctag

SEQ ID NO: 147583 - DNA, 2832 bp, Artificial Sequence
  derived and/or modified sequence
atggcccggggcagcgccctgccccggcggcccctgctgtgcatccccgccgtgtgggccgcagcagcattgctcctgtcagtttcacggacctccggcgaggtcgaggtgctcgaccccaacgatccactcggccccctggatgggcaggacggacctattcccacccttaagggatactttctaaattttctcgaacctgtgaacaacatcactatcgtccaaggacagactgcgattctgcactgcaaagttgccggtaatccgcccccgaatgtacgctggcttaagaacgatgctcccgtggtgcaagagccccggagaatcattatccgcaaaaccgaatacggatccaggctgaggattcaggaccttgataccacagacaccggatattaccagtgcgtcgccaccaacggaatgaaaaccataactgctacaggggtcctatttgtccgactgggccccacccattcccccaatcacaactttcaggatgattaccacgaagacgggttttgccagccttataggggaatagcttgcgcgaggtttattggaaatcggacaatctacgttgacagcctgcaaatgcagggggaaatagaaaatcgaatcactgcagcctttacgatgatcggtacatctacccacctatccgatcagtgttctcaatttgccatcccatctttctgtcactttgttttccctctctgcgatgctcgatcacggacgcctaagccccgtgaactgtgccgcgatgagtgtgaagtcttagagtccgacctctgcagacaggagtacaccatcgccagatccaatccactcatcctgatgaggttgcagcttccaaagtgtgaagctctgccaatgccagagagccctgacgctgctaattgtatgaggataggcattcccgctgagcgacttggtagataccaccagtgttataacgggtccgggatggactacagggggaccgcatctaccacaaagtccgggcaccagtgccaaccctgggccctgcagcacccacattcacaccatttgagctcgacagatttccccgaattgggcggtgggcatgcttattgccggaatccgggagggcagatggaggggccctggtgctttacacagaataagaatgtgcgcatggagctgtgtgatgtcccttcatgtagccccagagacagcagcaaaatggggattctgtatatattggtcccttctatcgcaatcccactggtgatcgcatgtttattcttcttagtgtgcatgtgtcggaataaacagaaggctagtgcctctaccccacagcgccgtcagctgatggcgagtccttcccaagacatggagatgcctctgatcaatcaacacaagcaggctaagcttaaggagataagtctctccgccgttcggttcatggaagaactgggcgaggacaggtttggtaaggtgtacaaaggtcacctatttggcccagcaccgggagaacaaactcaagccgttgccatcaaaaccctcaaagacaaggctgaaggccctctccgggaagagttccggcatgaagcaatgctgagggccagactgcagcacccaaatgtggtttgcctgttaggagtggtcaccaaagaccagcccctgtctatgatattctcatactgtagccatggggacttacacgagtttttggtgatgcgctcgccacactccgatgtgggctctacagacgatgatagaactgtgaaaagcgccctcgagcctcctgatttcgttcatctggtggcacaaatcgccgccggtatggaatatctgagttctcaccacgtagtgcacaaggatctggccacccgcaacgtgttggtgtatgataagctgaatgtgaaaatctcagacctagggctattccgagaggtgtacgcagcggattattacaagctgctgggtaattccttgctgcccattcgttggatggcccccgaagccatcatgtacggcaagttttcaatcgatagcgatatttggagttatggcgtcgttctgtgggaagtgttctcttacggccttcagccttattgtgggtactctaaccaagatgttgtggagatgattagaaaccgacaagtgctgccatgtcccgatgactgccctgcttgggtgtacgcactaatgattgagtgttggaatgagtttccaagtcgtcgaccccgtttcaaagatatccactctcgcctccgcgcttgggggaatctgagcaattataattctagcgctcagacctccggagcttccaacacaacccagacttccagtctctctacttcacccgtgtccaacgtctccaacgcccgctatgtggggcccaagcaaaaggctccacctttcccacagcctcagtttatcccaatgaaaggacagatacgtccaatggtgcccccaccccagctgtatgtgccggtgaatgggtaccaacccgtgccagcatacggggcctatcttccgaacttttatcccgtacagattcccatgcagatggcacctcaacaggtcccccctcaaatggttcctaagccaagctcccatcactccgggtctggatctacatcgaccgggtatgtaactacagcgcccagtaacacaagcatggctgatcgtgccgcattgctcagtgagggcgcggatgatacccagaacgcccctgaagatggggcgcagagcaccgttcaggaagcagaggaagaagaagagggatctgtgcccgaaaccgagctgctaggcgactgtgacaccctccaggtcgatgaagcccaggttcagctcgaggcttag

SEQ ID NO: 147584 - DNA, 2832 bp, Artificial Sequence
  derived and/or modified sequence
atggcccgtgggagcgcccttccaagacggcctctgctctgcatccccgctgtttgggctgctgccgcactgcttctcagcgtatcccgaacatccggcgaagttgaagtcttagatcctaacgatccacttggtcctctggatggacaggatggaccaataccaactctgaaaggctacttcctgaactttctcgagccggtgaacaacataacaatcgtgcaggggcaaacggccattctgcactgtaaggtggccggaaatccacctcccaatgtgcggtggcttaaaaacgacgcgccagtggtgcaggagccgagacgtattatcattcggaaaaccgagtacgggtcaaggctcaggatacaggatctggacaccactgacactggttactatcagtgcgttgcaacgaatggcatgaagactatcacagccaccggcgtgctgtttgtgcgtcttgggccaacacacagccctaaccataatttccaagacgattatcatgaagacgggttctgtcagccctaccgagggatagcatgcgcacggttcatagggaatcgaacgatatacgtggactctttgcaaatgcagggagaaattgaaaacaggatcacagccgcttttactatgattgggacttccactcatctcagcgatcagtgcagccaatttgcaataccaagtttctgtcattttgtgttccctttgtgtgacgcccgatctcgtactcctaaaccgcgtgagttgtgccgtgacgaatgtgaagtcctggagtcggacctatgcagacaggagtatacaattgcacggtctaaccccctgatactcatgcgcctgcagttgcctaagtgcgaagcgctgcccatgccggagtcgcccgatgcggcaaattgcatgaggattggtatacctgccgagcgtttaggccgatatcatcagtgctataacggctctggcatggactaccgaggcaccgctagcacaactaagtcaggacaccaatgccagccttgggctctccaacacccccattcccaccacctctcatccaccgatttcccggagctggggggaggccacgcttattgtcgcaatccgggaggccagatggaaggaccctggtgttttacacagaacaagaacgttcggatggaactctgcgacgtgccatcctgttccccgagggatagctccaaaatgggaattctctacattctggttccttccatcgccatccccctcgtgatcgcttgtctttttttcttggtgtgcatgtgcagaaacaagcagaaagcctccgcatctaccccccaacgtagacaactgatggccagcccaagccaagacatggagatgcctctgattaaccagcacaaacaggctaaactgaaggaaatcagcctatctgccgtccgctttatggaagagctgggggaggatcgcttcggaaaagtatataagggacacctgtttggacctgcccctggggaacagacccaggctgttgcgattaaaaccctaaaggacaaagctgagggacctttacgcgaggaatttagacacgaggcaatgcttagagccagactgcagcacccaaatgtagtatgcctcctaggtgtcgtgacaaaggatcagccgctgtcgatgatctttagctactgttcccacggtgacttacatgaattcctggttatgcgcagtcctcacagtgatgttggatcaacggacgacgatcgcactgtgaagtccgccttagagcccccagatttcgtacatctggtggcgcagatcgcggctggaatggaatatctgtcaagccatcacgtggtccacaaagacctggctactcgtaacgtattggtatacgataagctgaacgtgaagattagcgacttgggcctattcagggaagtgtacgccgctgattattataagttgctaggaaactccttgctgcccatcaggtggatggcacccgaagccattatgtacgggaagttcagcattgacagtgatatttggtcttacggcgtagtattatgggaggtcttctcttacggccttcaaccgtattgcggatactccaatcaggacgtcgttgagatgattcgcaatcgacaggtcctgccatgtcctgatgactgtcctgcatgggtttacgcccttatgatcgaatgctggaatgagtttccaagccgacgccctagatttaaagatatccatagccgcctgagggcgtggggtaacctgtccaattataacagctctgcacagacttccggggcaagcaacacaacacagacgtcaagcctctctacaagccccgtctctaacgtctctaacgctcggtacgtcggaccaaaacagaaagcaccaccctttccccagccgcaattcattccaatgaagggccaaatcaggcccatggtccctcccccacagctgtatgtgccagtcaacggctaccagccggttcccgcatatggggcttatcttcctaatttctatcccgttcagatcccaatgcagatggcgccacaacaggtacccccacagatggtgcccaaaccaagctctcaccactccggctctggatctacctccactgggtacgtcactacagccccaagcaacacatctatggctgatcgtgccgctctcctgtctgaaggcgcagatgacacgcaaaatgctcccgaggacggggctcagtccactgtgcaggaagcagaggaggaggaagaaggctccgtccctgagacagagcttctgggagactgcgacacactgcaggttgacgaggctcaggttcagttagaagcctag

SEQ ID NO: 147585 - DNA, 4096 bp, Artificial Sequence
  derived and/or modified sequence
agccagcccttgccgtggccggagccgagcggcgcatccgggccggagaagaggacgacgacgaggtcctcgaagtggacccgtttgcgaagcgccagggagaaggaggagcggacgcatcgtagaaaggggtggtggcgcccgaccccgcgccccggcccgaagctctgagggcttcccggcccccactgcctgcggcatggcccggggctcggcgctcccgcggcggccgctgctgtgcatcccggccgtctgggcggccgccgcgcttctgctctcagtgtcccggacttcaggtgaagtggaggttctggatccgaacgaccctttaggaccccttgatgggcaggacggcccgattccaactctgaaaggttactttctgaattttctggagccagtaaacaatatcaccattgtccaaggccagacggcaattctgcactgcaaggtggcaggaaacccaccccctaacgtgcggtggctaaagaatgatgccccggtggtgcaggagccgcggcggatcatcatccggaagacagaatatggttcacgactgcgaatccaggacctggacacgacagacactggctactaccagtgcgtggccaccaacgggatgaagaccattaccgccactggcgtcctgtttgtgcggctgggtccaacgcacagcccaaatcataactttcaggatgattaccacgaggatgggttctgccagccttaccggggaattgcctgtgcacgcttcattggcaaccggaccatttatgtggactcgcttcagatgcagggggagattgaaaaccgaatcacagcggccttcaccatgatcggcacgtctacgcacctgtcggaccagtgctcacagttcgccatcccatccttctgccacttcgtgtttcctctgtgcgacgcgcgctcccggacacccaagccgcgtgagctgtgccgcgacgagtgcgaggtgctggagagcgacctgtgccgccaggagtacaccatcgcccgctccaacccgctcatcctcatgcggcttcagctgcccaagtgtgaggcgctgcccatgcctgagagccccgacgctgccaactgcatgcgcattggcatcccagccgagaggctgggccgctaccatcagtgctataacggctcaggcatggattacagaggaacggcaagcaccaccaagtcaggccaccagtgccagccgtgggccctgcagcacccccacagccaccacctgtccagcacagacttccctgagcttggaggggggcacgcctactgccggaaccccggaggccagatggagggcccctggtgctttacgcagaataaaaacgtacgcatggaactgtgtgacgtaccctcgtgtagtccccgagacagcagcaagatggggattctgtacatcttggtccccagcatcgcaattccactggtcatcgcttgccttttcttcttggtttgcatgtgccggaataagcagaaggcatctgcgtccacaccgcagcggcgacagctgatggcctcgcccagccaagacatggaaatgcccctcattaaccagcacaaacaggccaaactcaaagagatcagcctgtctgcggtgaggttcatggaggagctgggagaggaccggtttgggaaagtctacaaaggtcacctgttcggccctgccccgggggagcagacccaggctgtggccatcaaaacgctgaaggacaaagcggaggggcccctgcgggaggagttccggcatgaggctatgctgcgagcacggctgcaacaccccaacgtcgtctgcctgctgggcgtggtgaccaaggaccagcccctgagcatgatcttcagctactgttcgcacggcgacctccacgaattcctggtcatgcgctcgccgcactcggacgtgggcagcaccgatgatgaccgcacggtgaagtccgccctggagccccccgacttcgtgcaccttgtggcacagatcgcggcggggatggagtacctatccagccaccacgtggttcacaaggacctggccacccgcaatgtgctagtgtacgacaagctgaacgtgaagatctcagacttgggcctcttccgagaggtgtatgccgccgattactacaagctgctggggaactcgctgctgcctatccgctggatggccccagaggccatcatgtacggcaagttctccatcgactcagacatctggtcctacggtgtggtcctgtgggaggtcttcagctacggcctgcagccctactgcgggtactccaaccaggatgtggtggagatgatccggaaccggcaggtgctgccttgccccgatgactgtcccgcctgggtgtatgccctcatgatcgagtgctggaacgagttccccagccggcggccccgcttcaaggacatccacagccggctccgagcctggggcaacctttccaactacaacagctcggcgcagacctcgggggccagcaacaccacgcagaccagctccctgagcaccagcccagtgagcaatgtgagcaacgcccgctacgtggggcccaagcagaaggccccgcccttcccacagccccagttcatccccatgaagggccagatcagacccatggtgcccccgccgcagctctacgtccccgtcaacggctaccagccggtgccggcctatggggcctacctgcccaacttctacccggtgcagatcccaatgcagatggccccgcagcaggtgcctcctcagatggtccccaagcccagctcacaccacagtggcagtggctccaccagcacaggctacgtcaccacggccccctccaacacatccatggcagacagggcagccctgctctcagagggcgctgatgacacacagaacgccccagaagatggggcccagagcaccgtgcaggaagcagaggaggaggaggaaggctctgtcccagagactgagctgctgggggactgtgacactctgcaggtggacgaggcccaagtccagctggaagcttgagtggcaccagggcccggggttcggggatagaagccccgccgagaccccacagggacctcagtcacctttgagaagacaccatactcagcaatcacaagagcccgccggccagtgggcttgtttgcagactgggtgaggtggagccctgctcctctctgtcctctgacacagagagctgccctgcctaggagcacccaagccaggcagggggtctggcagcacggcgtcctggggagcaggacacatggtcatccccagggctgtatacattgattctggtggtagactggtagtgagcagcaaatgcctttcaagaaaataggtggcagcttcactccatgtcatatatggagtgaatatttcaaaacgttgggaataagggcctgcaaaaggcagcgaggaggcacctcgggtcttgaggttcctgacaaccgatctggtctgttggtttgaggatgaaggggctccatttctgctgcctccctgctgagaatattctccctttagcagccaaagattcgctggaacggaggctgccctctgctgcctgttggggtcggaagacaaggggcttctgaaatgggagttcctgagatacaacaaaatgtgtgccttcaaagaaactgacagctttgtatttggtgaaatggttttaattatactccatgtgtattttgcccactttttttgggaattcaagggaaagtgtttcttgggtttggaatgttcagaggaagcagtattgtacagaacacggtattgttatttttgttaagaatcatgtacagagcttaaatgtaatttatatgtttttaatatgccattttcattgaagtattttggtcttaagatgactttagtaatttaactgtttatgttacccacgttgggatccagttggtcttggtttgcttctctctgtaccacgtgcacatgaggtccattcattttacagcccctgttacacacagacccacaggcagccgtctgtgccccgcacacattgttggtcctatttgtaaatcccacacccggtgtatccaataaagtgaaacaaagcatgtg

SEQ ID NO: 147586 - DNA, 2832 bp, Artificial Sequence
  derived and/or modified sequence
atggccagaggcagcgccctgcccagaagacccctgctgtgcatccccgccgtgtgggccgccgccgccctgctgctgagcgtgagcagaaccagcggcgaggtggaggtgctggaccccaacgaccccctgggccccctggacggccaggacggccccatccccaccctgaagggctacttcctgaacttcctggagcccgtgaacaacatcaccatcgtgcagggccagaccgccatcctgcactgcaaggtggccggcaaccccccccccaacgtgagatggctgaagaacgacgcccccgtggtgcaggagcccagaagaatcatcatcagaaagaccgagtacggcagcagactgagaatccaggacctggacaccaccgacaccggctactaccagtgcgtggccaccaacggcatgaagaccatcaccgccaccggcgtgctgttcgtgagactgggccccacccacagccccaaccacaacttccaggacgactaccacgaggacggcttctgccagccctacagaggcatcgcctgcgccagattcatcggcaacagaaccatctacgtggacagcctgcagatgcagggcgagatcgagaacagaatcaccgccgccttcaccatgatcggcaccagcacccacctgagcgaccagtgcagccagttcgccatccccagcttctgccacttcgtgttccccctgtgcgacgccagaagcagaacccccaagcccagagagctgtgcagagacgagtgcgaggtgctggagagcgacctgtgcagacaggagtacaccatcgccagaagcaaccccctgatcctgatgagactgcagctgcccaagtgcgaggccctgcccatgcccgagagccccgacgccgccaactgcatgagaatcggcatccccgccgagagactgggcagataccaccagtgctacaacggcagcggcatggactacagaggcaccgccagcaccaccaagagcggccaccagtgccagccctgggccctgcagcacccccacagccaccacctgagcagcaccgacttccccgagctgggcggcggccacgcctactgcagaaaccccggcggccagatggagggcccctggtgcttcacccagaacaagaacgtgagaatggagctgtgcgacgtgcccagctgcagccccagagacagcagcaagatgggcatcctgtacatcctggtgcccagcatcgccatccccctggtgatcgcctgcctgttcttcctggtgtgcatgtgcagaaacaagcagaaggccagcgccagcaccccccagagaagacagctgatggccagccccagccaggacatggagatgcccctgatcaaccagcacaagcaggccaagctgaaggagatcagcctgagcgccgtgagattcatggaggagctgggcgaggacagattcggcaaggtgtacaagggccacctgttcggccccgcccccggcgagcagacccaggccgtggccatcaagaccctgaaggacaaggccgagggccccctgagagaggagttcagacacgaggccatgctgagagccagactgcagcaccccaacgtggtgtgcctgctgggcgtggtgaccaaggaccagcccctgagcatgatcttcagctactgcagccacggcgacctgcacgagttcctggtgatgagaagcccccacagcgacgtgggcagcaccgacgacgacagaaccgtgaagagcgccctggagccccccgacttcgtgcacctggtggcccagatcgccgccggcatggagtacctgagcagccaccacgtggtgcacaaggacctggccaccagaaacgtgctggtgtacgacaagctgaacgtgaagatcagcgacctgggcctgttcagagaggtgtacgccgccgactactacaagctgctgggcaacagcctgctgcccatcagatggatggcccccgaggccatcatgtacggcaagttcagcatcgacagcgacatctggagctacggcgtggtgctgtgggaggtgttcagctacggcctgcagccctactgcggctacagcaaccaggacgtggtggagatgatcagaaacagacaggtgctgccctgccccgacgactgccccgcctgggtgtacgccctgatgatcgagtgctggaacgagttccccagcagaagacccagattcaaggacatccacagcagactgagagcctggggcaacctgagcaactacaacagcagcgcccagaccagcggcgccagcaacaccacccagaccagcagcctgagcaccagccccgtgagcaacgtgagcaacgccagatacgtgggccccaagcagaaggccccccccttcccccagccccagttcatccccatgaagggccagatcagacccatggtgccccccccccagctgtacgtgcccgtgaacggctaccagcccgtgcccgcctacggcgcctacctgcccaacttctaccccgtgcagatccccatgcagatggccccccagcaggtgcccccccagatggtgcccaagcccagcagccaccacagcggcagcggcagcaccagcaccggctacgtgaccaccgcccccagcaacaccagcatggccgacagagccgccctgctgagcgagggcgccgacgacacccagaacgcccccgaggacggcgcccagagcaccgtgcaggaggccgaggaggaggaggagggcagcgtgcccgagaccgagctgctgggcgactgcgacaccctgcaggtggacgaggcccaggtgcagctggaggcctag

SEQ ID NO: 147587 - protein, 267 aa, Artificial Sequence
  derived and/or modified sequence
MPRAFLVKKPCVSTCKRNWSELPDEERGEIYVPVSLGFCPPQPYREPEPSVAEPPSCPLALNMSLRDSSYSMAPGPCVVAQLPSEDMGHLTDPQSRDHGFLRTKMKVTLGDSPSGDLFTCRVCQKAFTYQRMLNRHMKCHNDVKRHLCTYCGKGFNDTFDLKRHVRTHTGVRPYKCSLCDKAFTQRCSLESHLKKIHGVQQKYAYKERRAKLYVCEECGCTSESQEGHVLHLKEHHPDSPLLRKTSKKVAVALQNTVTSLLQGSPHL

SEQ ID NO: 147588 - DNA, 3007 bp, Artificial Sequence
  derived and/or modified sequence
ggctcgcactttaagacttcccgagcggcggcggggacgccagtcgagccgggagacgcttacctgccgcttccccgcgccgcccggtgcacctggccgcaagggacctcgttctcagggaagacggcgacattccgcggaggtggaaccgccgcgcgccgtccgggctcggaccttccccggaacgtgggggcgccttagcgactccttccctgttgtgcccccgttcccggcgttcagcccggccccgcaaaggtgggacggctcccggcttcagttacggaagcggcccgtgtccagcgacgagggttcgaaaatgccccgcgcgttcctggtgaagaagccgtgcgtctccacgtgcaagaggaactggagcgagctccccgacgaggagcgcggcgagatctacgtgccagtcagcctgggcttctgcccaccacagccctaccgggagccggaaccctctgtggccgaacccccttcctgcccgctggctttgaacatgagccttcgagactctagctacagcatggcccccgggccctgtgtggtggcccagctgccctctgaagacatgggccacttgacagacccccagagcagagaccatggcttcctgcgcaccaagatgaaggtgacccttggggacagtcccagtggagacctgttcacctgccgtgtctgccagaaggccttcacctaccagcgcatgctgaaccgccacatgaagtgtcacaacgacgtcaagaggcacctctgcacgtactgcgggaagggcttcaatgacaccttcgacctcaagagacacgtccgaactcacactggcgtgcggccctacaagtgcagcctgtgtgacaaggccttcacgcagcgctgctctctggagtctcacctcaagaagatccatggtgtgcagcagaagtacgcgtacaaggagcggcgggccaagctgtacgtgtgtgaggagtgcggctgcacatctgagagccaggagggccacgtcctgcacctgaaggagcaccaccctgacagcccgctgctgcgcaagacctccaagaaggtggccgtggcactacagaacactgtcacttccctgctgcagggcagcccccacctgtgagtggctcgagccctgggggtgctcctggaagccccaagagcatccaggattgcctcccagctgcctggccagcccaccctcctgcaacctctcacccgaacaccagtgatcaggactggagcccccgtgccttggtctcccccctgggcacacgtgctcactcaggcccagcaatgacctctgctcatttttgcatttttgacttatgggccgaggctgttctgagcctgggaagatgtacctatgtcaagagaagggatgaggccaaggctgccttcaattagaagcagccgcccacagagacaggcactgtgtgcctggcagcaggacttcctacccagaggaggttcgagctaggatcccactgcccccgcctctcagcacagggcaggggctgcaggtccccagtggacatcagagtcaaaagcactggcaaagggtacccctgcaaacaactgtggtgggggctggcagcagaccccccacctggcagggcttctaatgctcagggttctggagggctctgtccttccggcaaggagaggcacacatgtgtgcccagccgtgtgtgtgcgtgtgcttgtgtgtgtgcactgctgtgtgtgtgtgcacgcacaggaagcctttccacatatcacctcatttctaagaaataaactacaaggtgccaagaaggttttatttccttttattttttaaagatgacaaatgtacagatgttaatatatttttggtgccaatggcgatgtttttaagagtgggatggagctggcttttctccattcccgtgcgcttctatttatcctggacatttcaaacctcctctgtgccttggctctgggcgggggctgccccaacccacccccgttctttgtacgtgctgagacagccactagaagatcttcctccagcggcgccctggacggctgctcctgcgaacagcccatggcatcttctgctcttccctcccggctctgccctgcacatcctgttgagccaagccccagtgacccggagagctggcctgatgctgagagtgtgtcctcctggggctttagggggcaggaaggtgggacgaatgacgatgcccatccactacctgaagcactaggacactcttgcagggccaggctggaagaccggcccttttcttggttgagtcaaaagccttagcacagtggcaaaaaatgggacagaatgatgaccagcacctcagaaacttccagagggaggagaggatttgatggctaccaaattgtatctgttgccttttttctgactttttcacctgaccaggctggggtttggagtggctgtggggagacccgtcctggctggctggctggctcccttgctcccttgctgcagctgggaaaggggttctgggtgtaaagaggtgtgcgtcttgtgggccaaagggaaaaacaggcaggggtcagagccagcctgccagaggcaaatgcaaaagaggtccccagaacacagccagctgggcagccccttaaagccaaaccccacctgaagcagaaccactttggcctcccctgcccaaaatgggtagtgtctacacgtccccgggctcaggctcaggcccagccctgggctgacctgagaggaaggctccttcctggactgccctctgaaatgtgtatagattgattctaaaatctcttgtttcacttgactttagagtgtctgggacgctgctgtattctgaaagtcacatagcacacagtaatgttatctggaagctctgtttttgtttacatttctgtatccctgggttgactgccaatccgaggccgtcatgaagctctgtgttgtctgttttattttataaccttcctctcaactattaaaattagagatctaaaaaaaaaaaaaaaa

SEQ ID NO: 147589 - DNA, 804 bp, Artificial Sequence
  derived and/or modified sequence
atgcccagagccttcctggtgaagaagccctgcgtgagcacctgcaagagaaactggagcgagctgcccgacgaggagagaggcgagatctacgtgcccgtgagcctgggcttctgccccccccagccctacagagagcccgagcccagcgtggccgagccccccagctgccccctggccctgaacatgagcctgagagacagcagctacagcatggcccccggcccctgcgtggtggcccagctgcccagcgaggacatgggccacctgaccgacccccagagcagagaccacggcttcctgagaaccaagatgaaggtgaccctgggcgacagccccagcggcgacctgttcacctgcagagtgtgccagaaggccttcacctaccagagaatgctgaacagacacatgaagtgccacaacgacgtgaagagacacctgtgcacctactgcggcaagggcttcaacgacaccttcgacctgaagagacacgtgagaacccacaccggcgtgagaccctacaagtgcagcctgtgcgacaaggccttcacccagagatgcagcctggagagccacctgaagaagatccacggcgtgcagcagaagtacgcctacaaggagagaagagccaagctgtacgtgtgcgaggagtgcggctgcaccagcgagagccaggagggccacgtgctgcacctgaaggagcaccaccccgacagccccctgctgagaaagaccagcaagaaggtggccgtggccctgcagaacaccgtgaccagcctgctgcagggcagcccccacctgtag

SEQ ID NO: 147590 - DNA, 804 bp, Artificial Sequence
  derived and/or modified sequence
atgcctagggcttttcttgtcaaaaagccatgcgtttccacttgcaaaagaaactggagtgagctgccagacgaagaacggggcgagatttatgttccggtctcactcggcttttgtcccccacagccatatcgggaaccggagccttctgtggccgagcccccgagctgtcctctggctttgaacatgtccctgagagacagctcctactctatggcaccaggcccatgtgtggtcgctcagttaccaagcgaggatatgggccacttgacagacccccagtctcgtgatcacgggtttctcaggaccaaaatgaaagtgacacttggcgattctcccagtggagacctgtttacttgcagagtttgtcagaaagccttcacttaccagcggatgttgaatcgtcatatgaagtgccataacgacgtgaagcgccacctctgcacttactgcggcaaagggttcaacgacacatttgatctgaaacgacacgtgcgtacacataccggcgtgaggccttataagtgtagcctttgcgacaaagcctttactcagagatgtagcctggagagccaccttaagaaaatccacggggtgcagcagaagtacgcctataaggaacgccgtgccaaactctacgtgtgcgaggaatgtgggtgtacttccgagagccaggagggacacgttctgcaccttaaagagcatcatccagactcacccctactgcggaaaacctccaaaaaggtggctgtggcactgcagaatactgtgacatcacttctgcagggctctccacacctgtag

SEQ ID NO: 147591 - DNA, 804 bp, Artificial Sequence
  derived and/or modified sequence
atgccccgggccttcctggtgaagaagccctgtgtgtccacctgcaagaggaactggagcgagctgcctgatgaggagcggggggagatctacgtgcctgtgtccctgggcttctgccccccccagccctaccgggagcctgagcccagcgtggccgagccccccagctgccccctggccctgaacatgagcctgcgggacagcagctacagcatggcccctggcccctgtgtggtggcccagctgcccagcgaggacatgggccacctgacagacccccagagccgggaccacggcttcctgcggaccaagatgaaggtgaccctgggggacagccccagcggggacctcttcacctgccgggtgtgccagaaggccttcacctaccagaggatgctgaacagacacatgaagtgccacaatgatgtgaagaggcacctgtgcacctactgtgggaagggcttcaatgacacctttgacctgaagagacatgtgaggacccacactggagtgcggccctacaagtgcagcctgtgtgacaaggccttcacccagcgctgcagcctggagagccacctgaagaagatccatggagtgcagcagaagtatgcctacaaggagcggcgggccaagctgtatgtgtgtgaagaatgtggctgcaccagcgagagccaggagggccacgtgctgcacctgaaggagcaccacccagacagccccctgctgaggaagaccagcaagaaggtggccgtggccctgcagaacacagtgaccagcctgctgcagggcagcccccacctgtag

SEQ ID NO: 147592 - DNA, 804 bp, Artificial Sequence
  derived and/or modified sequence
atgccccgggccttcctggtgaagaagccctgcgtgagcacctgcaaacgaaactggtctgagctgcccgatgaggaacggggcgagatttatgtgcctgtcagcttaggattctgtcctccccagccatacagggagccagaacccagtgtcgcagagccaccttcgtgtcctctggccctgaatatgtctctgcgcgactccagctatagtatggctccaggaccatgtgtggtcgctcagctgccctccgaagacatgggccatctgacagatccccaaagccgagatcacggattcctccgtaccaagatgaaggtgacactaggtgatagtccgagtggcgatctctttacctgccgagtgtgtcaaaaggcttttacctatcagagaatgctgaaccgccatatgaaatgtcacaatgacgtcaagagacatctgtgtacatattgtgggaagggctttaacgacaccttcgatctcaagcgccacgttcgcacccacaccggggtgcggccttacaagtgcagcctgtgtgataaagcctttacccagcgctgcagtctggaatcccacctgaaaaagattcacggagtgcagcagaaatatgcgtataaagagaggcgcgccaagctgtatgtgtgtgaggaatgtggttgcaccagcgagtcacaagaggggcatgttctccatctgaaagagcaccaccccgattctcctctactccggaagacctctaagaaggttgcagtcgcactccagaacacagtcacatcgcttctgcaggggtcaccacacttgtag

SEQ ID NO: 147593 - DNA, 804 bp, Artificial Sequence
  derived and/or modified sequence
atgccacgagcatttctggtaaaaaagccctgcgtttctacttgcaagcgtaactggagtgagctgccagacgaagaacgcggtgagatctatgtgccggtttctcttggcttctgtcctcctcagccctatcgggagcccgaaccgtcagtagcagagcctccctcctgtcctcttgccctgaatatgagtctgcgcgactcatcctactctatggcccctggcccttgcgtggtggcacaacttccaagcgaggatatggggcacctgacagatcctcaatctagggatcacggtttcctgcggacgaaaatgaaggtgacccttggagatagtcccagcggcgatttgttcacttgcagggtgtgtcagaaggcctttacttaccagcggatgctgaaccggcatatgaaatgccataatgacgtgaaacgacatctgtgcacttactgcggcaagggattcaatgacaccttcgatctgaagcgccacgttaggacgcatacaggggttagaccatacaaatgcagtctctgcgataaggcctttacccagaggtgcagtctggagagtcatctgaagaaaattcacggagtgcagcaaaagtacgcctataaggaacgccgagccaaactctatgtttgcgaggaatgtgggtgcacgtccgaatctcaagaggggcacgtattgcacctcaaggaacatcatcccgattcccccctgttacgcaagacttcaaaaaaggtcgctgtggctctacagaatacagtgacgtctctcttacagggtagcccacatctgtag

SEQ ID NO: 147594 - DNA, 3034 bp, Artificial Sequence
  derived and/or modified sequence
ccgccgcgagccaataaagcgtgaacccgtccgtccggctcgcactttaagacttcccgagcggcggcggggacgccagtcgagccgggagacgcttacctgccgcttccccgcgccgcccggtgcacctggccgcaagggacctcgttctcagggaagacggcgacattccgcggaggtggaaccgccgcgcgccgtccgggctcggaccttccccggaacgtgggggcgccttagcgactccttccctgttgtgcccccgttcccggcgttcagcccggccccgcaaaggtgggacggctcccggcttcagttacggaagcggcccgtgtccagcgacgagggttcgaaaatgccccgcgcgttcctggtgaagaagccgtgcgtctccacgtgcaagaggaactggagcgagctccccgacgaggagcgcggcgagatctacgtgccagtcagcctgggcttctgcccaccacagccctaccgggagccggaaccctctgtggccgaacccccttcctgcccgctggctttgaacatgagccttcgagactctagctacagcatggcccccgggccctgtgtggtggcccagctgccctctgaagacatgggccacttgacagacccccagagcagagaccatggcttcctgcgcaccaagatgaaggtgacccttggggacagtcccagtggagacctgttcacctgccgtgtctgccagaaggccttcacctaccagcgcatgctgaaccgccacatgaagtgtcacaacgacgtcaagaggcacctctgcacgtactgcgggaagggcttcaatgacaccttcgacctcaagagacacgtccgaactcacactggcgtgcggccctacaagtgcagcctgtgtgacaaggccttcacgcagcgctgctctctggagtctcacctcaagaagatccatggtgtgcagcagaagtacgcgtacaaggagcggcgggccaagctgtacgtgtgtgaggagtgcggctgcacatctgagagccaggagggccacgtcctgcacctgaaggagcaccaccctgacagcccgctgctgcgcaagacctccaagaaggtggccgtggcactacagaacactgtcacttccctgctgcagggcagcccccacctgtgagtggctcgagccctgggggtgctcctggaagccccaagagcatccaggattgcctcccagctgcctggccagcccaccctcctgcaacctctcacccgaacaccagtgatcaggactggagcccccgtgccttggtctcccccctgggcacacgtgctcactcaggcccagcaatgacctctgctcatttttgcatttttgacttatgggccgaggctgttctgagcctgggaagatgtacctatgtcaagagaagggatgaggccaaggctgccttcaattagaagcagccgcccacagagacaggcactgtgtgcctggcagcaggacttcctacccagaggaggttcgagctaggatcccactgcccccgcctctcagcacagggcaggggctgcaggtccccagtggacatcagagtcaaaagcactggcaaagggtacccctgcaaacaactgtggtgggggctggcagcagaccccccacctggcagggcttctaatgctcagggttctggagggctctgtccttccggcaaggagaggcacacatgtgtgcccagccgtgtgtgtgcgtgtgcttgtgtgtgtgcactgctgtgtgtgtgtgcacgcacaggaagcctttccacatatcacctcatttctaagaaataaactacaaggtgccaagaaggttttatttccttttattttttaaagatgacaaatgtacagatgttaatatatttttggtgccaatggcgatgtttttaagagtgggatggagctggcttttctccattcccgtgcgcttctatttatcctggacatttcaaacctcctctgtgccttggctctgggcgggggctgccccaacccacccccgttctttgtacgtgctgagacagccactagaagatcttcctccagcggcgccctggacggctgctcctgcgaacagcccatggcatcttctgctcttccctcccggctctgccctgcacatcctgttgagccaagccccagtgacccggagagctggcctgatgctgagagtgtgtcctcctggggctttagggggcaggaaggtgggacgaatgacgatgcccatccactacctgaagcactaggacactcttgcagggccaggctggaagaccggcccttttcttggttgagtcaaaagccttagcacagtggcaaaaaatgggacagaatgatgaccagcacctcagaaacttccagagggaggagaggatttgatggctaccaaattgtatctgttgccttttttctgactttttcacctgaccaggctggggtttggagtggctgtggggagacccgtcctggctggctggctggctcccttgctcccttgctgcagctgggaaaggggttctgggtgtaaagaggtgtgcgtcttgtgggccaaagggaaaaacaggcaggggtcagagccagcctgccagaggcaaatgcaaaagaggtccccagaacacagccagctgggcagccccttaaagccaaaccccacctgaagcagaaccactttggcctcccctgcccaaaatgggtagtgtctacacgtccccgggctcaggctcaggcccagccctgggctgacctgagaggaaggctccttcctggactgccctctgaaatgtgtatagattgattctaaaatctcttgtttcacttgactttagagtgtctgggacgctgctgtattctgaaagtcacatagcacacagtaatgttatctggaagctctgtttttgtttacatttctgtatccctgggttgactgccaatccgaggccgtcatgaagctctgtgttgtctgttttattttataaccttcctctcaactattaaaattagagatctaatgttt

SEQ ID NO: 147595 - protein, 274 aa, Artificial Sequence
  derived and/or modified sequence
MSGECQSPHCPGTSAEFFFKCGAHPTSDKETSVALHLIATNSRNITCITCTDVRSPVLVFQCNSRHVICLDCFHLYCVTRLNDRQFVHDPQLGYSLPCVAGCPNSLIKELHHFRILGEEQYNRYQQYGAEECVLQMGGVLCPRPGCGAGLLPEPDQRKVTCEGGNGLGCGFAFCRECKEAYHEGECSAVFEASGTTTQAYRVDERAAEQARWEAASKETIKKTTKPCPRCHVPVEKNGGCMHMKCPQPQCRLEWCWNCGCEWNRVCMGDHWFDV

SEQ ID NO: 147596 - protein, 465 aa, Artificial Sequence
  derived and/or modified sequence
MIVFVRFNSSHGFPVEVDSDTSIFQLKEVVAKRQGVPADQLRVIFAGKELRNDWTVQNCDLDQQSIVHIVQRPWRKGQEMNATGGDDPRNAAGGCEREPQSLTRVDLSSSVLPGDSVGLAVILHTDSRKDSPPAGSPAGRSIYNSFYVYCKGPCQRVQPGKLRVQCSTCRQATLTLTQGPSCWDDVLIPNRMSGECQSPHCPGTSAEFFFKCGAHPTSDKETSVALHLIATNSRNITCITCTDVRSPVLVFQCNSRHVICLDCFHLYCVTRLNDRQFVHDPQLGYSLPCVAGCPNSLIKELHHFRILGEEQYNRYQQYGAEECVLQMGGVLCPRPGCGAGLLPEPDQRKVTCEGGNGLGCGFAFCRECKEAYHEGECSAVFEASGTTTQAYRVDERAAEQARWEAASKETIKKTTKPCPRCHVPVEKNGGCMHMKCPQPQCRLEWCWNCGCEWNRVCMGDHWFDV

SEQ ID NO: 147597 - protein, 203 aa, Artificial Sequence
  derived and/or modified sequence
MSGECQSPHCPGTSAEFFFKCGAHPTSDKETSVALHLIATNSRNITCITCTDVRSPVLVFQCNSRHVICLDCFHLYCVTRLNDRQFVHDPQLGYSLPCVAGCPNSLIKELHHFRILGEEQYNRYQQYGAEECVLQMGGVLCPRPGCGAGLLPEPDQRKVTCEGGNGLGCGFAFCRECKEAYHEGECSAVFEASGTTTQHSGCT

SEQ ID NO: 147598 - DNA, 1398 bp, Artificial Sequence
  derived and/or modified sequence
atgatcgtttttgtgaggtttaactccagtcatggtttccccgttgaggtagatagtgatacatccatattccagttaaaggaagtggtagccaaacgtcagggggttccggccgaccagctgcgcgtgatatttgctgggaaagagctgcggaatgactggactgtgcagaactgcgacctcgaccagcaatcgatagtacacatcgtgcagagaccctggaggaaagggcaagaaatgaacgcaacaggtggggatgatccacgaaatgctgccggtggctgcgagcgagaacctcagtccctgacccgcgtagacctcagctctagcgtgctacctggggatagcgttggcttggcagtcatacttcacacagatagcaggaaagacagcccccctgcaggaagtcctgctggccggagcatttacaactcgttttatgtctactgtaaaggcccctgtcagcgggtccagcccggaaaactgagggtgcaatgtagcacgtgtcggcaagccaccctaactctgacacagggtcctagctgctgggacgacgttctcattcctaaccgaatgtcaggggagtgtcaaagcccacactgtcctggcacttcagcagagttcttcttcaagtgcggtgcccatccgacttccgataaagagactagcgtagcgctgcacttaatagccacgaacagccgcaatattacatgtattacatgcactgatgtgaggtcccctgtccttgtcttccaatgcaatagcaggcatgtcatctgcttagactgtttccacctttactgcgtgacacgcctcaacgaccgccagttcgtccacgatcctcagctgggttattcactgccttgcgtcgccggctgtccaaacagcttgattaaggaattacaccatttccggattttaggcgaggagcaatacaacagatatcagcagtatggcgccgaggagtgcgtcctgcagatgggaggcgtcctgtgccccagacccgggtgcggggccggactgctgccagagccggaccagcgcaaagtcacctgtgagggtgggaatggcttagggtgcggttttgcattttgccgtgaatgtaaggaggcttatcatgagggggagtgctctgccgtattcgaagcatctggtaccactactcaggcctaccgcgtcgatgagagagctgcagagcaggccaggtgggaggccgcctccaaggagaccatcaagaaaacaactaagccatgtcctcggtgtcacgttcctgtcgaaaaaaatggtggctgcatgcatatgaagtgcccccagccacaatgccgactcgagtggtgttggaactgcggatgtgagtggaaccgcgtgtgtatgggagaccattggttcgatgtatag

SEQ ID NO: 147599 - DNA, 1398 bp, Artificial Sequence
  derived and/or modified sequence
atgattgtgtttgtgcgcttcaacagcagccacggcttccctgtggaggtggacagcgacaccagcatcttccagctgaaggaggtggtggccaagaggcagggcgtgcctgctgaccagctgcgggtcatctttgctgggaaggagctgagaaatgactggacagtgcagaactgtgacctggaccagcagagcatcgtgcacatcgtgcagaggccctggaggaagggccaggagatgaatgccactggaggagatgaccccagaaatgctgctgggggctgtgagcgggagccccagagcctgaccagggtggacctgagcagctctgtgctgcccggggacagcgtgggcctggccgtcatcctgcacacagacagcaggaaggacagccccccagctggcagccctgctggccgcagcatctacaacagcttctacgtgtactgcaagggcccctgccagagggtgcagcccgggaagctgcgggtgcagtgcagcacctgccggcaggccaccctgaccctgacccagggccccagctgctgggatgatgtgctgatccccaacaggatgtctggagagtgccagagcccccactgccccggcaccagcgctgagttcttcttcaagtgtggggcccaccccaccagtgacaaggagacctctgtggccctgcacctgattgccaccaacagcaggaacatcacctgcatcacctgcacagatgtgcgcagccctgtgctggtgttccagtgcaacagcagacatgtgatctgcctggactgcttccacctgtactgtgtgacccggctgaatgaccggcagtttgtgcatgacccccagctgggctacagcctgccctgtgtggccggctgccccaacagcctcatcaaggagctgcaccacttccgcatcctgggggaggagcagtacaaccgctaccagcagtacggggctgaggagtgtgtgctgcagatgggcggcgtgctgtgccccaggcctggctgtggggccggcctgctgcctgagccagaccagaggaaggtgacctgtgagggcggcaatggcctgggctgcggctttgccttctgccgggagtgcaaggaggcctaccatgaaggagagtgcagcgctgtgtttgaggccagcggcaccaccacccaggcctacagagtggatgaaagagctgctgagcaggcccgctgggaggccgccagcaaggagaccatcaagaagaccaccaagccctgcccccgctgccacgtgcctgtggagaagaatggaggctgcatgcacatgaagtgcccccagccccagtgccgcctggagtggtgctggaactgtggctgtgagtggaacagagtgtgcatgggagaccactggtttgatgtgtag

SEQ ID NO: 147600 - DNA, 1398 bp, Artificial Sequence
  derived and/or modified sequence
atgatcgtgttcgtgcggttcaacagcagccacggcttccccgtggaggtggacagcgatactagcatcttccagctgaaagaggtggtggccaaaagacaaggagtgcctgccgaccagctgagggtgatcttcgccggcaaagaactgcgaaatgactggacggtgcagaactgcgacctggaccagcaaagtattgtccacatcgtccagcggccttggaggaagggccaggagatgaacgcaactggcggggacgatcccaggaatgccgctggaggctgtgagcgggaaccacagtctttaactcgcgtggacctgagcagctcggtcctgccaggtgatagcgtgggcttagctgtcatcctgcacacggactcccggaaagattctccaccggccggctcgcctgctggtaggtcaatctacaatagcttctatgtgtactgcaagggcccttgtcagagagtccaaccagggaagttgcgagtgcaatgttctacatgtcgtcaagccacactcaccctgacccagggaccttcctgctgggatgatgtcctcattcccaaccgcatgtctggagaatgtcagagtccccattgccctggcacgagtgctgagttctttttcaagtgcggcgctcaccccacaagcgacaaggagacatcagttgccctgcatctgatcgcgactaattctaggaatattacatgcatcacttgcactgacgtgcgctcccccgttctggtgttccaatgtaattctaggcatgtgatctgcctggactgtttccatctgtactgcgtcacgcgtctgaatgatcgccaatttgtccatgacccccagctggggtactcactgccatgcgttgccgggtgtcccaacagcctcattaaagaactgcaccatttccgtatcctcggggaggagcagtacaatcggtaccaacaatacggggctgaagagtgtgtactgcagatgggaggagttttatgcccgcggccaggctgtggagccggcctgctccctgagccagatcagcgtaaggttacttgcgaaggcgggaacgggctaggatgtggcttcgccttctgtagggagtgcaaggaagcctaccacgagggggaatgctccgctgtcttcgaggcaagtggtaccaccacacaggcttaccgcgttgacgagagagcagcagaacaggctaggtgggaggcagccagcaaagagactatcaagaagactacaaagccttgtcctcgctgtcacgtccctgtggaaaagaacggaggatgtatgcacatgaagtgtcctcagccccagtgccgcttggagtggtgttggaactgcgggtgtgagtggaatcgggtgtgcatgggagaccattggttcgacgtgtag

SEQ ID NO: 147601 - DNA, 1157 bp, Artificial Sequence
  derived and/or modified sequence
atgatagtgtttgtcaggttcaactccagccatggtttcccagtggaggtcgattctgacaccagcatcttccagctcaaggaggtggttgctaagcgacagggggttccggctgaccagttgcgtgtgattttcgcagggaaggagctgaggaatgactggactgtgcagcaggtagatcaatctacaacagcttttatgtgtattgcaaaggcccctgtcaaagagtgcagccgggaaaactcagggtacagtgcagcacctgcaggcaggcaacgctcaccttgacccagggtccatcttgctgggatgatgttttaattccaaaccggatgagtggtgaatgccaatccccacactgccctgggactagtgcagaatttttctttaaatgtggagcacaccccacctctgacaaggaaacatcagtagctttgcacctgatcgcaacaaatagtcggaacatcacttgcattacgtgcacagacgtcaggagccccgtcctggttttccagtgcaactcccgccacgtgatttgcttagactgtttccacttatactgtgtgacaagactcaatgatcggcagtttgttcacgaccctcaacttggctactccctgccttgtgtggctggctgtcccaactccttgattaaagagctccatcacttcaggattctgggagaagagcagtacaaccggtaccagcagtatggtgcagaggagtgtgtcctgcagatggggggcgtgttatgcccccgccctggctgtggagcggggctgctgccggagcctgaccagaggaaagtcacctgcgaagggggcaatggcctgggctgtgggtttgccttctgccgggaatgtaaagaagcgtaccatgaaggggagtgcagtgccgtatttgaagcctcaggaacaactactcaggcctacagagtcgatgaaagagccgccgagcaggctcgttgggaagcagcctccaaagaaaccatcaagaaaaccaccaagccctgtccccgctgccatgtaccagtggaaaaaaatggaggctgcatgcacatgaagtgtccgcagccccagtgcaggctcgagtggtgctggaactgtggctgcgagtggaaccgcgtctgcatgggggaccactggttcgacgtgtag

SEQ ID NO: 147602 - DNA, 4180 bp, Artificial Sequence
  derived and/or modified sequence
cctggaggatttaacccaggagagccgctggtgggaggcgcggctggcgccgctgcgcgcatgggcctgttcctggcccgcagccgccacctacccagtgaccatgatagtgtttgtcaggttcaactccagccatggtttcccagtggaggtcgattctgacaccagcatcttccagctcaaggaggtggttgctaagcgacagggggttccggctgaccagttgcgtgtgattttcgcagggaaggagctgaggaatgactggactgtgcagaattgtgacctggatcagcagagcattgttcacattgtgcagagaccgtggagaaaaggtcaagaaatgaatgcaactggaggcgacgaccccagaaacgcggcgggaggctgtgagcgggagccccagagcttgactcgggtggacctcagcagctcagtcctcccaggagactctgtggggctggctgtcattctgcacactgacagcaggaaggactcaccaccagctggaagtccagcaggtagatcaatctacaacagcttttatgtgtattgcaaaggcccctgtcaaagagtgcagccgggaaaactcagggtacagtgcagcacctgcaggcaggcaacgctcaccttgacccagggtccatcttgctgggatgatgttttaattccaaaccggatgagtggtgaatgccaatccccacactgccctgggactagtgcagaatttttctttaaatgtggagcacaccccacctctgacaaggaaacatcagtagctttgcacctgatcgcaacaaatagtcggaacatcacttgcattacgtgcacagacgtcaggagccccgtcctggttttccagtgcaactcccgccacgtgatttgcttagactgtttccacttatactgtgtgacaagactcaatgatcggcagtttgttcacgaccctcaacttggctactccctgccttgtgtggctggctgtcccaactccttgattaaagagctccatcacttcaggattctgggagaagagcagtacaaccggtaccagcagtatggtgcagaggagtgtgtcctgcagatggggggcgtgttatgcccccgccctggctgtggagcggggctgctgccggagcctgaccagaggaaagtcacctgcgaagggggcaatggcctgggctgtgggtttgccttctgccgggaatgtaaagaagcgtaccatgaaggggagtgcagtgccgtatttgaagcctcaggaacaactactcaggcctacagagtcgatgaaagagccgccgagcaggctcgttgggaagcagcctccaaagaaaccatcaagaaaaccaccaagccctgtccccgctgccatgtaccagtggaaaaaaatggaggctgcatgcacatgaagtgtccgcagccccagtgcaggctcgagtggtgctggaactgtggctgcgagtggaaccgcgtctgcatgggggaccactggttcgacgtgtagccagggcggccgggcgccccatcgccacatcctgggggagcatacccagtgtctaccttcattttctaattctcttttcaaacacacacacacacgcgcgcgcgcgcacacacactcttcaagtttttttcaaagtccaactacagccaaattgcagaagaaactcctggatccctttcactatgtccatgaaaaacagcagagtaaaattacagaagaagctcctgaatccctttcagtttgtccacacaagacagcagagccatctgcgacaccaccaacaggcgttctcagcctccggatgacacaaataccagagcacagattcaagtgcaatccatgtatctgtatgggtcattctcacctgaattcgagacaggcagaatcagtagctggagagagagttctcacatttaatatcctgccttttaccttcagtaaacaccatgaagatgccattgacaaggtgtttctctgtaaaatgaactgcagtgggttctccaaactagattcatggctttaacagtaatgttcttatttaaattttcagaaagcatctattcccaaagaaccccaggcaatagtcaaaaacatttgtttatccttaagaattccatctatataaatcgcattaatgaaataccaactatgcgtaaatcaacttgtcacaaagtgagaaattatgaaagttaatttgaatgttgaatgtttgaattacagggaagaaatcaagttaatgtactttcattccctttcatgatttgcaactttagaaagaaattgtttttctgaaagtatcaccaaaaaatctatagtttgattctgagtattcattttgcaacttggagattttgctaatacatttggctccactgtaaatttaatagataaagtgcctataaaggaaacacgtttagaaatgatttcaaaatgatattcaatcttaacaaaagtgaacattattaaatcagaatctttaaagaggagcctttccagaactaccaaaatgaagacacgcccgactctctccatcagaagggtttatacccctttggcacaccctctctgtccaatctgcaagtcccagggagctctgcataccaggggttccccaggagagaccttctcttaggacagtaaactcactagaatattccttatgttgacatggattggatttcagttcaatcaaactttcagcttttttttcagccattcacaacacaatcaaaagattaacaacactgcatgcggcaaaccgcatgctcttacccacactacgcagaagagaaagtacaaccactatcttttgttctacctgtattgtctgacttctcaggaagatcgtgaacataactgagggcatgagtctcactagcacatggaggcccttttggatttagagactgtaaattattaaatcggcaacagggcttctctttttagatgtagcactgaaatccttgctggagggaagagaggggatgaactcaagttttccacatcctgggacacctgtccctcttttcctaactgcctaagataacccatttcttccaaccatctgaggacagtcccgtcgtctcagaggccctgcaccggggagagactgggctctgcagcagccacatcagcattcacagcttcatgtggcttcactgtctgaaaatctaccgactccaacatggccccacggtgacaacagacctgtgacaggaagcccaaagctcacatagaaatggtggacagatcaaagtctctatagtaagggaaaaaaagagaggtggcaggcatgagccccctgcacccagtggctcgtgtccatactgagtccagaccctgatcaaggcctgacttagtgtcactggcagtcccactaaattacacttccttacactggcccgatgcgacaaatcaggtggctcccttctgtcacgtggagcacacagtgttttccatcatccatagctttcttcctgatggtgtttgcattattgcgccttcccaatctgcatgctgcgttgggcttgcggtgcctgaacaaggtttgctcccatgagctcaggcaccctaggatcccctgttagactattaggctgtccagcatggtctcctttcccttcttggtggtggtcttttccctttccagaatagaacagtgattcttaaaataagttagagcaggccgggcgcggtggctcatgcctgtaatcccagcactttgggaggccgaggtgggtggatcacgaggtcaggagttcaagaccagcctggccaagatgatgaaaccccgtctctattaaaaatacaaaaattagctgggcgtggtggcaggcacctgtaatcccagcttcctgggaggctgaggcaggagaatcacttgaacccggggggcagaggttgcagtgagccgagatcacgccactgaactccagcctgggcaacagagtgagactctgtctcaaaaaaaaaaaaaaaacaaaaacaaaaaagcaagatcatccactacacatgaacatgaatcacagtattatttgcacaggaagggtgtaacaaaatatgaatgtatcaaaaaatagaaataaagtctttgcagaaaaagtctgtttttctctgaagtgtgttgagattatctgacaactctaagattgtacttaaattgtcaataaagcatcaaaa

SEQ ID NO: 147603 - DNA, 1398 bp, Artificial Sequence
  derived and/or modified sequence
atgattgtgtttgtgagatttaattcctcgcacggtttccctgtggaggttgatagcgatacatccatttttcagctgaaagaggtcgtggccaagaggcagggtgtgcctgccgatcaactaagggtcatcttcgcaggtaaggagctacgcaatgactggactgtgcagaattgcgacttagaccagcaatcaattgtccatatcgtgcagcgcccatggagaaagggacaggaaatgaacgctaccgggggagatgacccacgcaacgcagccggtggctgtgagcgcgagcctcagtctctgacccgtgtggacctgtcaagctccgtactgccaggggacagtgtcggtttagctgttattctccacactgattcccgcaaggacagcccccctgcagggtctcccgcaggtagatccatctacaacagcttctatgtgtattgtaagggcccatgccagcgcgtgcagccagggaagctaagagtccagtgcagcacgtgcagacaggcgacactcacactgacacaaggccctagttgttgggacgacgtgttgatccccaaccgaatgagcggcgagtgtcaaagccctcactgtcctggcacttctgcagagtttttctttaagtgtggtgcccacccaaccagcgataaggagacctcagtagcactgcacctcatcgctaccaactccaggaatattacctgcattacctgcacggatgtcagaagtcctgtattagtcttccaatgcaacagccggcatgttatctgtctggactgttttcacctgtattgtgtgaccagactgaatgatcgccagtttgtgcacgatccacagctagggtactcactgccgtgcgttgccggttgccccaacagcctcattaaagagcttcaccacttccgcatcttaggggaggaacagtacaaccgctatcagcagtatggagcggaagaatgtgttctgcagatggggggagtcctgtgccccaggcctgggtgtggggctggcctgctccctgaacccgaccagagaaaagtgacttgcgagggaggcaatggtctgggatgcggatttgctttttgtagagaatgtaaagaagcttaccacgagggagagtgttcggcggtgttcgaggccagcgggactactactcaggcttatcgggttgatgaacgggcagctgaacaggccaggtgggaggctgcaagtaaggaaaccattaagaagaccaccaaaccatgcccgagatgccatgtcccagttgaaaagaacgggggatgtatgcatatgaagtgtccacaaccccagtgtaggctggagtggtgttggaactgtggctgcgagtggaatcgagtttgcatgggcgatcattggttcgatgtctag

SEQ ID NO: 147604 - DNA, 1398 bp, Artificial Sequence
  derived and/or modified sequence
atgatcgtgttcgtgagattcaacagcagccacggcttccccgtggaggtggacagcgacaccagcatcttccagctgaaggaggtggtggccaagagacagggcgtgcccgccgaccagctgagagtgatcttcgccggcaaggagctgagaaacgactggaccgtgcagaactgcgacctggaccagcagagcatcgtgcacatcgtgcagagaccctggagaaagggccaggagatgaacgccaccggcggcgacgaccccagaaacgccgccggcggctgcgagagagagccccagagcctgaccagagtggacctgagcagcagcgtgctgcccggcgacagcgtgggcctggccgtgatcctgcacaccgacagcagaaaggacagcccccccgccggcagccccgccggcagaagcatctacaacagcttctacgtgtactgcaagggcccctgccagagagtgcagcccggcaagctgagagtgcagtgcagcacctgcagacaggccaccctgaccctgacccagggccccagctgctgggacgacgtgctgatccccaacagaatgagcggcgagtgccagagcccccactgccccggcaccagcgccgagttcttcttcaagtgcggcgcccaccccaccagcgacaaggagaccagcgtggccctgcacctgatcgccaccaacagcagaaacatcacctgcatcacctgcaccgacgtgagaagccccgtgctggtgttccagtgcaacagcagacacgtgatctgcctggactgcttccacctgtactgcgtgaccagactgaacgacagacagttcgtgcacgacccccagctgggctacagcctgccctgcgtggccggctgccccaacagcctgatcaaggagctgcaccacttcagaatcctgggcgaggagcagtacaacagataccagcagtacggcgccgaggagtgcgtgctgcagatgggcggcgtgctgtgccccagacccggctgcggcgccggcctgctgcccgagcccgaccagagaaaggtgacctgcgagggcggcaacggcctgggctgcggcttcgccttctgcagagagtgcaaggaggcctaccacgagggcgagtgcagcgccgtgttcgaggccagcggcaccaccacccaggcctacagagtggacgagagagccgccgagcaggccagatgggaggccgccagcaaggagaccatcaagaagaccaccaagccctgccccagatgccacgtgcccgtggagaagaacggcggctgcatgcacatgaagtgcccccagccccagtgcagactggagtggtgctggaactgcggctgcgagtggaacagagtgtgcatgggcgaccactggttcgacgtgtag

SEQ ID NO: 147605 - protein, 640 aa, Artificial Sequence
  derived and/or modified sequence
MAALYRPGLRLNWHGLSPLGWPSCRSIQTLRVLSGDLGQLPTGIRDFVEHSARLCQPEGIHICDGTEAENTATLTLLEQQGLIRKLPKYNNCWLARTDPKDVARVESKTVIVTPSQRDTVQLPPGGARGQLGNWMSPADFQRAVDERFPGCMQGRTMYVLPFSMGPVGSPLSRIGVQLTDSAYVVASMRIMTRLGTPVLQALGDGDFVKCLHSVGQPLTGQGEPVSQWPCNPEKTLIGHVPDQREIISFGSGYGGNSLLGKKCFALRIASRLARDEGWLAEHMLILGITSPAGKKRYVAAAFPSACGKTNLAMMRPALPGWKVECVGDDIAWMRFDSEGRLRAINPENGFFGVAPGTSATTNPNAMATIQSNTIFTNVAETSDGGVYWEGIDQPLPPGVTVTSWLGKPWKPGDKEPCAHPNSRFCAPARQCPIMDPAWEAPEGVPIDAIIFGGRRPKGVPLVYEAFNWRHGVFVGSAMRSESTAAAEHKGKIIMHDPFAMRPFFGYNFGHYLEHWLSMEGRKGAQLPRIFHVNWFRRDEAGHFLWPGFGENARVLDWICRRLEGEDSARETPIGLVPKEGALDLSGLRAIDTTQLFSLPKDFWEQEVRDIRSYLTEQVNQDLPKEVLAELEALERRVHKM

SEQ ID NO: 147606 - protein, 506 aa, Artificial Sequence
  derived and/or modified sequence
MSPADFQRAVDERFPGCMQGRTMYVLPFSMGPVGSPLSRIGVQLTDSAYVVASMRIMTRLGTPVLQALGDGDFVKCLHSVGQPLTGQGEPVSQWPCNPEKTLIGHVPDQREIISFGSGYGGNSLLGKKCFALRIASRLARDEGWLAEHMLILGITSPAGKKRYVAAAFPSACGKTNLAMMRPALPGWKVECVGDDIAWMRFDSEGRLRAINPENGFFGVAPGTSATTNPNAMATIQSNTIFTNVAETSDGGVYWEGIDQPLPPGVTVTSWLGKPWKPGDKEPCAHPNSRFCAPARQCPIMDPAWEAPEGVPIDAIIFGGRRPKGVPLVYEAFNWRHGVFVGSAMRSESTAAAEHKGKIIMHDPFAMRPFFGYNFGHYLEHWLSMEGRKGAQLPRIFHVNWFRRDEAGHFLWPGFGENARVLDWICRRLEGEDSARETPIGLVPKEGALDLSGLRAIDTTQLFSLPKDFWEQEVRDIRSYLTEQVNQDLPKEVLAELEALERRVHKM

SEQ ID NO: 147607 - DNA, 1923 bp, Artificial Sequence
  derived and/or modified sequence
atggccgccctgtacagacccggcctgagactgaactggcacggcctgagccccctgggctggcccagctgcagaagcatccagaccctgagagtgctgagcggcgacctgggccagctgcccaccggcatcagagacttcgtggagcacagcgccagactgtgccagcccgagggcatccacatctgcgacggcaccgaggccgagaacaccgccaccctgaccctgctggagcagcagggcctgatcagaaagctgcccaagtacaacaactgctggctggccagaaccgaccccaaggacgtggccagagtggagagcaagaccgtgatcgtgacccccagccagagagacaccgtgcagctgccccccggcggcgccagaggccagctgggcaactggatgagccccgccgacttccagagagccgtggacgagagattccccggctgcatgcagggcagaaccatgtacgtgctgcccttcagcatgggccccgtgggcagccccctgagcagaatcggcgtgcagctgaccgacagcgcctacgtggtggccagcatgagaatcatgaccagactgggcacccccgtgctgcaggccctgggcgacggcgacttcgtgaagtgcctgcacagcgtgggccagcccctgaccggccagggcgagcccgtgagccagtggccctgcaaccccgagaagaccctgatcggccacgtgcccgaccagagagagatcatcagcttcggcagcggctacggcggcaacagcctgctgggcaagaagtgcttcgccctgagaatcgccagcagactggccagagacgagggctggctggccgagcacatgctgatcctgggcatcaccagccccgccggcaagaagagatacgtggccgccgccttccccagcgcctgcggcaagaccaacctggccatgatgagacccgccctgcccggctggaaggtggagtgcgtgggcgacgacatcgcctggatgagattcgacagcgagggcagactgagagccatcaaccccgagaacggcttcttcggcgtggcccccggcaccagcgccaccaccaaccccaacgccatggccaccatccagagcaacaccatcttcaccaacgtggccgagaccagcgacggcggcgtgtactgggagggcatcgaccagcccctgccccccggcgtgaccgtgaccagctggctgggcaagccctggaagcccggcgacaaggagccctgcgcccaccccaacagcagattctgcgcccccgccagacagtgccccatcatggaccccgcctgggaggcccccgagggcgtgcccatcgacgccatcatcttcggcggcagaagacccaagggcgtgcccctggtgtacgaggccttcaactggagacacggcgtgttcgtgggcagcgccatgagaagcgagagcaccgccgccgccgagcacaagggcaagatcatcatgcacgaccccttcgccatgagacccttcttcggctacaacttcggccactacctggagcactggctgagcatggagggcagaaagggcgcccagctgcccagaatcttccacgtgaactggttcagaagagacgaggccggccacttcctgtggcccggcttcggcgagaacgccagagtgctggactggatctgcagaagactggagggcgaggacagcgccagagagacccccatcggcctggtgcccaaggagggcgccctggacctgagcggcctgagagccatcgacaccacccagctgttcagcctgcccaaggacttctgggagcaggaggtgagagacatcagaagctacctgaccgagcaggtgaaccaggacctgcccaaggaggtgctggccgagctggaggccctggagagaagagtgcacaagatgtag

SEQ ID NO: 147608 - DNA, 1923 bp, Artificial Sequence
  derived and/or modified sequence
atggctgcactttacagaccaggcctgagactcaactggcacgggctgtcacccctcgggtggccaagctgccgctcgatacaaacattgcgcgtcctgtctggagatctcgggcagctgccgaccggcatccgagattttgttgaacatagcgccaggctctgtcaacccgagggcatccatatatgcgatgggacggaagccgagaacacagcaacactaacacttttagaacaacagggtttgatccgtaagttacccaaatataacaattgctggctggcgagaactgatccaaaggatgtagccagagtggagagcaagacagtgattgtgaccccaagccagcgagataccgtccagctgcctcctgggggggctcgggggcagttggggaactggatgagccccgctgatttccaacgcgccgtggatgagaggtttcccggttgcatgcagggaaggaccatgtatgtgctccccttcagtatgggacccgtcgggagtcctctcagccggattggggtgcaactcaccgattccgcctatgtggtagcttccatgcgaatcatgacaaggctcggaactccagtgctccaggcacttggcgacggcgatttcgtgaaatgtttacactcagtagggcagcctctaaccggacagggtgagcctgtctcccaatggccctgtaaccccgaaaagacacttattggtcatgttccagaccagcgagaaattatctcctttggaagcgggtacggaggcaactctctgctgggcaaaaaatgtttcgccctgcgcatcgcttccaggcttgctcgcgatgaaggttggttggccgaacatatgctgatcctgggtattacgtccccagcaggtaagaagaggtacgtggccgccgcttttccctccgcatgcgggaagaccaacctggccatgatgaggcccgctctaccgggctggaaagtggagtgcgtgggcgatgatatcgcctggatgaggtttgacagcgagggcagattacgggcgattaatcctgagaacgggttcttcggggtggccccaggcactagtgccaccaccaatcccaacgctatggccacaatccagagcaataccatctttactaacgttgcagagaccagcgacggcggagtctattgggagggaatcgatcaacccctgccaccaggcgtgacagtcaccagctggctggggaagccatggaagcccggtgacaaggaaccctgcgcccaccccaactctcggttttgcgcaccagcaagacagtgccctatcatggatccagcctgggaggctcccgaaggcgttccaatcgacgcaattattttcggcggtagacgtcccaaaggggtacctcttgtttatgaagcgttcaattggagacatggcgtctttgtggggtccgccatgcgcagcgaaagcaccgccgccgctgagcataaaggtaagatcatcatgcatgaccctttcgcaatgagaccgttcttcggctacaatttcggccattatctcgaacattggctgtcaatggaggggagaaaaggggcacaactcccccgaattttccacgtcaactggttccgtcgagacgaagccggacacttcctatggcccggctttggcgagaacgcaagggttctcgactggatctgtagacgactcgaaggggaggacagtgcccgggaaacaccgatcgggctcgtgcctaaggaaggcgccctggacctgtctggactgcgagctatagacactactcagctgttcagcctccccaaagatttttgggaacaggaggtgcgcgacattcgctcctaccttacagagcaggttaatcaggatctgccaaaagaggtgttggcggagttagaagctctggagagaagggtacacaaaatgtag

SEQ ID NO: 147609 - DNA, 1923 bp, Artificial Sequence
  derived and/or modified sequence
atggccgccctgtacagacctggcctgcggctgaactggcacggcctgagccccctgggctggcccagctgccgcagcatccagaccctgcgggtgctgagcggggacctgggccagctgcccaccggcatccgggactttgtggagcacagcgcccggctgtgccagcctgagggcatccacatctgtgatggaacagaagcagaaaatacagccaccctgaccctgctggagcagcagggcctcatcaggaagctgcccaagtacaacaactgctggctggccaggacagaccccaaggatgtggcccgggtggagagcaagacagtgattgtgacccccagccagagggacacagtgcagctgcccccaggaggagcccggggccagctgggcaactggatgagccctgctgacttccagagagctgtggatgagcgcttccctggctgcatgcagggccgcaccatgtatgtgctgcccttctccatgggccctgtgggcagccccctgagccgcatcggcgtgcagctgacagattctgcctacgtggtggcctccatgaggatcatgacccggctgggcacccctgtgctgcaggccctgggagatggagactttgtgaagtgcctgcacagcgtgggccagcccctgaccggccagggcgagcctgtgtcccagtggccctgcaaccctgagaagaccctgattggacatgtgcctgaccagcgggagatcatcagctttggaagtggctatggaggcaacagcctgctgggcaagaagtgctttgccctgcgcatcgccagccggctggccagagatgagggctggctggccgagcacatgctgatcctgggcatcaccagccctgctgggaagaagagatatgtggccgccgccttccccagcgcctgtgggaagaccaacctggccatgatgaggcctgccctgcccggctggaaggtggagtgtgtgggagatgacatcgcctggatgagatttgattctgagggccgcctgcgggccatcaacccagaaaatggcttctttggagtggcccctggcaccagcgccaccaccaaccccaatgccatggccaccatccagagcaacaccatcttcaccaacgtggccgagaccagtgatggaggagtgtactgggagggcatcgaccagcccctgcccccaggagtgacagtgacctcctggctgggcaagccctggaagccaggggacaaggagccctgtgcccaccccaacagccgcttctgtgccccagcccggcagtgccccatcatggaccctgcctgggaggcccctgagggcgtgcccattgatgccatcatctttggaggccggcggcccaagggcgtgcccctggtgtatgaggccttcaactggaggcatggagtgtttgtgggcagcgccatgaggtctgagagcacagctgctgctgagcacaagggcaagatcatcatgcatgacccctttgccatgaggcccttcttcggctacaactttggccactacctggagcactggctgtccatggagggcaggaagggggcccagctgccccgcatcttccacgtgaactggttcagaagagatgaggccggccacttcctgtggccaggctttggagaaaatgcccgggtgctggactggatctgccggcggctggagggagaagattctgcccgggagacccccatcggcctggtgcccaaggagggcgccctggacctgagcggcctgcgggccatcgacaccacccagctgttcagcctgcccaaggacttctgggagcaggaggtgcgggacatccgcagctacctgacagagcaggtgaaccaggacctgcccaaggaggtgctggccgagctggaggccctggagaggagagtgcacaagatgtag

SEQ ID NO: 147610 - DNA, 1923 bp, Artificial Sequence
  derived and/or modified sequence
atggccgccctgtaccggcccggcctgcggctgaactggcacggcctctctccccttggatggccaagttgtagaagtattcagacccttcgagtgctgtccggcgatctcggccaactgcccaccggtatccgagacttcgttgagcactctgctcggctgtgtcagcccgaggggattcatatttgtgacggaactgaagccgagaacacagccactcttacattactggaacagcagggtctcattaggaaactgcccaaatataacaactgctggctggcccgaactgacccaaaggacgtggcacgcgtcgagagcaagacagtgattgtcacaccaagtcagagggacaccgtccagctcccacccgggggggcacggggccagctcggaaattggatgtccccagccgacttccagcgggccgtcgacgagaggttcccaggctgcatgcaaggcaggactatgtacgtcctgccgttcagcatgggccccgtgggaagcccattatccaggataggagttcagctgacagacagcgcctacgtcgttgcgagcatgcggataatgacccgcctgggaacaccagtacttcaagccctgggagacggggattttgtgaagtgcctacacagtgtgggacagccactgaccgggcaaggggagcccgttagtcagtggccttgtaacccggagaaaactctgatcggacatgttccggatcagcgggaaatcatcagcttcgggtcaggatatggcggtaatagtcttcttgggaagaagtgtttcgcccttcggatcgcctccagactggccagagacgaggggtggctggctgagcacatgctgattcttgggattacctctcccgccggaaaaaaaaggtacgtagctgccgccttcccatcggcctgtggcaagaccaatcttgccatgatgcggccagctcttccgggatggaaggtcgaatgtgtcggcgatgacatagcctggatgcgttttgattctgaggggcgattgcgagctatcaacccagaaaacggattctttggtgtggccccaggcactagcgcgactaccaacccgaatgcaatggccacgatccagagtaatacaatcttcaccaacgtcgcagaaaccagcgacggaggcgtgtactgggagggcatcgaccaaccgctgcctcctggcgtcactgtgaccagctggttaggtaagccctggaagcccggggataaggagccctgcgcgcaccctaacagtaggttttgcgctcctgcacgccaatgcccaatcatggaccccgcttgggaggctccagagggtgttcccatcgacgctatcatcttcggcggtcgaagacccaagggagtgcctctcgtctatgaggcctttaactggagacatggcgtgttcgtgggatccgcaatgaggagcgagagcactgcagcagccgagcataaggggaagataattatgcacgacccttttgcaatgcgaccgttctttggctacaactttggccattacttagagcattggctgtcgatggagggacgaaagggcgcacaactgccccggatctttcatgtgaactggttccgtcgtgacgaggcaggtcattttctttggcccgggtttggcgagaacgcccgcgtcctggactggatttgccgccgattggagggcgaggacagtgcccgggaaacacccattggcctcgtgccaaaggagggtgcgttggacctgagcggcctacgcgctatcgataccacccaactgttcagcctgccgaaagatttttgggagcaggaggtaagagacatccgctcatatttaactgagcaggtaaatcaggaccttcccaaggaggtccttgctgaactggaggcactggagcggagggttcataagatgtag

SEQ ID NO: 147611 - DNA, 1923 bp, Artificial Sequence
  derived and/or modified sequence
atggccgctctgtacagaccaggcctgcggctaaattggcacgggctgtctccattggggtggcccagctgcaggtcaatccagactctacgcgttttgagcggggatctcggtcagctgccaacaggaatccgcgactttgtagaacactctgccagactgtgccagcccgagggaattcacatctgcgatggaactgaagccgagaatacagccacactgacgctgctggagcagcagggattgatcagaaagttgccaaagtacaacaactgttggctagccagaacagaccccaaggacgtggccagagttgagtccaaaacggtaattgtaacccccagccagcgcgatactgtgcagctgccccctggaggtgctcggggtcagctgggcaattggatgagcccagcggacttccagcgcgcagttgacgaacggttccccggttgcatgcagggacggaccatgtatgttctgcctttttctatgggtccagttggttcaccactgagtcggatcggagttcagcttacagattctgcctacgtggttgcgtcaatgagaatcatgacccgcttggggacgcccgtgctgcaggccctgggtgatggtgatttcgtcaaatgtctgcatagcgtgggacagcctcttaccggccagggagagcccgtttcccagtggccatgtaacccagaaaagacacttatcggacatgtacctgatcagcgcgaaataattagtttcggcagcgggtacggcggaaactcactgctggggaaaaaatgtttcgccctgaggattgcctcccggttagccagggatgaggggtggctcgccgaacacatgctgatcttggggattacatctcctgctggcaagaagaggtatgtggctgccgctttccctagtgcttgtggtaaaacgaacctcgctatgatgcgccctgcccttccaggatggaaggtggagtgcgtgggggacgacatcgcttggatgcgcttcgactctgagggcaggctccgcgcaataaatccagaaaatggtttttttggagttgctcctggtactagcgccactacaaaccccaacgccatggcaactatccagtccaatacaatcttcaccaacgtagccgaaaccagcgacggaggagtctactgggaaggaatcgaccaacccttgcctccaggcgttaccgtcacctcgtggctcgggaaaccttggaaaccgggagacaaagaaccctgcgcccacccaaactctagattttgcgccccagcacgacagtgtccgatcatggacccagcttgggaggctcccgaaggggtgcctatagacgcaattatatttggaggcagaagaccgaaaggagtgcccttggtgtacgaggccttcaactggaggcatggcgttttcgtcggcagtgccatgcgtagcgaaagcactgctgctgccgaacacaagggaaaaattattatgcacgatccctttgccatgcgtccctttttcggttataactttggtcattatttggagcactggctttctatggaaggcaggaagggcgcacagttaccccgaatctttcacgtcaactggtttcgtcgtgacgaagctggacactttctgtggcccggattcggggagaatgccagagtgctagattggatctgccgcagacttgagggcgaagacagtgcaagagaaactcctatcggtcttgttcccaaagagggcgctttggacctcagtggcctgcgcgcaatagacacaactcagcttttctctctcccaaaagacttctgggaacaggaagtaagagacattcggagctatctgacagagcaagtcaaccaagacctgccaaaagaggtgctggctgaactggaggcactggagcggagggttcataagatgtag

SEQ ID NO: 147612 - DNA, 2357 bp, Artificial Sequence
  derived and/or modified sequence
ggcggtttggaggcaggggttggggcggcggctgggctgacctggagcctggagccccggggccgagggagctggcctgccagcggggcggaggaaagctagtgccagccctaccaggttccgcccccgcgcctgcccccctcctttttaagcgcctcccgccagcctctgctgtggctcgcttcgccgcgctccctccttccccgccttccatacctccccggctccgctcggttcctggccaccccgcagcccctgcccaggtgccatggccgcattgtaccgccctggcctgcggcttaactggcatgggctgagccccttgggctggccatcatgccgtagcatccagaccctgcgagtgcttagtggagatctgggccagcttcccactggcattcgagattttgtagagcacagtgcccgcctgtgccaaccagagggcatccacatctgtgatggaactgaggctgagaatactgccacactgaccctgctggagcagcagggcctcatccgaaagctccccaagtacaataactgctggctggcccgcacagaccccaaggatgtggcacgagtagagagcaagacggtgattgtaactccttctcagcgggacacggtacaactcccgcctggtggggcccgtgggcagctgggcaactggatgtccccagctgatttccagcgagctgtggatgagaggtttccaggctgcatgcagggccgcaccatgtatgtgcttccattcagcatgggtcctgtgggctccccgctgtcccgcatcggggtgcagctcactgactcagcctatgtggtggcaagcatgcgtattatgacccgactggggacacctgtgcttcaggccctgggagatggtgactttgtcaagtgtctgcactccgtgggccagcccctgacaggacaaggggagccagtgagccagtggccgtgcaacccagagaaaaccctgattggccacgtgcccgaccagcgggagatcatctccttcggcagcggctatggtggcaactccctgctgggcaagaagtgctttgccctacgcatcgcctctcggctggcccgggatgagggctggctggcagagcacatgctgatcctgggcatcaccagccctgcagggaagaagcgctatgtggcagccgccttccctagtgcctgtggcaagaccaacctggctatgatgcggcctgcactgccaggctggaaagtggagtgtgtgggggatgatattgcttggatgaggtttgacagtgaaggtcgactccgggccatcaaccctgagaacggcttctttggggttgcccctggtacctctgccaccaccaatcccaacgccatggctacaatccagagtaacactatttttaccaatgtggctgagaccagtgatggtggcgtgtactgggagggcattgaccagcctcttccacctggtgttactgtgacctcctggctgggcaaaccctggaaacctggtgacaaggagccctgtgcacatcccaactctcgattttgtgccccggctcgccagtgccccatcatggacccagcctgggaggccccagagggtgtccccattgacgccatcatctttggtggccgcagacccaaaggggtacccctggtatacgaggccttcaactggcgtcatggggtgtttgtgggcagcgccatgcgctctgagtccactgctgcagcagaacacaaagggaagatcatcatgcacgacccatttgccatgcggcccttttttggctacaacttcgggcactacctggaacactggctgagcatggaagggcgcaagggggcccagctgccccgtatcttccatgtcaactggttccggcgtgacgaggcagggcacttcctgtggccaggctttggggagaatgctcgggtgctagactggatctgccggcggttagagggggaggacagtgcccgagagacacccattgggctggtgccaaaggaaggagccttggatctcagcggcctcagagctatagacaccactcagctgttctccctccccaaggacttctgggaacaggaggttcgtgacattcggagctacctgacagagcaggtcaaccaggatctgcccaaagaggtgttggctgagcttgaggccctggagagacgtgtgcacaaaatgtgacctgaggccctagtctagcaagaggacatagcaccctcatctgggaatagggaaggcaccttgcagaaaatatgagcaatttgatattaactaacatcttcaatgtgccatagaccttcccacaaagactgtccaataataagagatgcttatctattttacacaa

SEQ ID NO: 147613 - DNA, 2505 bp, Artificial Sequence
  derived and/or modified sequence
agcctctgctgtggctcgcttcgccgcgctccctccttccccgccttccatacctccccggctccgctcggttcctggccaccccgcagcccctgcccaggtgccatggccgcattgtaccgccctggcctgcggtgagtgacccccggcccggggcccacccgcaccttccgctgcgctcgccccctcggggctgccagtggcgctctcctgctctcagcctccgccaggtttcccatcctaggcggaggcgggcaggggcgactgctgtgggtccagcctcccgcgccgcgcgtctcttgggagggcagccggccggtgctcctcgtttccgcctgcacctccccttctctgcctcgctcgcctctgaccgcgcgatctctatctgccactctcagaacttcctctctctcctcgctcctctctgctgagccaggtctccgcatatcctcctttccttcccagatacctccctcggacctctaacgggctctcagccagcgccccagggtacttcgagaggcagcagggccctggggacaagggcttaactggcatgggctgagccccttgggctggccatcatgccgtagcatccagaccctgcgagtgcttagtggagatctgggccagcttcccactggcattcgagattttgtagagcacagtgcccgcctgtgccaaccagagggcatccacatctgtgatggaactgaggctgagaatactgccacactgaccctgctggagcagcagggcctcatccgaaagctccccaagtacaataactgctggctggcccgcacagaccccaaggatgtggcacgagtagagagcaagacggtgattgtaactccttctcagcgggacacggtacaactcccgcctggtggggcccgtgggcagctgggcaactggatgtccccagctgatttccagcgagctgtggatgagaggtttccaggctgcatgcagggccgcaccatgtatgtgcttccattcagcatgggtcctgtgggctccccgctgtcccgcatcggggtgcagctcactgactcagcctatgtggtggcaagcatgcgtattatgacccgactggggacacctgtgcttcaggccctgggagatggtgactttgtcaagtgtctgcactccgtgggccagcccctgacaggacaaggggagccagtgagccagtggccgtgcaacccagagaaaaccctgattggccacgtgcccgaccagcgggagatcatctccttcggcagcggctatggtggcaactccctgctgggcaagaagtgctttgccctacgcatcgcctctcggctggcccgggatgagggctggctggcagagcacatgctgatcctgggcatcaccagccctgcagggaagaagcgctatgtggcagccgccttccctagtgcctgtggcaagaccaacctggctatgatgcggcctgcactgccaggctggaaagtggagtgtgtgggggatgatattgcttggatgaggtttgacagtgaaggtcgactccgggccatcaaccctgagaacggcttctttggggttgcccctggtacctctgccaccaccaatcccaacgccatggctacaatccagagtaacactatttttaccaatgtggctgagaccagtgatggtggcgtgtactgggagggcattgaccagcctcttccacctggtgttactgtgacctcctggctgggcaaaccctggaaacctggtgacaaggagccctgtgcacatcccaactctcgattttgtgccccggctcgccagtgccccatcatggacccagcctgggaggccccagagggtgtccccattgacgccatcatctttggtggccgcagacccaaaggggtacccctggtatacgaggccttcaactggcgtcatggggtgtttgtgggcagcgccatgcgctctgagtccactgctgcagcagaacacaaagggaagatcatcatgcacgacccatttgccatgcggcccttttttggctacaacttcgggcactacctggaacactggctgagcatggaagggcgcaagggggcccagctgccccgtatcttccatgtcaactggttccggcgtgacgaggcagggcacttcctgtggccaggctttggggagaatgctcgggtgctagactggatctgccggcggttagagggggaggacagtgcccgagagacacccattgggctggtgccaaaggaaggagccttggatctcagcggcctcagagctatagacaccactcagctgttctccctccccaaggacttctgggaacaggaggttcgtgacattcggagctacctgacagagcaggtcaaccaggatctgcccaaagaggtgttggctgagcttgaggccctggagagacgtgtgcacaaaatgtgacctgaggccctagtctagcaagaggacatagcaccctcatctgggaatagggaaggcaccttgcag

SEQ ID NO: 147614 - DNA, 2012 bp, Artificial Sequence
  derived and/or modified sequence
gtggctcgcttcgccgcgctccctccttccccgccttccatacctccccggctccgctcggttcctggccaccccgcagcccctgcccaggtgccatggccgcattgtaccgccctggcctgcgatacctccctcggacctctaacgggctctcagccagcgccccagggtacttcgagaggcagcagggccctggggacaaggctggctggcccgcacagaccccaaggatgtggcacgagtagagagcaagacggtgattgtaactccttctcagcgggacacggtacaactcccgcctggtggggcccgtgggcagctgggcaactggatgtccccagctgatttccagcgagctgtggatgagaggtttccaggctgcatgcagggccgcaccatgtatgtgcttccattcagcatgggtcctgtgggctccccgctgtcccgcatcggggtgcagctcactgactcagcctatgtggtggcaagcatgcgtattatgacccgactggggacacctgtgcttcaggccctgggagatggtgactttgtcaagtgtctgcactccgtgggccagcccctgacaggacaaggggagccagtgagccagtggccgtgcaacccagagaaaaccctgattggccacgtgcccgaccagcgggagatcatctccttcggcagcggctatggtggcaactccctgctgggcaagaagtgctttgccctacgcatcgcctctcggctggcccgggatgagggctggctggcagagcacatgctgatcctgggcatcaccagccctgcagggaagaagcgctatgtggcagccgccttccctagtgcctgtggcaagaccaacctggctatgatgcggcctgcactgccaggctggaaagtggagtgtgtgggggatgatattgcttggatgaggtttgacagtgaaggtcgactccgggccatcaaccctgagaacggcttctttggggttgcccctggtacctctgccaccaccaatcccaacgccatggctacaatccagagtaacactatttttaccaatgtggctgagaccagtgatggtggcgtgtactgggagggcattgaccagcctcttccacctggtgttactgtgacctcctggctgggcaaaccctggaaacctggtgacaaggagccctgtgcacatcccaactctcgattttgtgccccggctcgccagtgccccatcatggacccagcctgggaggccccagagggtgtccccattgacgccatcatctttggtggccgcagacccaaaggggtacccctggtatacgaggccttcaactggcgtcatggggtgtttgtgggcagcgccatgcgctctgagtccactgctgcagcagaacacaaagggaagatcatcatgcacgacccatttgccatgcggcccttttttggctacaacttcgggcactacctggaacactggctgagcatggaagggcgcaagggggcccagctgccccgtatcttccatgtcaactggttccggcgtgacgaggcagggcacttcctgtggccaggctttggggagaatgctcgggtgctagactggatctgccggcggttagagggggaggacagtgcccgagagacacccattgggctggtgccaaaggaaggagccttggatctcagcggcctcagagctatagacaccactcagctgttctccctccccaaggacttctgggaacaggaggttcgtgacattcggagctacctgacagagcaggtcaaccaggatctgcccaaagaggtgttggctgagcttgaggccctggagagacgtgtgcacaaaatgtgacctgaggccctagtctagcaagaggacatagcaccctcatctgggaatagggaaggcaccttgcagaaaatatgagcaatttgatattaactaacatcttcaatgtgccatagaccttcccacaaagactgtccaataataagagatgcttatctatttt

SEQ ID NO: 147615 - protein, 557 aa, Artificial Sequence
  derived and/or modified sequence
MAAPMLRWGCRGRRWAFARVDGGSCHRRGAPTGSTSNQIRGESSVAQQPLHTAQKTRKGEHKWAAVVGLEIHAQISSNSKLFSGSQVRFSAPPNSLVSFFDASLPGTLPVLNRRCVEAAVMTGLALNCHINKKSLFDRKHYFYADLPAGYQITQQRLPIAVNGSLIYGVCAGKKQSQVIPKTVRIKQIQLEQDSGKSLHDNLRSQTLIDLNRAGVGLLEVVLEPDMSCGEEAATAVRELQLILQALGTSQANMAEGQLRVDANISVHHPGEPLGVRTEVKNLNSIRFLAKAIDYEIQRQINELENGGEILNETRSFHHKLGCTMSMRDKEGKQDYRFMPEPNLPPLVLYDATSLPAGADPQQVINIDQIRETLPELPSVTREKLVQQYGMLLEHSFTLLNEVGLLEFFQNVIKETRAEPKKVTSWVLNTFLGYLKQQNLAVSESPVTPSALAELLDLLDSRTISSSAAKQVFEELWKREGKTPGQIVSEKQLELMQDQGALEQLCHSVMEAHPQVVMDVKNRNPRAINKLIGLVRKATQSRADPVMIKEILEKKLSL

SEQ ID NO: 147616 - DNA, 1674 bp, Artificial Sequence
  derived and/or modified sequence
atggccgcccccatgctgagatggggctgcagaggcagaagatgggccttcgccagagtggacggcggcagctgccacagaagaggcgcccccaccggcagcaccagcaaccagatcagaggcgagagcagcgtggcccagcagcccctgcacaccgcccagaagaccagaaagggcgagcacaagtgggccgccgtggtgggcctggagatccacgcccagatcagcagcaacagcaagctgttcagcggcagccaggtgagattcagcgccccccccaacagcctggtgagcttcttcgacgccagcctgcccggcaccctgcccgtgctgaacagaagatgcgtggaggccgccgtgatgaccggcctggccctgaactgccacatcaacaagaagagcctgttcgacagaaagcactacttctacgccgacctgcccgccggctaccagatcacccagcagagactgcccatcgccgtgaacggcagcctgatctacggcgtgtgcgccggcaagaagcagagccaggtgatccccaagaccgtgagaatcaagcagatccagctggagcaggacagcggcaagagcctgcacgacaacctgagaagccagaccctgatcgacctgaacagagccggcgtgggcctgctggaggtggtgctggagcccgacatgagctgcggcgaggaggccgccaccgccgtgagagagctgcagctgatcctgcaggccctgggcaccagccaggccaacatggccgagggccagctgagagtggacgccaacatcagcgtgcaccaccccggcgagcccctgggcgtgagaaccgaggtgaagaacctgaacagcatcagattcctggccaaggccatcgactacgagatccagagacagatcaacgagctggagaacggcggcgagatcctgaacgagaccagaagcttccaccacaagctgggctgcaccatgagcatgagagacaaggagggcaagcaggactacagattcatgcccgagcccaacctgccccccctggtgctgtacgacgccaccagcctgcccgccggcgccgacccccagcaggtgatcaacatcgaccagatcagagagaccctgcccgagctgcccagcgtgaccagagagaagctggtgcagcagtacggcatgctgctggagcacagcttcaccctgctgaacgaggtgggcctgctggagttcttccagaacgtgatcaaggagaccagagccgagcccaagaaggtgaccagctgggtgctgaacaccttcctgggctacctgaagcagcagaacctggccgtgagcgagagccccgtgacccccagcgccctggccgagctgctggacctgctggacagcagaaccatcagcagcagcgccgccaagcaggtgttcgaggagctgtggaagagagagggcaagacccccggccagatcgtgagcgagaagcagctggagctgatgcaggaccagggcgccctggagcagctgtgccacagcgtgatggaggcccacccccaggtggtgatggacgtgaagaacagaaaccccagagccatcaacaagctgatcggcctggtgagaaaggccacccagagcagagccgaccccgtgatgatcaaggagatcctggagaagaagctgagcctgtag

SEQ ID NO: 147617 - DNA, 1674 bp, Artificial Sequence
  derived and/or modified sequence
atggctgcgccgatgttgcgctggggctgtagagggaggaggtgggcttttgcaagggtcgacggcggtagttgtcacagacgcggcgcgccgaccggaagcaccagcaatcaaatcaggggagagtcttccgtggcccaacagcctctgcacaccgcccagaaaacaaggaaaggcgaacacaaatgggcagcagtcgtcggcttggagatccacgcccagatcagctcgaatagcaaactgttctccggaagccaggtgaggttttcagcccctcccaattccctcgtgtctttttttgatgcatccctgcctggcacacttcctgtgcttaaccggcgctgcgtagaggccgcggtaatgaccggcctcgcactcaactgtcacatcaataaaaaaagcctctttgatcgcaagcactatttttatgcagatctgcctgctggctatcaaataacccagcagcggctaccgatagctgtgaatgggtcactgatctacggcgtttgcgcaggcaaaaagcaatcccaggtgattccaaagaccgttagaataaaacagattcagctggaacaggatagtggaaaatccttgcacgataacctccggtcccaaaccctgattgacctaaatagagcgggcgtgggtctgctggaggtggtcctcgagccagatatgagctgcggcgaagaggctgcaaccgccgtgagagagctgcaactcattctccaggcacttggcacttcgcaggcaaacatggcagagggacagcttcgggtagatgccaacatttccgtgcatcacccgggcgagccgctgggagtgcggacggaggtgaagaatcttaactctatccgattcctggccaaagccattgactatgagattcagcgccagatcaacgagctcgagaatgggggtgagattctgaacgagaccaggtcctttcaccataagctggggtgtactatgagcatgagggacaaagaagggaaacaggactaccgttttatgcctgaacccaatctcccccctctcgtgctgtatgacgcaacttccctgcccgcaggagccgatccccagcaggtcattaacatagatcaaatccgcgaaaccctgccggaattgccatcagtcacccgcgagaaactggtgcagcaatacggcatgctcctggagcatagcttcactctgctgaacgaggttggcctactagagtttttccagaacgtcattaaggaaaccagggccgagcccaagaaagtgacctcctgggttctgaataccttccttgggtacttgaagcagcagaatctcgccgtttccgaatctccggttaccccatctgcgcttgctgagctattagacctgctggatagccgtacgataagttcctctgccgccaagcaagttttcgaagaactgtggaagcgagaggggaaaacacctggacaaatcgttagtgagaaacagttggagttgatgcaggaccaaggcgccctcgagcaactgtgccatagcgttatggaagctcacccgcaggtggtcatggacgtgaaaaataggaacccaagagctattaataaactgatcgggctggtacgcaaagccacccagtcccgcgctgaccccgttatgataaaggagatcctcgaaaaaaaactcagcctctag

SEQ ID NO: 147618 - DNA, 1674 bp, Artificial Sequence
  derived and/or modified sequence
atggccgcccccatgctgcgctggggctgccggggccgccgctgggcctttgcccgggtggatggcggcagctgccacagaagaggagcccccaccggcagcaccagcaaccagatccggggggagagctctgtggcccagcagcccctgcacacagcccagaagaccaggaagggggagcacaagtgggccgctgtggtgggcctggagatccacgcccagatcagcagcaacagcaagctgttcagcggcagccaggtgcgcttcagcgccccacccaacagcctggtgtccttctttgatgccagcctgcccggcaccctgcctgtgctgaacagaagatgtgtggaggccgctgtgatgacaggcctggccctgaactgccacatcaacaagaagagcctgtttgacaggaagcactacttctacgccgacctgcctgctggctaccagatcacccagcagaggctgcccatcgctgtgaatggcagcctcatctatggagtgtgtgccggcaagaagcagagccaggtgatccccaagacagtgcgcatcaagcagatccagctggagcaggacagcggcaagagcctgcatgacaacctgcggagccagaccctgattgacctgaacagagctggggtgggcctgctggaggtggtgctggagccagacatgagctgtggggaggaggccgccacagctgtgcgggagctgcagctgatcctgcaggccctgggcaccagccaggccaacatggccgagggccagctgcgggtggatgccaacatctctgtgcaccaccctggagagcccctgggcgtgaggacagaggtgaagaacctgaacagcatccgcttcctggccaaggccatcgactatgagatccagaggcagatcaatgagctggagaatggaggagagatcctgaatgagaccaggagcttccaccacaagctgggctgcaccatgtccatgagggacaaggagggcaagcaggactaccgcttcatgcctgagcccaacctgccccccctggtgctgtatgatgccaccagcctgcctgctggagctgacccccagcaggtgatcaacatcgaccagatccgggagaccctgcctgagctgcccagcgtgacccgggagaagctggtgcagcagtatggcatgctgctggagcacagcttcaccctgctgaatgaggtgggcctgctggagttcttccagaatgtcatcaaggagaccagggctgagcccaagaaggtgacctcctgggtgctgaacaccttcctgggctacctgaagcagcagaacctggccgtgtctgagagccctgtgaccccatctgccctggccgagctgctggacctgctggacagcaggaccatcagcagcagcgctgccaagcaggtgtttgaggagctgtggaagcgggagggcaagaccccaggccagatcgtgtctgagaagcagctggagctgatgcaggaccagggcgccctggagcagctgtgccacagcgtgatggaggcccacccccaggtggtgatggatgtgaagaacagaaacccccgggccatcaacaagctgattggcctggtgaggaaggccacccagagcagagctgaccctgtgatgatcaaggagatcctggagaagaagctgagcctgtag

SEQ ID NO: 147619 - DNA, 1674 bp, Artificial Sequence
  derived and/or modified sequence
atggccgcccccatgctgcggtggggctgccggggccggcggtgggctttcgcgagagtagacggaggatcctgccacaggcgaggagctccaacagggagcacaagcaaccagatcaggggagagtctagcgtcgcacaacagccccttcacacggcgcagaagacacgcaagggcgagcacaagtgggccgcagtggtgggcctagagatacatgcccagataagcagtaactctaagctctttagtggtagccaggtacgattttctgccccacccaatagcctcgtttcgttttttgacgccagtctgcccggaaccctcccagtactgaaccgcagatgcgtggaagccgcagtgatgacagggctggctctgaattgccatattaataaaaagagcttatttgatcggaaacattatttctacgctgatttacccgcggggtaccaaatcacccaacagcggctcccgattgccgtgaatggtagcttgatctatggtgtctgtgctggtaaaaaacagtctcaggtcattccgaaaacagttcgaataaagcagattcagctggagcaagatagtggcaagtcccttcacgacaacctgcgtagccaaaccctgatcgacctgaatagagccggggtgggcctactggaggtcgtgttagaacccgatatgagttgcggagaagaggccgctacggccgtccgcgagctgcaactcatactgcaagctctgggcacctctcaggccaacatggcagagggtcagctgcgcgttgatgccaatattagcgtgcatcacccaggcgaaccgctgggggtccgcaccgaagtcaagaaccttaactcgattcggttccttgccaaggccatcgactacgaaatccagaggcaaataaacgaactggagaacgggggcgagattctcaacgagacgcggagcttccatcacaagttagggtgcaccatgtccatgcgggataaagagggtaaacaagattatcgattcatgcctgaacccaatctccccccgctggtgctgtatgatgccacaagcctgcctgccggagcagatccccaacaggtgattaacattgaccaaatccgggagactctgccagagctgcctagcgtcacccgggaaaagcttgtgcaacagtatgggatgctcctggagcattccttcacattactgaatgaggtgggcttactcgaatttttccagaacgtcattaaagagactagggcagagcccaagaaggttacatcctgggtgctgaataccttcctgggatatctaaaacagcagaacctagcagtctcggagtcccccgtgactcctagcgccttagcagaactcttagatctgctggactccaggacgattagttccagcgccgctaaacaagtatttgaggaattgtggaagagggaaggcaaaactcctggccagattgtaagcgaaaagcaactcgaattgatgcaggatcagggagctctcgagcagctgtgccactccgtcatggaagcgcatccccaggtggtgatggacgtgaagaaccgtaatccccgggcaatcaacaagctgattggcttggtcaggaaagccacccaatccagagctgatccggtgatgataaaagaaattctggagaagaagttgagtctctag

SEQ ID NO: 147620 - DNA, 2385 bp, Artificial Sequence
  derived and/or modified sequence
atagtgaggctgagtcacctgaccaagaccctggagttacaatggcggcgcccatgctgcgctggggctgccgtggaagacgttgggctttcgcccgggttgacggtggttcttgccaccgaagaggggctccgactgggtccacatccaaccagattaggggagagagctcagtggctcagcagcccctccacacggcccagaagacgaggaaaggtgaacacaaatgggctgctgtggtaggtttggaaattcatgcccagatttcctccaactctaaactcttctctggatctcaagttcgcttttcagcacctccaaattctttggtttctttttttgatgcatctctacctggaactttgccggttctcaacaggaggtgtgtagaagcggcggtgatgacaggcctggctctgaactgccacataaacaagaagtccttgtttgacaggaagcactacttctatgcagacctccctgcaggctaccaaattacccagcagaggctcccaattgctgtgaatgggagcttgatatatggcgtctgtgcagggaagaagcagagtcaggtgatccccaagacggtgaggatcaagcagatccagttggagcaagacagtggcaaaagcctccacgacaacctgaggtctcagacgctcattgatttgaacagggcaggagtgggccttctggaggtggtcctggagcccgacatgtcctgtggagaagaggcggcaacagctgtcagggagctgcagctgatccttcaagccctggggaccagccaggcgaacatggcagagggccagttgagagtggatgccaatatatccgtgcatcaccctggggagcctttgggcgttcgaacggaagtgaagaatctcaacagcatcaggttcctggccaaagccatagactatgaaattcagaggcaaatcaatgaacttgagaatggaggtgaaattctgaacgaaacacgctcatttcatcacaagctggggtgcaccatgtcaatgagagacaaagaaggaaaacaggactacaggttcatgccagaacccaacctgcctcccctggtgctctacgacgccacatctctgcccgcaggtgcagacccacagcaagtgatcaatattgaccagattcgggagacactcccggagctccccagtgtgacccgagagaagcttgtccaacagtatgggatgctgctggaacacagcttcactttgctgaacgaagtcggcctactggagttcttccaaaatgtgataaaagaaactagggcagagccaaaaaaggtgactagttgggtcctcaacacttttctgggctatttaaagcaacagaacctcgctgtcagtgagagtcctgtcacaccctctgcactcgctgagcttcttgacctgctggacagcagaacaatttcttcatcagcagctaaacaggtgtttgaggaactgtggaagagggaaggcaagactccagggcagattgtttcagaaaagcagcttgaactgatgcaggaccagggggcactggagcagctctgccactctgtgatggaggcccatcctcaagtggtaatggatgtgaagaacagaaaccccagagctataaataaactgattgggttggtccggaaagcgactcaaagccgagcagatccagtcatgataaaggagatcctggagaagaagctgtcattgtgagatgtttgggatccccttgcccaagggacaacaacaaacagtgcagcctgactgggaacaggatcctgtgaaagctgatgcccatgtgccctgagagctgcctctcaatccctgtcccaagccacagctatggcattaatgtcaccagtgttctcaccctctaggccctgtgcctggaggtgcctccacagccgaccagcagccaccccgcctgcttcatccacatcaggagggtccggtgaggctgcagcagtggttaaggagtaacaccttcttgtattaaggaattttaaactaaataaaatgtatgttggagatactgttacccattctaagaaaacttttcattctgcagttccttcaacaaatatttttgagcaactcctaagggccagccattgtaggtgatgggcattagcagtggtcaagagagactgtaatttggatgtattgttttcagacctaaacacaggttaacaaagatgaaaatacaaccaaataaactggcacagtataaacacatttgtttgtttaaggaggtctcaagagggtggggaaggaggatattattagaattaatcaacctatcgactgagtagaagtgatattgcctgttaaactccctccccatcccagaaggcacagtctgagaataaatgaattaaaaaaa

SEQ ID NO: 147621 - DNA, 1674 bp, Artificial Sequence
  derived and/or modified sequence
atggccgcaccaatgctgaggtgggggtgccggggacgtcggtgggcattcgctcgggttgatggcggttcgtgccacaggcgcggtgcccctactggatccacatccaatcagattaggggggaatctagcgtggcacagcaacctttgcacaccgcgcagaagacccggaagggcgagcacaaatgggcagccgtggtggggctggagattcacgcacagatttcttccaatagcaagctattcagcgggtctcaagttcggttttctgctccacccaatagtttagtgtcattctttgatgcaagtttgccagggaccctcccggtgctgaatcggcgatgcgtggaggccgctgtcatgactggtctcgcactgaactgccacataaacaagaaatctctgttcgacagaaaacactacttctatgccgacctgcctgccggataccaaattactcagcaacgattacccatcgcagttaacggctccctcatctatggggtgtgtgctgggaagaaacagagtcaggtcatcccaaagacagtcaggatcaaacaaattcaattggaacaggattctggaaagtcgttacatgacaacttaaggtcccagacccttattgatttaaatagggcaggcgtggggctgctggaagttgtgctggagcccgacatgtcatgtggggaggaggctgccactgccgtcagggaactacagcttatattgcaggccctcggaacttcgcaggcaaacatggctgagggccagctgcgagtggacgctaacatcagcgtgcaccaccccggtgaacccctgggcgtgcggacggaagtaaagaatttaaatagcatccggtttctggcaaaagccattgactacgagatccaacggcagataaacgagttggaaaatggcggagaaatcctgaatgagacaaggtcgtttcaccataaactgggctgcacaatgtccatgcgggacaaggagggtaaacaggattatcgtttcatgcccgagcctaatctgccccctctggtcctctacgatgccaccagcctccccgctggtgcagatccccagcaggtcattaacatcgaccagattagagaaaccctgcccgagcttccttcagtgacccgcgagaagctagtccaacagtatggcatgctcttggagcacagctttactcttcttaatgaggtgggcctcttggaatttttccagaacgtgatcaaggaaactcgggcagaacccaaaaaagtgacatcatgggtcttgaatacatttctgggctatctgaagcagcagaatcttgcggtatcggagtcgcccgtcacaccatcagcactcgcagaacttcttgaccttcttgatagcagaacaatcagcagtagtgcggcaaaacaggtctttgaggagttgtggaagagagagggcaaaacaccaggtcagattgtgtccgaaaaacaactcgagctgatgcaggatcagggagctctggagcagctatgccattcagtcatggaagctcacccccaggtagtcatggatgttaaaaacagaaatcctcgagcgatcaataagctaatcgggctcgtgaggaaggcaacacaatcacgtgcagatcctgtgatgatcaaggagatattggagaaaaagctgtccctgtag

SEQ ID NO: 147622 - protein, 520 aa, Artificial Sequence
  derived and/or modified sequence
MPLELTQSRVQKIWVPVDHRPSLPRSCGPKLTNSPTVIVMVGLPARGKTYISKKLTRYLNWIGVPTKVFNVGEYRREAVKQYSSYNFFRPDNEEAMKVRKQCALAALRDVKSYLAKEGGQIAVFDATNTTRERRHMILHFAKENDFKAFFIESVCDDPTVVASNIMEVKISSPDYKDCNSAEAMDDFMKRISCYEASYQPLDPDKCDRDLSLIKVIDVGRRFLVNRVQDHIQSRIVYYLMNIHVQPRTIYLCRHGENEHNLQGRIGGDSGLSSRGKKFASALSKFVEEQNLKDLRVWTSQLKSTIQTAEALRLPYEQWKALNEIDAGVCEELTYEEIRDTYPEEYALREQDKYYYRYPTGESYQDLVQRLEPVIMELERQENVLVICHQAVLRCLLAYFLDKSAEEMPYLKCPLHTVLKLTPVAYGCRVESIYLNVESVCTHRERSEDAKKGPNPLMRRNSVTPLASPEPTKKPRINSFEEHVASTSAALPSCLPPEVPTQLPGQNMKGSRSSADSSRKH

SEQ ID NO: 147623 - DNA, 1563 bp, Artificial Sequence
  derived and/or modified sequence
atgcccctggagttgacacaaagccgggtgcagaagatttgggttccagttgaccacaggccttcattgccacggtcttgcggccccaaactgactaacagccctactgtgatagttatggtgggccttcctgcacgaggcaagacttatatctcaaaaaaacttacgcgatacttaaattggattggcgtgcccacaaaggtgtttaacgtgggagagtaccggcgcgaggctgtgaaacagtactccagttacaatttcttcagaccagataatgaggaggcaatgaaggtcagaaaacaatgcgcactcgctgccttacgcgacgtcaagtcctacttggcaaaggaggggggtcagatcgcagtgtttgacgctacaaacacaacccgggaacgcagacacatgattctacactttgctaaggagaatgacttcaaggccttcttcattgaatccgtgtgcgatgacccaaccgtggtagcctccaatattatggaagtcaaaatttcgagccccgattacaaagactgcaactcggcagaagcaatggatgattttatgaaacgcatctcctgttacgaggcttcataccagccattagatcctgataagtgtgatcgagatctgtccctgattaaagtgattgacgttggacgtagatttcttgtgaatcgggtacaagaccacattcagagccgcatcgtgtattatctgatgaatatccatgtgcagccaagaaccatctacctgtgccggcacggagagaacgagcacaatctccagggacgaatcgggggcgacagcgggctctcctcacgtggtaaaaagtttgctagcgctctgagcaaattcgttgaggaacagaatctgaaggacctacgggtgtggacctcacagttgaagtccaccatccagacagccgaggctttgagactaccatacgagcagtggaaggcactcaacgagatagatgctggggtgtgtgaagaactcacttacgaagagattcgagatacatatccggaggaatacgccttacgggagcaggacaagtattattatcgctacccaacaggagaaagctaccaggacctcgtccagcgcctcgaaccagtaatcatggagctggagaggcaggagaatgttctggtgatctgccaccaggccgttcttcgctgcctcctggcctacttcctcgataaatctgccgaggagatgccctacctaaagtgcccactgcatactgtgctcaaactgaccccggtcgcctacggatgccgcgtcgagtcaatctatctcaatgtggagagcgtgtgcactcaccgtgaacggtctgaagatgctaagaagggtcctaaccccctgatgaggcgaaacagtgtcacccctcttgcctctcctgaaccaaccaagaagcctcgtatcaattctttcgaagaacacgttgcctctacttctgcagctttaccaagttgtttacctccagaagtgcccacgcagctgcctggtcaaaatatgaagggtagtagatcttcagctgacagctcccggaaacactag

SEQ ID NO: 147624 - DNA, 1563 bp, Artificial Sequence
  derived and/or modified sequence
atgcccctggagctgacccagagccgggtgcagaagatctgggtgcctgtggaccaccggcccagcctgcccaggagctgtggccccaagctgaccaacagccccaccgtcatcgtgatggtgggcctgcctgcccggggcaagacctacatcagcaagaagctgacccgctacctgaactggattggagtgcccaccaaggtgttcaacgtgggggagtacagaagagaggccgtgaagcagtacagcagctacaacttcttccggccagacaatgaggaggccatgaaggtgaggaagcagtgtgccctggccgccctgagagatgtgaagagctacctggccaaggagggcggccagattgctgtgtttgatgccaccaacaccacccgggagaggaggcacatgatcctgcactttgccaaggaaaatgacttcaaggccttcttcattgaatctgtgtgtgatgaccccaccgtggtggccagcaacatcatggaggtgaagatcagcagcccagactacaaggactgcaacagcgctgaggccatggatgacttcatgaagaggatcagctgctatgaggccagctaccagcccctggaccctgacaagtgtgaccgggacctgagcctcatcaaggtgattgatgtgggccgccgcttcctggtgaacagagtgcaggaccacatccagagcagaattgtgtactacctgatgaacatccacgtgcagcccaggaccatctacctgtgccgccacggggagaatgagcacaacctgcagggcagaattggaggagacagcggcctgagcagccggggcaagaagtttgccagcgccctgagcaagtttgtggaggagcagaacctgaaggacctgcgggtgtggaccagccagctgaagagcaccatccagacagctgaggccctgcggctgccctatgagcagtggaaggccctgaatgaaattgatgctggggtgtgtgaggagctgacctatgaggagatccgggacacctacccagaggagtatgccctgcgggagcaggacaagtactactaccgctaccccactggagagagctaccaggacctggtgcagaggctggagcccgtcatcatggagctggagcggcaggagaatgtgctggtgatctgccaccaggccgtgctgcgctgcctgctggcctacttcctggacaagtctgctgaggagatgccctacctgaagtgccccctgcacacagtgctgaagctgacccctgtggcctacggctgccgggtggagagcatctacctgaatgtggagagcgtgtgcacccaccgggagaggagtgaagatgccaagaagggccccaaccccctgatgagaagaaattctgtgacccccctggccagccctgagcccaccaagaagccccgcatcaacagctttgaggagcacgtggccagcaccagcgctgccctgcccagctgcctgcccccagaggtgcccacccagctgcccggccagaacatgaagggcagccgcagcagcgctgacagcagcaggaagcactag

SEQ ID NO: 147625 - DNA, 1563 bp, Artificial Sequence
  derived and/or modified sequence
atgcccctggagctgacccagagccgggtgcagaagatctgggtgcctgtggatcaccgcccttctctgccaaggagctgcgggcccaagctgaccaacagccctacggtgatcgtgatggtaggactgcctgctagaggaaaaacatatattagcaagaaactgaccagatatttgaattggataggggtgcccactaaagtgttcaacgtgggggaatatcgacgcgaagcagtgaagcagtatagctcttataacttctttcgaccagacaatgaagaagcaatgaaggtgaggaaacaatgtgccctcgctgctctgcgtgatgtgaagtcatacctggccaaggaaggaggccagatcgccgtgttcgacgcaacaaatactacccgagagcgaagacatatgattctgcattttgctaaggagaacgacttcaaggcctttttcattgaatccgtgtgcgacgaccccactgtggtcgcaagtaatatcatggaagttaagatcagttcacccgactacaaagactgtaactctgcagaggcgatggatgactttatgaagcgaatcagttgctacgaggctagttaccagccactggaccccgataagtgtgatcgagatctcagccttatcaaggtcattgatgtgggtcggcgattccttgtgaacagagttcaggatcacattcagtcccgcatcgtgtactacctcatgaatatacacgtgcagccaagaacaatctatctctgccggcatggagaaaacgaacataacttgcagggtcgcatcggaggggacagcggactgtccagcagagggaagaagttcgctagcgcactgagcaagttcgtggaggagcagaatctgaaagatttgcgggtgtggacctcccagctgaagagtaccatccagacagccgaggcactcagactgccatacgaacagtggaaggctctgaacgagatagacgccggggtgtgcgaggagctgacatacgaggaaattagagacacctatcccgaagagtacgcactgcgcgaacaagataaatactactatcggtaccccactggagagtcctaccaggatctggttcagcggttggaaccagttatcatggagctggagcgccaagagaatgtcctcgtgatttgtcatcaggcggtcctcagatgcctgctggcgtatttcctagacaagagcgccgaggaaatgccatacctgaaatgtccactgcacacagtgctgaagcttacgcctgttgcttacggatgcagagttgagtctatctacttaaacgttgagagcgtgtgtacgcatagagagcgaagtgaggacgcaaagaagggtccaaacccattaatgcgacgaaactccgtgacaccccttgcctctccagaaccaacaaaaaaacccaggattaatagttttgaagaacatgtagctagcaccagcgccgccctacctagttgtctacccccagaagttcctactcagcttccaggacaaaacatgaaaggcagtaggtccagcgccgatagcagccggaagcactag

SEQ ID NO: 147626 - DNA, 1563 bp, Artificial Sequence
  derived and/or modified sequence
atgcccctcgagctgacccagtcccgggtacagaaaatctgggtgcccgtggatcatagaccctccctccctcgctcttgtgggcctaaattaacaaatagccctacggtgattgtcatggtgggcttacccgctagaggtaaaacttacatcagtaagaagctgacgagatatctcaactggatcggcgtgcccaccaaggtttttaatgtcggcgagtacaggcgggaagctgttaaacagtatagctcatacaatttctttcggcctgataatgaagaagcgatgaaagtccggaagcagtgtgccctcgccgcactgagagacgttaaatcgtacctggcaaaggagggcggacagattgccgtgttcgacgcaaccaacaccacgagagaacgtcggcacatgatcctccatttcgctaaggagaacgatttcaaggctttttttattgagtcagtgtgcgatgaccctactgtagtggctagtaatattatggaagtgaagattagctctccggattacaaagattgcaatagtgctgaggcaatggacgattttatgaagaggataagttgctacgaagcgtcctaccagcctctggaccctgacaaatgtgacagagacctgtctttaatcaaggttatcgatgtagggaggaggttccttgtaaatagagtgcaggatcacattcaatctcggattgtctactacctaatgaatatccatgtgcaacccaggaccatttatctgtgtcgtcatggggaaaatgaacataacctgcagggacgtattgggggtgatagcgggctttcctcacggggaaagaagttcgcatcagccctgtctaaatttgtggaggagcagaacctgaaggatttgagggtgtggacgtcgcaacttaaatctaccatccagactgcggaagcgttgcggcttccttacgaacagtggaaagcactgaatgagatcgacgcaggcgtgtgcgaggagctcacgtacgaagagatcagggacacctaccctgaggaatacgctctgcgggagcaggataaatactactacagatatcccacgggcgagagctatcaggacttagtgcagagactagagcctgtgatcatggagcttgagaggcaggagaacgtactggtcatctgtcaccaggccgtcctgcggtgcctacttgcttatttcttggacaagtccgccgaggaaatgccttatctaaagtgtcctctccatacggtgctcaagctgacccccgtggcctatggttgccgagttgagtccatctacctcaatgtggaatccgtctgtactcaccgagagcgaagcgaagatgctaagaaaggacccaacccactaatgcggaggaattccgtgacgccgctcgcctcccccgaaccaacaaagaagcctcgcataaacagctttgaggagcatgtggccagcactagcgccgcactcccgtcatgtttacctccagaggtgcccacacagcttccaggccagaacatgaaaggaagcagaagctccgccgactcatcacggaaacactag

SEQ ID NO: 147627 - DNA, 4483 bp, Artificial Sequence
  derived and/or modified sequence
cagccaagccggagaggaggcgagcagcagggcctggtggcgagagcgcggctgtcactgcgcccgagcatcccagagctttccgagcggacgagccggccgtgccgggcatccccagcctcgctaccctcgcagcacacgtcgagccccgcacaggcgagggtccggaacttagcccaaagcacgtttcccctggcagcgcaggaaacgcccggccgcgcgccggcgcacgcccccctctcctcctttgttccgggggtcggcggccgctctcctgccagcgtcgggatctcggccccgggaggcgggccgtcgggcgcagccgcgaagatgccgttggaactgacgcagagccgagtgcagaagatctgggtgcccgtggaccacaggccctcgttgcccagatcctgtgggccaaagctgaccaactcccccaccgtcatcgtcatggtgggcctccccgcccggggcaagacctacatctccaagaagctgactcgctacctcaactggattggcgtccccacaaaagtgttcaacgtcggggagtatcgccgggaggctgtgaagcagtacagctcctacaacttcttccgccccgacaatgaggaagccatgaaagtccggaagcaatgtgccttagctgccttgagagatgtcaaaagctacctggcgaaagaagggggacaaattgcggttttcgatgccaccaatactactagagagaggagacacatgatccttcattttgccaaagaaaatgactttaaggcgtttttcatcgagtcggtgtgcgacgaccctacagttgtggcctccaatatcatggaagttaaaatctccagcccggattacaaagactgcaactcggcagaagccatggacgacttcatgaagaggatcagttgctatgaagccagctaccagcccctcgaccccgacaaatgcgacagggacttgtcgctgatcaaggtgattgacgtgggccggaggttcctggtgaaccgggtgcaggaccacatccagagccgcatcgtgtactacctgatgaacatccacgtgcagccgcgtaccatctacctgtgccggcacggcgagaacgagcacaacctccagggccgcatcgggggcgactcaggcctgtccagccggggcaagaagtttgccagtgctctgagcaagttcgtggaggagcagaacctgaaggacctgcgcgtgtggaccagccagctgaagagcaccatccagacggccgaggcgctgcggctgccctacgagcagtggaaggcgctcaatgagatcgacgcgggcgtctgtgaggagctgacctacgaggagatcagggacacctaccctgaggagtatgcgctgcgggagcaggacaagtactattaccgctaccccaccggggagtcctaccaggacctggtccagcgcttggagccagtgatcatggagctggagcggcaggagaatgtgctggtcatctgccaccaggccgtcctgcgctgcctgcttgcctacttcctggataagagtgcagaggagatgccctacctgaaatgccctcttcacaccgtcctgaaactgacgcctgtcgcttatggctgccgtgtggaatccatctacctgaacgtggagtccgtctgcacacaccgggagaggtcagaggatgcaaagaagggacctaacccgctcatgagacgcaatagtgtcaccccgctagccagccccgaacccaccaaaaagcctcgcatcaacagctttgaggagcatgtggcctccacctcggccgccctgcccagctgcctgcccccggaggtgcccacgcagctgcctggacaaaacatgaaaggctcccggagcagcgctgactcctccaggaaacactgaggcagacgtgtcggttccattccatttccatttctgcagcttagcttgtgtcctgccctccgcccgaggcaaaacgtatcctgaggacttcttccggagagggtggggtggagcagcgggggagccttggccgaagagaaccatgcttggcaccgtctgtgtcccctcggccgctggacaccagaaagccacgtgggtccctggcgccctgcctttagccgtggggcccccacctccactctctgggtttcctaggaatgtccagcctcggagaccttcacaaagccttgggagggtgatgagtgctggtcctgacaggaggccgctggggacactgtgctgttttgtttcgtttctgtgatctcccggcacgtttggagctgggaagaccacactggtggcagaatcctaaaattaaaggaggcaggctcctagttgctgaaagttaaggaatgtgtaaaacctccacgtgactgtttggtgcatcttgacctgggaagacgcctcatgggaacgaacttggacaggtgttgggttgaggcctcttctgcaggaagtccctgagctgagacgcaagttggctgggtggtccgcaccctggctctcctgcaggtccacacaccttccaggcctgtggcctgcctccaaagatgtgcaagggcaggctggctgcacggggagagggaagtattttgccgaaatatgagaactggggcctcctgctcccagggagctccagggcccctctctcctcccacctggacttggggggaactgagaaacactttcctggagctgctggcttttgcacttttttgatggcagaagtgtgacctgagagtcccaccttctcttcaggaacgtagatgttggggtgtcttgccctggggggcttggaacctctgaaggtggggagcggaacacctggcatccttccccagcacttgcattaccgtccctgctcttcccaggtggggacagtggcccaagcaaggcctcactcgcagccacttcttcaagagctgcctgcacactgtcttggagcatctgccttgtgcctggcactctgccggtgccttgggaaggtcggaagagtggactttgtcctggccttcccttcatggcgtctatgacacttttgtggtgatggaaagcatgggacctgtcgtctcagcctgttggtttctcctcattgcctcaaaccctggggtaggtgggacggggggtctcgtgcccagatgaaaccatttggaaactcggcagcagagtttgtccaaatgacccttttcaggatgtctcaaagcttgtgccaaaggtcacttttctttcctgccttctgctgtgagccctgagatcctcctcccagctcaagggacaggtcctgggtgagggtgggagatttagacacctgaaactgggcgtggagagaagagccgttgctgtttgttttttgggaagagcttttaaagaatgcatgtttttttcctggttggaattgagtaggaactgaggctgtgcttcaggtatggtacaatcaagtgggggattttcatgctgaaccattcaagccctccccgcccgttgcacccactttggctggcgtctgctggagaggatgtctctgtccgcattcccgtgcagctccaggctcgcgcagttttctctctctccctggatgttgagtctcatcagaatatgtgggtagggggtggacgtgcacgggtgcatgattgtgcttaacttggttgtatttttcgatttgacatggaaggcctgttgctttgctcttgagaatagtttctcgtgtccccctcgcaggcctcattctttgaacatcgactctgaagtttgatacagataggggcttgatagctgtggtcccctctcccctctgactacctaaaatcaatacctaaatacagaagccttggtctaacacgggacttttagtttgcgaagggcctagatagggagagaggtaacatgaatctggacagggagggagatactatagaaaggagaacactgcctactttgcaagccagtgacctgccttttgaggggacattggacgggggccgggggcgggggttgggtttgagctacagtcatgaacttttggcgtctactgattcctccaactctccaccccacaaaataacggggaccaatatttttaactttgcctatttgtttttgggtgagtttcccccctccttattctgtcctgagaccacgggcaaagctcttcattttgagagagaagaaaaactgtttggaaccacaccaatgatatttttctttgtaatacttgaaatttatttttttattattttgatagcagatgtgctatttatttatttaatatgtataaggagcctaaacaatagaaagctgtagagattgggtttcattgttaattggtttgggagcctcctatgtgtgacttatgacttctctgtgttctgtgtatttgtctgaattaatgacctgggatataaagctatgctagctttcaaacaggagatgcctttcagaaatttgtatattttgcagttgccagaccaataaaatacctggttgaaataca

SEQ ID NO: 147628 - DNA, 1563 bp, Artificial Sequence
  derived and/or modified sequence
atgcccctggagctgacccagagcagagtgcagaagatctgggtgcccgtggaccacagacccagcctgcccagaagctgcggccccaagctgaccaacagccccaccgtgatcgtgatggtgggcctgcccgccagaggcaagacctacatcagcaagaagctgaccagatacctgaactggatcggcgtgcccaccaaggtgttcaacgtgggcgagtacagaagagaggccgtgaagcagtacagcagctacaacttcttcagacccgacaacgaggaggccatgaaggtgagaaagcagtgcgccctggccgccctgagagacgtgaagagctacctggccaaggagggcggccagatcgccgtgttcgacgccaccaacaccaccagagagagaagacacatgatcctgcacttcgccaaggagaacgacttcaaggccttcttcatcgagagcgtgtgcgacgaccccaccgtggtggccagcaacatcatggaggtgaagatcagcagccccgactacaaggactgcaacagcgccgaggccatggacgacttcatgaagagaatcagctgctacgaggccagctaccagcccctggaccccgacaagtgcgacagagacctgagcctgatcaaggtgatcgacgtgggcagaagattcctggtgaacagagtgcaggaccacatccagagcagaatcgtgtactacctgatgaacatccacgtgcagcccagaaccatctacctgtgcagacacggcgagaacgagcacaacctgcagggcagaatcggcggcgacagcggcctgagcagcagaggcaagaagttcgccagcgccctgagcaagttcgtggaggagcagaacctgaaggacctgagagtgtggaccagccagctgaagagcaccatccagaccgccgaggccctgagactgccctacgagcagtggaaggccctgaacgagatcgacgccggcgtgtgcgaggagctgacctacgaggagatcagagacacctaccccgaggagtacgccctgagagagcaggacaagtactactacagataccccaccggcgagagctaccaggacctggtgcagagactggagcccgtgatcatggagctggagagacaggagaacgtgctggtgatctgccaccaggccgtgctgagatgcctgctggcctacttcctggacaagagcgccgaggagatgccctacctgaagtgccccctgcacaccgtgctgaagctgacccccgtggcctacggctgcagagtggagagcatctacctgaacgtggagagcgtgtgcacccacagagagagaagcgaggacgccaagaagggccccaaccccctgatgagaagaaacagcgtgacccccctggccagccccgagcccaccaagaagcccagaatcaacagcttcgaggagcacgtggccagcaccagcgccgccctgcccagctgcctgccccccgaggtgcccacccagctgcccggccagaacatgaagggcagcagaagcagcgccgacagcagcagaaagcactag

SEQ ID NO: 147629 - protein, 469 aa, Artificial Sequence
  derived and/or modified sequence
MASPRELTQNPLKKIWMPYSNGRPALHACQRGVCMTNCPTLIVMVGLPARGKTYISKKLTRYLNWIGVPTREFNVGQYRRDVVKTYKSFEFFLPDNEEGLKIRKQCALAALRDVRRFLSEEGGHVAVFDATNTTRERRATIFNFGEQNGYKTFFVESICVDPEVIAANIVQVKLGSPDYVNRDSDEATEDFMRRIECYENSYESLDEDLDRDLSYIKIMDVGQSYVVNRVADHIQSRIVYYLMNIHVTPRSIYLCRHGESELNLKGRIGGDPGLSPRGREFAKSLAQFISDQNIKDLKVWTSQMKRTIQTAEALGVPYEQWKVLNEIDAGVCEEMTYEEIQDNYPLEFALRDQDKYRYRYPKGESYEDLVQRLEPVIMELERQENVLVICHQAVMRCLLAYFLDKAAEQLPYLKCPLHTVLKLTPVAYGCKVESIFLNVAAVNTHRDRPQNVDISRPPEEALVTVPAHQ

SEQ ID NO: 147630 - DNA, 1410 bp, Artificial Sequence
  derived and/or modified sequence
atggcatctccgcgggagctaacccagaaccccttgaagaagatctggatgccctactcgaacggtaggcctgctttgcacgcctgtcagcgaggggtctgcatgaccaattgtcccactttgatcgtcatggtagggcttcccgcccgaggcaagacatacatttccaaaaaactgaccaggtatctgaattggattggcgttccgactagagaattcaacgttggacaatacagacgggatgtagtgaaaacatataaatcatttgaattcttccttcctgacaatgaagaagggctcaagatcaggaagcagtgtgctctggccgccttaagggacgtgcgtcgattcttgtcggaagaaggcggccacgtggcggtttttgatgctactaacacgacacgggaaagaagggctactatttttaactttggcgaacagaacgggtacaagacctttttcgtcgaatccatatgcgtggatcccgaagtcatagccgcaaacatcgtacaggttaaactaggcagccccgactacgtaaatcgagatagtgacgaagctacagaagactttatgcgacgcatagagtgctacgaaaattcctacgaaagtctcgacgaggatctggatcgggatctgtcttatatcaaaataatggacgtaggccagtcttatgtggtcaatcgggttgccgatcacatacagtcccggatagtgtactacctcatgaatattcatgtgaccccccgctcgatctatctctgccgacacggggaatccgaacttaacctgaaagggcggatcggcggtgaccctgggctgagcccacgggggcgcgagtttgctaagagcctcgcccagttcattagtgaccaaaacatcaaagatctcaaagtatggacaagccagatgaaacgtaccatccagacagcagaggcgttgggggtgccatacgagcagtggaaagtcctcaacgaaattgatgccggcgtgtgtgaggaaatgacttacgaggagattcaggacaattatcctttagagtttgcgctccgggaccaggataagtacaggtacagataccccaagggagaaagctacgaggacctcgtccaaagactcgagccagtgattatggagctggagagacaagagaacgttctagttatctgccaccaagcggtgatgcgctgtctgttagcctatttcctcgacaaggctgccgagcagctgccttacctgaaatgtcccttacatacagttttgaagctgacccccgtggcttacggttgtaaggtggagagtatcttccttaatgttgcagcagtgaacacccaccgggacagacctcagaacgtcgatatcagcaggccacccgaggaggccctcgtaaccgtgccagcccaccagtag

SEQ ID NO: 147631 - DNA, 1410 bp, Artificial Sequence
  derived and/or modified sequence
atggccagcccccgggagctgacccagaaccccctgaagaagatctggatgccctacagcaatggccggcctgccctgcacgcctgccagaggggcgtgtgcatgaccaactgccccaccctcatcgtgatggtgggcctgcctgcccggggcaagacctacatcagcaagaagctgacccgctacctgaactggattggagtgcccacccgggagttcaacgtgggccagtacagaagagatgtggtgaagacctacaagagctttgagttcttcctgcctgacaatgaggagggcctgaagatcaggaagcagtgtgccctggccgccctgagagatgtgcggcgcttcctgtctgaggagggcggccacgtggccgtgtttgatgccaccaacaccacccgggagcggcgggccaccatcttcaactttggagagcagaatggctacaagaccttctttgtggagagcatctgtgtggaccctgaggtgattgctgccaacatcgtgcaggtgaagctgggcagcccagactatgtgaacagagacagtgatgaggccacagaggacttcatgagaagaattgagtgctatgaaaattcctatgagagcctggatgaggacctggaccgggacctgagctacatcaagatcatggatgtgggccagagctatgtggtgaacagagtggccgaccacatccagagccgcatcgtgtactacctgatgaacatccacgtgacccccaggagcatctacctgtgcagacatggagagagcgagctgaacctgaagggccgcatcggcggggaccccggcctgagcccccggggccgggagtttgccaagagcctggcccagttcatcagtgaccagaacatcaaggacctgaaggtgtggaccagccagatgaagaggaccatccagacagctgaggccctgggcgtgccctatgagcagtggaaggtgctgaatgaaattgatgctggggtgtgtgaggagatgacctatgaggagatccaggacaactaccccctggagtttgccctgcgggaccaggacaagtaccgctaccgctaccccaagggggagagctatgaggacctggtgcagaggctggagcctgtgatcatggagctggagcggcaggagaatgtgctggtgatctgccaccaggccgtgatgcgctgcctgctggcctacttcctggacaaggctgctgagcagctgccctacctgaagtgccccctgcacacagtgctgaagctgacccctgtggcctacggctgcaaggtggagagcatcttcctgaatgtggccgctgtgaacacccaccgggaccggccccagaatgtggacatcagcaggcctcctgaggaggccctggtgacagtgcctgcccaccagtag

SEQ ID NO: 147632 - DNA, 1410 bp, Artificial Sequence
  derived and/or modified sequence
atggccagcccccgggagctgacccagaaccccctgaagaagatctggatgccatacagcaatgggcgcccagcacttcacgcatgccaaagaggagtttgtatgaccaattgtcccaccctcatagtcatggtcggactgcccgcaagggggaagacctatatcagtaagaagttgacacggtacctgaactggattggagtaccgacacgcgagttcaacgtggggcagtatcggcgggatgttgtcaagacctacaaaagtttcgagtttttcctgccagacaacgaggaggggctcaagatccgaaagcaatgcgctctagccgccctccgcgacgtgcggcggttcttgtctgaagagggcggacacgtggcggtgttcgacgccaccaataccaccagggaacgccgagccacgatattcaattttggtgagcagaacggctacaagacattcttcgtggagagcatttgcgtggatcccgaggtgatagccgccaatatcgtccaggtgaaactcggctcacccgactacgttaacagagatagcgacgaggctactgaggatttcatgagacgaattgagtgctacgaaaactcttacgagagcctggacgaagatctggacagagacctttcctatattaaaatcatggatgtgggccagtcttatgttgtgaacagagtggccgaccatatccagtctcggattgtttactatttaatgaatattcacgttacaccaagatctatttatttatgcaggcacggtgagtccgagttaaacctcaagggcaggattggcggagacccggggctgagcccccgtggtcgtgaatttgccaagagtttagctcagtttatttcggaccaaaacatcaaggatctgaaagtgtggaccagccagatgaaaaggactatccagactgctgaagcactcggcgtcccttacgagcagtggaaggttctgaacgaaatcgacgcaggagtatgcgaagaaatgacatatgaggaaatccaggacaattacccactcgagttcgctttgcgagatcaagataaataccgctaccgttaccctaagggggaatcctacgaagacttggtacagcggctcgaaccggtgataatggagctggagcgccaagagaacgtcctcgtaatctgccaccaggccgtaatgaggtgcttactcgcctattttctcgataaggcagccgaacagctgccctatctgaaatgccctcttcatacagtgctgaagttaaccccagtagcctatgggtgtaaagtggagagtatcttcctgaacgtcgctgctgtcaatacgcaccgagatcgcccgcagaacgtggacataagcagaccccccgaagaggcactcgtgacagtgcctgctcaccagtag

SEQ ID NO: 147633 - DNA, 1410 bp, Artificial Sequence
  derived and/or modified sequence
atggctagccccagggaacttacacaaaacccccttaagaaaatttggatgccttacagcaacggtcgcccagcgttgcacgcatgccagaggggtgtctgtatgacaaactgtcccacactcatcgtgatggtcggtttgcccgctaggggcaagacgtatataagcaagaaactgactcgctacctaaattggataggagtgcccacgagggagttcaacgtgggacagtacaggagagatgtggtaaaaacatataaatcattcgagtttttcctgccagataatgaagaaggcctgaaaattagaaaacaatgtgcattggctgctctgcgggacgtgaggagatttctcagtgaagaagggggacatgtggcagtattcgatgccacaaacaccacccgtgagagacgcgctacgatctttaatttcggcgaacaaaacggctataagacattctttgtggagtcgatctgtgtcgatcccgaggtgattgcagccaatattgtgcaggtaaagctcgggagcccagactatgtcaatagagattcagacgaggcaacggaggatttcatgaggcgaattgaatgttatgagaattcatacgaaagcctggatgaggacctggatcgggatctgtcatacatcaaaatcatggacgtgggccaatcatacgttgtgaatcgcgttgcggatcacatccagagtcggatcgtctactatctgatgaatatacatgtcacccctcgcagcatttacttatgccggcatggggaatcagagctgaacctcaagggtcgcataggaggcgaccccggtttgtccccaagggggagggagtttgccaagagcttagctcagttcatctctgaccagaacattaaggatctgaaggtatggaccagccaaatgaagcgtacaatacaaaccgcagaggcccttggcgtgccttatgaacagtggaaggtgttgaatgagatcgatgccggtgtatgtgaggaaatgacttatgaggaaatccaggacaattatcccttagagtttgctctcagagaccaggacaagtataggtaccgctatcccaaaggagagtcatacgaggacctggtgcagcgactcgagccagtgattatggagctggagcgccaggagaacgtcctcgttatctgtcaccaggctgtgatgaggtgcctcctggcctactttctggataaagcagccgaacagttaccttacctgaagtgccccctgcacaccgtgctaaaactgacccctgttgcctacggatgcaaggtggagagcatcttcctcaacgttgccgctgttaacactcatcgcgatcgccctcagaacgttgacatttcccgccctcccgaagaagcgctcgtcacagtgcccgctcaccagtag

SEQ ID NO: 147634 - DNA, 3586 bp, Artificial Sequence
  derived and/or modified sequence
gggctgtcgcggcttgaggaggggcggggcccaaggggcgggacctcgggtggcccgaggtggcccggctgctgggttggaagcggcgcagtccgactcatcccggccccgggatggcgtccccacgggaattgacacagaaccccctgaagaagatctggatgccatacagcaatgggcggcccgctctgcacgcttgccagcgcggtgtgtgcatgaccaactgcccaactctcattgtcatggtgggcctgcccgccaggggcaagacctacatctccaagaagctgactcgatacctgaactggattggtgtgcccactcgggagttcaatgttggccagtatcgccgggacgtggtcaagacctacaaatcttttgaattttttctccccgacaatgaagagggcctgaaaatcaggaagcagtgtgccctggcagccctccgtgacgtccggcggttccttagtgaggaggggggacatgtggcggtttttgatgccacaaacaccacccgagaacggagagcgaccatctttaattttggagaacagaatggctacaagaccttttttgtcgagtccatctgtgtggatcctgaggtcatagctgccaacatcgtgcaagtgaaactgggcagccctgactatgtcaaccgcgacagtgatgaggctacggaggacttcatgaggcgcattgagtgctatgagaactcctacgagtcgctagatgaggacctggatagggacctgtcctatatcaagatcatggatgtgggccagagctacgtggtgaaccgtgtggctgaccacatccagagccgcatcgtatattacctcatgaacatccacgtgaccccccgctccatctacctctgccggcacggggagagcgagctcaacctcaagggccggattggcggggacccaggactgtcccctcggggcagggagtttgccaagagtctagcccagttcatcagtgaccaaaatatcaaggatctgaaggtctggacaagccagatgaagaggacaatccagacggctgaggcactgggtgtgccctatgaacagtggaaggtcctcaacgagatcgatgcgggcgtctgtgaggaaatgacctacgaggaaattcaggataattatccactggagttcgccctgcgggaccaggacaagtaccggtaccggtaccctaaaggggagtcctacgaggacctggtccagagactggagcctgtcatcatggagctggagaggcaagagaatgtgctggtcatctgccaccaggctgtgatgcgctgcctgctggcctacttcctcgacaaggcagcagaacagctgccctacctcaagtgtccgctgcacacagtcctgaagctgactcctgtggcatatggttgtaaagtggagtccatattcctgaacgtggctgctgtgaacacgcaccgggacaggcctcagaacgtggacatctcaagacctccagaggaagcccttgtcacggtgcctgctcaccagtgaccatgttcatccactgtgaccactaggcaggcactgctctctgcagagggggtcattccaggccctccagtgtgtgtgatagtcaccatgccatgcagggatattcttgaagccacacatggctggcggaacccagagcccccaccccagcccacctggctctttgttgacagtcggcgacaaggttgtgcgtggctcctgacctgctgctaagagtcacttgaccagactgcatctgcatgggctgcgcggaggttgcccagccccagtttcttccggcgcagctcttaggtgttcactctcgccagctcagttggctttgtgaagtgtgaaaccctacaatgtgaaaggaaagtgcttgctgtgatgttcctactgtggcccagctgcccagcatggacctggtgactctccacagggcctctaccatcctctctgtggccacttcctgagccagaggccaggtcttcatggggccctgagcttctgctgcctctggtgagagggagagcccttcccatccttacccaccaggaactagagccccaaccacagcagatgcttcctgggcagccactggccaggccgttgtatccatgtcacccttagttgtgggcattcatgaaagcaatgcgcttgcttcagcacattgggatgcacagaaacgtgagggcaggggggcagttgtggtcgcccctccccagttgtgcatgtacccggctacttaggtatgcttaggggagctggtggccaggggtgccccttcaggcctgctctcacagtgaaaccacttcaagacagggcaggaagttaccttcctggtgcacacaccgaagtgctcgagggagaggctgccgccccctctccccttccctggctgtggacactggcagccaatggggaggcggcctctcccctgttgctgcccgtgtccacacaggaatgtacactggtggcagaaacatgcatttgccataaataattcagaaacacttgtatggtcctgtaaaacttctctggtgtttgttgacttctgcctgtgggtctgaggaagggagaaggcagaacccataggcagtccctgggcaagggaggattttcccggccgcagcacagccttccattcatgtgcacgtgagtctggtgaaaatggccttgtgaagtccagtgtctgtcatgcccctgagttcttttggtcccagagaggcagcctgggcagtctgtttacagctggcaaacagactggctggcaagttgtggggctgggtcagaaagtgtctggacttgtaatcgggtgccctgctgtccacaggtggactctggggaagccaggcccctggatcccaagtcctttgtgtccggagcctttcctggcctgtgcctggagggtagcacatctttccagcctcccagggctttgcagcctgcagatgccacctgtccctgagagaagttagcgtccctggccctggccggtggtctctcatccttgtgtgctgctctgctaagagatgtccaaggcggagccggggcaagatccttccagactcatctgtcagagccccaagccctttagacccagagcccaaggaccatgcctttgggacattaggactgcagcctttgcttctgtgtattttggagttttggtgacttttgtcacctggacacactcatttgttagccatagtgggttcccttggtcagcaacagtgcatgtacctctggatgtcatctgaggtgagaccaccgaggccttttctctctgtgtacagaggggagttaggagttgctggactggatgcattacgaggactggggacagggtagagggacatccagggatcagggcatgagtgggggcaaccccccggcctctgccctggcatggtctccgcatgggctgaggtgtagctgattggctgccacatttcggccatgctggctggcgtgcccatgttgcagatattttcccgagttccccagaatggatggtattgaatctcagccacatgcaacactgtgtccagcattctttgcaataaatactttttaaaaaataa

SEQ ID NO: 147635 - DNA, 1410 bp, Artificial Sequence
  derived and/or modified sequence
atggccagccccagagagctgacccagaaccccctgaagaagatctggatgccctacagcaacggcagacccgccctgcacgcctgccagagaggcgtgtgcatgaccaactgccccaccctgatcgtgatggtgggcctgcccgccagaggcaagacctacatcagcaagaagctgaccagatacctgaactggatcggcgtgcccaccagagagttcaacgtgggccagtacagaagagacgtggtgaagacctacaagagcttcgagttcttcctgcccgacaacgaggagggcctgaagatcagaaagcagtgcgccctggccgccctgagagacgtgagaagattcctgagcgaggagggcggccacgtggccgtgttcgacgccaccaacaccaccagagagagaagagccaccatcttcaacttcggcgagcagaacggctacaagaccttcttcgtggagagcatctgcgtggaccccgaggtgatcgccgccaacatcgtgcaggtgaagctgggcagccccgactacgtgaacagagacagcgacgaggccaccgaggacttcatgagaagaatcgagtgctacgagaacagctacgagagcctggacgaggacctggacagagacctgagctacatcaagatcatggacgtgggccagagctacgtggtgaacagagtggccgaccacatccagagcagaatcgtgtactacctgatgaacatccacgtgacccccagaagcatctacctgtgcagacacggcgagagcgagctgaacctgaagggcagaatcggcggcgaccccggcctgagccccagaggcagagagttcgccaagagcctggcccagttcatcagcgaccagaacatcaaggacctgaaggtgtggaccagccagatgaagagaaccatccagaccgccgaggccctgggcgtgccctacgagcagtggaaggtgctgaacgagatcgacgccggcgtgtgcgaggagatgacctacgaggagatccaggacaactaccccctggagttcgccctgagagaccaggacaagtacagatacagataccccaagggcgagagctacgaggacctggtgcagagactggagcccgtgatcatggagctggagagacaggagaacgtgctggtgatctgccaccaggccgtgatgagatgcctgctggcctacttcctggacaaggccgccgagcagctgccctacctgaagtgccccctgcacaccgtgctgaagctgacccccgtggcctacggctgcaaggtggagagcatcttcctgaacgtggccgccgtgaacacccacagagacagaccccagaacgtggacatcagcagaccccccgaggaggccctggtgaccgtgcccgcccaccagtag

SEQ ID NO: 147636 - protein, 1445 aa, Artificial Sequence
  derived and/or modified sequence
MAYSWQTDPNPNESHEKQYEHQEFLFVNQPHSSSQVSLGFDQIVDEISGKIPHYESEIDENTFFVPTAPKWDSTGHSLNEAHQISLNEFTSKSRELSWHQVSKAPAIGFSPSVLPKPQNTNKECSWGSPIGKHHGADDSRFSILAPSFTSLDKINLEKELENENHNYHIGFESSIPPTNSSFSSDFMPKEENKRSGHVNIVEPSLMLLKGSLQPGMWESTWQKNIESIGCSIQLVEVPQSSNTSLASFCNKVKKIRERYHAADVNFNSGKIWSTTTAFPYQLFSKTKFNIHIFIDNSTQPLHFMPCANYLVKDLIAEILHFCTNDQLLPKDHILSVCGSEEFLQNDHCLGSHKMFQKDKSVIQLHLQKSREAPGKLSRKHEEDHSQFYLNQLLEFMHIWKVSRQCLLTLIRKYDFHLKYLLKTQENVYNIIEEVKKICSVLGCVETKQITDAVNELSLILQRKGENFYQSSETSAKGLIEKVTTELSTSIYQLINVYCNSFYADFQPVNVPRCTSYLNPGLPSHLSFTVYAAHNIPETWVHRINFPLEIKSLPRESMLTVKLFGIACATNNANLLAWTCLPLFPKEKSILGSMLFSMTLQSEPPVEMITPGVWDVSQPSPVTLQIDFPATGWEYMKPDSEENRSNLEEPLKECIKHIARLSQKQTPLLLSEEKKRYLWFYRFYCNNENCSLPLVLGSAPGWDERTVSEMHTILRRWTFSQPLEALGLLTSSFPDQEIRKVAVQQLDNLLNDELLEYLPQLVQAVKFEWNLESPLVQLLLHRSLQSIQVAHRLYWLLKNAENEAYFKSWYQKLLAALQFCAGKALNDEFSKEQKLIKILGDIGERVKSASDHQRQEVLKKEIGRLEEFFQDVNTCHLPLNPALCIKGIDHDACSYFTSNALPLKITFINANPMGKNISIIFKAGDDLRQDMLVLQLIQVMDNIWLQEGLDMQMIIYRCLSTGKDQGLVQMVPDAVTLAKIHRHSGLIGPLKENTIKKWFSQHNHLKADYEKALRNFFYSCAGWCVVTFILGVCDRHNDNIMLTKSGHMFHIDFGKFLGHAQTFGGIKRDRAPFIFTSEMEYFITEGGKNPQHFQDFVELCCRAYNIIRKHSQLLLNLLEMMLYAGLPELSGIQDLKYVYNNLRPQDTDLEATSHFTKKIKESLECFPVKLNNLIHTLAQMSAISPAKSTSQTFPQESCLLSTTRSIERATILGFSKKSSNLYLIQVTHSNNETSLTEKSFEQFSKLHSQLQKQFASLTLPEFPHWWHLPFTNSDHRRFRDLNHYMEQILNVSHEVTNSDCVLSFFLSEAVQQTVEESSPVYLGEKFPDKKPKVQLVISYEDVKLTILVKHMKNIHLPDGSAPSAHVEFYLLPYPSEVRRRKTKSVPKCTDPTYNEIVVYDEVTELQGHVLMLIVKSKTVFVGAINIRLCSVPLDKEKWYPLGNSII

SEQ ID NO: 147637 - DNA, 4338 bp, Artificial Sequence
  derived and/or modified sequence
atggcttattcttggcagacagaccctaaccccaatgagagccacgaaaaacagtacgagcatcaagaatttcttttcgttaatcagccacactcttcatcacaggtctcactcgggtttgaccaaatcgtggacgaaataagcggtaaaattccccactacgagtccgaaattgatgagaatacctttttcgtgcctacggcacctaaatgggacagcaccggacatagtctgaacgaagcccaccagatcagtcttaatgaattcactagtaagagccgggagctctcttggcatcaagtctcaaaggcccctgctatcgggttctccccctctgtgctgcccaagccgcaaaatacaaataaggagtgcagctggggctctcccattggcaagcatcatggtgccgatgattctagatttagtatccttgcgccttcatttacatcactggataagatcaacctggagaaggagcttgagaacgagaatcacaactaccatataggctttgaatcctcgatccctccaacaaacagcagtttcagctccgactttatgcccaaggaggagaacaagcgatcaggccatgtaaacattgttgaaccttccttgatgctgctgaaaggctctctgcagcccgggatgtgggaatcaacctggcagaagaatattgaatctatcggttgttctatccagctggtcgaggtgccacagtcctccaacacttctctggccagcttctgcaataaggtcaagaagatcagggagagatatcacgccgcagacgtgaatttcaactctggaaagatctggtccaccactactgccttcccttatcagctcttttccaagactaagttcaatatacatatttttatcgacaattcgacccaacctctgcatttcatgccatgcgctaattaccttgtcaaagatttgattgcagagatcctccacttctgtaccaatgaccagctcctgcccaaagaccacatcctatcagtttgtgggagcgaagagttcttgcaaaacgaccattgtctgggttcccacaaaatgtttcaaaaagataagagcgtgattcaactacatttgcagaagtcccgggaggcccctggtaagctgagcagaaagcatgaggaggatcattctcagttctacttaaaccagttactggaatttatgcacatctggaaggttagcaggcagtgcctactgaccctgatacggaagtatgattttcacctgaagtacctcttaaaaacccaagaaaacgtttacaacattatcgaagaagttaagaaaatttgttcagttttggggtgtgtggagaccaaacaaattacggacgccgtgaatgaactgagtttgattttgcagagaaaaggcgagaatttctatcagtcctcagagactagtgccaaaggacttatcgagaaggtgacaactgagcttagtactagcatttaccagctcatcaacgtatattgcaacagcttttacgccgacttccagcctgtgaacgttccacggtgtacttcctatctgaaccccggccttccgtctcatctgtcgtttacggtttacgcagcacacaacatccctgaaacttgggtgcaccgaatcaactttccccttgaaatcaagtctctgcctcgggagagcatgcttaccgtgaagttatttggcatagcctgcgctacaaataacgccaatctgcttgcttggacttgccttccactctttcctaaggaaaagagcatcctgggaagtatgctcttttccatgacattgcaatctgaacctcccgttgaaatgatcacacccggcgtgtgggacgtgagccaacccagccctgtcacacttcagatcgattttccagccactggctgggagtatatgaaaccggatagcgaggagaatcggtcaaatctcgaggaacctctgaaggagtgtataaagcacattgcacgtttaagccagaaacagacaccgctcctgctctccgaagagaaaaagcgctacttgtggttttaccgcttttattgcaataatgaaaactgctcacttccactagtgctgggctccgcacctggctgggatgaaagaacagtcagcgaaatgcatacaatcctgcgccggtggacctttagtcaacctctcgaggcccttggtcttttgacgagctcctttcctgatcaggagatccgcaaggtcgccgtgcagcaactcgataacctgctgaacgatgaattacttgagtatttaccacagctggtgcaggccgtaaaattcgagtggaatttggagagccctctagtacaattgctgctccatagaagcctccagagcattcaggtggcccatagactatactggctgcttaagaatgctgagaacgaagcgtattttaagtcctggtaccagaaactgttggcagcccttcaattctgcgccgggaaggccttaaatgatgagttttccaaagaacagaaacttatcaagatcctgggtgacatcggagagcgcgtgaaatccgcctctgatcaccagcgccaggaagtattgaagaaggagatcggccgcttagaagagttttttcaggacgtcaatacctgtcatttgcctttgaatcccgcactctgcataaaaggaatagatcatgatgcctgctcttatttcacctcaaatgcactgccccttaaaatcacctttatcaacgctaatccgatgggcaagaacataagcattattttcaaagccggcgatgacctgcgtcaggacatgctggtccttcagttgatacaagttatggataatatctggttgcaggagggtctggatatgcaaatgatcatctataggtgcctaagtacaggaaaggaccaggggctcgttcagatggtgccagacgcggtcaccctggccaagatacaccgacactcgggactgataggcccattgaaagagaacactatcaagaaatggttttcccagcataaccacctcaaggcagattacgagaaggcgctccggaattttttctactcttgcgcaggatggtgcgtggtaacctttatccttggagtttgtgatcgtcataatgacaatatcatgcttactaaaagcgggcatatgtttcacatcgatttcgggaagtttctgggccatgctcaaacattcggagggatcaagcgtgatagggctcccttcatattcacctccgagatggaatacttcattactgaagggggcaaaaacccgcaacactttcaggatttcgtggaattgtgctgtcgggcctacaatattatccggaagcactcgcagctcctgcttaatctgctggagatgatgctctatgccggcctgccggagctctccgggatccaggacctgaagtatgtttataataatttacggcctcaggacaccgacctcgaagctactagtcattttaccaagaaaataaaggagtcactggagtgttttcctgtgaagctgaataatttgatacacacgttagctcagatgtccgcaatctcccccgcaaagtcaacatcacagacattcccgcaagagagctgtcttctcagtacaacacgcagcattgaacgcgccacaatcctgggatttagtaaaaagagctctaacctgtacttgatccaggtgacccacagcaacaatgagacatcccttactgaaaaatcctttgaacaattctccaagttacattcacagctacagaagcagtttgccagtcttactcttcctgaatttcctcattggtggcacctgccgttcaccaattccgatcacaggaggttcagagacctcaatcactacatggaacagatcctcaatgtatcccatgaagttacgaattctgattgtgttctgagtttcttcctgagtgaggctgtacagcagactgtggaagaatcaagcccagtatacctgggcgagaaattcccagataagaagccaaaagtccagctggtcatttcctacgaagacgtcaagcttacaattcttgtgaaacatatgaagaatatccacctccctgacgggtctgcgccaagcgcccacgtcgagttttaccttctcccatatccttccgaagtgagacggagaaagaccaagtctgtgcccaagtgcacagaccccacatataacgaaatcgttgtgtatgatgaggtcaccgaactgcaaggccacgtcttgatgttgatagtgaaatccaaaacagtttttgtcggagccataaatatccgcttgtgtagcgtcccgctagataaagagaaatggtatccgctggggaactctataatttag

SEQ ID NO: 147638 - DNA, 4338 bp, Artificial Sequence
  derived and/or modified sequence
atggcctacagctggcaaactgatccaaatcccaatgaaagccacgagaagcaatatgagcaccaagagttcctattcgtgaatcaaccgcattcatctagccaggtgtccctgggctttgaccagattgtggatgagatttccgggaagataccccactacgagtcagaaattgatgaaaatacattcttcgtgcctaccgcaccaaagtgggacagcacaggacactccctgaatgaagctcaccagattagcctcaacgagttcacctccaagagtagggagttgtcatggcaccaagtcagcaaagcacccgccatcggtttcagcccctcagtgttgcccaaaccacagaacacaaataaagaatgcagttgggggagtcccatcgggaaacaccacggggctgatgactccaggttcagtatcctcgccccctccttcaccagccttgataagatcaacctggaaaaagagcttgagaacgaaaaccataactatcacatcggcttcgagtccagtatccccccaacaaacagttcttttagctccgactttatgccaaaggaggagaataagagaagtggacacgtcaacatagtggagccaagcctcatgctgttaaaggggtcattacagccgggtatgtgggaatctacctggcagaagaacatcgagtctattggctgttccattcagctagtggaagtcccccaaagtagcaacacctcgctggcgtctttctgcaataaggtcaagaagattagggagaggtaccatgccgctgatgtaaactttaactccgggaagatctggagcactaccacagcatttccctatcagctgttctccaaaacaaagtttaacattcatatctttatcgataactctacacagccacttcattttatgccctgcgccaattatctcgttaaagaccttattgccgaaatattacacttttgcacaaacgaccagcttctgcctaaggatcatattctttccgtctgcggaagtgaagagttcctgcagaacgaccattgcctgggctcacataagatgtttcagaaagataaatcagtgatccagctgcatctgcaaaagtctcgtgaagccccaggaaaactgagtcgaaaacacgaggaggaccactctcagttttacctgaaccaacttctcgaatttatgcacatttggaaggtaagtaggcagtgtttgctgacactgatccgaaagtacgatttccatttaaaatatctgctaaagactcaggaaaacgtttacaatatcattgaggaagtgaaaaaaatttgctctgtactaggatgtgtggagacaaagcaaatcacagatgctgtgaatgagctgtccctcatcctccagcggaaaggtgagaatttttatcaatcttcagaaacttccgcgaaaggcctgatcgagaaagtgacaacggaactctcaacaagtatctaccaactcatcaacgtgtactgcaattctttttacgctgactttcagccagttaatgtgccccggtgcacttcctacctcaatcccggcttaccttctcacttgtcctttaccgtgtatgctgctcataacattcccgaaacgtgggtacaccgaatcaattttccactcgagatcaagtccctacctcgcgaatcaatgttgacagtcaaactttttggcattgcctgtgctaccaataatgctaatctgttagcctggacgtgcctgccactgtttcctaaggagaagtccatcctcggttcgatgctattcagcatgaccctgcagagcgaacctcccgtggagatgattacacctggagtctgggatgtatcccagccctccccggtcacccttcagatcgatttccctgccaccggatgggagtatatgaaaccagattccgaagagaatcgttctaacctcgaggagccactcaaggaatgcattaagcacatcgcacgcttgagccagaaacagacccccctcctgctgagcgaggaaaaaaagcgatacctgtggttctacagattttattgtaataatgaaaattgtagcctgcctctggttctgggttccgccccaggttgggatgagcggacagtttccgagatgcacacaatcctgagacggtggacattctcacagcccctcgaggccctgggcctgttaacttctagcttcccagaccaggagatcagaaaggtagcagtgcagcagcttgataatctattgaacgacgagctgctggaataccttccgcagctagtgcaggccgtgaagttcgaatggaacctggagtcgcccctggtgcagctgcttttgcaccgctccctgcagtcaattcaggttgcccaccggctgtattggttgctgaaaaacgcggagaacgaagcctattttaaatcatggtaccagaaattgcttgctgctctgcagttttgtgcaggaaaagcgctcaacgatgagtttagtaaggaacagaaacttatcaaaatcctgggcgatatcggtgaaagagtgaagtccgctagtgatcaccagaggcaggaggtgttgaagaaggagattggacgccttgaagagtttttccaggacgtcaacacctgtcacctccccttaaacccagccctatgcattaagggcatcgaccatgacgcttgctcttacttcaccagcaacgcactccctctaaagattacattcatcaacgccaatccgatggggaagaatatatctattatctttaaagccggcgatgacctccggcaggatatgctggtactgcagctgattcaagttatggacaatatttggctgcaggagggtctcgacatgcagatgataatctatcggtgcctgagcactggaaaggatcagggtctagtgcagatggtccccgacgccgtgactctcgcgaaaattcatcgccacagcggattgattggcccactgaaagaaaataccatcaaaaagtggttcagccagcacaatcacttgaaggccgattacgagaaagctctgaggaattttttctactcatgcgcagggtggtgcgttgtcacattcattctgggggtctgcgatagacacaatgataatataatgctgactaagtcagggcacatgttccatatcgattttgggaagttcctaggacacgctcagacctttgggggcatcaaacgggatagagcccctttcatatttacgtccgagatggagtatttcatcacggaaggagggaaaaatccccagcacttccaggacttcgtggaactctgttgccgagcatacaatatcatacgtaagcatagtcagttgttactaaacctactggagatgatgctgtatgctggcctgccagagttaagcggcattcaggatcttaagtacgtctataacaatctgaggcctcaggacactgatttagaagccacctcccatttcaccaaaaagataaaagaatcccttgaatgtttccccgttaagctgaataatctgatccacactctcgcgcagatgagcgccatctctccagccaagtctacatcccagacatttccgcaggaatcatgcctgctcagtacaactcgttccatcgagcgggcaacaatcctgggcttctcaaaaaagtctagcaatctttacctgatacaggtgacccattcaaacaatgagacgagtctgaccgagaagagcttcgaacagttctccaagcttcactcccagctgcagaagcaattcgcgtcactcacactaccggaatttcctcactggtggcatttaccgtttacgaactcagaccacagacgctttcgggacctgaaccattatatggaacagatccttaacgtgagccacgaagttaccaacagcgattgcgtgctgagttttttcctctcagaagctgttcagcagactgtggaggagtcttctcccgtatatctgggggagaagttccccgataagaaacccaaagtacagctggttatctcttacgaagatgtgaagctgactatcctcgtgaagcacatgaagaatatccatcttcccgatgggagcgccccttccgcccacgtcgaattttatctgttgccatacccgagtgaggtcagacgccggaaaaccaagagcgtgcctaagtgcactgaccctacctacaacgagatagtggtgtacgacgaagtgaccgaactgcagggtcacgtacttatgctgattgtgaagtcgaagaccgtgttcgttggggccatcaacatcaggctgtgtagtgttccactagataaggagaagtggtatccgctaggtaatagtatcatctag

SEQ ID NO: 147639 - DNA, 4338 bp, Artificial Sequence
  derived and/or modified sequence
atggcctacagctggcagacagaccccaaccccaatgaaagccatgagaagcagtatgagcaccaggagttcctgtttgtgaaccagccccacagcagcagccaggtgtccctgggctttgaccagatcgtggatgagatcagcggcaagatcccccactatgagagcgagattgatgagaacaccttctttgtgcccacagcccccaagtgggacagcacaggccacagcctgaatgaggcccaccagatcagcctgaatgagttcaccagcaagagccgggagctgtcctggcaccaggtgtccaaggccccagccatcggcttcagccccagcgtgctgcccaagccccagaacaccaacaaggaatgttcctggggcagccccatcggcaagcaccacggggctgatgacagccgcttcagcatcctggcccccagcttcaccagcctggacaagatcaacctggagaaggagctggagaatgaaaaccacaactaccacatcggctttgagagcagcatcccccccaccaacagcagcttcagcagtgacttcatgcccaaggaggagaacaagaggagcggccacgtgaacatcgtggagcccagcctgatgctgctgaagggcagcctgcagcccggcatgtgggagagcacctggcagaagaacatcgagagcatcggctgcagcatccagctggtggaggtgccccagagcagcaacaccagcctggccagcttctgcaacaaggtgaagaagatccgggagcgctaccacgccgcagatgtgaacttcaacagcggcaagatctggagcaccaccacagccttcccctaccagctgttcagcaagaccaagttcaacatccacatcttcatcgacaacagcacccagcccctgcacttcatgccctgtgccaactacctggtgaaggacctgattgctgagatcctgcacttctgcaccaatgaccagctgctgcccaaggaccacatcctgtctgtgtgtggcagcgaggagttcctgcagaatgaccactgcctgggcagccacaagatgttccagaaggacaagagcgtcatccagctgcacctgcagaagagccgggaggcccctgggaagctgagcaggaagcatgaggaggaccacagccagttctacctgaaccagctgctggagttcatgcacatctggaaggtgtcccggcagtgcctgctgaccctcatcagaaaatatgacttccacctgaagtacctgctgaagacccaggagaatgtgtacaacatcatcgaggaggtgaagaagatctgcagcgtgctgggctgtgtggagaccaagcagatcacagatgctgtgaatgagctgagcctcatcctgcagaggaaaggagagaacttctaccagagcagcgagaccagcgccaagggcctgattgagaaggtgaccacagagctgagcaccagcatctaccagctgatcaacgtgtactgcaacagcttctatgctgacttccagcctgtgaatgtgccccgctgcaccagctacctgaaccctggcctgcccagccacctgtccttcaccgtgtatgctgcccacaacatccctgagacctgggtgcaccgcatcaacttccccctggagatcaagagcctgccccgggagagcatgctgactgtgaagctgtttggaattgcctgtgccaccaacaatgccaacctgctggcctggacctgcctgcccctcttccccaaggagaagagcatcctgggctccatgctgttctccatgaccctgcagagcgagccccctgtggagatgatcaccccaggagtgtgggatgtgtcccagcccagccctgtgaccctgcagattgacttccctgccaccggctgggagtacatgaagccagattctgaagaaaatagaagcaacctggaggagcccctgaaggagtgcatcaagcacatcgcccggctgagccagaagcagacccccctgctgctgtctgaggagaagaagcgctacctgtggttctaccgcttctactgcaacaatgaaaactgcagcctgcccctggtgctgggcagcgcccctggctgggatgagaggacagtgtctgagatgcacaccatcctgcggcgctggaccttcagccagcccctggaggccctgggcctgctgaccagcagcttcccagaccaggagatcaggaaggtggccgtgcagcagctggacaacctgctgaatgatgagctgctggagtacctgccccagctggtgcaggccgtgaagtttgagtggaacctggagagccccctggtgcagctgctgctgcacaggagcctgcagagcatccaggtggcccaccggctgtactggctgctgaagaatgcagaaaatgaggcctacttcaagtcctggtaccagaagctgctggccgccctgcagttctgtgccggcaaggccctgaatgatgagttcagcaaggagcagaagctgatcaagatcctgggggacattggagagcgggtgaagagcgccagtgaccaccagaggcaggaggtgctgaagaaggagatcggccgcctggaggagttcttccaggatgtgaacacctgccacctgcccctgaacccagccctgtgcatcaagggcatcgaccatgatgcctgcagctacttcaccagcaatgccctgcccctgaagatcaccttcatcaatgccaaccccatgggcaagaacatcagcatcatcttcaaggctggagatgacctgcggcaggacatgctggtgctgcagctgatccaggtgatggacaacatctggctgcaggagggcctggacatgcagatgatcatctaccgctgcctgagcacaggcaaggaccagggcctggtgcagatggtgcctgatgctgtgaccctggccaagatccaccgccacagcggcctcatcggccccctgaaggagaacaccatcaagaagtggttcagccagcacaaccacctgaaggctgactatgagaaggccctgaggaacttcttctacagctgtgccggctggtgtgtggtgaccttcatcctgggcgtgtgtgacagacacaatgacaacatcatgctgaccaagagcggccacatgttccacatcgactttgggaagttcctgggccacgcccagaccttcggcggcatcaagagggaccgggcccccttcatcttcaccagcgagatggagtacttcatcacagaaggaggcaagaacccccagcacttccaggactttgtggagctgtgctgccgggcctacaacatcatcaggaagcacagccagctgctgctgaacctgctggagatgatgctgtatgccggcctgcctgagctgagcggcatccaggacctgaagtatgtgtacaacaacctgcggccccaggacacagacctggaggccaccagccacttcaccaagaagatcaaggagagcctggagtgcttccctgtgaagctgaacaacctgatccacaccctggcccagatgtctgccatcagccctgccaagagcaccagccagaccttcccccaggagagctgcctgctgagcaccaccaggagcattgagcgggccaccatcctgggcttcagcaagaagagcagcaacctgtacctgatccaggtgacccacagcaacaatgagaccagcctgacagagaagagctttgagcagttcagcaagctgcacagccagctgcagaagcagtttgccagcctgaccctgcctgagttcccccactggtggcacctgcccttcaccaacagcgaccaccggcgcttccgggacctgaaccactacatggagcagatcctgaatgtgtcccatgaggtgaccaacagcgactgtgtgctgtccttcttcctgtctgaggccgtgcagcagacagtggaggagagcagccctgtgtacctgggggagaagttcccagacaagaagcccaaggtgcagctggtgatctcctatgaagatgtgaagctgaccatcctggtgaagcacatgaagaacatccacctgcctgatggcagcgcccccagcgcccacgtggagttctacctgctgccctaccccagcgaggtgagaagaaggaagaccaagtctgtgcccaagtgcacagaccccacctacaatgaaattgtggtgtatgatgaggtgacagagctgcagggccacgtgctgatgctgattgtgaagagcaagacagtgtttgtgggcgccatcaacatccggctgtgcagcgtgcccctggacaaggagaagtggtaccccctgggcaacagcatcatctag

SEQ ID NO: 147640 - DNA, 4338 bp, Artificial Sequence
  derived and/or modified sequence
atggcctacagctggcagaccgaccccaaccccaacgagagccacgagaaacagtatgagcaccaggaatttctatttgtgaatcagccacattcttcgtcacaagtcagtctcgggtttgatcagatcgtggacgaaatctcgggcaagatccctcactacgaaagcgaaattgacgaaaatacctttttcgtgcccacggctcccaagtgggatagcactggccattccctcaatgaggctcaccagatctctctgaatgaattcacatcaaagagcagggagctaagctggcatcaggtatccaaggcccccgctataggtttttctccatccgtgctgcctaagcctcagaacactaacaaagaatgctcctggggttcgcctatcggaaaacaccacggagccgatgacagccggttctctatccttgccccaagcttcacatctctagataagatcaaccttgagaaggagctggagaatgagaatcacaactatcatatcggatttgaatcctccatccccccaaccaactcatctttttcatcagattttatgcccaaagaggagaacaaaaggagcgggcatgtgaacatcgtggaaccgagcctcatgttgcttaagggcagtttgcagccagggatgtgggagagtacttggcaaaagaatatcgagtccataggctgcagtatccagctcgtggaggtcccccagagctcgaatacatccttagcttctttctgcaataaggtgaagaagattcgggaaagataccacgcggccgacgtgaatttcaactccggcaagatttggtctacaaccaccgctttcccctaccaacttttcagcaagacaaagtttaatatccacatttttatcgataattcaacccagccactgcatttcatgccatgtgcaaattacctggttaaggacctcatcgccgaaatcttgcacttctgtaccaatgaccagctattgccaaaggaccacatactgtccgtgtgtggctctgaggaatttctgcagaatgaccattgccttggatctcataagatgttccagaaggataaatccgtgatccagctgcatttgcagaaatcgagggaggccccagggaagctgtctaggaagcacgaagaagatcactcccagttttacctgaatcagctgttggagttcatgcatatctggaaggtgtcccgccagtgtctgctcacactaatccgtaagtacgactttcatctgaagtaccttctgaagacacaggagaacgtatacaatataattgaagaggtcaaaaagatttgctcagtcctgggttgcgtcgagaccaaacagatcacagatgctgtgaacgagttatccttgattctccagcgtaagggcgagaacttttaccagtcaagcgagacttctgccaaggggttgatagagaaggtcaccaccgaactttccacatcgatttatcaactcattaacgtgtattgtaactccttttatgccgacttccaacccgtcaacgtgccacggtgtactagttacttgaacccgggactaccttcacatctgagctttacggtatacgctgcccacaatatccctgagacatgggtacaccgaattaacttccccctggagatcaagagcctgccccgcgaatctatgttgacagttaagctattcgggatcgcatgtgcaactaacaatgctaacttgttagcatggacctgtcttcctctctttcccaaagaaaaatcgattctgggttccatgctcttctccatgactttgcagtccgagccaccagtggagatgattactcccggcgtctgggatgtgtcacaaccctcaccagtgaccctgcagatcgactttcctgcaaccggctgggagtacatgaagccagattccgaggagaatcgctcgaatctggaagaaccgttgaaagaatgtataaaacatattgcacggctaagccagaagcaaacccctttactgcttagtgaagaaaaaaagcgatacctgtggttttatcgtttttactgcaataacgagaactgctccctgcctctggtcctgggttcggcacctggttgggacgaaagaacggtgtcagaaatgcatacaattctgcgccgctggacattctctcagcccctagaggctctggggttactgacttcgagtttccccgaccaagaaatccggaaggtggccgtgcagcagctggataacctgttgaacgatgaactgctggagtacctcccccagctcgtgcaagccgtaaaattcgaatggaatttagagagccccctcgtgcagttattactgcaccggtctttacagagcatccaggtggctcaccgcctctattggctcctgaagaacgccgagaacgaggcgtacttcaaaagctggtatcagaagctcttagccgccctccagttttgcgccggaaaggccctcaacgatgaattcagtaaggagcaaaaactgatcaaaattcttggcgatattggagaacgagtaaaaagcgcttctgaccaccagaggcaggaggtgctcaagaaggagattggtagactggaggagttctttcaagatgttaatacatgccacttaccacttaacccagctctgtgtatcaaagggatagatcacgatgcctgttcctactttacctccaatgctctgccgctgaagatcacgtttatcaatgcaaaccctatgggcaaaaatatcagtattattttcaaagcgggagatgatctgcggcaggacatgttggtcctgcaactgatacaggtcatggacaacatctggcttcaggaaggtctggacatgcagatgataatctaccggtgtttgtcgaccggcaaagaccagggtctcgtgcaaatggtacccgacgcggtgacgctcgctaaaattcaccggcactcagggctgatcggccccctaaaagaaaataccattaaaaagtggttctcccaacataaccacctgaaggctgactatgaaaaggccctccggaacttcttttactcctgtgctggctggtgcgtcgtgacttttatactaggcgtttgtgacagacataacgacaacatcatgctgacaaaatctggccacatgttccacatagattttggaaagtttctgggtcatgcccagaccttcgggggcatcaagagagacagggcgccatttatctttactagtgaaatggagtattttataactgagggggggaagaaccctcagcattttcaggatttcgtggaactctgttgccgcgcttataacattatcagaaagcactcccaactgcttctcaatctgctggagatgatgctgtacgcgggactgcccgaactgtctggtatccaggatcttaaatatgtttacaacaatctgcgaccacaggatacagaccttgaggccacttcacactttactaaaaagatcaaggagtcactggagtgcttcccggttaaactgaacaaccttattcacactctggcccagatgagcgccatctccccagccaaatcaaccagccagaccttccctcaagagagttgtttattatcaaccaccagaagcattgagagagcgaccatcctgggcttttccaaaaaaagctctaacctgtatctgatccaggtaacgcattctaacaatgagactagcttgacagaaaagagcttcgaacaattttctaagctccatagccagctccagaaacagtttgcgtctctcacacttcccgagttcccgcactggtggcacctgccctttacgaactccgatcacagacgcttccgggacctgaatcattatatggagcagatcttgaatgtgagccacgaagtgactaattccgactgcgtcctttccttctttctctccgaggcagtgcagcagacagtggaggaatcctcacctgtgtatctgggagagaaattccctgacaaaaagcctaaagtccagctggtcatttcttatgaggacgtgaagctgaccatactagtgaaacatatgaaaaatatccaccttccggatggtagtgccccgtcagcccacgtggagttttacctgctcccttacccatctgaggtgagacgcaggaagaccaaatcagtccccaagtgcaccgatcctacttataatgagattgtggtgtatgatgaagtgactgaactccaggggcatgtcctgatgttgattgttaaatccaagactgtatttgtgggcgcgatcaatattcgtttatgtagtgttccacttgataaggagaaatggtatcccctagggaacagcataatctag

SEQ ID NO: 147641 - DNA, 4338 bp, Artificial Sequence
  derived and/or modified sequence
atggcctacagctggcagaccgaccccaaccccaacgagagccacgagaagcagtacgaacaccaggagtttctatttgtgaaccagccacacagtagctcccaggtttcactcggcttcgaccagatcgttgatgagatatcaggtaagatcccacactacgagtcagaaatcgacgaaaacaccttcttcgtgcccacagcccctaaatgggacagtaccgggcatagccttaatgaggcacatcagattagccttaatgagtttaccagtaaatctagagaactgtcctggcatcaggtgagtaaagctccggctattggcttttcgccatccgtgctcccgaaacctcaaaacacaaataaagaatgtagttgggggagtcccatcggcaaacaccacggagccgatgattccaggttctcaatcctggcccctagtttcaccagcctagacaagataaatctggagaaggagctggagaacgagaaccacaattaccacattggcttcgagagctccatccctcctaccaatagttcgttcagcagtgacttcatgccaaaggaagaaaacaagagatccggtcatgtgaacattgttgaacctagcctgatgctcctaaaaggatccctacagcccggcatgtgggaatcaacatggcagaaaaacatcgagtctattggctgctcaatccaactggtggaggtgcctcagtcaagcaatacgtctctcgcaagcttttgcaacaaagtgaaaaagattagagaacgctaccacgccgcggatgtgaattttaattcaggaaagatatggtctaccacaaccgccttcccttaccaacttttttctaagaccaagtttaacattcatatttttatcgacaattctacccagccactgcactttatgccctgtgccaattacctggtcaaggacctgatcgctgagatcctccacttttgtactaacgatcagctcctgcctaaagaccacatcctgagcgtttgtgggtcagaagagtttctacaaaatgatcactgcttgggatcccataaaatgttccagaaagacaaaagcgtcatccaactccaccttcaaaaatcccgggaggcacccggaaaactgagtaggaagcatgaagaagatcatagtcagttttacctgaatcagctgcttgagtttatgcacatctggaaggtatcaaggcagtgcctcctgaccctgattcgcaagtatgacttccacctaaaatacctcctgaaaactcaggaaaatgtgtacaacattatagaagaggttaagaagatctgctcagttttgggttgtgtggagacgaagcagatcaccgatgccgtgaatgagcttagcttgattttgcagcgcaagggcgagaatttttaccaatcatcagaaactagtgccaaagggctgattgaaaaggtgactactgagctgagtacaagcatctatcagctgattaacgtgtactgcaattctttctacgctgactttcagcccgtgaatgtgcctaggtgcacttcctatctgaatccaggcttgccttctcacctcagcttcacagtctatgccgcgcacaacatccccgaaacgtgggtgcaccggattaatttccccttggaaataaagtcacttcctagggaaagcatgctcacagtcaaactctttggcattgcctgcgcaacaaataacgctaacctgctcgcctggacctgcctgccactgtttcccaaggaaaagtcaatcctcggcagcatgctatttagtatgacactccagtcagaaccccctgtcgagatgattactccaggcgtgtgggatgtgagccagccttccccagtcaccctgcagattgacttccccgcaaccgggtgggaatacatgaagcccgactctgaagaaaatcgcagtaatctggaggagcctcttaaggaatgcataaagcatattgcgcgactttcgcagaagcagacgcctttactgctgagcgaagagaaaaagcggtatctgtggttctataggttctactgcaataacgagaactgtagcctgcccctcgtgctaggttctgcccccgggtgggacgagcggacagtatcagagatgcatacaatcctccgaaggtggacattctctcagccattggaagcgcttggactgttaacaagttcgttcccagaccaggagatacgtaaagtcgctgtgcagcaactcgataaccttctgaacgacgaactgctggaatacctgccccagcttgtgcaggccgtcaagtttgagtggaatctggaatcacccctggtccagttgttgctccatcgcagtctccagagcatacaggtggcccacagactatactggctcctaaaaaacgccgaaaatgaggcatatttcaagtcttggtatcagaaattactggccgcattgcagttctgtgcggggaaagctctgaatgatgagttttcaaaggagcaaaaactcattaagatcctaggggacatcggggagcgcgtgaagagtgcctccgaccaccaacgccaggaggtactgaagaaagagatcgggcgactggaggaattcttccaggacgtcaatacttgccacctgcctctcaatccggcattgtgtattaagggcattgatcatgacgcatgctcttatttcacatccaacgcactccccctcaaaatcactttcatcaatgctaatccaatggggaaaaacatatccataattttcaaggcaggggacgatctgaggcaggacatgctggtactgcaactcatacaggttatggataatatctggctacaagaagggctggatatgcagatgatcatttaccggtgcctttccactggaaaggaccagggcctcgtgcagatggtccctgatgctgtcacacttgcaaaaatccacaggcactctggcctcatcgggcccctcaaagaaaacactattaaaaagtggttctcccaacacaaccatcttaaagcagactacgaaaaggcactgcgaaacttcttttactcctgtgccgggtggtgcgtagttacgtttatccttggcgtctgtgatagacacaatgataacattatgctgaccaagagtggacatatgtttcacatcgattttggcaagttccttggacatgcccagacgttcggtggaataaaacgagatcgggcgcctttcatcttcacctctgaaatggagtatttcataactgagggtggaaagaatcctcagcacttccaagattttgtcgagctgtgctgcagagcctataacatcatcagaaaacacagtcagctgttgcttaacctcttggaaatgatgctgtacgccggcttaccggaactaagcggaatccaggatttaaagtatgtttacaataaccttagacctcaggacactgatctggaggccactagccatttcacaaaaaaaattaaagagtctctcgagtgcttccctgtgaagttgaacaatctaatacacacactcgctcagatgtctgcaattagtcccgcgaagagtacttcacaaaccttccctcaggaaagctgcttactgtccaccacccggtctatcgagagagcaactattctgggattcagtaaaaagtcatctaatttatacctcatccaggtgactcatagcaacaatgagacaagcctgactgaaaaaagcttcgaacagttttcaaaactacattctcagttgcagaagcagttcgccagtcttaccctgccagaattcccccattggtggcatctcccttttacaaactctgaccaccggcgattccgagacctgaatcactatatggaacagattcttaatgtaagtcatgaagtaaccaatagcgactgcgttctgtccttttttctgtctgaggctgtgcagcagacagtagaggagtccagcccagtttatctcggagaaaagtttcctgataagaagcccaaggtccagttggtgatcagctatgaggacgtgaagctgaccattctcgtgaagcacatgaagaacatccatctgccggatggaagcgcaccaagcgcccacgtcgagttctacctgttaccctacccatctgaagtgcgccgccggaagactaagagcgttcccaaatgtacggaccctacatacaacgaaatcgtggtgtacgacgaggtgacggagctgcaagggcacgtgttaatgttaattgtgaagtcaaaaaccgtctttgtcggcgcaattaatatccgcctgtgctccgtgcccctcgacaaagaaaaatggtaccccctaggcaactcaattatttag

SEQ ID NO: 147642 - DNA, 4754 bp, Artificial Sequence
  derived and/or modified sequence
ggagcagagtcaaccctctcagttacataaaataaaaaatggcatattcttggcaaacggatccaaatcctaatgaatcacacgaaaagcagtatgaacaccaagaatttctctttgtaaatcaaccccattcttctagccaagtcagtctgggttttgatcagatagtagatgagatcagtggcaaaattccacactacgagagtgaaattgatgaaaacaccttttttgtgcccactgcaccaaaatgggactcaacagggcattcattaaatgaagcacaccaaatatccttgaatgaattcacttctaaaagccgtgaactctcctggcatcaagttagcaaagcaccagcaattggttttagtccttctgtgttaccaaaacctcaaaatacgaataaagaatgctcctggggaagccccataggaaaacatcatggtgctgatgattccagattcagtattttagctccatcattcacaagtttggataaaattaatctagagaaagaattagaaaatgaaaatcataactaccatataggatttgaaagtagcattcctccaacaaattcatccttctcaagtgacttcatgccgaaagaagagaataaaaggagtggacatgtgaacattgtggaaccatctttgatgcttttgaaaggctctcttcaacccggaatgtgggaaagtacatggcagaagaatatagagtcaataggttgttccattcagctagtggaagtacctcaaagcagcaatacgagtctggcctctttttgcaacaaagtaaaaaaaatcagagaaagatatcatgcagctgatgttaatttcaattctgggaagatctggagcactactacagcatttccgtatcagctcttttctaagaccaagtttaatatacatatttttattgataactcaacacaacctcttcattttatgccatgtgctaattatcttgtcaaagatctaattgcagaaattctgcatttttgcacaaatgaccagctactccccaaagatcatattctaagtgtatgtggctctgaagaatttttacaaaacgaccactgtttggggagccacaaaatgtttcaaaaagataaatctgttattcagctccacctgcagaaaagtagggaagctccaggaaagctatctcgaaagcatgaagaggaccacagtcagttttatctgaatcaacttctagaatttatgcatatttggaaagtatccagacaatgtctcttaacactcatcagaaaatatgacttccacctgaaatacctattgaaaacccaggaaaacgtgtataatattattgaagaagttaaaaaaatatgcagtgttctagggtgtgtggaaaccaaacaaattacagatgcagtaaatgaactaagtctaattcttcagagaaaaggagagaatttttatcaaagttcagagacttcagcaaaaggcttgatagagaaggtaacaactgaactatccacatccatctaccagctaatcaatgtctactgtaacagcttttatgcagattttcagcctgtaaatgtacctagatgcacttcctatctaaatcccgggcttccttcccacctcagcttcacagtgtatgcagcacacaacattccagaaacctgggtgcacaggatcaattttccccttgaaataaagtcacttccaagggaatccatgctcactgtaaaactgtttgggattgcctgtgcaaccaacaatgcaaatttactggcgtggacttgtcttccactgtttccaaaagaaaaatccattctcgggtctatgctgttcagcatgacattacagagtgagcctcccgtagaaatgataactccaggagtgtgggatgtaagtcagccatccccggtgaccctgcagattgattttccagctactgggtgggagtatatgaaacctgattctgaagagaatagaagtaatcttgaagagccactaaaggagtgtataaaacatattgccagactttcacagaaacagactcccctactactctctgaagaaaagaaaagatatttatggttttatcgcttctactgcaataatgaaaactgctcccttcctttagtcctgggtagtgcccctggatgggatgaaaggactgtttcagaaatgcataccattttgagaagatggacattttctcaacctttagaggctcttgggcttttgacttccagttttccagatcaagaaattcgtaaagtggcagttcaacaattagacaacctcttgaatgatgaactactggaatatctcccacagctagttcaggctgtcaagtttgaatggaaccttgagagtcctttagtgcaacttctactccaccgctccttgcagagcatccaggttgcccatcgtctttactggctgctaaaaaatgcagaaaatgaagcttattttaaaagctggtatcagaagctactagctgctctccaattctgtgcaggtaaagccttgaatgatgagttttccaaggagcagaaacttatcaaaattctgggagatattggggaaagagtcaagtctgccagtgaccatcaaagacaggaggtactgaagaaagaaattggcagactagaagagttctttcaagatgtaaatacttgtcatcttcctctgaaccctgccctatgtataaaagggattgatcacgatgcatgttcatattttacatctaatgctttgccattgaagattactttcatcaatgctaatccgatgggcaaaaacatcagcattatttttaaggctggagatgatcttcgtcaggatatgcttgttctgcagcttattcaagtgatggacaatatttggctgcaggaaggcttggatatgcaaatgatcatttatagatgtctatccacaggaaaagaccaaggattggtgcagatggtacctgatgctgtgaccctagcaaagattcatcgccattctggactgataggaccattgaaagaaaatacaattaaaaagtggttcagtcagcacaaccacttaaaggcagattatgaaaaggccttgaggaactttttctactcctgtgctggctggtgtgtggtaacattcatcctgggagtatgtgaccgtcacaatgataatatcatgctgacaaagtcgggccacatgtttcatattgactttggaaaattcttaggtcatgcacaaacatttggagggataaaaagggaccgagctcctttcatttttacttcagagatggaatactttattacagagggtgggaaaaacccacagcattttcaagattttgtggaactttgctgtcgtgcttataatattatcagaaagcacagccaactgctcttgaacctgctggaaatgatgctgtatgcaggactgcctgagctaagtggaattcaagacctgaaatatgtgtataataatcttcgtccacaagacacagacctggaagcaacaagtcattttaccaagaaaataaaggaaagtctggagtgtttccctgttaaattgaataacttgatccacacacttgcacaaatgtcagccataagccctgccaaatctacttcacagacttttcctcaggaatcctgtttgctgagtacaactaggtcgattgaaagagcaacaattttagggttcagcaagaaatccagtaatctgtatctgatccaggtgacacacagcaacaacgaaacaagcctgacagaaaaatcatttgagcagttttcaaaacttcacagccaacttcagaagcagtttgcatcactgactctcccagagtttcctcattggtggcacctaccttttacaaattcagatcacagaagattcagagatctaaatcattacatggaacagatattaaatgtatcacatgaagttacaaacagtgattgtgtacttagctttttcctctctgaggctgtgcaacaaacagttgaagaatcatcacctgtgtacctaggtgagaagtttccagacaagaagcctaaggtgcagttagtcatatcctacgaggatgtgaagctgaccatactagtgaaacacatgaaaaacattcatctcccagatggctctgcgcccagtgcacatgttgaattttatcttttaccatatcccagtgaagttcgtaggaggaaaacaaaatctgttccaaaatgtacggaccccacttacaatgaaattgtagtatatgatgaagtcacagagctccaaggacatgtcttaatgcttattgtgaagagtaaaactgtatttgtgggagcaattaacatccgactctgtagtgtcccactcgataaagaaaaatggtatccattaggaaacagtataatttgaccattgctatgaacatatgcattattcattaactacttgtatttttttcacttctgggcctctgaatcacataagtaaggcatctttgttgtcaaagacagcacagggtattaaggacacagaaaaaaaatcagaattagtcttttgtgttgtttattttctacctgtgctttcattgttttttcataatcttttctccttcagtggagtactgattgcatgaaatttgatgtgtaaaataataaaagacctttattaaatcattttaatatattttaaattaaacataggtttacatttgttttaattgtgtgcctacagttaaaagcagtatttttaatgtattttataagaaagacaatcaaataaacctcatca

SEQ ID NO: 147643 - DNA, 4840 bp, Artificial Sequence
  derived and/or modified sequence
tgagatcgtgtttcatttcaggaagatatatgcgtcaggaaaatttctatcttcttttgtattatcaaggagatatttggagcagagtcaaccctctcagttacataaaataaaaaatggcatattcttggcaaacggatccaaatcctaatgaatcacacgaaaagcagtatgaacaccaagaatttctctttgtaaatcaaccccattcttctagccaagtcagtctgggttttgatcagatagtagatgagatcagtggcaaaattccacactacgagagtgaaattgatgaaaacaccttttttgtgcccactgcaccaaaatgggactcaacagggcattcattaaatgaagcacaccaaatatccttgaatgaattcacttctaaaagccgtgaactctcctggcatcaagttagcaaagcaccagcaattggttttagtccttctgtgttaccaaaacctcaaaatacgaataaagaatgctcctggggaagccccataggaaaacatcatggtgctgatgattccagattcagtattttagctccatcattcacaagtttggataaaattaatctagagaaagaattagaaaatgaaaatcataactaccatataggatttgaaagtagcattcctccaacaaattcatccttctcaagtgacttcatgccgaaagaagagaataaaaggagtggacatgtgaacattgtggaaccatctttgatgcttttgaaaggctctcttcaacccggaatgtgggaaagtacatggcagaagaatatagagtcaataggttgttccattcagctagtggaagtacctcaaagcagcaatacgagtctggcctctttttgcaacaaagtaaaaaaaatcagagaaagatatcatgcagctgatgttaatttcaattctgggaagatctggagcactactacagcatttccgtatcagctcttttctaagaccaagtttaatatacatatttttattgataactcaacacaacctcttcattttatgccatgtgctaattatcttgtcaaagatctaattgcagaaattctgcatttttgcacaaatgaccagctactccccaaagatcatattctaagtgtatgtggctctgaagaatttttacaaaacgaccactgtttggggagccacaaaatgtttcaaaaagataaatctgttattcagctccacctgcagaaaagtagggaagctccaggaaagctatctcgaaagcatgaagaggaccacagtcagttttatctgaatcaacttctagaatttatgcatatttggaaagtatccagacaatgtctcttaacactcatcagaaaatatgacttccacctgaaatacctattgaaaacccaggaaaacgtgtataatattattgaagaagttaaaaaaatatgcagtgttctagggtgtgtggaaaccaaacaaattacagatgcagtaaatgaactaagtctaattcttcagagaaaaggagagaatttttatcaaagttcagagacttcagcaaaaggcttgatagagaaggtaacaactgaactatccacatccatctaccagctaatcaatgtctactgtaacagcttttatgcagattttcagcctgtaaatgtacctagatgcacttcctatctaaatcccgggcttccttcccacctcagcttcacagtgtatgcagcacacaacattccagaaacctgggtgcacaggatcaattttccccttgaaataaagtcacttccaagggaatccatgctcactgtaaaactgtttgggattgcctgtgcaaccaacaatgcaaatttactggcgtggacttgtcttccactgtttccaaaagaaaaatccattctcgggtctatgctgttcagcatgacattacagagtgagcctcccgtagaaatgataactccaggagtgtgggatgtaagtcagccatccccggtgaccctgcagattgattttccagctactgggtgggagtatatgaaacctgattctgaagagaatagaagtaatcttgaagagccactaaaggagtgtataaaacatattgccagactttcacagaaacagactcccctactactctctgaagaaaagaaaagatatttatggttttatcgcttctactgcaataatgaaaactgctcccttcctttagtcctgggtagtgcccctggatgggatgaaaggactgtttcagaaatgcataccattttgagaagatggacattttctcaacctttagaggctcttgggcttttgacttccagttttccagatcaagaaattcgtaaagtggcagttcaacaattagacaacctcttgaatgatgaactactggaatatctcccacagctagttcaggctgtcaagtttgaatggaaccttgagagtcctttagtgcaacttctactccaccgctccttgcagagcatccaggttgcccatcgtctttactggctgctaaaaaatgcagaaaatgaagcttattttaaaagctggtatcagaagctactagctgctctccaattctgtgcaggtaaagccttgaatgatgagttttccaaggagcagaaacttatcaaaattctgggagatattggggaaagagtcaagtctgccagtgaccatcaaagacaggaggtactgaagaaagaaattggcagactagaagagttctttcaagatgtaaatacttgtcatcttcctctgaaccctgccctatgtataaaagggattgatcacgatgcatgttcatattttacatctaatgctttgccattgaagattactttcatcaatgctaatccgatgggcaaaaacatcagcattatttttaaggctggagatgatcttcgtcaggatatgcttgttctgcagcttattcaagtgatggacaatatttggctgcaggaaggcttggatatgcaaatgatcatttatagatgtctatccacaggaaaagaccaaggattggtgcagatggtacctgatgctgtgaccctagcaaagattcatcgccattctggactgataggaccattgaaagaaaatacaattaaaaagtggttcagtcagcacaaccacttaaaggcagattatgaaaaggccttgaggaactttttctactcctgtgctggctggtgtgtggtaacattcatcctgggagtatgtgaccgtcacaatgataatatcatgctgacaaagtcgggccacatgtttcatattgactttggaaaattcttaggtcatgcacaaacatttggagggataaaaagggaccgagctcctttcatttttacttcagagatggaatactttattacagagggtgggaaaaacccacagcattttcaagattttgtggaactttgctgtcgtgcttataatattatcagaaagcacagccaactgctcttgaacctgctggaaatgatgctgtatgcaggactgcctgagctaagtggaattcaagacctgaaatatgtgtataataatcttcgtccacaagacacagacctggaagcaacaagtcattttaccaagaaaataaaggaaagtctggagtgtttccctgttaaattgaataacttgatccacacacttgcacaaatgtcagccataagccctgccaaatctacttcacagacttttcctcaggaatcctgtttgctgagtacaactaggtcgattgaaagagcaacaattttagggttcagcaagaaatccagtaatctgtatctgatccaggtgacacacagcaacaacgaaacaagcctgacagaaaaatcatttgagcagttttcaaaacttcacagccaacttcagaagcagtttgcatcactgactctcccagagtttcctcattggtggcacctaccttttacaaattcagatcacagaagattcagagatctaaatcattacatggaacagatattaaatgtatcacatgaagttacaaacagtgattgtgtacttagctttttcctctctgaggctgtgcaacaaacagttgaagaatcatcacctgtgtacctaggtgagaagtttccagacaagaagcctaaggtgcagttagtcatatcctacgaggatgtgaagctgaccatactagtgaaacacatgaaaaacattcatctcccagatggctctgcgcccagtgcacatgttgaattttatcttttaccatatcccagtgaagttcgtaggaggaaaacaaaatctgttccaaaatgtacggaccccacttacaatgaaattgtagtatatgatgaagtcacagagctccaaggacatgtcttaatgcttattgtgaagagtaaaactgtatttgtgggagcaattaacatccgactctgtagtgtcccactcgataaagaaaaatggtatccattaggaaacagtataatttgaccattgctatgaacatatgcattattcattaactacttgtatttttttcacttctgggcctctgaatcacataagtaaggcatctttgttgtcaaagacagcacagggtattaaggacacagaaaaaaaatcagaattagtcttttgtgttgtttattttctacctgtgctttcattgttttttcataatcttttctccttcagtggagtactgattgcatgaaatttgatgtgtaaaataataaaagacctttattaaatcattttaatatattttaaattaaacataggtttacatttgttttaattgtgtgcctacagttaaaagcagtatttttaatgtattttataagaaagacaatcaaataaacctcatcaattaattc

SEQ ID NO: 147644 - DNA, 4338 bp, Artificial Sequence
  derived and/or modified sequence
atggcctatagctggcagacagacccgaaccctaatgaatcccatgagaagcagtatgaacaccaggagtttctcttcgttaatcagccacactcgtcatctcaggtgtcactgggatttgatcagatcgtggatgagatttccggaaaaatcccacattatgaaagcgaaatagatgaaaacacattttttgtgccaacagctcctaaatgggatagcacaggacacagcctgaacgaggcgcaccagatatctctgaacgagtttacgtcaaagtcccgtgagctctcctggcaccaagtaagcaaggcgccagcaatcgggtttagcccctctgttctgcctaagccacagaatacaaacaaggaatgctcatgggggagcccaattgggaaacatcacggagcagatgatagcagattctcgatattagctccctcattcacgtccttggataaaattaatctagaaaaggaacttgagaacgagaaccataattaccacattgggtttgagagctcaatccccccaacaaacagctcattcagctctgatttcatgcctaaagaggagaataagaggtccgggcacgttaacatcgtggaaccctctctgatgctgctgaagggtagcctccaacccggtatgtgggaaagtacatggcagaaaaacattgaatccattggttgctctatccagcttgtcgaggtccctcagtcgtccaacacctccctggcttcgttctgtaataaagtgaaaaaaatcagggagcgctaccacgcggctgacgtcaacttcaacagtggaaagatttggtccacgaccactgctttcccatatcagcttttttctaagactaagtttaacattcatatcttcattgacaatagcactcagcccttgcattttatgccgtgcgccaattatctggtgaaagacctgatcgctgaaatcctgcatttttgcacaaacgaccagttgctccccaaggatcatattcttagtgtgtgcggctctgaggaatttctacagaacgatcactgtcttgggagtcacaaaatgttccagaaagacaaaagtgtgatccaattgcacctgcaaaagagccgggaggcacctgggaagctgtctcgaaagcatgaggaggaccacagccaattttacctgaaccagcttctggagttcatgcatatctggaaagtctcccgacagtgccttcttacactgatccggaagtacgattttcacctcaaatatcttctgaagacccaggaaaacgtgtacaacattattgaagaggtgaagaaaatttgcagtgtcctgggatgcgtggagaccaagcaaatcaccgacgccgtcaacgagctgagcctgatattgcagaggaaaggggagaatttctaccaaagcagcgaaacctctgcaaaagggctcatcgaaaaggtgaccaccgagctgagcacctccatttatcagttaattaatgtatattgcaactctttttacgcagacttccagcctgtgaacgtccctcgctgtaccagctatctcaaccctgggttgccctcccatctgtctttcactgtatatgccgcacacaacattccagagacgtgggtgcatcggatcaatttcccactggaaattaagagcttgcccagggagagtatgcttaccgtaaaactgttcggcatagcctgtgctactaacaacgctaatctgctggcatggacttgcctaccccttttccccaaggagaaatccattctcgggtcaatgttattttcaatgacactgcagtcagaaccacccgtggagatgatcacacccggagtgtgggacgttagccaaccttcacctgttaccttgcagatcgacttcccggcaactgggtgggaatacatgaagcccgactccgaggagaatcggtcaaacctggaggagccactgaaggagtgcatcaaacacatcgcacgcctcagccaaaaacagacccccttactgttatcagaagagaaaaagcgatacctgtggttttaccggttttactgcaacaacgagaactgctcactccccctggttctgggcagcgccccaggctgggacgaaaggacggtgtccgaaatgcacactatcttgcggaggtggaccttcagccaacctttagaggctttaggccttcttacaagcagtttccccgaccaggagattagaaaggtcgctgtgcaacagctggacaacttattgaacgacgaacttctcgaatatctgccacagctggtacaggctgtaaaattcgagtggaacctcgagagtccacttgtgcagcttttacttcatcggtcgttgcagtctattcaggtggctcaccgcctctactggttgctcaagaatgcagaaaacgaggcctactttaagagctggtatcagaaactgcttgccgcactccaattttgtgctggtaaagccttgaacgacgaattttccaaggaacagaaactgattaaaatcctgggggacataggtgaacgcgtcaaatcggccagcgaccatcagaggcaggaggtgctaaaaaaagaaattggacggctggaagagtttttccaggacgtgaacacttgtcacctgcccctgaatccagccttatgtattaagggcattgatcacgacgcgtgtagttactttacttccaatgccctcccgcttaagatcaccttcatcaacgcaaatccgatgggcaaaaacatctccattatctttaaagccggtgacgacttgagacaagatatgttggttctccagttgatccaggttatggataacatttggctccaggagggactcgacatgcagatgataatttaccggtgtctaagcaccggtaaggaccaagggctcgtacagatggtgcccgacgcggtcacccttgccaaaatccatcgccattcaggtctgatcggacctctgaaggagaacaccatcaagaagtggttctctcagcataatcatttgaaggcagattatgagaaagcccttcgcaacttcttttattcgtgcgcgggatggtgtgtggtaaccttcattctcggtgtttgtgatcgtcacaatgacaacattatgttgacaaagagtggccatatgttccatattgacttcggcaaatttttgggccatgcacagacgttcggcggaataaaacgcgatcgtgccccatttatttttaccagcgaaatggagtactttatcactgaagggggaaaaaacccacagcacttccaagacttcgtggaactgtgttgccgcgcttacaacattatccgtaaacattcccaactccttctgaacttgctcgagatgatgctctatgccggactgcccgaactaagcggcatacaggatctcaagtatgtctacaataacctgcgtcctcaggacacggacctggaggccaccagccacttcaccaagaagattaaggaaagcctggagtgtttcccagtcaagttaaataacctcatacataccctagctcagatgtcagccataagccccgcaaaaagcacctcccagactttcccgcaggagtcgtgtctcctgtcaaccactaggtccattgagagagccaccatccttggatttagcaagaagtcttctaacttgtacctgatccaggtcacccattcgaacaatgaaacctctcttactgaaaaaagttttgagcagttctctaaactgcacagtcagttgcagaagcagtttgcttccctgaccctgcctgagtttccccattggtggcacctgccatttactaattccgaccataggaggtttagagacttgaatcactacatggagcagattctaaacgtatcgcatgaagtgaccaactctgactgcgtgcttagcttttttctttccgaagctgtccagcagactgtggaagagagctcacccgtgtacctgggggagaagttccctgataaaaaacccaaggtccagctcgtgatcagttacgaggatgtgaaacttaccatcctcgtaaaacacatgaagaatattcacttacccgatggaagcgcgccatctgctcacgtggaattttacctgctcccctacccgtctgaggtccgccgacgtaaaaccaaatccgtgccaaagtgtaccgaccctacctacaacgaaatcgtggtgtatgatgaggtgaccgagttacagggtcacgtgctgatgctaattgtgaaatctaagaccgtttttgtcggcgcaataaatatccggctgtgctccgtacccctggacaaggagaaatggtaccccttgggtaacagtataatctag

SEQ ID NO: 147645 - DNA, 4338 bp, Artificial Sequence
  derived and/or modified sequence
atggcgtattcgtggcagaccgacccaaaccctaatgaatcacatgagaagcaatacgagcatcaggagtttttgttcgtcaaccagccccactcatcctctcaggtgtctctgggcttcgatcagatcgtcgatgagatcagtggcaagataccacattacgagagcgagattgacgagaacaccttctttgttccaaccgcacccaaatgggattctacgggccatagccttaatgaagcgcatcagattagtctgaacgagttcacctcgaagagtcgcgagctgtcctggcatcaggtgagtaaagcaccggctattggctttagtccgagtgtcctgccaaagccccagaatacaaacaaggagtgttcttggggtagccctattggtaaacatcacggcgcagacgactcacgcttttccattttggctccgagtttcaccagtctggacaaaattaacctggagaaggaactggagaatgaaaaccacaattatcacattggctttgaaagttctatccccccaactaattcatcgttcagttctgatttcatgcctaaagaagaaaacaaaaggtccgggcacgttaatattgtagagccttctctaatgctgctcaaaggatccctgcagccaggaatgtgggagagcacatggcagaaaaacattgaatcgatcggttgctccattcagcttgtggaggtccctcaatcaagtaatacatctcttgcgagcttctgcaataaggtgaaaaagatccgggaaagatatcatgctgcagacgtgaacttcaacagcggaaagatttggagtactacaactgctttcccttatcaactgttcagcaaaaccaaatttaacattcacatatttatcgacaatagtacccagcccttgcactttatgccatgcgccaactacctagttaaggaccttatcgcagagatcttgcatttttgcacaaatgaccaattgttgccaaaagatcacatactttccgtgtgcggctccgaagagttccttcagaatgaccactgcttggggtcacataaaatgttccagaaggataagagcgtgatacaactccaccttcagaagagtcgcgaggctccagggaaactgtctcgcaaacatgaagaggatcactcgcagttttatttgaaccagctgctcgaatttatgcatatctggaaagtctccagacagtgcctgctgaccctgatccgaaaatacgattttcatttaaagtatctcctcaaaacccaggaaaatgtgtataacatcatcgaggaagtcaagaaaatatgcagtgtcctcggctgtgtggaaacaaaacaaatcaccgacgccgtgaacgaactgtcactgatacttcagagaaagggcgagaacttttatcagtctagcgaaaccagcgcgaaggggctaatcgagaaggtaaccacagagctttccacttctatctaccagcttatcaatgtatactgcaactcattttatgccgacttccagcctgtgaacgtgccaaggtgcacttcatatcttaatcctggtctccccagccacctctcgtttacagtctacgcggcacacaatataccagaaacctgggtgcaccgcataaatttccctttagaaatcaaaagtctgccaagagagtccatgctgaccgtcaagctgtttgggattgcatgcgccactaataacgcaaacctgctggcctggacttgtctgccgttattccccaaggagaagagtatcttagggagtatgcttttcagcatgaccctgcagtcagagccacctgtggagatgataactccaggtgtgtgggacgtctcacagcccagtcccgttactctacagatcgacttccccgctactggttgggagtatatgaaacccgattccgaagaaaacagatctaatttggaagagccgctcaaggaatgtatcaaacacatcgctagactgagtcagaaacagactccacttctgctgagtgaggaaaaaaaacgttatctttggttctacaggttctactgcaataatgaaaattgctcactccctctagtcctgggttcagcccctggatgggatgaacgcacagtaagtgaaatgcatacaatcctcagacgatggacattttctcagccccttgaagccctcggtcttctgaccagctcctttcccgaccaggagatcaggaaggttgctgttcagcagctcgataacctcctcaacgatgagctgttggaataccttccccagcttgtccaggcagtcaagttcgagtggaatctggagagcccattggtccagctgctgctgcaccgttcactccaatcaatccaagtggcgcatcgactctactggctattgaagaacgcggaaaacgaggcctacttcaaatcctggtaccagaaactgctagctgccctccaattttgtgcaggtaaagcattaaacgatgagtttagtaaggagcagaagctcatcaagatcctaggagacatcggcgaacgcgtaaaatctgcttccgatcatcagcgccaggaagtactgaagaaagaaatcggcaggcttgaagagttctttcaggatgtgaatacatgtcatctcccactcaatcccgctctctgtatcaagggcatcgaccacgatgcctgttcttacttcacttccaatgcccttccactgaagatcacatttattaacgccaatcctatgggaaagaacatctccattatcttcaaagctggtgacgacctcagacaagacatgctcgtgctgcagctcattcaggttatggataatatctggctccaggaaggactggacatgcagatgatcatctataggtgccttagtaccggaaaggatcaaggtctcgtgcaaatggtaccagatgctgtgacactagcaaagattcatagacatagtggtttaattggaccactgaaggaaaacaccatcaagaagtggttttcccagcataaccatttgaaggcagactatgagaaagccttgagaaatttcttctatagttgcgcagggtggtgtgtcgtgacattcatcctcggtgtgtgcgaccgccacaacgataatataatgctcaccaagtcagggcatatgtttcacattgatttcgggaaatttttagggcatgctcagaccttcggagggattaaaagggacagagcacctttcattttcactagcgaaatggagtattttattaccgaaggaggcaaaaatccacaacacttccaggacttcgtggagctgtgctgccgcgcttataacattatacggaagcacagccagctactgttaaaccttctggagatgatgctctatgctggattgcccgaattaagcggcattcaggatcttaagtatgtgtataacaatctgcggccacaggacaccgacctggaagcgaccagccacttcacgaagaagatcaaggaaagtctagagtgtttccctgtcaagcttaataacctgatacacacccttgcgcaaatgtcagccatttcccccgcaaaaagtacttcccagacttttccgcaggagtcgtgcttgctttcgacaacacggtctatagagagggcaacaattttggggttcagcaagaaatcctcgaatctgtacctcattcaggtaacacacagtaacaacgagactagcctcacagagaagtcgtttgagcagttcagtaagctgcattcgcagctgcagaagcaattcgccagcctcaccctccccgaattcccgcattggtggcaccttcctttcacaaactcggaccacagaaggttcagagacctgaatcattatatggagcagatcttgaacgtttcccatgaagtgacaaattctgattgcgttctgagcttcttcttgagcgaggccgttcagcagactgtcgaagaaagcagtcccgtatatctgggggaaaagttcccagacaagaagccgaaggtacaactggtcattagctatgaagacgtgaagctgacaattctcgtgaaacatatgaaaaacattcacctccccgacggatcggcccctagtgcacatgtggagttctacctcctcccatatcccagtgaggtgcgccgtcggaaaactaaatctgttccgaagtgcacagatcccacctacaacgagatagtcgtctatgacgaggttacagaattgcagggtcacgtgctcatgttaattgtcaaatccaaaaccgtcttcgtgggtgcaataaacatcagactatgcagtgtgcccctcgacaaggaaaagtggtacccattgggtaactctatcatctag

SEQ ID NO: 147646 - DNA, 4338 bp, Artificial Sequence
  derived and/or modified sequence
atggcctacagctggcagaccgaccccaaccccaacgagagccacgagaagcagtacgagcaccaggagttcctgttcgtgaaccagccccacagcagcagccaggtgagcctgggcttcgaccagatcgtggacgagatcagcggcaagatcccccactacgagagcgagatcgacgagaacaccttcttcgtgcccaccgcccccaagtgggacagcaccggccacagcctgaacgaggcccaccagatcagcctgaacgagttcaccagcaagagcagagagctgagctggcaccaggtgagcaaggcccccgccatcggcttcagccccagcgtgctgcccaagccccagaacaccaacaaggagtgcagctggggcagccccatcggcaagcaccacggcgccgacgacagcagattcagcatcctggcccccagcttcaccagcctggacaagatcaacctggagaaggagctggagaacgagaaccacaactaccacatcggcttcgagagcagcatcccccccaccaacagcagcttcagcagcgacttcatgcccaaggaggagaacaagagaagcggccacgtgaacatcgtggagcccagcctgatgctgctgaagggcagcctgcagcccggcatgtgggagagcacctggcagaagaacatcgagagcatcggctgcagcatccagctggtggaggtgccccagagcagcaacaccagcctggccagcttctgcaacaaggtgaagaagatcagagagagataccacgccgccgacgtgaacttcaacagcggcaagatctggagcaccaccaccgccttcccctaccagctgttcagcaagaccaagttcaacatccacatcttcatcgacaacagcacccagcccctgcacttcatgccctgcgccaactacctggtgaaggacctgatcgccgagatcctgcacttctgcaccaacgaccagctgctgcccaaggaccacatcctgagcgtgtgcggcagcgaggagttcctgcagaacgaccactgcctgggcagccacaagatgttccagaaggacaagagcgtgatccagctgcacctgcagaagagcagagaggcccccggcaagctgagcagaaagcacgaggaggaccacagccagttctacctgaaccagctgctggagttcatgcacatctggaaggtgagcagacagtgcctgctgaccctgatcagaaagtacgacttccacctgaagtacctgctgaagacccaggagaacgtgtacaacatcatcgaggaggtgaagaagatctgcagcgtgctgggctgcgtggagaccaagcagatcaccgacgccgtgaacgagctgagcctgatcctgcagagaaagggcgagaacttctaccagagcagcgagaccagcgccaagggcctgatcgagaaggtgaccaccgagctgagcaccagcatctaccagctgatcaacgtgtactgcaacagcttctacgccgacttccagcccgtgaacgtgcccagatgcaccagctacctgaaccccggcctgcccagccacctgagcttcaccgtgtacgccgcccacaacatccccgagacctgggtgcacagaatcaacttccccctggagatcaagagcctgcccagagagagcatgctgaccgtgaagctgttcggcatcgcctgcgccaccaacaacgccaacctgctggcctggacctgcctgcccctgttccccaaggagaagagcatcctgggcagcatgctgttcagcatgaccctgcagagcgagccccccgtggagatgatcacccccggcgtgtgggacgtgagccagcccagccccgtgaccctgcagatcgacttccccgccaccggctgggagtacatgaagcccgacagcgaggagaacagaagcaacctggaggagcccctgaaggagtgcatcaagcacatcgccagactgagccagaagcagacccccctgctgctgagcgaggagaagaagagatacctgtggttctacagattctactgcaacaacgagaactgcagcctgcccctggtgctgggcagcgcccccggctgggacgagagaaccgtgagcgagatgcacaccatcctgagaagatggaccttcagccagcccctggaggccctgggcctgctgaccagcagcttccccgaccaggagatcagaaaggtggccgtgcagcagctggacaacctgctgaacgacgagctgctggagtacctgccccagctggtgcaggccgtgaagttcgagtggaacctggagagccccctggtgcagctgctgctgcacagaagcctgcagagcatccaggtggcccacagactgtactggctgctgaagaacgccgagaacgaggcctacttcaagagctggtaccagaagctgctggccgccctgcagttctgcgccggcaaggccctgaacgacgagttcagcaaggagcagaagctgatcaagatcctgggcgacatcggcgagagagtgaagagcgccagcgaccaccagagacaggaggtgctgaagaaggagatcggcagactggaggagttcttccaggacgtgaacacctgccacctgcccctgaaccccgccctgtgcatcaagggcatcgaccacgacgcctgcagctacttcaccagcaacgccctgcccctgaagatcaccttcatcaacgccaaccccatgggcaagaacatcagcatcatcttcaaggccggcgacgacctgagacaggacatgctggtgctgcagctgatccaggtgatggacaacatctggctgcaggagggcctggacatgcagatgatcatctacagatgcctgagcaccggcaaggaccagggcctggtgcagatggtgcccgacgccgtgaccctggccaagatccacagacacagcggcctgatcggccccctgaaggagaacaccatcaagaagtggttcagccagcacaaccacctgaaggccgactacgagaaggccctgagaaacttcttctacagctgcgccggctggtgcgtggtgaccttcatcctgggcgtgtgcgacagacacaacgacaacatcatgctgaccaagagcggccacatgttccacatcgacttcggcaagttcctgggccacgcccagaccttcggcggcatcaagagagacagagcccccttcatcttcaccagcgagatggagtacttcatcaccgagggcggcaagaacccccagcacttccaggacttcgtggagctgtgctgcagagcctacaacatcatcagaaagcacagccagctgctgctgaacctgctggagatgatgctgtacgccggcctgcccgagctgagcggcatccaggacctgaagtacgtgtacaacaacctgagaccccaggacaccgacctggaggccaccagccacttcaccaagaagatcaaggagagcctggagtgcttccccgtgaagctgaacaacctgatccacaccctggcccagatgagcgccatcagccccgccaagagcaccagccagaccttcccccaggagagctgcctgctgagcaccaccagaagcatcgagagagccaccatcctgggcttcagcaagaagagcagcaacctgtacctgatccaggtgacccacagcaacaacgagaccagcctgaccgagaagagcttcgagcagttcagcaagctgcacagccagctgcagaagcagttcgccagcctgaccctgcccgagttcccccactggtggcacctgcccttcaccaacagcgaccacagaagattcagagacctgaaccactacatggagcagatcctgaacgtgagccacgaggtgaccaacagcgactgcgtgctgagcttcttcctgagcgaggccgtgcagcagaccgtggaggagagcagccccgtgtacctgggcgagaagttccccgacaagaagcccaaggtgcagctggtgatcagctacgaggacgtgaagctgaccatcctggtgaagcacatgaagaacatccacctgcccgacggcagcgcccccagcgcccacgtggagttctacctgctgccctaccccagcgaggtgagaagaagaaagaccaagagcgtgcccaagtgcaccgaccccacctacaacgagatcgtggtgtacgacgaggtgaccgagctgcagggccacgtgctgatgctgatcgtgaagagcaagaccgtgttcgtgggcgccatcaacatcagactgtgcagcgtgcccctggacaaggagaagtggtaccccctgggcaacagcatcatctag

SEQ ID NO: 147647 - protein, 436 aa, Artificial Sequence
  derived and/or modified sequence
MMATQTLSIDSYQDGQQMQVVTELKTEQDPNCSEPDAEGVSPPPVESQTPMDVDKQAIYRHPLFPLLALLFEKCEQSTQGSEGTTSASFDVDIENFVRKQEKEGKPFFCEDPETDNLMVKAIQVLRIHLLELEKVNELCKDFCSRYIACLKTKMNSETLLSGEPGSPYSPVQSQQIQSAITGTISPQGIVVPASALQQGNVAMATVAGGTVYQPVTVVTPQGQVVTQTLSPGTIRIQNSQLQLQLNQDLSILHQDDGSSKNKRGVLPKHATNVMRSWLFQHIGHPYPTEDEKKQIAAQTNLTLLQVNNWFINARRRILQPMLDSSCSETPKTKKKTAQNRPVQRFWPDSIASGVAQPPPSELTMSEGAVVTITTPVNMNVDSLQSLSSDGATLAVQQVMMAGQSEDESVDSTEEDAGALAPAHISGLVLENSDSLQ

SEQ ID NO: 147648 - protein, 419 aa, Artificial Sequence
  derived and/or modified sequence
MMATQTLSIDSYQDGQQMQVVTELKTEQDPNCSEPDAEGVSPPPVESQTPMDVDKQAIYRHPLFPLLALLFEKCEQSTQGSEGTTSASFDVDIENFVRKQEKEGKPFFCEDPETDNLMVKAIQVLRIHLLELEKVNELCKDFCSRYIACLKTKMNSETLLSGEPGSPYSPVQSQQIQSAITGTISPQGIVVPASALQQGNVAMATVAGGTVYQPVTVVTPQGQVVTQTLSPGTIRIQNSQLQLQLNQDLSILHQDDGSSKNKRGVLPKHATNVMRSWLFQHIGHPYPTEDEKKQIAAQTNLTLLQVNNWFINARRRILQPMLDSSCSETPKTKKKTAQNRPVQRFWPDSIASGVAQPPPSELTMSEGTGGRPRPDMVDHGVGIMNKRPGSGLLAPPRPAENDILKPPLRSSFVNCLLIF

SEQ ID NO: 147649 - DNA, 4997 bp, Artificial Sequence
  derived and/or modified sequence
gcgtcgccctcctcccattgagcgaggctgtgtcgcgtggcccagcgtcggcgtgacggttggacgcgggcgcggcactgcgggtcccgattgctgcagccgcttgtcagtgtgatgaagattggcacccagacaccattcgcttttcacccaagatgatttgatgtcttataaaactctgatgaaccatgatggctacacagacattaagtatagacagctatcaagatgggcaacagatgcaagtagtaacagagttaaagacagaacaagatccaaactgctctgaacccgatgcagaaggagtgagccctccccctgtggagtctcagaccccgatggatgtggacaagcaggccatttataggcatccactatttccattattagctttgttgtttgaaaaatgtgaacaatctacacagggctctgaaggcacaacttctgccagttttgatgtagacatcgaaaattttgtaagaaagcaagagaaggaagggaaacctttcttttgtgaagatccagaaactgataatttaatggtaaaagcaatccaggttttgcgcattcatcttcttgagctggaaaaggttaacgaactctgcaaagatttctgcagtcgatacattgcttgtctgaaaacaaaaatgaacagtgaaactctgttgagtggagagcctggaagcccgtactcaccagtgcagtcccagcagattcaaagtgccatcacaggcaccatcagccctcagggaattgtggtgccggcgtccgcgctgcagcagggaaacgtagccatggcgacggtggcaggtggcacagtgtatcagcctgtcacggtcgtcactccccaaggccaagtggtcacacagacattgtcgcctgggacaattaggatccagaactcccagcttcagttacagttaaaccaagatctcagcatcttgcatcaagatgatggttcatctaagaacaagaggggcgtcctgccaaagcatgccacgaacgtgatgcggtcctggctcttccagcacatcgggcatccctacccaacagaggatgagaaaaaacagattgctgctcagacaaatttgacactactccaagtcaacaactggttcatcaatgccagaagacgaattcttcagccaatgttggattcaagttgttcagagacccccaaaacaaagaaaaaaactgctcagaaccggccagttcagaggttttggcctgattctattgcatcaggagtcgcacagccaccgccgagcgagctcaccatgtcggaaggagctgttgtcaccatcaccacgcccgtgaacatgaacgtggacagccttcagtctctgtcctcggacggggccaccctggcggtgcagcaggtcatgatggcagggcagagcgaggacgagtctgtggacagcacagaggaggatgcgggtgccctggcccctgcccacatcagcgggctggtcttggagaacagtgactccctgcagtaggggcaggagcagacgcacctgactttttggagtttgcacagcaaacattttacacagttttatttctaatatgttttatatgtagatatagaagagtgcacttttgtatttcatagtaagcttaaagcgcgtctttgccggtgcagcgacttctttcaagtgtgtgtgtgtgtgtgtgtgtgtgtgtgtgtgcgtgtgtgcgtgtgtgtggatttttaaagaaattctttaaaggtttaacgctagattgtgaggaatgacacaccactccctccccaccttgaatccctaattagattaaggaatagcgctgccattttctaaaccgtgatgcggttgtcacttagttctgtggttccagcagatctcagtgggctggttgatttgtgtggcccatggatttgaaagaagctgctgcacccgaaactgccagtgtgcggtgacaacggcacacgcctagactgagtgtggtttcgtcgtgagtggatggacggcaagcttagcaagcctaagtcccctcatgttcagtgagcctgtttcatttgctatatagaaaaagaaactcctatttttaccttgctggaattattggataaaaaagctatttttataaattcgttatgaattggatgatgactatattgaggataaaatttctagagaagaaacaatacatgcttgctattaatatttcaatttggaatgttctgaattgaccaaatttaatgaacctgcccaaagttagctaccgttccatggttctttgctctccccgggtagtgatgaacatttactactataaaagaaacagctatttaatgaaattttgatatctgcaaatttttgttgatatgtaatgctcagattgcattttacacttgatctaaacatatatcgaaagatatctgctaaacaggacttcaggtaagtgaggtgaaatggtagccagtgacccgttaggagctctcaccgtacatactccagtctaatttaaatctgaccacagttgcatggtcgctttaccatgttagctgtgtattgttttaaaagttttaacttcaaaatatgttatgcacagaatgtttattataaactaatataaaatgtgctctaccccattggctcagagctagggcaaacagcagatattcagactttattacttaactagcggacatccctggagtcccagcagcgagctggtctggcgagggcacctcggcagcccccacgggttggctcctacgtttgcgtttgtggctggtctcctggtgtcagtgttctcttgtacgttgttgctttcgacttttcagagccctcctgctcacttgaccacgtgagatttggaataactgtaggacttctgtttcctggtaacaagatgaaccgagagagtgggctgggttctgttttctttggttttgatttgttttcattgtttacttaggagtggtgctttttctcagaaaacaggccacggtgtttcatacagaatgtcttcatatcatctgaaatggtatggctgaagttcatttgtttacagggtcgggaatgtcttcagttcttgagagtcaacagtaatgattggttgtaagccaagggacattttaagctagtgaagagttttttctggaattgatttttcccaaaagaatatattaattgaggttaagaagtcagtgggaaacacacagaaatttgttttaaaatctttcaggagctttactgaaagacttggttatcaagtcttttggggagagaatgacattttttttttgagacagagttttgctcttgttgcccaggctggagggcaatggtgcaatctcagctcactgcaacctccacctcttatgttcaagcaattctccttccttagcctcctgagtagctgggattacaggcatgcgccaccacacccggctaattttgtatttttagtagagatgggtttctccatgttggtcgggctggtctcgaactcccgacctcaggtgatctgcctgcctcagcctcccaaagtgctgggattacaggtgtgagccaccgcgcccggccgagaatgacatcttaaagccaccattgcgttcctcatttgtgaactgtcttctcatattttaagtcaagtctataagatcatttttaacctaagttccaactttgttggactccttaaaataagcacccatgaaagccagccagcccttcctccttccctcaccaccctccgtctcttcggctgcttgctctttagtgtagattagtggaagccattcacagaatgtagactcatgtataggtcaccgtttctttcccccactagaaatcacattcactaagcagtggattgaatttaagagtgctgcccctgcccggcgcagtagggcgtgcctctagttccagctactcgggagtctgaggcagaggatggcatgtgccaggagtttgaggctgcagtgcactatgcttgcacctgtgaatagccactgcactccatcttgggcaacacagtgagacccccatctataaaaagagagcactgcctgaacctcggtggcactgggaagctctggcctgagagttaaacacccatgctgaatgatacagtgtgcattctctccagctgcaaactttcttcaactttcctaaattcttactaaattcagaggaataggataaagatcacttagagaaagggtgcttatggacatagcctgagtttcctttaacctctctgcaatgggtgcttttaactagcttctacatggcaagctgtttcagtttgcaaaatcactgcccagcatgtttgaggtcagttggcaccttaaaacacctgttctccagcccttggacagtggagagaatctgtaaaagtgtgaccccctctaagatttcgttttaaatgatcagattcggttccagttttattcttgttgagtttttccctatgaaggctccttttgaatgtgtcttgagacccaaattgagcatgttgctgttattcctgccctgcacctgtggagcaggagtggcagggctggctgtgctgggttccagctcgctcccaccgagggactagcttggcctttgcgctttgattccagatagtaagatgagtggaagtgtttatcgagcatgcaaaagaaaccctcacggctaagggctctgggagttgtgtctgtgtgacctgagagtgatccatctcctgcctgtgtgaggtagcagtgggcacttttcattgagacaaactccagggtgtccagagggggttctgccccttgtgaaggcccattcctggcacttagagacagaaagaactcagcaatctttcgttctagttatattcggtctttgaaactgacaatctttgaaatgtgaatactgtaacaatatgttttcttggattgttgtctttaaaaaggatttttgtgaagcaattgatttatcaaagcaaaaaaattaaaaatagaaacttgcaaaaaaaaaaaaaaaaaaaaa

SEQ ID NO: 147650 - DNA, 1311 bp, Artificial Sequence
  derived and/or modified sequence
atgatggcaacccagactctgtctattgactcctaccaggacgggcaacaaatgcaggtggtgaccgaacttaagacagagcaagaccccaactgtagtgaaccagatgctgagggggttagcccacctcctgtagagagccagacacctatggacgtcgacaaacaggctatctatagacatcccttattccccctgctcgcgctgctcttcgaaaagtgcgaacagagcacacagggcagtgagggcaccacttctgcatcgtttgatgtggacatcgaaaatttcgtccgcaagcaggaaaaggaggggaagccattcttttgcgaagaccctgaaactgacaacctcatggtaaaggctatccaggtactccgtatccacctgctagagctggaaaaggtaaatgagctatgtaaggatttctgctctaggtatatcgcctgtctcaaaaccaagatgaactcagagaccctgctgagcggcgaacccggtagcccttatagtcctgtccagtcacagcaaatccagtctgccattacaggaactatctccccccagggcatcgtggtgcctgcgtccgcgctccagcagggaaatgttgcgatggctacagtggctggcggcacagtgtatcagcccgtgaccgtagtaactccccaggggcaggtcgtaacacagacactgtctccaggcacaattaggatccagaatagccagttacagctgcaacttaaccaggatttaagcattctccaccaagacgacggcagctccaaaaacaagcggggcgtcctccccaaacacgccacaaacgtgatgcggagctggttgtttcagcatattgggcacccctaccccacagaggacgaaaaaaagcaaattgccgcgcaaactaacctgacacttttgcaagtgaacaattggttcatcaacgcacgccggcggatactccaacctatgctcgactcatcctgttctgaaacaccaaagacaaagaagaagaccgcacagaaccgaccagttcagcgcttctggccagacagcatcgcatctggcgtggcacagcccccaccatcggaacttactatgagcgaaggagccgtagtgaccatcactacaccagtgaacatgaatgtcgacagcctgcaatcactctcctcagatggggccactctcgccgtccagcaggttatgatggccgggcagtcagaggacgaatctgtggattccactgaggaagacgccggtgccctcgcccccgctcacatttctgggttggtcctcgaaaactccgatagtcttcagtag

SEQ ID NO: 147651 - DNA, 1260 bp, Artificial Sequence
  derived and/or modified sequence
atgatggccacccaaacactgagcattgatagctatcaggatggccagcaaatgcaggtggtgacagagcttaaaacagaacaggatccaaactgttccgagcctgatgccgagggggtgagcccccccccagtggagtctcagacacccatggacgtggacaagcaagccatttatagacatccactttttcctcttcttgccctattattcgagaagtgtgaacaaagtacacaaggctccgagggcaccacttccgcctcatttgacgtggacatcgagaactttgtcaggaaacaggaaaaggagggaaagcccttcttttgtgaagaccccgaaaccgataaccttatggtgaaagcgatccaggtcctgagaatccatctccttgagctcgagaaagtgaatgagctgtgcaaagacttctgctcccgctatatcgcttgcttgaagactaagatgaactcggaaaccctcctgtccggagaaccaggctccccctactcacctgttcagagccaacagatccagtcagcgatcacagggacaatctctccccaaggcatagtggttcccgcgagtgcgctccaacaaggcaacgtggccatggccactgtggcagggggaactgtctatcagcccgtaactgtggtgactccacaggggcaggtggtgacacagaccttgtccccgggaactatccggattcagaacagtcagctgcagcttcagctgaaccaagacctgtcaatcctccaccaggacgacgggagcagcaagaacaagcgcggtgtccttcctaaacacgctactaatgtcatgaggagctggctcttccagcatatcggccatccgtatcccacagaggacgaaaagaaacagatagctgctcagaccaatttgacactcctccaggtgaacaattggttcatcaatgccaggagaaggatcttacagcctatgttagattcgtcgtgtagcgaaaccccaaagaccaaaaagaaaacagcccaaaatcgccctgtccagcgattttggcctgactccatcgcctctggggtggcacaaccacccccttcagagctgaccatgagcgagggaactggggggcgcccccgaccagatatggtcgaccacggcgtagggattatgaataagaggccgggctctggtctccttgcacccccccgcccggccgagaacgacattttgaaacccccattgcggtcaagctttgtgaattgtcttctaatcttctag

SEQ ID NO: 147652 - DNA, 1311 bp, Artificial Sequence
  derived and/or modified sequence
atgatggccacccagaccctgagcattgacagctaccaggacggccagcagatgcaggtggtgacagagctgaagacagagcaggaccccaactgcagcgagccagatgctgagggcgtgagccccccacctgtggagagccagacccccatggatgtggacaagcaggccatctaccgccaccccctcttccccctgctggccctgctgtttgagaagtgtgagcagagcacccagggcagcgagggcaccaccagcgccagctttgatgtggacatcgagaactttgtgaggaagcaggagaaggagggcaagcccttcttctgtgaggaccctgagacagacaacctgatggtgaaggccatccaggtgctgcgcatccacctgctggagctggagaaggtgaatgagctgtgcaaggacttctgcagccgctacatcgcctgcctgaagaccaagatgaacagcgagaccctgctgtctggagagcccggcagcccctacagccctgtgcagagccagcagatccagagcgccatcaccggcaccatcagcccccagggcatcgtggtgcctgccagcgccctgcagcagggcaatgtggccatggccaccgtggccggcggcaccgtgtaccagcctgtgacagtggtgaccccccagggccaggtggtgacccagaccctgagccctggcaccatccgcatccagaacagccagctgcagctgcagctgaaccaggacctgagcatcctgcaccaggatgatggcagcagcaagaacaagaggggcgtgctgcccaagcacgccaccaacgtgatgaggtcctggctgttccagcacatcggccacccctaccccacagaagatgagaagaagcagattgctgcccagaccaacctgaccctgctgcaggtgaacaactggttcatcaatgcccggcggcgcatcctgcagcccatgctggacagcagctgcagcgagacccccaagaccaagaagaagacagcccagaacagacctgtgcagcgcttctggccagacagcatcgccagcggcgtggcccagcccccacccagcgagctgaccatgtctgagggcgctgtggtgaccatcaccacccctgtgaacatgaatgtggacagcctgcagagcctgagcagtgatggagccaccctggccgtgcagcaggtgatgatggccggccagagtgaagatgagagcgtggacagcacagaggaggatgctggggccctggccccagcccacatcagcggcctggtgctggagaacagcgacagcctgcagtag

SEQ ID NO: 147653 - DNA, 1260 bp, Artificial Sequence
  derived and/or modified sequence
atgatggccacccagaccctgagcattgacagctaccaggacggccagcagatgcaggtggtgacagagctgaagacagagcaggaccccaactgcagcgagccagatgctgagggcgtgagccccccacctgtggagagccagacccccatggatgtggacaagcaggccatctaccgccaccccctcttccccctgctggccctgctgtttgagaagtgtgagcagagcacccagggcagcgagggcaccaccagcgccagctttgatgtggacatcgagaactttgtgaggaagcaggagaaggagggcaagcccttcttctgtgaggaccctgagacagacaacctgatggtgaaggccatccaggtgctgcgcatccacctgctggagctggagaaggtgaatgagctgtgcaaggacttctgcagccgctacatcgcctgcctgaagaccaagatgaacagcgagaccctgctgtctggagagcccggcagcccctacagccctgtgcagagccagcagatccagagcgccatcaccggcaccatcagcccccagggcatcgtggtgcctgccagcgccctgcagcagggcaatgtggccatggccaccgtggccggcggcaccgtgtaccagcctgtgacagtggtgaccccccagggccaggtggtgacccagaccctgagccctggcaccatccgcatccagaacagccagctgcagctgcagctgaaccaggacctgagcatcctgcaccaggatgatggcagcagcaagaacaagaggggcgtgctgcccaagcacgccaccaacgtgatgaggtcctggctgttccagcacatcggccacccctaccccacagaagatgagaagaagcagattgctgcccagaccaacctgaccctgctgcaggtgaacaactggttcatcaatgcccggcggcgcatcctgcagcccatgctggacagcagctgcagcgagacccccaagaccaagaagaagacagcccagaacagacctgtgcagcgcttctggccagacagcatcgccagcggcgtggcccagcccccacccagcgagctgaccatgtctgagggcaccggcggccggcccaggccagacatggtggaccatggagtgggcatcatgaacaagaggcctggcagcggcctgctggccccacccaggcctgcagaaaatgacatcctgaagccacccctgcggagcagctttgtgaactgcctgctgatcttctag

SEQ ID NO: 147654 - DNA, 1311 bp, Artificial Sequence
  derived and/or modified sequence
atgatggccacccagaccctgagcatcgacagctaccaggacggccaacagatgcaggtggtgaccgaactgaaaacagagcaggaccccaattgcagcgagcccgacgcggaaggcgttagccctcctcctgtggaatcacagacgcccatggacgtggacaaacaggccatctacaggcaccctctatttcccctgctggccctgctcttcgaaaagtgcgagcaatctacacaagggtccgagggtaccacctccgcttctttcgatgtagacatagaaaacttcgtgcgcaaacaggagaaagagggaaagcccttcttctgtgaggatcccgagacagacaacctgatggtgaaggcaatacaggtcctccgcatccacttactagagctggaaaaagttaacgagttgtgcaaagacttctgttctcgatacatcgcatgccttaaaacgaaaatgaattcggaaacactattgagcggcgaacctgggtccccttactcccccgtacagtctcaacaaatccagtcggctattacgggaacgatatctccacagggaattgtggttcccgcaagcgcactgcagcagggcaacgtggccatggccacggtcgcaggcggaaccgtgtatcaacccgtcaccgttgtcaccccacagggtcaagtggttactcagacactgtcaccaggcaccatcagaatccaaaacagccagctccaactgcaacttaaccaggatctgtccatactccaccaggatgacggcagcagcaagaacaagaggggcgtgctgcccaagcatgcaactaacgtaatgcggagctggctcttccagcacatcggtcatccttatcctaccgaggacgaaaagaagcagatcgcagcacagaccaatttaaccctgttgcaagtgaacaactggtttatcaatgcccgacgacgaatccttcagccaatgctcgattcctcatgctccgagacacccaaaacaaaaaagaagaccgctcagaaccgacccgtccagcgcttctggcccgactcaatcgcaagcggggtggcacagccacctccaagcgaacttactatgtcggaaggagcagtcgtgacaatcactacaccggtgaatatgaatgtagactccctgcagagcctcagtagcgacggcgcaaccctggcagtccagcaggtgatgatggccggacagagtgaggatgaaagcgtggattcgaccgaggaagatgcaggggcccttgcacccgctcacatctcaggactggttctggagaattctgatagcctccaatag

SEQ ID NO: 147655 - DNA, 1260 bp, Artificial Sequence
  derived and/or modified sequence
atgatggccacccagaccctgagcatcgacagctaccaggacggccagcagatgcaggtcgtcacagagcttaaaaccgagcaagatccaaattgcagcgaaccagatgccgaaggagtgtcaccccccccagtcgaaagccagacccctatggacgtggataagcaggcgatctatcggcatcctctgttccctctgcttgccctgttatttgagaaatgtgagcagtctacccaagggagcgaaggaaccacttcggcctcattcgatgtcgacatcgaaaacttcgtgcggaagcaggagaaggaaggcaagccatttttttgtgaagatcctgaaactgataatctcatggtcaaggcaatccaggtgctacgcatccatctgcttgagctggaaaaagtgaatgaactgtgtaaggacttttgctcccgatatatcgcttgcctgaagacaaagatgaactcagaaacactattgagcggggagccaggcagtccgtattcccccgtgcagtcacagcagattcagtccgctattactggaaccatttccccacagggcatcgtggttcctgctagtgctctgcagcagggaaatgttgccatggctactgtcgccgggggcactgtgtaccaaccagtgaccgtcgtgaccccgcagggccaagtcgtgacacaaacactctctcctggaaccatccgaatccagaactcgcagctccagcttcagctcaatcaggacttgagtatactgcaccaggacgatggatctagcaagaacaagaggggagtgctgcccaagcacgccaccaatgtcatgcggtcttggctcttccagcacattggtcacccctatcctaccgaggacgaaaagaagcagattgccgcccaaaccaatctcacactactacaggtaaacaattggttcatcaatgccaggaggagaatccttcaaccgatgctagacagcagttgctccgaaacacccaagactaagaaaaagactgcacagaacaggcctgtacagcggttttggcccgactccatagccagtggggtcgctcaacctcccccatccgagctaacaatgtccgagggcactgggggacgcccaagaccagacatggtggatcacggcgttggcatcatgaacaaacgtcccggttccggtctgttagcaccacctcggccagctgagaatgacatcctgaaaccgcctctccggtcttccttcgtgaattgtttgctgatattctag

SEQ ID NO: 147656 - DNA, 5483 bp, Artificial Sequence
  derived and/or modified sequence
gaatattgatgcggcgcgcgtcggcgtcgccctcctcccattgagcgaggctgtgtcgcgtggcccagcgtcggcgtgacggttggacgcgggcgcggcactgcgggtcccgattgctgcagccgcttgtcagtgtgatgaagattggcacccagacaccattcgcttttcacccaagatgatttgatgtcttataaaactctgatgaaccatgatggctacacagacattaagtatagacagctatcaagatgggcaacagatgcaagtagtaacagagttaaagacagaacaagatccaaactgctctgaacccgatgcagaaggagtgagccctccccctgtggagtctcagaccccgatggatgtggacaagcaggccatttataggcatccactatttccattattagctttgttgtttgaaaaatgtgaacaatctacacagggctctgaaggcacaacttctgccagttttgatgtagacatcgaaaattttgtaagaaagcaagagaaggaagggaaacctttcttttgtgaagatccagaaactgataatttaatggtaaaagcaatccaggttttgcgcattcatcttcttgagctggaaaaggttaacgaactctgcaaagatttctgcagtcgatacattgcttgtctgaaaacaaaaatgaacagtgaaactctgttgagtggagagcctggaagcccgtactcaccagtgcagtcccagcagattcaaagtgccatcacaggcaccatcagccctcagggaattgtggtgccggcgtccgcgctgcagcagggaaacgtagccatggcgacggtggcaggtggcacagtgtatcagcctgtcacggtcgtcactccccaaggccaagtggtcacacagacattgtcgcctgggacaattaggatccagaactcccagcttcagttacagttaaaccaagatctcagcatcttgcatcaagatgatggttcatctaagaacaagaggggcgtcctgccaaagcatgccacgaacgtgatgcggtcctggctcttccagcacatcgggcatccctacccaacagaggatgagaaaaaacagattgctgctcagacaaatttgacactactccaagtcaacaactggttcatcaatgccagaagacgaattcttcagccaatgttggattcaagttgttcagagacccccaaaacaaagaaaaaaactgctcagaaccggccagttcagaggttttggcctgattctattgcatcaggagtcgcacagccaccgccgagcgagctcaccatgtcggaaggagctgttgtcaccatcaccacgcccgtgaacatgaacgtggacagccttcagtctctgtcctcggacggggccaccctggcggtgcagcaggtcatgatggcagggcagagcgaggacgagtctgtggacagcacagaggaggatgcgggtgccctggcccctgcccacatcagcgggctggtcttggagaacagtgactccctgcagtaggggcaggagcagacgcacctgactttttggagtttgcacagcaaacattttacacagttttatttctaatatgttttatatgtagatatagaagagtgcacttttgtatttcatagtaagcttaaagcgcgtctttgccggtgcagcgacttctttcaagtgtgtgtgtgtgtgtgtgtgtgtgtgtgtgtgcgtgtgtgcgtgtgtgtggatttttaaagaaattctttaaaggtttaacgctagattgtgaggaatgacacaccactccctccccaccttgaatccctaattagattaaggaatagcgctgccattttctaaaccgtgatgcggttgtcacttagttctgtggttccagcagatctcagtgggctggttgatttgtgtggcccatggatttgaaagaagctgctgcacccgaaactgccagtgtgcggtgacaacggcacacgcctagactgagtgtggtttcgtcgtgagtggatggacggcaagcttagcaagcctaagtcccctcatgttcagtgagcctgtttcatttgctatatagaaaaagaaactcctatttttaccttgctggaattattggataaaaaagctatttttataaattcgttatgaattggatgatgactatattgaggataaaatttctagagaagaaacaatacatgcttgctattaatatttcaatttggaatgttctgaattgaccaaatttaatgaacctgcccaaagttagctaccgttccatggttctttgctctccccgggtagtgatgaacatttactactataaaagaaacagctatttaatgaaattttgatatctgcaaatttttgttgatatgtaatgctcagattgcattttacacttgatctaaacatatatcgaaagatatctgctaaacaggacttcaggtaagtgaggtgaaatggtagccagtgacccgttaggagctctcaccgtacatactccagtctaatttaaatctgaccacagttgcatggtcgctttaccatgttagctgtgtattgttttaaaagttttaacttcaaaatatgttatgcacagaatgtttattataaactaatataaaatgtgctctaccccattggctcagagctagggcaaacagcagatattcagactttattacttaactagcggacatccctggagtcccagcagcgagctggtctggcgagggcacctcggcagcccccacgggttggctcctacgtttgcgtttgtggctggtctcctggtgtcagtgttctcttgtacgttgttgctttcgacttttcagagccctcctgctcacttgaccacgtgagatttggaataactgtaggacttctgtttcctggtaacaagatgaaccgagagagtgggctgggttctgttttctttggttttgatttgttttcattgtttacttaggagtggtgctttttctcagaaaacaggccacggtgtttcatacagaatgtcttcatatcatctgaaatggtatggctgaagttcatttgtttacagggtcgggaatgtcttcagttcttgagagtcaacagtaatgattggttgtaagccaagggacattttaagctagtgaagagttttttctggaattgatttttcccaaaagaatatattaattgaggttaagaagtcagtgggaaacacacagaaatttgttttaaaatctttcaggagctttactgaaagacttggttatcaagtcttttggggagagaatgacattttttttttgagacagagttttgctcttgttgcccaggctggagggcaatggtgcaatctcagctcactgcaacctccacctcttatgttcaagcaattctccttccttagcctcctgagtagctgggattacaggcatgcgccaccacacccggctaattttgtatttttagtagagatgggtttctccatgttggtcgggctggtctcgaactcccgacctcaggtgatctgcctgcctcagcctcccaaagtgctgggattacaggtgtgagccaccgcgcccggccgagaatgacatcttaaagccaccattgcgttcctcatttgtgaactgtcttctcatattttaagtcaagtctataagatcatttttaacctaagttccaactttgttggactccttaaaataagcacccatgaaagccagccagcccttcctccttccctcaccaccctccgtctcttcggctgcttgctctttagtgtagattagtggaagccattcacagaatgtagactcatgtataggtcaccgtttctttcccccactagaaatcacattcactaagcagtggattgaatttaagagtgctgcccctgcccggcgcagtagggcgtgcctctagttccagctactcgggagtctgaggcagaggatggcatgtgccaggagtttgaggctgcagtgcactatgcttgcacctgtgaatagccactgcactccatcttgggcaacacagtgagacccccatctataaaaagagagcactgcctgaacctcggtggcactgggaagctctggcctgagagttaaacacccatgctgaatgatacagtgtgcattctctccagctgcaaactttcttcaactttcctaaattcttactaaattcagaggaataggataaagatcacttagagaaagggtgcttatggacatagcctgagtttcctttaacctctctgcaatgggtgcttttaactagcttctacatggcaagctgtttcagtttgcaaaatcactgcccagcatgtttgaggtcagttggcaccttaaaacacctgttctccagcccttggacagtggagagaatctgtaaaagtgtgaccccctctaagatttcgttttaaatgatcagattcggttccagttttattcttgttgagtttttccctatgaaggctccttttgaatgtgtcttgagacccaaattgagcatgttgctgttattcctgccctgcacctgtggagcaggagtggcagggctggctgtgctgggttccagctcgctcccaccgagggactagcttggcctttgcgctttgattccagatagtaagatgagtggaagtgtttatcgagcatgcaaaagaaaccctcacggctaagggctctgggagttgtgtctgtgtgacctgagagtgatccatctcctgcctgtgtgaggtagcagtgggcacttttcattgagacaaactccagggtgtccagagggggttctgccccttgtgaaggcccattcctggcacttagagacagaaagaactcagcaatctttcgttctagttatattcggtctttgaaactgacaatctttgaaatgtgaatactgtaacaatatgttttcttggattgttgtctttaaaaaggatttttgtgaagcaattgatttatcaaagcaaaaaaattaaaaatagaaacttgctttatggatgttttattttataaagctcatgtcaccaaaagctgcttctccattttatgtaaaacattgagaatgttttcatgttttctggtgacatgtagggtctgtagtcacccctgcatattgagaaactaggaccacactgcatcggactagtcaggtccatttacatgtccaagaatcttttcttaaattccttactttgttcattcattggctgttcaggcagaaaatggaaacaggtagcttttatgttttttattatagttttccacaaatctaattattttgatagttacaagaagataatgattcatcagtaagctaacataatccctttcatagttcatattataaattttcatgacaagaaagttcctgaagatttaaaaggtacattaaaacaatttcagagggtttttaatctttgttgtccagagtgttataactcccaacaactgttcatgcttagaggctaaagtca

SEQ ID NO: 147657 - DNA, 2788 bp, Artificial Sequence
  derived and/or modified sequence
gcgtcgccctcctcccattgagcgaggctgtgtcgcgtggcccagcgtcggcgtgacggttggacgcgggcgcggcactgcgggtcccgattgctgcagccgcttgtcagtgtgatgaagattggcacccagacaccattcgcttttcacccaagatgatttgatgtcttataaaactctgatgaaccatgatggctacacagacattaagtatagacagctatcaagatgggcaacagatgcaagtagtaacagagttaaagacagaacaagatccaaactgctctgaacccgatgcagaaggagtgagccctccccctgtggagtctcagaccccgatggatgtggacaagcaggccatttataggcatccactatttccattattagctttgttgtttgaaaaatgtgaacaatctacacagggctctgaaggcacaacttctgccagttttgatgtagacatcgaaaattttgtaagaaagcaagagaaggaagggaaacctttcttttgtgaagatccagaaactgataatttaatggtaaaagcaatccaggttttgcgcattcatcttcttgagctggaaaaggttaacgaactctgcaaagatttctgcagtcgatacattgcttgtctgaaaacaaaaatgaacagtgaaactctgttgagtggagagcctggaagcccgtactcaccagtgcagtcccagcagattcaaagtgccatcacaggcaccatcagccctcagggaattgtggtgccggcgtccgcgctgcagcagggaaacgtagccatggcgacggtggcaggtggcacagtgtatcagcctgtcacggtcgtcactccccaaggccaagtggtcacacagacattgtcgcctgggacaattaggatccagaactcccagcttcagttacagttaaaccaagatctcagcatcttgcatcaagatgatggttcatctaagaacaagaggggcgtcctgccaaagcatgccacgaacgtgatgcggtcctggctcttccagcacatcgggcatccctacccaacagaggatgagaaaaaacagattgctgctcagacaaatttgacactactccaagtcaacaactggttcatcaatgccagaagacgaattcttcagccaatgttggattcaagttgttcagagacccccaaaacaaagaaaaaaactgctcagaaccggccagttcagaggttttggcctgattctattgcatcaggagtcgcacagccaccgccgagcgagctcaccatgtcggaaggtacaggtggccggccaaggccagacatggtggaccatggggtggggattatgaacaagaggcctggatcaggcctgttagctccaccgcgcccggccgagaatgacatcttaaagccaccattgcgttcctcatttgtgaactgtcttctcatattttaagtcaagtctataagatcatttttaacctaagttccaactttgttggactccttaaaataagcacccatgaaagccagccagcccttcctccttccctcaccaccctccgtctcttcggctgcttgctctttagtgtagattagtggaagccattcacagaatgtagactcatgtataggtcaccgtttctttcccccactagaaatcacattcactaagcagtggattgaatttaagagtgctgcccctgcccggcgcagtagggcgtgcctctagttccagctactcgggagtctgaggcagaggatggcatgtgccaggagtttgaggctgcagtgcactatgcttgcacctgtgaatagccactgcactccatcttgggcaacacagtgagacccccatctataaaaagagagcactgcctgaacctcggtggcactgggaagctctggcctgagagttaaacacccatgctgaatgatacagtgtgcattctctccagctgcaaactttcttcaactttcctaaattcttactaaattcagaggaataggataaagatcacttagagaaagggtgcttatggacatagcctgagtttcctttaacctctctgcaatgggtgcttttaactagcttctacatggcaagctgtttcagtttgcaaaatcactgcccagcatgtttgaggtcagttggcaccttaaaacacctgttctccagcccttggacagtggagagaatctgtaaaagtgtgaccccctctaagatttcgttttaaatgatcagattcggttccagttttattcttgttgagtttttccctatgaaggctccttttgaatgtgtcttgagacccaaattgagcatgttgctgttattcctgccctgcacctgtggagcaggagtggcagggctggctgtgctgggttccagctcgctcccaccgagggactagcttggcctttgcgctttgattccagatagtaagatgagtggaagtgtttatcgagcatgcaaaagaaaccctcacggctaagggctctgggagttgtgtctgtgtgacctgagagtgatccatctcctgcctgtgtgaggtagcagtgggcacttttcattgagacaaactccagggtgtccagagggggttctgccccttgtgaaggcccattcctggcacttagagacagaaagaactcagcaatctttcgttctagttatattcggtctttgaaactgacaatctttgaaatgtgaatactgtaacaatatgttttcttggattgttgtctttaaaaaggatttttgtgaagcaattgatttatcaaagcaaaaaaatt

SEQ ID NO: 147658 - DNA, 1311 bp, Artificial Sequence
  derived and/or modified sequence
atgatggcaacccagaccctcagtatcgacagctaccaagacgggcagcagatgcaggtggtgaccgagctgaaaactgaacaagaccctaattgttctgagccagacgcggagggcgtcagtccgcctcctgtcgaatcacagacccccatggacgtcgataagcaggccatctacaggcaccctttattcccactgttagcccttctttttgagaaatgcgaacagtcaacccagggatccgagggcactaccagtgcatctttcgacgtcgatatcgaaaatttcgtgcgcaaacaggagaaggaaggtaaaccctttttctgtgaagatcccgaaaccgataatctgatggtcaaggcgatacaggtgctcaggatccacttattggaattagagaaggtgaacgagctgtgtaaggatttttgttctcgatatatcgcctgcttgaagactaaaatgaactccgagactctcctctccggtgagcccggatccccctactctcctgttcaatcccaacaaattcagtctgccatcacgggaacaatttcgcctcagggaattgtggttccagcctcggccttacagcagggcaacgtggccatggccaccgtcgctggcggaactgtctatcagcccgtgactgtagtcaccccacagggtcaggtggtgactcaaacactgagtcccggaactattcggattcaaaatagtcaactccagctacaacttaatcaggatctctctattctccaccaagatgacggcagctccaagaataaaagaggcgtgcttcccaagcacgccacaaatgtcatgcggtcctggcttttccagcacattgggcatccttatcctaccgaagatgaaaaaaagcagatagccgcacagaccaacctcacactgctccaggtcaataattggttcatcaatgcccgtcgcagaattctgcagcctatgttagattcttcatgttcagaaacacctaagacaaagaaaaagacagcacagaaccgcccagtccaacgcttctggcctgactcgatagcgtcgggtgtggctcagccacctccatctgagctgactatgagcgaaggcgcagtggtgactataaccactcccgtcaatatgaatgtcgacagcctgcagtccttaagctcagacggggctacgttggccgttcagcaggtgatgatggctggacagtccgaggatgagtccgtcgattcgaccgaggaggacgcaggtgccctagccccagctcacatatccggactcgtgctggagaattcggacagcttgcagtag

SEQ ID NO: 147659 - DNA, 1260 bp, Artificial Sequence
  derived and/or modified sequence
atgatggcaacccagacactgtcgatcgactcatatcaggacggacagcagatgcaggttgtcactgagttgaaaacagaacaggaccccaactgttccgagcccgatgccgaaggcgtgtctccacctcccgtggaaagtcagacaccgatggatgtagacaagcaggctatctaccgccaccctcttttccctcttcttgctctccttttcgagaaatgtgaacagtccacccagggaagcgagggcaccaccagcgcctcctttgacgtggatatagaaaactttgtgcggaagcaagagaaggaaggcaaaccctttttctgtgaagatcctgaaactgacaacttgatggttaaggcaatccaggtactgaggatacatctcctcgagctggaaaaagtcaatgaactgtgtaaggacttctgctctcgctatatcgcctgtcttaagacgaaaatgaactcagagactttgctctcaggagaacctggaagtccctacagccccgtacagagccagcaaattcagtctgctattaccggcactatttctcctcagggaattgttgtcccagcatctgcgctccagcagggcaacgtggccatggccactgtagcgggagggacggtctatcagccagtgactgtggttacaccacaaggacaagtggtgacacagacactgtcaccaggaacaattagaatccagaactcccagctccagctccaattgaaccaggacctgagcatcttgcatcaggatgatgggtcctccaagaataaacgcggagtcctgccaaagcacgctactaacgtgatgcgcagctggcttttccaacacatcggccacccttatccaacagaggatgaaaagaagcagattgcagctcaaacgaatctgacactgctacaggtgaataactggttcatcaacgcccgacgaagaatactgcaacctatgctcgatagttcctgttccgagactcccaagaccaagaaaaaaaccgcacaaaaccgacctgtgcaacgtttttggcccgattccattgcttctggagtcgctcagcctcctccctctgagttgactatgtccgaggggaccggaggacgaccaagacctgacatggtcgatcatggagttggaatcatgaacaaaagacctggatctggcctcctggcacctccgaggccagctgagaacgatatactgaaaccacctctgcggagctcctttgtcaactgtctgctgatcttctag

SEQ ID NO: 147660 - DNA, 1311 bp, Artificial Sequence
  derived and/or modified sequence
atgatggccacccagaccctgagcatcgacagctaccaggacggccagcagatgcaggtggtgaccgagctgaagaccgagcaggaccccaactgcagcgagcccgacgccgagggcgtgagccccccccccgtggagagccagacccccatggacgtggacaagcaggccatctacagacaccccctgttccccctgctggccctgctgttcgagaagtgcgagcagagcacccagggcagcgagggcaccaccagcgccagcttcgacgtggacatcgagaacttcgtgagaaagcaggagaaggagggcaagcccttcttctgcgaggaccccgagaccgacaacctgatggtgaaggccatccaggtgctgagaatccacctgctggagctggagaaggtgaacgagctgtgcaaggacttctgcagcagatacatcgcctgcctgaagaccaagatgaacagcgagaccctgctgagcggcgagcccggcagcccctacagccccgtgcagagccagcagatccagagcgccatcaccggcaccatcagcccccagggcatcgtggtgcccgccagcgccctgcagcagggcaacgtggccatggccaccgtggccggcggcaccgtgtaccagcccgtgaccgtggtgaccccccagggccaggtggtgacccagaccctgagccccggcaccatcagaatccagaacagccagctgcagctgcagctgaaccaggacctgagcatcctgcaccaggacgacggcagcagcaagaacaagagaggcgtgctgcccaagcacgccaccaacgtgatgagaagctggctgttccagcacatcggccacccctaccccaccgaggacgagaagaagcagatcgccgcccagaccaacctgaccctgctgcaggtgaacaactggttcatcaacgccagaagaagaatcctgcagcccatgctggacagcagctgcagcgagacccccaagaccaagaagaagaccgcccagaacagacccgtgcagagattctggcccgacagcatcgccagcggcgtggcccagcccccccccagcgagctgaccatgagcgagggcgccgtggtgaccatcaccacccccgtgaacatgaacgtggacagcctgcagagcctgagcagcgacggcgccaccctggccgtgcagcaggtgatgatggccggccagagcgaggacgagagcgtggacagcaccgaggaggacgccggcgccctggcccccgcccacatcagcggcctggtgctggagaacagcgacagcctgcagtag

SEQ ID NO: 147661 - DNA, 1260 bp, Artificial Sequence
  derived and/or modified sequence
atgatggccacccagaccctgagcatcgacagctaccaggacggccagcagatgcaggtggtgaccgagctgaagaccgagcaggaccccaactgcagcgagcccgacgccgagggcgtgagccccccccccgtggagagccagacccccatggacgtggacaagcaggccatctacagacaccccctgttccccctgctggccctgctgttcgagaagtgcgagcagagcacccagggcagcgagggcaccaccagcgccagcttcgacgtggacatcgagaacttcgtgagaaagcaggagaaggagggcaagcccttcttctgcgaggaccccgagaccgacaacctgatggtgaaggccatccaggtgctgagaatccacctgctggagctggagaaggtgaacgagctgtgcaaggacttctgcagcagatacatcgcctgcctgaagaccaagatgaacagcgagaccctgctgagcggcgagcccggcagcccctacagccccgtgcagagccagcagatccagagcgccatcaccggcaccatcagcccccagggcatcgtggtgcccgccagcgccctgcagcagggcaacgtggccatggccaccgtggccggcggcaccgtgtaccagcccgtgaccgtggtgaccccccagggccaggtggtgacccagaccctgagccccggcaccatcagaatccagaacagccagctgcagctgcagctgaaccaggacctgagcatcctgcaccaggacgacggcagcagcaagaacaagagaggcgtgctgcccaagcacgccaccaacgtgatgagaagctggctgttccagcacatcggccacccctaccccaccgaggacgagaagaagcagatcgccgcccagaccaacctgaccctgctgcaggtgaacaactggttcatcaacgccagaagaagaatcctgcagcccatgctggacagcagctgcagcgagacccccaagaccaagaagaagaccgcccagaacagacccgtgcagagattctggcccgacagcatcgccagcggcgtggcccagcccccccccagcgagctgaccatgagcgagggcaccggcggcagacccagacccgacatggtggaccacggcgtgggcatcatgaacaagagacccggcagcggcctgctggccccccccagacccgccgagaacgacatcctgaagccccccctgagaagcagcttcgtgaactgcctgctgatcttctag

SEQ ID NO: 147662 - protein, 36 aa, Artificial Sequence
  derived and/or modified sequence
MEETESGSGRKERRWLGAVAHVCNPSTLGGQVGRII

SEQ ID NO: 147663 - protein, 131 aa, Artificial Sequence
  derived and/or modified sequence
SACMCVCVCVCMYIYIYIYIFFFFFFFFFLNIFKQAPPRQNQVRRPGAVAHTCNPSTVGGHGGQITRGQEFETSLANMGETPSLLKIQTWPGVVAHACNPSYSGGRLRQENCLNLGGGGCGEIALQPGQQE

SEQ ID NO: 147664 - protein, 131 aa, Artificial Sequence
  derived and/or modified sequence
SACMCVCVCVCIYIYIYIYIFFFFFFEFLTKLIKQLVMIKNQVRRPGAVAHTCNASTVGGHGGQITRGQEFETSLANMGETPSLLKIQTWPGVVAHACNPSYSGGRLRQENCLNLGGGGCGEIALQPGQQE

SEQ ID NO: 147665 - protein, 123 aa, Artificial Sequence
  derived and/or modified sequence
VCVCVCVCVCVCLFIYFSVFWSFLYLFVFLLKIYEKRPCAVAHACNPPGVVAHACNPSTLGGRGGQISWSQEFETSLANMSKTPSRKKRKGWSGVVAHACNHSYSGLRQENCLNPVGGGCVQP

SEQ ID NO: 147666 - protein, 123 aa, Artificial Sequence
  derived and/or modified sequence
CVCVCVCVCVCLFIYFSVFWSFLYLFVFLLKIYEKRPCAVAHACNPPGVVAHACNPSTLGGRGGQISWSQEFETSLANMSKTPSRKKRKGWSGVVAHACNHSYSGLRQENCLNPVGGGCVQPR

SEQ ID NO: 147667 - protein, 46 aa, Artificial Sequence
  derived and/or modified sequence
HSGLQPTGNTFSSSLRNRFGGQAQHACNPSTLGGRGGRIMRIPELK

SEQ ID NO: 147668 - protein, 881 aa, Artificial Sequence
  derived and/or modified sequence
MAAPGAPAEYGYIRTVLGQQILGQLDSSSLALPSEAKLKLAGSSGRGGQTVKSLRIQEQVQQTLARKGRSSVGNGNLHRTSSVPEYVYNLHLVENDFVGGRSPVPKTYDMLKAGTTATYEGRWGRGTAQYSSQKSVEERSLRHPLRRLEISPDSSPERAHYTHSDYQYSQRSQAGHTLHHQESRRAALLVPPRYARSEIVGVSRAGTTSRQRHFDTYHRQYQHGSVSDTVFDSIPANPALLTYPRPGTSRSMGNLLEKENYLTAGLTVGQVRPLVPLQPVTQNRASRSSWHQSSFHSTRTLREAGPSVAVDSSGRRAHLTVGQAAAGGSGNLLTERSTFTDSQLGNADMEMTLERAVSMLEADHMLPSRISAAATFIQHECFQKSEARKRVNQLRGILKLLQLLKVQNEDVQRAVCGALRNLVFEDNDNKLEVAELNGVPRLLQVLKQTRDLETKKQITDHTVNLRSRNGWPGAVAHACNPSTLGGQGGRITRSGVRDQPDQHGLLWNLSSNDKLKNLMITEALLTLTENIIIPFSGWPEGDYPKANGLLDFDIFYNVTGCLRNMSSAGADGRKAMRRCDGLIDSLVHYVRGTIADYQPDDKATENCVCILHNLSYQLEAELPEKYSQNIYIQNRNIQTDNNKSIGCFGSRSRKVKEQYQDVPMPEEKSNPKGVEWLWHSIVIRMYLSLIAKSVRNYTQEASLGALQNLTAGSGPMPTSVAQTVVQKESGLQHTRKMLHVGDPSVKKTAISLLRNLSRNLSLQNEIAKETLPDLVSIIPDTVPSTDLLIETTASACYTLNNIIQNSYQNARDLLNTGGIQKIMAISAGDAYASNKASKAASVLLYSLWAHTELHHAYKKAQFKKTDFVNSRTAKAYHSLKD

SEQ ID NO: 147669 - protein, 824 aa, Artificial Sequence [sequence omitted]

SEQ ID NO: 147670 - DNA, 111 bp, Artificial Sequence
  derived and/or modified sequence
atggaggagaccgagagcggcagcggcagaaaggagagaagatggctgggcgccgtggcccacgtgtgcaaccccagcaccctgggcggccaggtgggcagaatcatctag

SEQ ID NO: 147671 - DNA, 396 bp, Artificial Sequence
  derived and/or modified sequence
agcgcctgcatgtgcgtgtgcgtgtgcgtgtgcatgtacatctacatctacatctacatcttcttcttcttcttcttcttcttcttcctgaacatcttcaagcaggccccccccagacagaaccaggtgagaagacccggcgccgtggcccacacctgcaaccccagcaccgtgggcggccacggcggccagatcaccagaggccaggagttcgagaccagcctggccaacatgggcgagacccccagcctgctgaagatccagacctggcccggcgtggtggcccacgcctgcaaccccagctacagcggcggcagactgagacaggagaactgcctgaacctgggcggcggcggctgcggcgagatcgccctgcagcccggccagcaggagtag

SEQ ID NO: 147672 - DNA, 396 bp, Artificial Sequence
  derived and/or modified sequence
agcgcctgcatgtgcgtgtgcgtgtgcgtgtgcatctacatctacatctacatctacatcttcttcttcttcttcttcgagttcctgaccaagctgatcaagcagctggtgatgatcaagaaccaggtgagaagacccggcgccgtggcccacacctgcaacgccagcaccgtgggcggccacggcggccagatcaccagaggccaggagttcgagaccagcctggccaacatgggcgagacccccagcctgctgaagatccagacctggcccggcgtggtggcccacgcctgcaaccccagctacagcggcggcagactgagacaggagaactgcctgaacctgggcggcggcggctgcggcgagatcgccctgcagcccggccagcaggagtag

SEQ ID NO: 147673 - DNA, 399 bp, Artificial Sequence
  derived and/or modified sequence
tgcatgtgcgtgtgcgtgtgcgtgtgcatctacatctacatctacatctacatcagccagcccatctacatcttcctgctgctgctgctgctgctgttcctgagacagagcctgatgatcaagaaccaggtgagaagacccggcgccgtggcccacacctgcaaccccagcaccgtgggcggccacggcggccagatcaccagaggccaggagttcgagaccagcctggccaacatgggcgagacccccagcctgctgaagatccagacctggcccggcgtggtggcccacgcctgcaaccccagctacagcggcggcagactgagacaggagaactgcctgaacctgggcggcggcggctgcggcgagatcgccctgcagcccggccagcaggagtag

SEQ ID NO: 147674 - DNA, 399 bp, Artificial Sequence
  derived and/or modified sequence
tgcatgtgcgtgtgcgtgtgcgtgtgcatgtacatctacatctacatctacatcagccagcccatctacatcttcctgctgctgctgctgctgctgttcctgagacagagcctgatgatcaagaaccaggtgagaagacccggcgccgtggcccacacctgcaaccccagcaccgtgggcggccacggcggccagatcaccagaggccaggagttcgagaccagcctggccaacatgggcgagacccccagcctgctgaagatccagacctggcccggcgtggtggcccacgcctgcaaccccagctacagcggcggcagactgagacaggagaactgcctgaacctgggcggcggcggctgcggcgagatcgccctgcagcccggccagcaggagtag

SEQ ID NO: 147675 - DNA, 366 bp, Artificial Sequence
  derived and/or modified sequence
tgcgtgtgcgtgtgcgtgtgcgtgtgcgtgtgcgtgttcatctacttcagcgtgttctggagcttcctgtacctgttcgtgttcctgatctgggccaaggagcaggacagcgtgagcaagaagaagaagaagaagcccggcgtggtggcccacgcctgcaaccccagcaccctgggcggcagaggcggccagatcaccaagcaggagttcgagaccagcctgagcaacatggccaagccccccaaggtgctgggcctgcagaactggcccggcatggtggccagcacctgcaaccccagctacggcagactgaagcaggagaaccacctgatcagaggcggcagaggctgcagcgagcccagatag

SEQ ID NO: 147676 - DNA, 111 bp, Artificial Sequence
  derived and/or modified sequence
atggaggagaccgagtcgggctctgggcgcaaggagagaaggtggctgggtgctgtcgcgcacgtgtgcaacccttcaacgctcggaggacaggtgggtagaatcatctag

SEQ ID NO: 147677 - DNA, 111 bp, Artificial Sequence
  derived and/or modified sequence
atggaggagacagagagcggcagcggcaggaaggagcggcgctggctgggcgctgtggcccacgtgtgcaaccccagcaccctgggcggccaggtgggccgcatcatctag

SEQ ID NO: 147678 - DNA, 111 bp, Artificial Sequence
  derived and/or modified sequence
atggaggagaccgagagcggcagcggccggaaggagcggcggtggctcggagcggtggctcatgtgtgcaaccctagtacgttgggcggccaggtgggccggataatttag

SEQ ID NO: 147679 - DNA, 111 bp, Artificial Sequence
  derived and/or modified sequence
atggaagaaactgaatccgggtcagggcgaaaggagcggaggtggctaggggcagtcgcccatgtctgcaaccctagtaccctgggtggtcaggtcgggcgaatcatctag

SEQ ID NO: 147680 - DNA, 141 bp, Artificial Sequence
  derived and/or modified sequence
cactccgggcttcagcctactggcaacacctttagttcaagtttgaggaacaggttcggggggcaggcccagcacgcctgcaatccgtccactctgggagggcgggggggaagaataatgcgaatccctgagctgaagtag

SEQ ID NO: 147681 - DNA, 2646 bp, Artificial Sequence
  derived and/or modified sequence
atggccgctcctggcgcccccgctgagtacgggtacatcaggacagttctgggacagcagattctaggtcaattggatagctcatcactggccctgcctagcgaagcgaaactgaaactcgccggctcatccggcaggggggggcaaacagtgaagtccctgcgcattcaggagcaggttcagcagacactcgcccggaagggaagaagctccgtcggaaatggtaatctgcatcgcacttcaagtgtcccagagtacgtttataatctgcacctggtagaaaacgatttcgtgggggggcggtctccagtcccaaagacctatgatatgctgaaggcagggaccactgccacatatgagggacgttggggcagagggacagcacagtatagcagccaaaagtccgtggaggaaaggtccctgcgtcaccctctgaggcggcttgagatctcccctgattcatcacccgagagagcgcactacacccactcagattatcaatactcacaaagaagccaggccggccacacacttcaccatcaagagtcacgccgggctgcactacttgtcccaccccgatacgcgagatccgaaatcgtcggtgtctctcgcgctggcacaaccagcagacagagacattttgatacttaccaccgtcagtaccaacatggatcggtgtccgatacagttttcgactccatccccgccaatcctgcgctgctaacataccccaggcccggcacatcacgctctatgggtaatctactggagaaagagaactacctgaccgccggactcaccgtgggccaagttcgaccccttgttcctctccagcctgtcactcagaaccgggctagccgttcttcttggcaccagtctagctttcacagcaccaggaccctgcgcgaggcgggcccatccgttgccgtggactcatccggccggcgtgctcacctgaccgtggggcaggctgccgccggaggctcgggaaatctcctgactgagcggtccactttcaccgacagccaattaggcaacgctgacatggagatgaccctggaacgcgcagtgtccatgcttgaagccgaccacatgctcccttcgagaataagcgcagcagcaaccttcatccagcatgagtgcttccaaaagtccgaagcgcgcaagagggtgaatcaactgcgggggatactgaagctcctgcagctcctgaaggtgcaaaatgaggatgtgcagcgggctgtttgcggagcactgcgaaatctcgtgttcgaagacaatgataacaaacttgaagtggctgagctcaacggcgtccccaggctgctgcaggtgcttaaacaaacacgcgatctggaaactaaaaaacaaatcactgaccataccgttaatttacggtctaggaacggctggcccggtgctgttgcacacgcgtgcaacccttcaacccttggaggacagggtggaaggattacccgctctggcgttcgagaccagcctgaccaacacggtctgctctggaatctgtcttctaacgataagctgaagaacctgatgattaccgaagctttgcttactttaaccgaaaatatcattatccccttttctggttggcccgaaggcgattaccctaaggcgaatgggctgctcgatttcgatatattttacaatgtaaccggctgtctgagaaacatgtcttctgcaggggccgatggtaggaaggcaatgagaaggtgtgatgggctgattgattcactggtgcactatgtgcgtgggaccattgccgactaccagcctgacgacaaagctactgagaactgtgtttgtatccttcataatctgtcctaccagttggaggccgaacttcctgaaaaatacagtcagaatatttacattcagaatcgaaacatccagaccgataataacaaaagcattggctgcttcggctcacggagccgtaaggtgaaagagcagtaccaggacgtgccgatgcctgaagagaaatctaacccaaagggagttgagtggctgtggcattcgattgtgatacgaatgtacttgagcctaattgctaagagtgtgcgtaactatacacaggaggccagcctaggcgcattgcaaaacctgaccgccggctctggaccaatgcccacctccgtggcacagaccgtggtgcaaaaggaaagcggactgcagcacacacggaaaatgctgcacgtaggggacccttctgtaaagaagacagctatctcgctactccgcaacctttctcgtaatctgtctctgcagaatgagatcgcaaaagagacacttcccgatctggtgagtattatccccgatactgtcccctcaaccgacttgctgatcgagactacagccagcgcctgctacacccttaacaacataatccagaacagttaccagaacgcacgcgacctgcttaatacaggtggaatccagaagattatggccatctccgccggagacgcatacgcatcaaacaaagcgtcgaaggccgcatcagttctgctgtactcgctctgggctcatacggagctgcaccacgcctacaagaaggcccagttcaagaagactgacttcgtgaatagtcgaacagcaaaggcatatcactctttgaaggattag

SEQ ID NO: 147682 - DNA, 2475 bp, Artificial Sequence
  derived and/or modified sequence
atggccgcgcctggggcacccgcagagtatggctacatacggacagttcttggtcaacagatattggggcagctggattccagctcactggctctgccatctgaggcaaagctgaaacttgctgggtccagtgggaggggaggtcagaccgtgaagagtttaaggatacaagagcaggtgcagcagactctcgccagaaaaggcagatcctccgtgggaaacggtaatttacaccgcactagctccgttccagagtacgtgtacaatctgcacttagtcgagaacgactttgtgggaggcaggtcgccggtgccaaagacctatgacatgctgaaggccggtactacagcgacgtacgaagggcggtggggtcgagggaccgcgcagtattcaagccagaagtccgtcgaagagagatctctgcgccaccctctgaggcgactagagattagtccagacagttctccggagcgggcccattatacgcactctgattaccagtacagtcagcgcagccaagccggtcacacactccaccatcaagaatctcggagagcagcactactggtgcctcccaggtatgctcgcagcgaaattgttggagtaagtcgcgccggtactacctctagacagcgccatttcgacacataccatcgccaataccaacacgggtcagttagcgacaccgtttttgatagcattcctgccaatcccgcgcttttaacttacccgaggcctggcacctccagatctatggggaacctactagagaaagagaactatctcacagcaggactgaccgtgggacaggttcggcccctagtacctctccagcctgtaacacagaatcgcgcatctcgcagttcctggcaccagtcttcatttcactctactagaaccctgcgggaagccggcccaagtgttgctgtagactcttccgggaggagagcccacctgacagtggggcaggcggctgccggaggctctggtaacctgctgactgagagatcgacattcacggactctcagctcgggaatgctgacatggagatgaccctcgagagagcagtgagtatgctcgaagccgatcatatgcttcccagtagaatctctgccgcggccacatttattcagcacgaatgctttcagaagagcgaagccaggaagagggtaaatcagcttcgcggcatcctgaagctgctccagcttctaaaggtgcagaacgaggacgttcagcgcgcagtgtgtggtgccctcagaaatctggtgttcgaggacaacgacaacaagctggaagttgctgaacttaacggggtgccccgcctgctgcaggttctgaagcaaactagggacttggagaccaagaaacagatcaccgaccatactgtgaatctgcgctctcggaacggctggcccggggccgtcgcccacgcttgtaaccctagtaccctggggggccagggtggtaggatcacacgaagtggtgtgagggaccagcctgatcagcacgggctgctttggaacctcagtagtaacgataagctgaagaatctgatgataactgaagctcttctgactttgacagagaacatcatcataccattttctggatggccagaaggcgattacccaaaagcaaatgggctcctagatttcgatatcttctataatgttactggctgtctccgaaacatgtctagcgctggtgcggacggcaggaaagcgatgcgccgttgcgatggcctgatagatagtctggtacactatgtccgggggacaatcgctgactaccagcccgacgacaaggccacggagaactgcgtatgcattctccacaatctgtcctaccagcttgaggcagagctgccggaaaagtattcgcagaatatctatatccagaatcggaacatccaaaccgacaacaataagtcaataggatgttttgggagccggagccggaaagtaaaagagcagtatcaagatgtccccatgccggaggagaaatcaaaccccaaaggggtggaatggctgtggcactcaattgtgatccggatgtatctgagcctgatcgccaaaagcgtccgaaactacactcaagaggccagcttgggggcactgcagaacctcactgccgggagtgggcctatgccgacctcagtggcccagaccgtggtgcagaaggagtccggcttgcagcatactcgcaaaatgctccatgtgggtgacccttctgtgaagaaaaccgccatctcactgctgagaaatctgagcagaaacctgtctttgcaaaatgagattgccaaggagacactgcccgacctggtcagtattatacctgatactgtgccgtccacagatctgttgatcgaaactacagctagcgcttgctacaccctgaacaatatcatacagaattcgtatcaaaatgcccgtgaccttctcaatcgtggccaccctgagaactacgggcactag

SEQ ID NO: 147683 - DNA, 141 bp, Artificial Sequence
  derived and/or modified sequence
cacagcggcctgcagcccactggaaacaccttcagcagcagcctgaggaacagatttggaggccaggcccagcacgcctgcaaccccagcaccctgggcggccggggcggccgcatcatgagaattcctgagctgaagtag

SEQ ID NO: 147684 - DNA, 2646 bp, Artificial Sequence
  derived and/or modified sequence
atggccgcccctggggccccagcagaatatggctacatcagaacagtgctgggccagcagatcctgggccagctggacagcagcagcctggccctgcccagcgaggccaagctgaagctggccggcagcagcggccggggcggccagacagtgaagagcctgcgcatccaggagcaggtgcagcagaccctggccaggaagggccgcagctctgtgggcaatggaaacctgcacaggaccagctctgtgcctgaatatgtgtacaacctgcacctggtggagaatgactttgtgggcggccgcagccctgtgcccaagacctatgacatgctgaaggccggcaccacagccacctatgagggccgctggggccggggcacagcccagtacagcagccagaagtctgtggaggagaggagcctgcggcaccccctgcggcggctggagatcagcccagacagcagccctgagcgggcccactacacccacagcgactaccagtacagccagaggagccaggccggccacaccctgcaccaccaggagagccggcgggccgccctgctggtgcccccaagatatgcccggagtgaaattgtgggcgtgtccagagctggcaccaccagccggcagaggcactttgacacctaccaccggcagtaccagcacggctctgtgtctgacacagtgtttgacagcatcccagccaacccagccctgctgacctacccccggcccggcaccagccgctccatgggcaacctgctggagaaggagaactacctgacagctggcctgactgtgggccaggtgcggcccctggtgcccctgcagcctgtgacccagaacagagccagccgcagctcctggcaccagagcagcttccacagcaccaggaccctgcgggaggccggccccagcgtggccgtggacagcagtggaagaagagcccacctgactgtgggccaggccgccgccggcggcagcggcaacctgctgacagagaggagcaccttcacagacagccagctgggcaatgctgacatggagatgaccctggagagagctgtgtccatgctggaggccgaccacatgctgcccagccgcatctctgctgctgccaccttcatccagcacgagtgcttccagaagtctgaggccaggaagagggtgaaccagctgcggggcatcctgaagctgctgcagctgctgaaggtgcagaatgaagatgtgcagagagctgtgtgtggggccctgaggaacctggtgtttgaagataatgacaacaagctggaggtggccgagctgaatggagtgccccggctgctgcaggtgctgaagcagacccgggacctggagaccaagaagcagatcacagaccacacagtgaacctgcggagcagaaatggctggccaggagctgtggcccacgcctgcaaccccagcaccctgggcggccagggcggccgcatcaccaggtctggagtgcgggaccagcctgaccagcacggcctgctgtggaacctgagcagcaatgacaagctgaagaacctgatgatcacagaggccctgctgaccctgacagagaacatcatcatccccttcagcggctggccagagggggactaccccaaggccaacggcctgctggactttgacatcttctacaacgtgacaggctgcctgaggaacatgagcagcgctggagcagatggcaggaaggccatgagaagatgtgatggcctgattgacagcctggtgcactacgtgcggggcaccatcgctgactaccagccagatgacaaggccacagagaactgtgtgtgcatcctgcacaacctgagctaccagctggaggccgagctgcctgagaagtacagccagaacatctacatccagaacagaaacatccagacagacaacaacaagagcatcggctgcttcggcagccgcagcaggaaggtgaaggagcagtaccaggatgtgcccatgcctgaggagaagagcaaccccaagggcgtggagtggctgtggcacagcatcgtcatccgcatgtacctgagcctcatcgccaagtctgtgaggaactacacccaggaggccagcctgggcgccctgcagaacctgacagctggcagcggccccatgcccacctctgtggcccagacagtggtgcagaaggagagcggcctgcagcacaccaggaagatgctgcacgtgggggaccccagcgtgaagaagacagccatcagcctgctgaggaacctgagcaggaacctgagcctgcagaatgagatcgccaaggagaccctgcctgacctggtgtccatcatcccagacacagtgcccagcacagacctgctgattgagaccacagccagcgcctgctacaccctgaacaacatcatccagaacagctaccagaatgcccgggacctgctgaacacaggaggcatccagaagatcatggccatctctgctggagatgcctatgccagcaacaaggccagcaaggccgcctctgtgctgctgtacagcctgtgggcccacacagagctgcaccacgcctacaagaaggcccagttcaagaagacagactttgtgaacagcaggacagccaaggcctaccacagcctgaaggactag

SEQ ID NO: 147685 - DNA, 2475 bp, Artificial Sequence
  derived and/or modified sequence
atggccgcccctggggccccagcagaatatggctacatcagaacagtgctgggccagcagatcctgggccagctggacagcagcagcctggccctgcccagcgaggccaagctgaagctggccggcagcagcggccggggcggccagacagtgaagagcctgcgcatccaggagcaggtgcagcagaccctggccaggaagggccgcagctctgtgggcaatggaaacctgcacaggaccagctctgtgcctgaatatgtgtacaacctgcacctggtggagaatgactttgtgggcggccgcagccctgtgcccaagacctatgacatgctgaaggccggcaccacagccacctatgagggccgctggggccggggcacagcccagtacagcagccagaagtctgtggaggagaggagcctgcggcaccccctgcggcggctggagatcagcccagacagcagccctgagcgggcccactacacccacagcgactaccagtacagccagaggagccaggccggccacaccctgcaccaccaggagagccggcgggccgccctgctggtgcccccaagatatgcccggagtgaaattgtgggcgtgtccagagctggcaccaccagccggcagaggcactttgacacctaccaccggcagtaccagcacggctctgtgtctgacacagtgtttgacagcatcccagccaacccagccctgctgacctacccccggcccggcaccagccgctccatgggcaacctgctggagaaggagaactacctgacagctggcctgactgtgggccaggtgcggcccctggtgcccctgcagcctgtgacccagaacagagccagccgcagctcctggcaccagagcagcttccacagcaccaggaccctgcgggaggccggccccagcgtggccgtggacagcagtggaagaagagcccacctgactgtgggccaggccgccgccggcggcagcggcaacctgctgacagagaggagcaccttcacagacagccagctgggcaatgctgacatggagatgaccctggagagagctgtgtccatgctggaggccgaccacatgctgcccagccgcatctctgctgctgccaccttcatccagcacgagtgcttccagaagtctgaggccaggaagagggtgaaccagctgcggggcatcctgaagctgctgcagctgctgaaggtgcagaatgaagatgtgcagagagctgtgtgtggggccctgaggaacctggtgtttgaagataatgacaacaagctggaggtggccgagctgaatggagtgccccggctgctgcaggtgctgaagcagacccgggacctggagaccaagaagcagatcacagaccacacagtgaacctgcggagcagaaatggctggccaggagctgtggcccacgcctgcaaccccagcaccctgggcggccagggcggccgcatcaccaggtctggagtgcgggaccagcctgaccagcacggcctgctgtggaacctgagcagcaatgacaagctgaagaacctgatgatcacagaggccctgctgaccctgacagagaacatcatcatccccttcagcggctggccagagggggactaccccaaggccaacggcctgctggactttgacatcttctacaacgtgacaggctgcctgaggaacatgagcagcgctggagcagatggcaggaaggccatgagaagatgtgatggcctgattgacagcctggtgcactacgtgcggggcaccatcgctgactaccagccagatgacaaggccacagagaactgtgtgtgcatcctgcacaacctgagctaccagctggaggccgagctgcctgagaagtacagccagaacatctacatccagaacagaaacatccagacagacaacaacaagagcatcggctgcttcggcagccgcagcaggaaggtgaaggagcagtaccaggatgtgcccatgcctgaggagaagagcaaccccaagggcgtggagtggctgtggcacagcatcgtcatccgcatgtacctgagcctcatcgccaagtctgtgaggaactacacccaggaggccagcctgggcgccctgcagaacctgacagctggcagcggccccatgcccacctctgtggcccagacagtggtgcagaaggagagcggcctgcagcacaccaggaagatgctgcacgtgggggaccccagcgtgaagaagacagccatcagcctgctgaggaacctgagcaggaacctgagcctgcagaatgagatcgccaaggagaccctgcctgacctggtgtccatcatcccagacacagtgcccagcacagacctgctgattgagaccacagccagcgcctgctacaccctgaacaacatcatccagaacagctaccagaatgcccgggacctgctgaacagaggccaccctgagaactacggccactag

SEQ ID NO: 147686 - DNA, 446 bp, Artificial Sequence
  derived and/or modified sequence
cactctggacttcagccaacaggtaataccttttcatcctctttaagaaacagatttggaggccaggcgcagcacgcctgtaatcccagcactttgggaggccgaggcgggcgaatcatgaggattcctgagctgaagtgaagatgaccacattcaaggaagaaccttctgccccagctttgcaggatgaaacacttccccgcttggctctcattcttccacaagagagacctttctccggacctggttgctactggttcagcagctctgcagaaaatgtcctcccttgtggctgcctcagctcgtacctttggcctgaagtcccagcattaatggcagcccctcatcttccaagttttgtgctcccctttacctaatgcttcctgcctcccatgcatctgtactcctgctgtgccacaaacacattacattattaaatgtttctc

SEQ ID NO: 147687 - DNA, 141 bp, Artificial Sequence
  derived and/or modified sequence
cacagcggcctgcagcccaccggcaacaccttcagcagcagcctgcgcaacaggtttgggggccaggcacagcatgcttgtaacccttccacgctgggtggtcggggagggcggatcatgcggattccagaacttaaatag

SEQ ID NO: 147688 - DNA, 2646 bp, Artificial Sequence
  derived and/or modified sequence
atggccgcccccggcgcccccgccgagtacggctacatccggaccgtgcttggacagcagatcctgggccagttggattccagctccctggcactgccgtccgaggccaagctaaaacttgcgggctcttctggcagggggggccagaccgtcaagtcattgcggattcaagagcaggtgcagcaaacactggcacgcaagggaaggtcctccgtaggaaatgggaatctccacagaacatctagtgtgcctgaatacgtgtacaatctgcatctagtcgagaatgacttcgttggtggcaggagcccagttccgaagacatacgacatgctcaaggctggcaccaccgccacctacgaagggcgttgggggagaggcacagcccagtattcctcacagaagtccgtggaggaaagaagtctgaggcatccacttcggaggctggaaatctcccctgactcctcaccagaaagggcacactatacccactccgattatcagtattcgcagaggagccaggccggacataccctgcatcatcaggaatcgagaagagccgcccttttggttcccccaagatatgctcgcagcgagatagtcggcgtgagtagagccggaacgaccagcaggcaacgacatttcgacacctatcaccgtcagtaccagcacggttcagtcagcgacacagtgtttgacagcataccagcaaaccccgcactgctcacgtaccccaggccaggcaccagtagatccatgggcaaccttctagagaaagaaaattatctcacagcaggcctgactgtgggccaggtgcggccattggtcccactgcagcccgtcacccagaacagggcctctcgctctagttggcaccagagctccttccactctactcggacactgcgagaggctgggccttcagtggctgtggatagctccggtaggcgcgcccacctaacagtggggcaggctgccgcgggcggatccggcaacttactgaccgaacgctccacatttaccgatagccagctgggcaacgccgatatggagatgaccctagaaagggccgtgtccatgctggaagccgatcatatgctgccatcccgcatttcggcggctgccacatttattcaacacgagtgcttccagaagagcgaagctcgcaaacgggtaaaccagttaagaggaattttgaagcttctgcaattgttgaaagtgcagaacgaagatgtgcaacgggccgtgtgcggagcccttcgaaaccttgtattcgaggacaacgataacaaactggaggtagctgagctcaacggcgtccctagacttctgcaggttctgaagcaaacgagggacttagaaactaagaagcagatcactgatcatactgtgaatctgaggtctcgcaatggctggcctggagccgtcgcacatgcctgtaacccctccaccctggggggccagggtggcagaatcactcggtccggggttagggaccagccggaccagcatggcctgctgtggaatctgagttctaacgataagctgaaaaacctgatgatcactgaggcactgctgactctgacagaaaacattatcatccccttttcaggatggcctgagggagactaccctaaggccaacggactcctcgactttgacatcttctataacgtaactgggtgcttaaggaacatgagtagtgcaggcgctgacggacgcaaagctatgcggagatgtgatggattgattgacagtcttgtccactatgtgagggggaccatagccgattaccaaccagacgacaaggctaccgagaattgcgtgtgcattctccacaacctctcttatcagctggaagccgaactgcccgagaagtattcccagaacatatatattcagaatcgtaacatacagaccgataacaacaagtccattgggtgtttcggcagccggagcagaaaggtaaaagagcaatatcaggacgtcccgatgccagaagagaaatccaaccccaaaggggtcgaatggctctggcactccatcgtcatcagaatgtatctgagtctcattgccaaatctgttcgtaattatactcaggaggcttcattaggcgctctccagaacctgacggccggcagtggcccaatgcctacctccgtcgcccagaccgtggtccagaaagagtctgggctccagcacactagaaaaatgctccatgtgggagatcctagtgtgaaaaagacggcgattagcttgctgagaaatttgagtcggaatctgtctctccaaaatgagatagctaaggagaccttgcccgaccttgtgagcattatccccgacaccgtgccttccactgatctgctgattgaaacgactgccagcgcctgctacaccctcaataacataatccagaacagctatcaaaatgctagggacctgctgaataccggtggaatccaaaaaattatggcgatcagtgccggcgacgcatatgcatctaacaaggcttctaaagccgcatccgttctgctttactccttgtgggcccacactgagctccaccacgcctacaagaaggcccaatttaaaaagactgatttcgtcaattccagaacagcgaaagcataccacagtctcaaggattag

SEQ ID NO: 147689 - DNA, 2475 bp, Artificial Sequence
  derived and/or modified sequence
atggccgcccccggcgcccccgccgagtacggctacatccggaccgtgctgggccagcaaattttgggtcagctcgactcatcctctctggccctgccaagcgaggccaaattgaagttggctgggagcagcgggcgcggcggacaaacagtgaagtcacttcggattcaagagcaggtgcagcagaccctggcccggaaaggacggtcatccgttggcaacggcaatctgcaccggacttcctccgtaccagaatatgtgtacaatcttcatctggtggagaacgattttgtgggggggagatctccagtcccaaagacgtacgacatgcttaaggctgggaccactgccacctacgaggggcgttgggggcgcggcaccgcccagtattcgtctcagaaaagcgtggaggagcgctctcttcgccaccctctccggaggctcgaaatcagccctgattcctcccccgaacgtgcccattacactcacagtgactatcagtattcacagaggtctcaggccgggcatacattgcatcaccaggagagcaggagggcagccctgctggtgccgccacgttatgcaaggtcagagatcgttggcgttagcagggctggaaccacatcgcggcagcgccattttgatacataccatcgccagtaccaacacggaagcgtaagcgacacagtgtttgatagcattccagctaacccagcactcttaacctatccacgcccaggcactagcagatcgatggggaatctgctcgagaaggagaattacctgaccgctggcttgacagtgggccaggttcggcccttagttccgcttcagcctgtaactcagaaccgcgcttcacgctccagctggcaccagtcttcatttcattctaccaggactctgcgggaagctgggccatctgtggccgtcgatagcagtgggcggagagcacacctgactgtgggacaagcagccgcgggtggatcaggaaacctcttaacagaaagatctacattcaccgattcccagctcggaaatgcggacatggagatgaccctagagcgagccgtcagcatgctcgaagcggatcacatgctgcctagcagaattagcgctgctgctacctttatccagcacgaatgctttcagaagtccgaggcacgaaaacgcgtgaatcagcttaggggcatattgaagctcctgcagctcctgaaagtccagaatgaggatgtacagcgggctgtttgcggagccctaaggaacctcgtgtttgaggacaacgacaataagttggaagtcgccgaacttaatggcgtacccagactcttgcaggtgctcaaacagacccgggacctggagaccaagaaacagattaccgatcataccgtcaacctaaggtccagaaatggatggccaggtgccgtcgcccacgcttgtaatcccagtaccctaggaggccaggggggtaggattactcgcagcggagtgcgggatcagcccgaccagcacgggttactctggaacctatccagtaatgataagctgaagaacctgatgatcacagaagcactgctcacgctaaccgagaacataatcatcccattcagtggatggccagagggagactacccaaaagcgaacggcctcctggacttcgatatcttttataacgttactggatgtcttaggaatatgtcctctgcgggagccgatggccggaaggccatgagaagatgtgacgggttgattgacagcctggtgcattatgtaaggggaaccatcgccgattatcagccggacgataaagccacagagaattgtgtttgcatactgcataatctcagttaccagctggaggccgaactgcctgagaagtattcccagaatatctacatccagaataggaacatccagactgataataataaatcaatcggctgttttggttcaagatccaggaaagtcaaggaacaataccaggatgtccccatgcctgaggaaaaaagcaaccccaaaggagttgagtggctgtggcacagtattgttattcgcatgtacctctcgttaattgccaagtccgtgagaaattacacacaggaagcatcactcggcgcgttgcagaacctgaccgctgggtccggccccatgcccacctccgtggcacagaccgtggttcaaaaagaatctggactgcaacatacacgcaagatgctgcacgtgggcgatccctcagtcaagaagacggccatttcactgcttaggaacctgtcacggaatctcagcttacaaaatgagatcgcgaaggagactctgccggacctggttagcattattcccgataccgtgcccagcacagacttactcattgaaactacagctagcgcatgttacacactgaataatatcatacagaatagctaccagaatgccagagacctgctgaacaggggacatcctgaaaactacggccattag

SEQ ID NO: 147690 - DNA, 4241 bp, Artificial Sequence
  derived and/or modified sequence
cagctcggtcgcccccaccggccccatggcagcccccggcgccccagctgagtacggctacatccggaccgtcctgggccagcagatcctgggacaactggacagctccagcctggcgctgccctccgaggccaagctgaagctggcggggagcagcggccgcggcggccagacagtcaagagcctgcggatccaggagcaggtgcagcagaccctcgcccggaagggccgcagctccgtgggcaacggaaatcttcaccgaaccagcagtgttcctgagtatgtctacaacctacacttggttgaaaatgattttgttggaggccgttcccctgttcctaaaacctatgacatgctaaaggctggcacaactgccacttatgaaggtcgctggggaagaggaacagcacagtacagctcccagaagtccgtggaagaaaggtccttgaggcatcctctgaggagactggagatttctcctgacagcagcccggagagggctcactacacgcacagcgattaccagtacagccagagaagccaggctgggcacaccctgcaccaccaagaaagcaggcgggccgccctcctagtgccaccgagatatgctcgttccgagatcgtgggggtcagccgtgctggcaccacaagcaggcagcgccactttgacacataccacagacagtaccagcatggctctgttagcgacaccgtttttgacagcatccctgccaacccggccctgctcacgtaccccaggccagggaccagccgcagcatgggcaacctcttggagaaggagaactacctgacggcagggctcactgtcgggcaggtcaggccgctggtgcccctgcagcccgtcactcagaacagggcttccaggtcctcctggcatcagagctccttccacagcacccgcacgctgagggaagctgggcccagtgtcgccgtggattccagcgggaggagagcgcacttgactgtcggccaggcggccgcagggggaagtgggaatctgctcactgagagaagcactttcactgactcccagctggggaatgcagacatggagatgactctggagcgagcagtgagtatgctcgaggcagaccacatgctgccatccaggatttctgctgcagctactttcatacagcacgagtgcttccagaaatctgaagctcggaagagggttaaccagcttcgtggcatcctcaagcttctgcagctcctaaaagttcagaatgaagacgttcagcgagctgtgtgtggggccttgagaaacttagtatttgaagacaatgacaacaaattggaggtggctgaactaaatggggtacctcggctgctccaggtgctgaagcaaaccagagacttggagactaaaaaacaaataacagaccatacagtcaatttaagaagtaggaatggctggccgggcgcggtggctcacgcctgtaatcccagcactttgggaggccaaggcgggcggatcacgaggtcaggagttcgagaccagcctgaccaacatggtttgctgtggaatttgtcatctaatgacaaactcaagaatctcatgataacagaagcattgcttacgctgacggagaatatcatcatccccttttctgggtggcctgaaggagactacccaaaagcaaatggtttgctcgattttgacatattctacaacgtcactggatgcctaagaaacatgagttctgctggcgctgatgggagaaaagcgatgagaagatgtgacggactcattgactcactggtccattatgtcagaggaaccattgcagattaccagccagatgacaaggccacggagaattgtgtgtgcattcttcataacctctcctaccagctggaggcagagctcccagagaaatattcccagaatatctatattcaaaaccggaatatccagactgacaacaacaaaagtattggatgttttggcagtcgaagcaggaaagtaaaagagcaataccaggacgtgccgatgccggaggaaaagagcaaccccaagggcgtggagtggctgtggcattccattgttataaggatgtatctgtccttgatcgccaaaagtgtccgcaactacacacaagaagcatccttaggagctctgcagaacctcacggccggaagtggaccaatgccgacatcagtggctcagacagttgtccagaaggaaagtggcctgcagcacacccgaaagatgctgcatgttggtgacccaagtgtgaaaaagacagccatctcgctgctgaggaatctgtcccggaatctttctctgcagaatgaaattgccaaagaaactctccctgatttggtttccatcattcctgacacagtcccgagtactgaccttctcattgaaactacagcctctgcctgttacacattgaacaacataatccaaaacagttaccagaatgcacgcgaccttctaaacaccgggggcatccagaaaattatggccattagtgcaggcgatgcctatgcctccaacaaagcaagtaaagctgcttccgtccttctgtattctctgtgggcacacacggaactgcatcatgcctacaagaaggctcagtttaagaagacagattttgtcaacagccggactgccaaagcctaccactcccttaaagactgaggaaaatgacaaagtattctcggctgcaaaaatccccaaaggaaaacacctatttttctactacccagcccaagaaacctcaaaagcatgccttgtttctatccttctctatttccgtggtcccctgaatccagaaaacaaatagaacataattttatgagtcttccagaagacctttgcaagtttgccaccagtagataccggccacaggctcgacaaatagtggtctttgttattagggcttatggtacatggcttcctggaatcaaaatgtgaattcatgtggaagggacattaatccaataaataaggaaagaagctgttgcattactgggattttaaaagtttgatttacatttatattccttttctggttcccatgttttgtcactcatgtgcacattgcttcgccattgggcctccagtgtattgttctgcagtgttgaaacagaatggaaatgacaagaaatatctgcagttatccaggagaaagtataatggcaaaattattggtttctttctttactttgtgcttgtttttatccccttgggttgtttttctctgatttttaaataaacttaagaaatttagattacagagtatgcatgactgtaagaaaaagaaattgagaggaagtgatcatagcaaattaaagaagtcttttcctcccagaacttaaagtaaaataaaaaataaataaataaataaaatcttttccacagagaaaggcaactgtgatgataaaatttaacgttcccccaaacactgagtcaatgagatttttctcaggagatactttacctataacaacgccgttaaatccaaatctcttctaaacgatggcattctatgtaatgcctttcctggacttttttggccactgccctggactagtgaaagaatggactctatctttatctgcaagaggaactaaggccttctctcagactgcctggccagcctggggcactgaaaatacggctcatgttaatgagttacattatcagccagcccagccttgcccaccatttaagaaatatcacagagccactagatctcatatgatcttcttcaagccattattttaactcaagaaaactctagagaagaaaagtgaagaagtcatgttgaagaagatgtaagaatgtgtcaagaccatccagaaatgatatgagaaatactgatattttaaatggttgacatcatccagcgaaatgaatctacattaaatgttgttttaactgcgctatgattaaaaccattcatatagagttagtctttacaactactattctgttatttttttttttaatctgacaacatttgtcctaagtaagataagcaaaaaaattcttcaactccttttggcaagaaaactgtaacagaaaataaattttgaatgtgtacttaagtctttattatatttgaagcaattttttttcaattttaaaagctgaatgaagacaacttaggttgctaacctagttcaaaatgaaattatttagataccaatttttaaaatactggagagaatttatatgtctttttccagagttctgatgataagca

SEQ ID NO: 147691 - DNA, 2644 bp, Artificial Sequence
  derived and/or modified sequence
atggcagcccccggcgccccagctgagtacggctacatccggaccgtcctgggccagcagatcctgggacaactggacagctccagcctggcgctgccctccgaggccaagctgaagctggcggggagcagcggccgcggcggccagacagtcaagagcctgcggatccaggagcaggtgcagcagaccctcgcccggaagggccgcagctccgtgggcaacggaaatcttcaccgaaccagcagtgttcctgagtatgtctacaacctacacttggttgaaaatgattttgttggaggccgttcccctgttcctaaaacctatgacatgctaaaggctggcacaactgccacttatgaaggtcgctggggaagaggaacagcacagtacagctcccagaagtccgtggaagaaaggtccttgaggcatcctctgaggagactggagatttctcctgacagcagcccggagagggctcactacacgcacagcgattaccagtacagccagagaagccaggctgggcacaccctgcaccaccaagaaagcaggcgggccgccctcctagtgccaccgagatatgctcgttccgagatcgtgggggtcagccgtgctggcaccacaagcaggcagcgccactttgacacataccacagacagtaccagcatggctctgttagcgacaccgtttttgacagcatccctgccaacccggccctgctcacgtaccccaggccagggaccagccgcagcatgggcaacctcttggagaaggagaactacctgacggcagggctcactgtcgggcaggtcaggccgctggtgcccctgcagcccgtcactcagaacagggcttccaggtcctcctggcatcagagctccttccacagcacccgcacgctgagggaagctgggcccagtgtcgccgtggattccagcgggaggagagcgcacttgactgtcggccaggcggccgcagggggaagtgggaatctgctcactgagagaagcactttcactgactcccagctggggaatgcagacatggagatgactctggagcgagcagtgagtatgctcgaggcagaccacatgctgccatccaggatttctgctgcagctactttcatacagcacgagtgcttccagaaatctgaagctcggaagagggttaaccagcttcgtggcatcctcaagcttctgcagctcctaaaagttcagaatgaagacgttcagcgagctgtgtgtggggccttgagaaacttagtatttgaagacaatgacaacaaattggaggtggctgaactaaatggggtacctcggctgctccaggtgctgaagcaaaccagagacttggagactaaaaaacaaataacagaccatacagtcaatttaagaagtaggaatggctggccgggcgcggtggctcacgcctgtaatcccagcactttgggaggccaaggcgggcggatcacgaggtcaggagttcgagaccagcctgaccaacatggtttgctgtggaatttgtcatctaatgacaaactcaagaatctcatgataacagaagcattgcttacgctgacggagaatatcatcatccccttttctgggtggcctgaaggagactacccaaaagcaaatggtttgctcgattttgacatattctacaacgtcactggatgcctaagaaacatgagttctgctggcgctgatgggagaaaagcgatgagaagatgtgacggactcattgactcactggtccattatgtcagaggaaccattgcagattaccagccagatgacaaggccacggagaattgtgtgtgcattcttcataacctctcctaccagctggaggcagagctcccagagaaatattcccagaatatctatattcaaaaccggaatatccagactgacaacaacaaaagtattggatgttttggcagtcgaagcaggaaagtaaaagagcaataccaggacgtgccgatgccggaggaaaagagcaaccccaagggcgtggagtggctgtggcattccattgttataaggatgtatctgtccttgatcgccaaaagtgtccgcaactacacacaagaagcatccttaggagctctgcagaacctcacggccggaagtggaccaatgccgacatcagtggctcagacagttgtccagaaggaaagtggcctgcagcacacccgaaagatgctgcatgttggtgacccaagtgtgaaaaagacagccatctcgctgctgaggaatctgtcccggaatctttctctgcagaatgaaattgccaaagaaactctccctgatttggtttccatcattcctgacacagtcccgagtactgaccttctcattgaaactacagcctctgcctgttacacattgaacaacataatccaaaacagttaccagaatgcacgcgaccttctaaaccgggggcatccagaaaattatggccattagtgcaggcgatgcctatgcctccaacaaagcaagtaaagctgcttccgtccttctgtattctctgtgggcacacacggaactgcatcatgcctacaagaaggctcagtttaagaagacagattttgtcaacagccggactgccaaagcctaccactcccttaaagactga

SEQ ID NO: 147692 - DNA, 141 bp, Artificial Sequence
  derived and/or modified sequence
cactcgggccttcagcctaccgggaatacattctcatcctccctgcgaaatcggttcgggggacaggcccagcacgcctgtaacccatccactctggggggaagaggcggaagaatcatgagaatacctgagctcaagtag

SEQ ID NO: 147693 - DNA, 2646 bp, Artificial Sequence
  derived and/or modified sequence
atggcagcccctggcgctcctgctgagtacggttatatcagaaccgtcctgggccagcagattcttggccagctggattcctccagcctcgcactgccgtccgaggctaagctcaagctggcaggatcctctgggcgtgggggacagactgtgaagtctcttaggattcaggagcaggtccaacagaccctggctcgcaaggggaggagtagcgtcggaaacggcaatctgcatcggacatcttcagtgcccgaatatgtgtacaacctccaccttgtggaaaacgactttgtggggggacgcagtccagtgccaaaaacatatgacatgctcaaggccggaacaacggctacttacgagggcagatgggggaggggcacagctcaatattcttctcagaaaagtgtcgaggagagaagtttacgccatcctttgcgccgacttgaaatatcacctgatagctccccagaacgtgcccactacacgcacagcgattatcaatactcccagcgaagtcaggctggccatacattacaccaccaggagtctagacgcgcagctttgcttgtgcccccaagatatgctagatccgaaatagttggcgtttctagagctggcacaaccagtcgccagcgccattttgatacataccaccggcagtaccaacacggatctgtatcggacaccgtttttgacagcatcccagccaacccggctctgttgacttacccgaggcccggaacctccaggtctatgggtaacctgctggaaaaggaaaactacctgaccgcaggccttactgtaggccaggtgagacccctagtgccgcttcagcctgtgacccaaaatcgggcttcccggtcatcctggcatcaaagcagctttcattccacccgaacactgcgcgaggcaggcccatccgtcgcagtcgattcgtcaggcagacgagcgcacttaacagtgggacaggccgctgctgggggaagcgggaacttactgactgaacgcagcacctttacagactcccagctcggaaatgccgacatggagatgaccctcgaaagagctgtgagcatgctcgaggccgatcacatgcttcccagccgcatatccgctgctgcaacattcatacaacacgaatgcttccagaaatccgaggctcggaagagggtcaaccaactgaggggcatcctgaaactcctgcaactcctgaaggtccagaatgaagatgtacagcgagccgtgtgcggcgctcttagaaatttagtgttcgaggataacgataacaagttagaagtcgccgagctgaacggcgtgcccagactgttgcaggttctcaaacagactagggacctcgagaccaagaaacagatcactgaccatacagttaacttaaggtcgcggaatggctggcctggcgcagtggcacacgcgtgcaacccctcgactttaggcggacagggaggacgcataacacgaagcggagtcagagaccagcccgaccagcatggtctgctctggaacttgagtagcaacgataaattgaaaaatctgatgatcacagaggccttgctgaccctgaccgagaacatcattatccccttttccggatggcccgagggcgactatcccaaggccaatgggctgttggactttgatattttttataatgtgaccggctgcctgcgtaatatgtcctcagccggagccgatggaagaaaggctatgcgaaggtgcgacgggctgatcgactccctcgtccattatgttcggggaactatcgcagattaccagcccgacgacaaggccacagaaaactgcgtatgcatcctgcataatctcagttaccagctcgaggctgaactgcctgaaaagtactcccaaaatatttacatccagaacagaaatatccaaacggataacaacaaaagtattgggtgtttcggttcccgtagcaggaaggtgaaggagcagtatcaagatgtcccaatgcccgaggagaagtccaatcccaagggcgtggaatggctgtggcattctatcgtgattcgcatgtacctgtctctgatcgccaaaagcgtgcgtaactatacgcaggaagcgtcattgggagctctccagaatctcacggcaggttccggtcccatgcctacttcagtggcacaaaccgttgtccagaaagaatccggtttgcaacacacccgcaaaatgctacacgttggcgacccatccgttaaaaaaacagctatttctcttttacgaaaccttagtcgcaatctttctttgcaaaatgaaattgccaaagagacactgcctgacctcgtctcaattattcccgacacagtaccatccactgatctactgattgagacgaccgcatctgcttgctacaccttgaataacattatacagaactcgtatcagaacgctagagatcttctcaacaccggtggcatacaaaagatcatggccataagcgcaggagacgcctacgcaagcaataaggcctccaaagctgcgtcagtgctattgtacagtctttgggcccataccgagcttcaccatgcttataagaaggctcagtttaagaagacagactttgttaattctagaaccgctaaagcatatcatagtctcaaggattag

SEQ ID NO: 147694 - DNA, 2475 bp, Artificial Sequence
  derived and/or modified sequence
atggctgcgccaggcgctccggcagaatacggttacatcaggactgtcttaggacagcagattctagggcagttggactcctcctcgctggccctgccatccgaagcaaagctgaagttggccggtagctctggcagagggggacaaaccgtgaagtctcttcggatccaagagcaggtgcagcagacacttgctcggaaaggacggtctagcgttggcaatgggaacctgcatagaaccagttcagtccctgaatacgtttacaatctgcatttggtagagaacgattttgttggaggcagatcccctgtgcccaagacatacgatatgctgaaagctggcaccacagccacatatgaggggaggtgggggaggggtacggctcagtatagctcacagaaatccgtcgaggaacgcagtctccgccatccccttcgaaggcttgagattagcccagattcaagccctgaaagagcccattacacccactccgattaccagtatagccagcgcagtcaggccggacacacccttcaccaccaggaatcccggagggccgcactgctcgtgcccccaaggtacgccagatcagagatcgtcggagtaagtagggctggcaccactagcaggcagcgccacttcgatacctatcataggcagtatcaacacggctctgtcagtgacaccgtgttcgacagtattcccgctaatcccgcactgttgacatatcccagacctgggacgtcccgttccatgggaaacctgttagaaaaggaaaactacctgacagccggactgactgtgggccaggtccgtcccctggtgcctctgcagcccgtcacccaaaatcgggcttcaaggagctcatggcaccagtcttcctttcactctacgcgtaccctacgcgaagccggtccaagcgtggctgtggactcctccgggaggcgtgcccacttaactgtgggccaggccgctgcagggggtagtggcaaccttctcactgaacgttcaaccttcacggattctcaactgggcaatgcggacatggagatgacgctcgagcgcgctgtcagcatgctggaggccgaccatatgctgcctagtcggatctcggctgctgctacattcattcagcacgagtgtttccaaaaaagtgaagctaggaaacgtgtgaatcagctgagaggcattctgaagctactccagttgttaaaagtgcagaacgaggacgtccagcgcgcagtctgcggcgcattacgcaacctagtgttcgaggacaacgataacaaactggaagtagctgaactcaacggagtccccagactactgcaggtactgaagcagacacgcgatctggagactaagaagcagatcacggatcacaccgtgaacctgaggtctcgtaatggctggccgggagcggtagcacacgcatgtaatccctccacgctggggggtcaaggcggaaggatcactaggtctggcgtccgagatcagccagatcagcacggcctgctgtggaacctcagttccaacgacaaactgaagaatctcatgattactgaggcactactgacccttacggaaaacataataatccccttcagcgggtggcccgagggagactatcccaaagccaatggactgctggattttgatatcttttataacgtaaccggttgcctgcggaatatgagttctgcgggtgctgatggcaggaaggcgatgaggaggtgtgatggtcttatcgacagtttggtccattatgtacggggtacgatcgctgactatcagcctgatgataaagccactgaaaattgcgtctgtatcttgcacaacctgtcctatcagttagaggcagagttaccggaaaagtactcacaaaatatctacatacagaacaggaacattcagactgacaataataagtctattggatgcttcgggtcgcgcagcagaaaagtcaaagagcagtaccaggacgtcccaatgcccgaggagaaaagtaatcccaagggtgtggagtggctgtggcactcaatcgtgattcgcatgtatttgagccttatcgcgaagtccgttaggaactacacccaggaggcttcgctaggcgctctccagaatctgactgctggaagtggacctatgccgacaagtgtcgctcaaaccgtagtgcagaaagaaagcggcctgcagcatactaggaagatgctgcatgtgggcgatcccagtgtcaagaagactgctatttctctgttacgaaatttaagcaggaatcttagcctgcagaatgaaatcgctaaggaaaccctccccgatcttgtgagcattatccccgacactgtcccttcaacagacttactcatagagaccacggcgtccgcctgctatactctcaacaacataatacaaaattcctaccagaatgccagagatctgctgaacagggggcaccctgaaaattatggtcactag

SEQ ID NO: 147695 - DNA, 2646 bp, Artificial Sequence
  derived and/or modified sequence
atggctgcgccaggcgccccggctgaatacggatacatcagaaccgtgttaggccagcagatcctaggtcagcttgattcctcctcgctcgctctccctagcgaggctaaactgaagctcgcaggcagcagtggtagaggtggccagacagtaaagagtctgcgcatccaggagcaggttcagcagacactcgcccgaaagggcaggagttccgtgggaaacggcaacctgcataggacgtcctctgtgccggaatatgtctataatctgcacctcgtagaaaacgatttcgtgggtggaaggtccccggtccctaagacctacgacatgttgaaagccggcaccacagccacatacgaaggaaggtggggaagggggactgcccagtatagttcccagaaaagcgtggaggagaggtctcttcgccaccccctacgccggcttgagataagtccagattccagtccggagagagcccactatacgcatagcgattatcaatacagccagagatcacaggccggacacacattgcaccaccaggagtctagacgggccgcgttgctcgtgcctccaagatatgccaggtcagaaatcgtaggagtctcgagggccggcaccacatcaaggcagcgccatttcgacacctatcatcgccaatatcagcacggtagcgtatctgacactgtgtttgacagtattcccgcaaatccggccctgctgacatatcctcgccccggcacgagtagaagtatggggaatctgcttgaaaaggaaaactacctgacggccggactcacagtgggacaggtgagacccctggttcctttgcagccagtaactcaaaatcgagcctcacgtagttcatggcatcagtcatcatttcactctacccgtacactgagagaagccgggccctcggttgctgttgacagtagcggacgaagagcccatttgactgttgggcaggctgcggctgggggctccggcaatctcctcacagaaaggtcaacctttaccgacagtcagctggggaacgcggacatggagatgacactggagcgggctgtaagtatgttagaggcagaccatatgctgccaagccgcatctctgccgccgccacgtttatccaacacgaatgctttcagaagtcggaagctagaaagagagtcaaccaactgagggggatcttgaaactcttgcaactgcttaaggtacagaatgaggatgtgcagcgcgccgtttgcggcgccctcaggaatttagtatttgaggacaacgacaacaagttagaggtggccgagttgaatggagtgcctagattactacaggttctgaagcagacccgcgacttagagacaaaaaagcagatcactgaccataccgtaaacctgaggtcccgtaatggctggcccggtgcagtggctcatgcgtgtaacccttccacactggggggacagggtggcagaataacccgatctggagtacgcgaccagcctgaccagcacggtctgttgtggaacctcagttctaatgataaactgaagaatctcatgatcaccgaggctctgctgacactcaccgaaaatattattattccctttagcggatggcccgaaggggattaccccaaggcgaatggactgttagattttgatattttttacaacgtcaccggctgccttcgaaacatgtcgtcagcaggcgcagatggtcggaaggccatgcgcagatgcgacggcctgattgactccttggtacactatgtccgtggcaccattgctgattaccaacccgacgacaaagccacagaaaactgcgtgtgtatcctacacaatctgtcctaccaactggaggctgaactgcccgaaaagtattcccaaaatatttatatccagaaccgcaacatccagacagacaataacaaatccataggctgttttggttctaggagccgcaaagtcaaagagcaataccaggatgtgcccatgcccgaagagaagagcaaccccaaaggggttgagtggctgtggcactctatcgtaatccggatgtacttatctctgattgcaaaatccgtgcgtaactacacccaggaagcctcacttggagctctccaaaatttaacagctggtagcgggccgatgcctacaagcgtggcacagacagtcgtgcagaaagagtccggcctccagcacactagaaaaatgttacatgtcggcgatccatcggtcaagaaaaccgctatctctctacttaggaacttatcccggaatctcagtctgcagaacgaaatagcaaaagagacactgccagacctcgtaagcattatcccagatactgtgccttctactgacctcctcattgagaccaccgcctctgcttgctacacgctgaacaacatcatccagaacagctatcagaacgccagggacttattgaacactggcggtattcagaagatcatggccatttccgctggggacgcctacgcctcaaacaaggcaagcaaggccgccagcgtgctgctttattctctgtgggctcatacagagctgcaccatgcctataagaaggcccagttcaaaaaaacggactttgtaaactctagaacagccaaggcctaccactccctgaaagattag

SEQ ID NO: 147696 - DNA, 2646 bp, Artificial Sequence
  derived and/or modified sequence
atggcagcgcccggagccccagcagaatatggatacataagaaccgtcctgggacagcagattttgggccagctcgattccagctctctcgcactgcctagtgaggccaagctgaagttagcgggtagctcaggccgcggaggccaaaccgtgaagagcttgagaattcaagaacaggtgcagcaaacattggccagaaagggaagatcatccgtcggaaatgggaatctccatcgaactagctctgtgcctgaatacgtgtacaacctgcatctggtggaaaatgattttgtgggaggtcgcagccctgtccccaagacttacgacatgcttaaagccggcactactgcaacatacgaaggaagatggggccgaggaactgcccaatatagttcccagaaatccgtagaggagcgctccctccgccacccccttagacgactcgagatatcgcccgactccagtccagagagggctcactacacccacagtgactaccagtactcccagcgcagtcaggcaggacacacactccatcatcaggaatcacgcagggccgcattgttagtacctcctagatatgccagatccgagattgtgggtgtctcacgggccggcacaacaagtcgccagcgtcactttgatacctaccacaggcagtaccaacatggctccgtgtccgatacggtcttcgattccatccccgccaacccagctctactcacttacccaagaccaggcacctccagatccatgggcaacttacttgaaaaagaaaactacctaactgccggactgactgttgggcaggtccggccgctcgttcctctgcagccagtgacacagaatcgagcatctcgctcatcatggcatcagtcctctttccatagcacacgcaccttgcgcgaagccggtcctagtgtcgctgtggattcctcgggaaggagggcccatcttaccgtcgggcaggcagcagccggtggctccggtaacctactgactgaacgctcaaccttcactgactcgcagctcgggaacgcagatatggagatgacactggaaagagccgtcagcatgctggaagcagaccacatgctgcccagccggatttctgctgctgccacttttatacaacatgaatgctttcagaaatcagaggctcgtaagagagtaaaccaacttaggggcatattaaagttattgcaactgcttaaggtacagaatgaggatgtgcagcgcgccgtttgcggcgccctcaggaatttagtatttgaggacaacgacaacaagttagaggtggccgagttgaatggagtgcctagattactacaggttctgaagcagacccgcgacttagagacaaaaaagcagatcactgaccataccgtaaacctgaggtcccgtaatggctggcccggtgcagtggctcatgcgtgtaacccttccacactggggggacagggtggcagaataacccgatctggagtacgcgaccagcctgatcagcatggtctgctgtggaacctgtctagtaacgataaactgaagaaccttatgataaccgaggctttactgactctcaccgagaacataattatccctttctctggatggccagagggcgactacccaaaggccaacggactgctggattttgatattttttacaacgtgaccggatgtctacgaaacatgagtagcgcaggcgccgacggacgcaaagccatgagaagatgcgacggcctaattgactctctcgtacattatgtccgcggcacgatcgccgattaccagcctgacgacaaggctaccgaaaattgcgtctgtatcttacataacctgagctatcaactagaggccgaactccctgaaaaatattcccagaacatctatatccaaaatcgcaatatacaaaccgacaacaacaagtctatcggctgcttcggctctagatctagaaaggtgaaggaacagtaccaggacgtacctatgcccgaggagaagagcaatccaaagggggtcgaatggctctggcacagcatcgtaatccgcatgtatctgagtctgattgccaagagtgttagaaactacacccaggaggcttcactgggagccctgcaaaacctgacagccggttctggaccaatgcccacttcagtcgcgcaaaccgtcgtgcagaaggaatctggtttacagcacactcggaagatgctacatgtgggtgaccctagtgttaaaaaaaccgccatcagcctattacgcaatcttagcagaaatctgtcccttcagaatgagatcgcaaaagaaacactgccagatttagtgagcatcataccagacaccgtcccaagcactgatttactgattgaaactaccgcatccgcctgctacactctaaacaatatcatccagaactcctaccaaaatgcacgcgatctactgaacaccggggggatacaaaaaattatggccataagtgcaggagatgcatacgcctccaataaggcctccaaggccgccagcgtcctactctacagtttgtgggctcatacagaacttcaccatgcttacaaaaaagcacagttcaagaagacagactttgttaatagccggaccgctaaagcctaccatagccttaaagactag

SEQ ID NO: 147697 - DNA, 141 bp, Artificial Sequence
  derived and/or modified sequence
cacagcggcctgcagcccaccggcaacaccttcagcagcagcctgagaaacagattcggcggccaggcccagcacgcctgcaaccccagcaccctgggcggcagaggcggcagaatcatgagaatccccgagctgaagtag

SEQ ID NO: 147698 - DNA, 2646 bp, Artificial Sequence
  derived and/or modified sequence
atggccgcccccggcgcccccgccgagtacggctacatcagaaccgtgctgggccagcagatcctgggccagctggacagcagcagcctggccctgcccagcgaggccaagctgaagctggccggcagcagcggcagaggcggccagaccgtgaagagcctgagaatccaggagcaggtgcagcagaccctggccagaaagggcagaagcagcgtgggcaacggcaacctgcacagaaccagcagcgtgcccgagtacgtgtacaacctgcacctggtggagaacgacttcgtgggcggcagaagccccgtgcccaagacctacgacatgctgaaggccggcaccaccgccacctacgagggcagatggggcagaggcaccgcccagtacagcagccagaagagcgtggaggagagaagcctgagacaccccctgagaagactggagatcagccccgacagcagccccgagagagcccactacacccacagcgactaccagtacagccagagaagccaggccggccacaccctgcaccaccaggagagcagaagagccgccctgctggtgccccccagatacgccagaagcgagatcgtgggcgtgagcagagccggcaccaccagcagacagagacacttcgacacctaccacagacagtaccagcacggcagcgtgagcgacaccgtgttcgacagcatccccgccaaccccgccctgctgacctaccccagacccggcaccagcagaagcatgggcaacctgctggagaaggagaactacctgaccgccggcctgaccgtgggccaggtgagacccctggtgcccctgcagcccgtgacccagaacagagccagcagaagcagctggcaccagagcagcttccacagcaccagaaccctgagagaggccggccccagcgtggccgtggacagcagcggcagaagagcccacctgaccgtgggccaggccgccgccggcggcagcggcaacctgctgaccgagagaagcaccttcaccgacagccagctgggcaacgccgacatggagatgaccctggagagagccgtgagcatgctggaggccgaccacatgctgcccagcagaatcagcgccgccgccaccttcatccagcacgagtgcttccagaagagcgaggccagaaagagagtgaaccagctgagaggcatcctgaagctgctgcagctgctgaaggtgcagaacgaggacgtgcagagagccgtgtgcggcgccctgagaaacctggtgttcgaggacaacgacaacaagctggaggtggccgagctgaacggcgtgcccagactgctgcaggtgctgaagcagaccagagacctggagaccaagaagcagatcaccgaccacaccgtgaacctgagaagcagaaacggctggcccggcgccgtggcccacgcctgcaaccccagcaccctgggcggccagggcggcagaatcaccagaagcggcgtgagagaccagcccgaccagcacggcctgctgtggaacctgagcagcaacgacaagctgaagaacctgatgatcaccgaggccctgctgaccctgaccgagaacatcatcatccccttcagcggctggcccgagggcgactaccccaaggccaacggcctgctggacttcgacatcttctacaacgtgaccggctgcctgagaaacatgagcagcgccggcgccgacggcagaaaggccatgagaagatgcgacggcctgatcgacagcctggtgcactacgtgagaggcaccatcgccgactaccagcccgacgacaaggccaccgagaactgcgtgtgcatcctgcacaacctgagctaccagctggaggccgagctgcccgagaagtacagccagaacatctacatccagaacagaaacatccagaccgacaacaacaagagcatcggctgcttcggcagcagaagcagaaaggtgaaggagcagtaccaggacgtgcccatgcccgaggagaagagcaaccccaagggcgtggagtggctgtggcacagcatcgtgatcagaatgtacctgagcctgatcgccaagagcgtgagaaactacacccaggaggccagcctgggcgccctgcagaacctgaccgccggcagcggccccatgcccaccagcgtggcccagaccgtggtgcagaaggagagcggcctgcagcacaccagaaagatgctgcacgtgggcgaccccagcgtgaagaagaccgccatcagcctgctgagaaacctgagcagaaacctgagcctgcagaacgagatcgccaaggagaccctgcccgacctggtgagcatcatccccgacaccgtgcccagcaccgacctgctgatcgagaccaccgccagcgcctgctacaccctgaacaacatcatccagaacagctaccagaacgccagagacctgctgaacaccggcggcatccagaagatcatggccatcagcgccggcgacgcctacgccagcaacaaggccagcaaggccgccagcgtgctgctgtacagcctgtgggcccacaccgagctgcaccacgcctacaagaaggcccagttcaagaagaccgacttcgtgaacagcagaaccgccaaggcctaccacagcctgaaggactag

SEQ ID NO: 147699 - DNA, 2475 bp, Artificial Sequence
  derived and/or modified sequence
atggccgcccccggcgcccccgccgagtacggctacatcagaaccgtgctgggccagcagatcctgggccagctggacagcagcagcctggccctgcccagcgaggccaagctgaagctggccggcagcagcggcagaggcggccagaccgtgaagagcctgagaatccaggagcaggtgcagcagaccctggccagaaagggcagaagcagcgtgggcaacggcaacctgcacagaaccagcagcgtgcccgagtacgtgtacaacctgcacctggtggagaacgacttcgtgggcggcagaagccccgtgcccaagacctacgacatgctgaaggccggcaccaccgccacctacgagggcagatggggcagaggcaccgcccagtacagcagccagaagagcgtggaggagagaagcctgagacaccccctgagaagactggagatcagccccgacagcagccccgagagagcccactacacccacagcgactaccagtacagccagagaagccaggccggccacaccctgcaccaccaggagagcagaagagccgccctgctggtgccccccagatacgccagaagcgagatcgtgggcgtgagcagagccggcaccaccagcagacagagacacttcgacacctaccacagacagtaccagcacggcagcgtgagcgacaccgtgttcgacagcatccccgccaaccccgccctgctgacctaccccagacccggcaccagcagaagcatgggcaacctgctggagaaggagaactacctgaccgccggcctgaccgtgggccaggtgagacccctggtgcccctgcagcccgtgacccagaacagagccagcagaagcagctggcaccagagcagcttccacagcaccagaaccctgagagaggccggccccagcgtggccgtggacagcagcggcagaagagcccacctgaccgtgggccaggccgccgccggcggcagcggcaacctgctgaccgagagaagcaccttcaccgacagccagctgggcaacgccgacatggagatgaccctggagagagccgtgagcatgctggaggccgaccacatgctgcccagcagaatcagcgccgccgccaccttcatccagcacgagtgcttccagaagagcgaggccagaaagagagtgaaccagctgagaggcatcctgaagctgctgcagctgctgaaggtgcagaacgaggacgtgcagagagccgtgtgcggcgccctgagaaacctggtgttcgaggacaacgacaacaagctggaggtggccgagctgaacggcgtgcccagactgctgcaggtgctgaagcagaccagagacctggagaccaagaagcagatcaccgaccacaccgtgaacctgagaagcagaaacggctggcccggcgccgtggcccacgcctgcaaccccagcaccctgggcggccagggcggcagaatcaccagaagcggcgtgagagaccagcccgaccagcacggcctgctgtggaacctgagcagcaacgacaagctgaagaacctgatgatcaccgaggccctgctgaccctgaccgagaacatcatcatccccttcagcggctggcccgagggcgactaccccaaggccaacggcctgctggacttcgacatcttctacaacgtgaccggctgcctgagaaacatgagcagcgccggcgccgacggcagaaaggccatgagaagatgcgacggcctgatcgacagcctggtgcactacgtgagaggcaccatcgccgactaccagcccgacgacaaggccaccgagaactgcgtgtgcatcctgcacaacctgagctaccagctggaggccgagctgcccgagaagtacagccagaacatctacatccagaacagaaacatccagaccgacaacaacaagagcatcggctgcttcggcagcagaagcagaaaggtgaaggagcagtaccaggacgtgcccatgcccgaggagaagagcaaccccaagggcgtggagtggctgtggcacagcatcgtgatcagaatgtacctgagcctgatcgccaagagcgtgagaaactacacccaggaggccagcctgggcgccctgcagaacctgaccgccggcagcggccccatgcccaccagcgtggcccagaccgtggtgcagaaggagagcggcctgcagcacaccagaaagatgctgcacgtgggcgaccccagcgtgaagaagaccgccatcagcctgctgagaaacctgagcagaaacctgagcctgcagaacgagatcgccaaggagaccctgcccgacctggtgagcatcatccccgacaccgtgcccagcaccgacctgctgatcgagaccaccgccagcgcctgctacaccctgaacaacatcatccagaacagctaccagaacgccagagacctgctgaacagaggccaccccgagaactacggccactag

SEQ ID NO: 147700 - DNA, 603 bp, Artificial Sequence
  derived and/or modified sequence
aactttcctcggagtgctgcctggcgctggctaggaggcaaacgcacgcgggaagagctgctacccattccagggaccctgccgctgcccctctgaggggtctgcacctcctgggagcaggtgggtctctgggacgagggtccatggtggatggctctggagacgctcccgaggctgtgccgtcccgctgctgcacaggtcggagggtcaccgcagaggctactcgggctggggctggggccgagggagcccgcactggagggtctcgctctgttgcccagtggcctgaccatggctcactgcagcctccaactactggcctcaagtgatcctcttgccttggcctcctgaagtcctggaattacaggcgtgagccactgcaccgggcccatttaatactctgagccccacctttcccatctgtggatggagccccatgtggaacccaaggatgcagctgctctgctaacacggcagcccatccttcaagactgtgacctcgccacagtggccctcagccctccacctccggcgggggcgagggccacccacctccaagtctccagccatgacgacctccgcactccggcgccaggtgaagaa

SEQ ID NO: 147701 - protein, 1185 aa, Artificial Sequence
  derived and/or modified sequence
MSLLNPVLLPPKVKAYLSQGERFIKWDDETTVASPVILRVDPKGYYLYWTYQSKEMEFLDITSIRDTRFGKFAKMPKSQKLRDVFNMDFPDNSFLLKTLTVVSGPDMVDLTFHNFVSYKENVGKAWAEDVLALVKHPLTANASRSTFLDKILVKLKMQLNSEGKIPVKNFFQMFPADRKRVEAALSACHLPKGKNDAINPEDFPEPVYKSFLMSLCPRPEIDEIFTSYHAKAKPYMTKEHLTKFINQKQRDSRLNSLLFPPARPDQVQGLIDKYEPSGINAQRGQLSPEGMVWFLCGPENSVLAQDKLLLHHDMTQPLNHYFINSSHNTYLTAGQFSGLSSAEMYRQVLLSGCRCVELDCWKGKPPDEEPIITHGFTMTTDIFFKEAIEAIAESAFKTSPYPIILSFENHVDSPRQQAKMAEYCRTIFGDMLLTEPLEKFPLKPGVPLPSPEDLRGKILIKNKKNQFSGPTSSSKDTGGEAEGSSPPSAPAGEGTVWAGEEGTELEEEEVEEEEEEESGNLDEEEIKKMQSDEGTAGLEVTAYEEMSSLVNYIQPTKFVSFEFSAQKNRSYVISSFTELKAYDLLSKASVQFVDYNKRQMSRIYPKGTRMDSSNYMPQMFWNAGCQMVALNFQTMDLPMQQNMAVFEFNGQSGYLLKHEFMRRPDKQFNPFSVDRIDVVVATTLSITVISGQFLSERSVRTYVEVELFGLPGDPKRRYRTKLSPSTNSINPVWKEEPFVFEKILMPELASLRVAVMEEGNKFLGHRIIPINALNSGYHHLCLHSESNMPLTMPALFIFLEMKDYIPGAWADLTVALANPIKFFSAHDTKSVKLKEAMGGLPEKPFPLASPVASQVNGALAPTSNGSPAARAGAREEAMKEAAEPRTASLEELRELKGVVKLQRRHEKELRELERRGARRWEELLQRGAAQLAELGPPGVGGVGACKLGPGKGSRKKRSLPREESAGAAPGEGPEGVDGRVRELKDRLELELLRQGEEQYECVLKRKEQHVAEQISKMMELAREKQAAELKALKETSENDTKEMKKKLETKRLERIQGMTKVTTDKMAQERLKREINNSHIQEVVQVIKQMTENLERHQEKLEEKQAACLEQIREMEKQFQKEALAEYEARMKGLEAEVKESVRACLRTCFPSEAKDKPERACECPPELCEQDPLIAKADAQESRL

SEQ ID NO: 147702 - DNA, 3558 bp, Artificial Sequence
  derived and/or modified sequence
atgtctctgctgaaccctgttctactgcctccaaaagttaaggcctacctttcccagggcgagaggtttatcaagtgggacgacgaaacaactgtggctagtccagtcatcctgcgggtcgatcccaaaggctactacctctattggacctaccagagtaaagaaatggaattcttggacattaccagcatccgggacacgcgctttggaaagttcgcgaaaatgccgaagtcccagaagctgagggatgtgtttaacatggactttcccgataactcttttctgttaaaaaccttgactgtggtaagcgggcctgacatggtggacctgaccttccacaacttcgtgtcctataaggagaacgtgggtaaggcctgggccgaagatgtgctggctttagtcaagcaccccttaacagcgaatgcctcacggtcaacatttctggataagatactggtcaaactgaagatgcagctgaacagtgagggaaaaatacctgtcaagaactttttccagatgttccccgccgaccgtaagcgcgtggaggcagcgctttcagcatgtcatcttcccaaaggcaagaatgatgctataaaccccgaggacttccctgagccagtctacaaaagtttccttatgtcactatgccccagacctgaaatcgatgaaatttttacatcttatcatgcaaaagccaaaccttatatgactaaggaacacctgaccaagtttattaaccagaagcagcgggactcaagattgaatagcctgttattcccacccgcacgacccgaccaggtgcaggggctcattgacaagtacgagccatcaggaatcaatgctcagagaggccagctctcgccggagggcatggtgtggttcctgtgcgggccagaaaattcagttctcgctcaggataagttattgctccaccacgacatgacgcagccattgaaccattactttataaattcatcacataatacctatttgacagcgggacagttcagcggactgtcaagcgctgaaatgtaccgccaggtcttgctctctggatgtcgctgtgtggagcttgattgttggaagggaaagccgcctgacgaggaacccataataacacacgggttcacaatgaccacggatatctttttcaaagaggctatcgaggcaatagccgagtctgctttcaagacttctccttatcccatcatcctgtcatttgagaaccatgtggattcgccacggcagcaggccaaaatggctgaatactgtcgaaccatcttcggcgatatgcttttgacagagcctctggagaaatttcctctgaagcctggcgtaccactgccttcacccgaggatctacgaggcaaaatactgattaaaaacaaaaagaaccagttcagcggacctacctcaagctcaaaagatacgggtggcgaggccgagggttccagcccccccagcgcccccgcgggggagggcacagtctgggctggtgaggagggtacggaactcgaagaggaagaagtcgaggaagaagaggaggaagaatcggggaacctggatgaagaagagataaagaagatgcagagtgacgagggcacggccggcctggaagtgacagcctatgaagagatgtccagcctggtcaactacatccagccgaccaaattcgtatcgtttgagtttagcgcccagaagaacaggtcttatgtgatcagctcctttaccgaattgaaggcatacgatctcttatctaaagcatccgtccagtttgtggactacaataaacgtcagatgtctcgaatctacccgaaagggacgagaatggacagcagcaactatatgccacaaatgttctggaatgcgggctgtcaaatggtggctctgaattttcagaccatggacctccccatgcagcagaacatggctgtttttgagttcaacggccagagtgggtatctcctgaagcacgaattcatgcgccggcctgacaagcagttcaatcccttcagtgtggatcgaatcgacgtggtcgtcgccacgaccctcagtatcacagtgatatcaggccagttcctgtcggagagatctgtgagaacctatgtggaggtggagctgttcggcctgcccggtgaccccaagcgccggtatagaaccaaactttcaccctcgacaaattccattaaccctgtatggaaggaagagccattcgtgtttgagaagatcctgatgcccgagctcgcctcactcagggttgccgtgatggaagagggaaacaagtttttagggcaccggataattcccatcaacgccctcaattcaggataccatcacctttgtctgcactcggagtccaacatgcccctcactatgccagcattgtttatattcctggagatgaaggactacatacccggcgcttgggcagaccttacggtggcactggccaaccccatcaagttctttagcgctcacgataccaagtccgtgaagttgaaggaggcgatgggaggtctccccgagaaacctttccctctcgccagccctgttgcaagtcaggttaacggagccctcgcgccaacatccaacgggagtcccgctgctagggcaggggcccgagaggaagcgatgaaagaggcagcagagccccggacagcctctctagaagagcttcgggaactgaaaggagtggttaagcttcagcgaagacacgagaaagagctgcgcgaattggaacggcgaggagcccgaagatgggaagaactgctgcagcgtggcgccgctcaactggccgagctcggccctcctggggtgggcggggtgggagcttgcaagctgggccccggtaaaggaagccgaaagaaacgcagtctgccaagggaagagtctgccggcgcagctccgggagagggccccgagggagttgacgggagagtgcgcgaattgaaggatcgcctggagttagaactccttcgacagggcgaggaacagtatgagtgtgttctcaaaagaaaagaacagcatgtggctgaacagatctctaagatgatggagctggctagagaaaaacaggctgccgagttaaaagcactgaaagagacatcagagaacgataccaaagaaatgaagaagaagctcgaaacaaaacgccttgaacggattcagggaatgaccaaggtcacaacagataagatggcacaagagaggctgaaaagagaaatcaacaattctcatatccaagaagtagtgcaggttataaagcaaatgaccgagaatctagaaagacatcaggagaaactggaagagaaacaggcagcttgcctcgagcaaatccgggaaatggagaaacagtttcagaaagaagctctcgcggagtatgaagccaggatgaagggcttggaagcggaagtgaaggagtctgtgcgggcctgtctgagaacttgcttcccgagcgaagccaaagacaaacctgaaagggcttgtgaatgtccccctgaattatgcgagcaagacccactgatcgcaaaagcagacgcgcaggaatcaagattgtag

SEQ ID NO: 147703 - DNA, 3558 bp, Artificial Sequence
  derived and/or modified sequence
atgagcctgctgaaccctgtgctgctgccccccaaggtgaaggcctacctgagccagggcgagcgcttcatcaagtgggatgatgagaccaccgtggccagccctgtgatcctgcgggtggaccccaagggctactacctgtactggacctaccagagcaaggagatggagttcctggacatcaccagcatccgggacaccaggtttgggaagtttgccaagatgcccaagagccagaagctgagagatgtgttcaacatggacttcccagacaacagcttcctgctgaagaccctgactgtggtgtctggccctgacatggtggacctgaccttccacaactttgtgtcctacaaggaaaatgtgggcaaggcctgggccgaggatgtgctggccctggtgaagcaccccctgacagccaatgccagccgcagcaccttcctggacaagatcctggtgaagctgaagatgcagctgaacagcgagggcaagatccctgtgaagaacttcttccagatgtttcctgctgacaggaagagggtggaggccgccctgagcgcctgccacctgcccaagggcaagaatgatgccatcaaccctgaggacttccctgagcctgtgtacaagagcttcctgatgagcctgtgccccaggcctgagattgatgagatcttcaccagctaccacgccaaggccaagccctacatgaccaaggagcacctgaccaagttcatcaaccagaagcagagggacagccggctgaacagcctgctcttccccccagcccggccagaccaggtgcagggcctgattgacaagtatgagcccagcggcatcaatgcccagaggggccagctgagccctgagggcatggtgtggttcctgtgtggcccagaaaattctgtgctggcccaggacaagctgctgctgcaccacgacatgacccagcccctgaaccactacttcatcaacagcagccacaacacctacctgacagctggccagttcagcggcctgagcagcgctgagatgtaccggcaggtgctgctgagcggctgccgctgtgtggagctggactgctggaagggcaagcccccagatgaggagcccatcatcacccacggcttcaccatgaccacagacatcttcttcaaggaggccatcgaggccatcgccgagagcgccttcaagaccagcccctaccccatcatcctgagctttgagaaccacgtggacagcccccggcagcaggccaagatggccgagtactgcaggaccatctttggagacatgctgctgacagagcccctggagaagttccccctgaagccaggagtgcccctgcccagccctgaggacctgcggggcaagatcctgatcaagaacaagaagaaccagttcagcggccccaccagcagcagcaaggacacaggaggagaggccgagggcagcagcccccccagcgccccagctggggagggcaccgtgtgggccggggaggagggcacagagctggaggaggaggaggtggaggaggaggaggaggaggagagcggcaacctggatgaggaggagatcaagaagatgcagagtgatgagggcacagctggcctggaggtgacagcctatgaggagatgagcagcctggtgaactacatccagcccaccaagtttgtgtcctttgagttcagcgcccagaagaacagaagctatgtgatcagcagcttcacagagctgaaggcctatgacctgctgagcaaggcctctgtgcagtttgtggactacaacaagaggcagatgagccgcatctaccccaagggcaccaggatggacagcagcaactacatgccccagatgttctggaatgccggctgccagatggtggccctgaacttccagaccatggacctgcccatgcagcagaacatggctgtgtttgagttcaacggccagagcggctacctgctgaagcatgagttcatgaggaggccagacaagcagttcaaccccttctctgtggacagaattgatgtggtggtggccaccaccctgagcatcaccgtcatcagcggccagttcctgtctgagaggtctgtgaggacctacgtggaggtggagctgtttggcctgcccggggaccccaagaggcgctaccgcaccaagctgagccccagcaccaacagcatcaaccctgtgtggaaggaggagccctttgtgtttgagaagatcctgatgcctgagctggccagcctgcgggtggccgtgatggaggagggcaacaagttcctgggccaccgcatcatccccatcaatgccctgaacagcggctaccaccacctgtgcctgcacagcgagagcaacatgcccctgaccatgcctgccctcttcatcttcctggagatgaaggactacatccctggggcctgggccgacctgactgtggccctggccaaccccatcaagttcttcagcgcccatgacaccaagtctgtgaagctgaaggaggccatgggcggcctgcctgagaagcccttccccctggccagccctgtggccagccaggtgaatggagccctggcccccaccagcaatggcagccctgctgcccgggccggggcccgggaggaggccatgaaggaggccgctgagcccaggacagccagcctggaggagctgcgggagctgaagggcgtggtgaagctgcagaggagacatgagaaggagctgcgggagctggagcggcggggggcccggcgctgggaggagctgctgcagagaggagctgcccagctggccgagctgggccccccaggagtgggcggcgtgggcgcctgcaagctgggccctgggaagggcagcaggaagaagaggagcctgccccgggaggagagcgctggagctgcccctggagagggccctgagggcgtggatggccgggtgcgggagctgaaggaccggctggagctggagctgctgcggcagggcgaggagcagtatgaatgtgtgctgaagaggaaggagcagcacgtggccgagcagatcagcaagatgatggagctggcccgggagaagcaggccgctgagctgaaggccctgaaggagaccagtgaaaatgacaccaaggagatgaagaagaagctggagaccaagaggctggagcgcatccagggcatgaccaaggtgaccacagacaagatggcccaggagcggctgaagcgggagatcaacaacagccacatccaggaggtggtgcaggtgatcaagcagatgacagagaacctggagcggcaccaggagaagctggaggagaagcaggccgcctgcctggagcagatccgggagatggagaagcagttccagaaggaggccctggccgagtatgaggccaggatgaagggcctggaggccgaggtgaaggagagcgtgcgggcctgcctgcggacctgcttccccagcgaggccaaggacaagccagagcgggcctgtgaatgtcctcctgagctgtgtgagcaggaccccctgattgccaaggcagatgcccaggagagccggctgtag

SEQ ID NO: 147704 - DNA, 3558 bp, Artificial Sequence
  derived and/or modified sequence
atgagcctgctgaaccccgtgctgctgccccccaaggtgaaggcctatctctcgcagggggagagattcattaagtgggacgatgaaactacggtggccagtcccgtcatcctcagagttgacccaaagggttattatctgtactggacgtaccagagtaaagaaatggaatttctcgatattacttcaatccgggatacaagatttggcaagtttgctaagatgccaaaaagccagaagctgagagacgtgttcaacatggatttccccgataactctttcctgcttaagaccctgacggtggttagcggtcccgacatggtggacctgacatttcataattttgtatcttacaaagagaatgtgggcaaggcttgggccgaggatgtgctggcacttgttaaacatcccctcaccgccaacgcctcgaggtccacttttttagacaaaatcttggtaaaactcaagatgcagcttaactctgagggcaagattcccgttaagaacttcttccagatgttccctgccgaccgtaagagagtggaggctgctttatctgcctgccacttaccaaaaggcaaaaacgatgcaatcaaccctgaggatttccccgagcctgtatacaagagtttcctcatgtcactctgccctcgccccgagatcgacgaaatctttactagttaccacgccaaggctaaaccttatatgaccaaggagcatctcactaagttcatcaatcagaagcagcgggatagcagattaaattccctcctgtttcctccagcgcgccccgaccaagtgcagggtctgattgataaatatgagcccagcggaattaacgcccagagggggcagctctcacctgagggcatggtgtggtttttgtgcggtcccgagaattccgttcttgctcaggacaaactcctactccaccacgatatgactcagccccttaaccattattttattaattcgtcacataatacttacttgacagccgggcaatttagtggcctgtcctccgcagaaatgtatagacaagtgttgctgtctgggtgccgttgcgtggaactggattgctggaagggaaaacccccagatgaggagccaattatcactcatggctttactatgaccaccgacatcttttttaaagaggcaatagaagccatcgcggaaagcgcgtttaaaacgagcccatatcccatcattctgagcttcgagaaccacgtggacagcccgcggcaacaggccaaaatggcagaatattgccgcacaattttcggcgacatgctgctgacggagcccctggagaaattccccctgaaacctggcgtgcctctgccgagtccagaagacctccgcggaaaaatacttattaagaacaaaaagaatcaattttctgggcctacatcctcctccaaagacacggggggggaggcggagggctcatcccccccttctgccccggcgggcgagggaaccgtctgggcaggggaggagggcacagagctagaggaagaagaggtggaagaagaggaagaggaagaatctggcaacctcgatgaggaagaaatcaaaaagatgcagtccgatgagggaacagccggtctcgaggtcacagcctacgaagagatgagctccctggtgaactacattcagcctaccaagttcgtgtctttcgagttttccgctcagaaaaatcggagctatgtgatcagcagttttaccgagctgaaagcatatgacttactgagcaaggcctcagtccagtttgtcgattataacaaaaggcagatgtcgaggatctatccaaaaggcacacggatggactcttctaattacatgcctcaaatgttttggaatgcgggatgccagatggtggcgctgaatttccagacaatggatctccccatgcagcaaaatatggccgtatttgagtttaacggacagtccgggtacctgctaaagcatgaatttatgagaagacctgataaacagttcaacccattctccgtggatcggatcgacgtcgtcgttgcaaccactctgagtattaccgtcattagcggccagttcttgagtgagaggtccgtgcgcacatacgtggaggtggagctgtttgggttgcctggtgaccctaagagacggtatagaactaagttgtctccttcgacaaacagtatcaatcctgtatggaaagaggaaccttttgtctttgagaaaatcctgatgcccgagttggcatctctccgggtggccgtgatggaggaggggaacaagtttctgggtcacaggattatccccatcaacgccttaaacagcggctaccatcacctgtgtttgcacagcgaatcaaatatgcctttgacaatgccagcactcttcattttccttgaaatgaaggactacatccctggcgcttgggccgacttaactgtggccctggccaatccaataaagtttttttctgcacatgacacgaaaagtgtgaagctgaaagaggcgatgggggggcttccagaaaaaccttttcccctggctagcccagtcgcctcgcaagtgaatggggctcttgcaccgacttcgaacgggagccctgccgccagagctggcgcccgtgaggaggcgatgaaggaggctgctgagcctcggacggcgtccctggaggaactgcgtgagctcaaaggagtcgtgaagctgcaaaggcgtcatgagaaagaactgagggagctcgaaagaaggggggcccgtaggtgggaggaactcttgcaacggggcgccgcccagcttgccgaactgggccctcccggggtagggggggtaggagcatgtaaattgggtccagggaagggtagcagaaaaaaaaggtccctccccagagaggagtccgccggagccgccccaggggagggccctgaaggagtcgacgggcgggtgagggagcttaaggatcggctggaactggaactgctgcggcagggcgaggagcagtacgagtgcgtcctgaaaaggaaggagcagcacgtggccgagcaaatttccaaaatgatggaactcgcccgggaaaaacaagcggcagaactgaaggctttgaaggaaacctcagagaacgatacaaaagaaatgaagaaaaaattggagaccaagcgccttgagaggatccagggcatgacaaaggttaccactgacaaaatggcgcaggagagacttaagcgggagattaataactcacacatccaagaagtcgttcaagtgataaaacaaatgaccgaaaacctggaaaggcatcaggagaagttggaggaaaagcaggctgcgtgtctagagcagatacgcgagatggagaagcagttccagaaggaggcgctggcggagtacgaggcgagaatgaagggcttggaagctgaggtgaaggaatcagtacgggcatgcctgaggacctgcttcccatcggaagcgaaggataaaccagaaagggcatgtgagtgtccacccgagctttgtgagcaggaccccctgatagctaaggccgatgcccaggagagccgactgtag

SEQ ID NO: 147705 - DNA, 4616 bp, Artificial Sequence
  derived and/or modified sequence
acaggcccccatggcaggcagggcgggtgggaggagggtgatttacaaggcagatgggcctctggctacagctcagtcctgcactcagccagggccaccccaggggctataagagcaactagatttctggagcagctcggggatgggtgccatttgagcccagcttggctccccctcctggctggcctccttcctgcccttctgcctgcctgtgtctgctgagattctgcaaagaggaacgcttggcaccatgtctctgctcaaccctgtcctgctgccccccaaggtgaaggcctatctgagccaaggggagcgcttcatcaaatgggatgatgaaactacagttgcctctccagttatcctccgtgtggatcctaagggctactacttatactggacgtatcaaagtaaggagatggagtttctggatatcaccagcatccgggatactcgctttgggaagtttgccaagatgcccaagagccagaagctccgggacgtcttcaacatggactttcctgataacagtttcctgctgaagacactcacggtggtgtccggcccggacatggtggacctcaccttccacaacttcgtctcctacaaggagaacgtgggcaaggcctgggctgaggacgtactggccctagtcaaacatccgctgacggccaacgcctcccgcagcaccttcctggacaagatccttgtgaagctcaagatgcagctcaactctgaagggaagattccggtgaagaactttttccagatgtttcctgctgaccgcaagcgggtggaagctgctctcagtgcctgccacctccccaaaggcaaaaatgacgccatcaatcctgaggacttcccagaacctgtctacaagagtttcctcatgagcctctgtcctcggccagaaatagatgagatcttcacttcttaccatgctaaggccaaaccctacatgacgaaggagcacctgaccaaattcatcaaccagaaacagcgggactcccggcttaactccctgctgttcccgccagcacggcctgaccaggtgcagggcctcatcgacaagtatgagcccagtggcatcaatgcacagaggggccagctgtcacctgaaggcatggtctggtttctctgtgggccagagaacagcgtgctggcccaggacaagctgctgctccaccacgacatgacgcagccactcaatcattacttcatcaactcgtcccacaacacctacctgacagccggccagttctcaggcctctcctcggctgagatgtaccgccaggtgctgctctctggctgccgttgcgtggagctagactgctggaaggggaaaccccctgacgaggagcccattatcacccatggcttcaccatgaccacagacatcttcttcaaagaagcaattgaggctattgcagaaagcgcctttaagacctccccctatcccatcatcctgtcgtttgagaaccatgtggactcaccccgccagcaggctaagatggctgagtattgccggacgatctttggggatatgctgctcacagagcccctggaaaagttcccactaaaaccaggtgtccccctgcccagccctgaggatctcaggggcaagatcctcatcaagaacaagaagaaccagttttctggccccacctcctccagtaaggatactggtggggaggctgagggcagcagcccacccagtgcccctgcaggtgagggcacagtgtgggctggcgaggaagggactgagctggaggaggaggaggtggaagaggaagaggaggaggagtcaggaaacctggatgaagaagagattaagaagatgcagtcggatgagggcacagcgggcctggaagtgacggcttatgaggagatgtccagcctagtcaattacatccagcccaccaagttcgtctcctttgagttctctgcccaaaagaaccgaagttatgtcatctcgtccttcacagagctcaaggcatatgacctgctctccaaggcctcggtgcagtttgtggactacaacaagcgccagatgagccgcatttaccccaagggaacccgcatggactcctccaactacatgccccagatgttctggaatgctggatgccagatggttgccctcaacttccagacgatggacttgcccatgcagcagaacatggcagtatttgagttcaacgggcagagcggctacctcctcaagcatgagttcatgcgccggccggacaagcagttcaaccccttctcagtggaccgcatcgacgtggtggtggccaccaccctttccattacggtgatctctgggcagttcctgtcagaacgcagcgtgcgcacctatgtagaagtggagctgtttggccttcctggggaccccaagaggcgctatcgaactaagctgtcacccagtactaactccatcaatcctgtctggaaggaggagccctttgtctttgagaagatcttgatgcctgagctggcctccctcagagtggctgtgatggaggaaggcaacaagtttcttggacaccgcatcatccccatcaatgccctaaattctgggtaccaccacctgtgcctgcacagtgagagcaacatgcccctcaccatgcctgcgctcttcatcttcctggagatgaaggactacatacctggtgcttgggcagatctcactgtggccctcgccaaccccattaagttcttcagtgcccatgacacgaagtctgtgaagctcaaggaggccatgggaggtctgcctgagaagcccttcccactggcgagtccagttgccagccaggtcaatggggcgttggccccaacgagcaatgggtcaccagcagccagggccggggccagggaagaggctatgaaagaagctgcggagccgcggaccgccagcctggaggagctccgggagctaaagggcgtggtgaagctgcagcggcggcacgagaaggagctgcgagagttggagcggcgcggagcgcggcgctgggaggagctgctgcagcggggcgcggcgcagctggcggagctcgggccaccgggcgtggggggcgtcggggcctgcaagctcggtcccggcaagggctctcgcaagaagaggagcctgccccgcgaggagagcgccggagccgcgccgggcgagggccctgagggcgtggacgggcgcgtgcgggagctgaaagacaggctggagctggagctgctgcggcagggcgaggagcagtacgagtgcgttctgaagcgcaaggagcagcacgtggccgagcaaatctccaaaatgatggagctggccagagagaaacaggcggcagagctgaaggccctgaaggagacgtcggagaacgacaccaaagagatgaagaaaaagctggagacaaagagactggagcggatccagggcatgaccaaagtcaccacagacaagatggcccaggagaggttgaagagagagattaacaactcccacatccaggaagtagtgcaggtgatcaagcagatgacggagaacttggagaggcaccaggagaagctggaggagaagcaggcggcttgcctggaacagatacgggagatggaaaagcagttccagaaggaggcgctggcagagtacgaggccaggatgaagggtctggaggcagaggtgaaggagtcggtgagggcctgcctcaggacctgctttccctccgaggccaaggacaagcctgagagggcctgcgagtgccccccagagctgtgtgagcaggacccactcatagcaaaggcagatgcccaggagagccgcctctgatgcccccatcccactgggacatttagcaaggaggttcagccccttctctgggatgtggttctattcccccaggaaaaaggagccccagccttctgaggctgtgggaacctgtggctgccttggacgctgcagccccctcctcaacggccaggccagagtctgagacaggacccaggcaccctcacggcagggcctctctggggcctagaagtcttctcaagctgacttcctacctccccctccatctctagataagtgtcatatatttgttgagggcaaaagactatggactggaaggcagaaagtgggatcctggccccactctgcctttcctattgagcaaccagctctgggctcagtttcctcacctggagggttggacccactcacctccactctagccccgaaccctcctgccccaggcttccaggccccatcaggcctgccctgagttggccttgtccactccttgaggcagatcctggcactacctcacagctccctggggacggccactccctggctgagggccctcccctcccctctgcctgtccggaacgggaggctgaaatggaaaagctgccttggccctgcttggctgagtcacaaggggcagtgggctcttgggtgctgttccaccctgaccctggctcacccctcttcctaggcctgggggcaggcagttcctaccatgtacccctctcaggctgcctgcctgacaaggtcagcatcatttgctctcctgaatttatgaggtttatttatttttctctttcctactcctattaaagaacctcgtcccagtgtt

SEQ ID NO: 147706 - DNA, 3558 bp, Artificial Sequence
  derived and/or modified sequence
atgtctctactaaatcctgttctgctgccgccaaaggtgaaagcttacctatctcagggggaacgcttcattaaatgggatgacgagaccacggtcgccagcccggtaatcctgagggtggatcctaagggttactatttgtactggacatatcagagcaaagagatggaatttctggatattacaagtataagagatacccgattcggcaaattcgctaagatgccgaagtcccagaagctacgagacgtctttaacatggacttcccagataatagctttctgttgaagacattgacagtggtgtccggacccgacatggttgacctaacgttccacaactttgtgtcttataaggagaatgtaggcaaagcttgggcagaggatgtgttggcccttgtgaagcaccctctaaccgccaacgctagcaggtccacctttctggacaagattttggtgaagctgaaaatgcagctcaactcggaggggaagatccccgtgaagaatttttttcaaatgttccccgcagacagaaaacgggttgaggcagccctaagtgcgtgtcacctgccaaaaggcaaaaatgacgcgataaacccggaggactttccggagcctgtgtataaaagctttctcatgtctctatgcccaagaccagagatcgacgaaatctttacctcttatcacgctaaggcaaaaccatatatgaccaaggaacatttgacgaaatttattaatcagaagcagagggattccagactgaattcccttctgttcccacccgctagaccagaccaggtccagggcctgattgacaaatacgagccatccggtattaatgcacaacgcggacaactgtcccccgaaggcatggtatggtttctttgcggcccagagaacagcgtgcttgctcaggacaaactcctcctccatcacgacatgacccagcctctaaatcactattttataaattcttcacacaacacatacttgaccgcgggtcagtttagcggactgtcctctgcagagatgtaccgacaagtgctcctttccgggtgcaggtgtgtggagctcgattgctggaaaggcaaacccccagacgaagagccaatcatcactcacggattcaccatgactactgacattttctttaaagaggcaatcgaagcgattgccgagagcgcatttaagacatccccttacccaatcattctcagcttcgaaaaccacgtagactcccccaggcagcaggcgaagatggccgagtactgtcgcacgatcttcggcgacatgctgctgactgagcctctggagaagttccccctcaagccgggtgttccattgcctagtcccgaagaccttagaggcaaaatcctcattaaaaacaagaaaaaccagtttagcggcccaaccagttcttcaaaagacacaggcggagaagcagaaggctctagcccccctagcgccccagcaggagaaggaactgtgtgggcaggagaagaggggaccgagctggaggaggaggaggttgaggaagaggaggaagaggagtcaggcaatctggatgaagaggaaattaagaaaatgcagtccgacgagggcacagcgggactggaggtgaccgcctatgaggagatgtccagccttgtgaattacattcagccgaccaagtttgtgagtttcgaatttagtgcacaaaaaaacagaagctacgtcatttcttcatttactgagttaaaggcctacgatctgcttagcaaagccagcgtgcaattcgtagattacaacaaacggcaaatgagtcggatatatccaaaagggacgaggatggactcgtcaaattacatgccacagatgttctggaacgcaggttgtcagatggtggccctgaacttccaaacaatggatctgcccatgcagcagaacatggcagtattcgagttcaatgggcaatctggctatctcctcaagcacgagttcatgcgcaggcctgacaaacagttcaaccctttctcagtggatagaatcgacgttgtggtggcaacgactctatcaatcaccgtcatctctggccagttcctttctgagaggtccgtgaggacatatgtagaggtggagctgttcggtctcccgggtgacccaaagagacggtataggacaaagctcagccctagcactaattccatcaaccctgtatggaaagaggagccgtttgtcttcgaaaagatcctgatgcctgagttagcgagccttcgcgtcgctgtgatggaggaaggcaacaagtttctggggcaccggatcatacctattaacgccctgaactcagggtatcatcatctgtgtctacactcagagagcaacatgccgctgaccatgcccgcactgtttatttttctggagatgaaagattacatcccgggtgcgtgggccgacctgacagtcgctctggccaatcctataaagtttttctccgcgcacgatacgaagagtgtcaagttaaaggaagcgatggggggtcttcctgaaaagccttttcccctggcatcacctgtggcctcacaagtgaacggcgctttagcccctactagcaacggcagccccgcagctcgcgctggcgctcgggaggaagccatgaaggaggcagcggagccacgaacagcaagcctcgaggaactgagggaactaaagggagtcgtaaaactacagcgtcggcatgaaaaagaattgagggagcttgagcggagaggcgctcggaggtgggaggagctactccagaggggcgctgcacagctggcggagttagggccacctggggtcggcggtgtgggcgcttgtaagttaggtccagggaagggctctagaaagaagagatctctgcctcgggaggaaagcgcaggagcagcgcctggggaggggccagagggcgtcgatgggagggtgcgagaattaaaagacaggcttgaactggagctgctccggcaaggggaggaacaatacgaatgtgtgttgaagagaaaggagcagcacgtcgccgaacagatctccaagatgatggagcttgcaagggaaaaacaggccgcagaactgaaggccctgaaagaaacatcagagaacgatacgaaggaaatgaagaagaagcttgagaccaaacggctcgaacggatacagggtatgacaaaggtaacgacagacaaaatggcccaggaaagactgaaacgcgagataaacaactcccacattcaggaagtcgtacaggttataaagcaaatgaccgagaacctcgaacgacatcaggagaagctggaggagaagcaggcagcctgcctggaacaaataagagagatggagaagcagttccagaaggaggccctcgctgagtatgaggctagaatgaagggactggaagccgaagtgaaagaaagtgtgcgcgcatgtctgcgaacatgtttcccaagcgaagccaaggacaagccagagcgggcttgcgagtgtcctcccgaattatgcgaacaagatccgctgattgcgaaggcagacgcacaggagtccaggctgtag

SEQ ID NO: 147707 - DNA, 3558 bp, Artificial Sequence
  derived and/or modified sequence
atgagcctgctgaaccccgtgctgctgccccccaaggtgaaggcctacctgagccagggcgagagattcatcaagtgggacgacgagaccaccgtggccagccccgtgatcctgagagtggaccccaagggctactacctgtactggacctaccagagcaaggagatggagttcctggacatcaccagcatcagagacaccagattcggcaagttcgccaagatgcccaagagccagaagctgagagacgtgttcaacatggacttccccgacaacagcttcctgctgaagaccctgaccgtggtgagcggccccgacatggtggacctgaccttccacaacttcgtgagctacaaggagaacgtgggcaaggcctgggccgaggacgtgctggccctggtgaagcaccccctgaccgccaacgccagcagaagcaccttcctggacaagatcctggtgaagctgaagatgcagctgaacagcgagggcaagatccccgtgaagaacttcttccagatgttccccgccgacagaaagagagtggaggccgccctgagcgcctgccacctgcccaagggcaagaacgacgccatcaaccccgaggacttccccgagcccgtgtacaagagcttcctgatgagcctgtgccccagacccgagatcgacgagatcttcaccagctaccacgccaaggccaagccctacatgaccaaggagcacctgaccaagttcatcaaccagaagcagagagacagcagactgaacagcctgctgttcccccccgccagacccgaccaggtgcagggcctgatcgacaagtacgagcccagcggcatcaacgcccagagaggccagctgagccccgagggcatggtgtggttcctgtgcggccccgagaacagcgtgctggcccaggacaagctgctgctgcaccacgacatgacccagcccctgaaccactacttcatcaacagcagccacaacacctacctgaccgccggccagttcagcggcctgagcagcgccgagatgtacagacaggtgctgctgagcggctgcagatgcgtggagctggactgctggaagggcaagccccccgacgaggagcccatcatcacccacggcttcaccatgaccaccgacatcttcttcaaggaggccatcgaggccatcgccgagagcgccttcaagaccagcccctaccccatcatcctgagcttcgagaaccacgtggacagccccagacagcaggccaagatggccgagtactgcagaaccatcttcggcgacatgctgctgaccgagcccctggagaagttccccctgaagcccggcgtgcccctgcccagccccgaggacctgagaggcaagatcctgatcaagaacaagaagaaccagttcagcggccccaccagcagcagcaaggacaccggcggcgaggccgagggcagcagcccccccagcgcccccgccggcgagggcaccgtgtgggccggcgaggagggcaccgagctggaggaggaggaggtggaggaggaggaggaggaggagagcggcaacctggacgaggaggagatcaagaagatgcagagcgacgagggcaccgccggcctggaggtgaccgcctacgaggagatgagcagcctggtgaactacatccagcccaccaagttcgtgagcttcgagttcagcgcccagaagaacagaagctacgtgatcagcagcttcaccgagctgaaggcctacgacctgctgagcaaggccagcgtgcagttcgtggactacaacaagagacagatgagcagaatctaccccaagggcaccagaatggacagcagcaactacatgccccagatgttctggaacgccggctgccagatggtggccctgaacttccagaccatggacctgcccatgcagcagaacatggccgtgttcgagttcaacggccagagcggctacctgctgaagcacgagttcatgagaagacccgacaagcagttcaaccccttcagcgtggacagaatcgacgtggtggtggccaccaccctgagcatcaccgtgatcagcggccagttcctgagcgagagaagcgtgagaacctacgtggaggtggagctgttcggcctgcccggcgaccccaagagaagatacagaaccaagctgagccccagcaccaacagcatcaaccccgtgtggaaggaggagcccttcgtgttcgagaagatcctgatgcccgagctggccagcctgagagtggccgtgatggaggagggcaacaagttcctgggccacagaatcatccccatcaacgccctgaacagcggctaccaccacctgtgcctgcacagcgagagcaacatgcccctgaccatgcccgccctgttcatcttcctggagatgaaggactacatccccggcgcctgggccgacctgaccgtggccctggccaaccccatcaagttcttcagcgcccacgacaccaagagcgtgaagctgaaggaggccatgggcggcctgcccgagaagcccttccccctggccagccccgtggccagccaggtgaacggcgccctggcccccaccagcaacggcagccccgccgccagagccggcgccagagaggaggccatgaaggaggccgccgagcccagaaccgccagcctggaggagctgagagagctgaagggcgtggtgaagctgcagagaagacacgagaaggagctgagagagctggagagaagaggcgccagaagatgggaggagctgctgcagagaggcgccgcccagctggccgagctgggcccccccggcgtgggcggcgtgggcgcctgcaagctgggccccggcaagggcagcagaaagaagagaagcctgcccagagaggagagcgccggcgccgcccccggcgagggccccgagggcgtggacggcagagtgagagagctgaaggacagactggagctggagctgctgagacagggcgaggagcagtacgagtgcgtgctgaagagaaaggagcagcacgtggccgagcagatcagcaagatgatggagctggccagagagaagcaggccgccgagctgaaggccctgaaggagaccagcgagaacgacaccaaggagatgaagaagaagctggagaccaagagactggagagaatccagggcatgaccaaggtgaccaccgacaagatggcccaggagagactgaagagagagatcaacaacagccacatccaggaggtggtgcaggtgatcaagcagatgaccgagaacctggagagacaccaggagaagctggaggagaagcaggccgcctgcctggagcagatcagagagatggagaagcagttccagaaggaggccctggccgagtacgaggccagaatgaagggcctggaggccgaggtgaaggagagcgtgagagcctgcctgagaacctgcttccccagcgaggccaaggacaagcccgagagagcctgcgagtgcccccccgagctgtgcgagcaggaccccctgatcgccaaggccgacgcccaggagagcagactgtag

SEQ ID NO: 147708 - protein, 478 aa, Artificial Sequence
  derived and/or modified sequence
MDRSLGWQGNSVPEDRTEAGIKRFLEDTTDDGELSKFVKDFSGNASCHPPEAKTWASRPQVPEPRPQAPDLYDDDLEFRPPSRPQSSDNQQYFCAPAPLSPSARPRSPWGKLDPYDSSEDDKEYVGFATLPNQVHRKSVKKGFDFTLMVAGESGLGKSTLVNSLFLTDLYRDRKLLGAEERIMQTVEITKHAVDIEEKGVRLRLTIVDTPGFGDAVNNTECWKPVAEYIDQQFEQYFRDESGLNRKNIQDNRVHCCLYFISPFGHGLRPLDVEFMKALHQRVNIVPILAKADTLTPPEVDHKKRKIREEIEHFGIKIYQFPDCDSDEDEDFKLQDQALKESIPFAVIGSNTVVEARGRRVRGRLYPWGIVEVENPGHCDFVKLRTMLVRTHMQDLKDVTRETHYENYRAQCIQSMTRLVVKERNRNKLTRESGTDFPIPAVPPGTDPETEKLIREKDEELRRMQEMLHKIQKQMKENY

SEQ ID NO: 147709 - DNA, 1437 bp, Artificial Sequence
  derived and/or modified sequence
atggacagaagcctgggctggcagggcaacagcgtgcccgaggacagaaccgaggccggcatcaagagattcctggaggacaccaccgacgacggcgagctgagcaagttcgtgaaggacttcagcggcaacgccagctgccacccccccgaggccaagacctgggccagcagaccccaggtgcccgagcccagaccccaggcccccgacctgtacgacgacgacctggagttcagaccccccagcagaccccagagcagcgacaaccagcagtacttctgcgcccccgcccccctgagccccagcgccagacccagaagcccctggggcaagctggacccctacgacagcagcgaggacgacaaggagtacgtgggcttcgccaccctgcccaaccaggtgcacagaaagagcgtgaagaagggcttcgacttcaccctgatggtggccggcgagagcggcctgggcaagagcaccctggtgaacagcctgttcctgaccgacctgtacagagacagaaagctgctgggcgccgaggagagaatcatgcagaccgtggagatcaccaagcacgccgtggacatcgaggagaagggcgtgagactgagactgaccatcgtggacacccccggcttcggcgacgccgtgaacaacaccgagtgctggaagcccgtggccgagtacatcgaccagcagttcgagcagtacttcagagacgagagcggcctgaacagaaagaacatccaggacaacagagtgcactgctgcctgtacttcatcagccccttcggccacggcctgagacccctggacgtggagttcatgaaggccctgcaccagagagtgaacatcgtgcccatcctggccaaggccgacaccctgaccccccccgaggtggaccacaagaagagaaagatcagagaggagatcgagcacttcggcatcaagatctaccagttccccgactgcgacagcgacgaggacgaggacttcaagctgcaggaccaggccctgaaggagagcatccccttcgccgtgatcggcagcaacaccgtggtggaggccagaggcagaagagtgagaggcagactgtacccctggggcatcgtggaggtggagaaccccggccactgcgacttcgtgaagctgagaaccatgctggtgagaacccacatgcaggacctgaaggacgtgaccagagagacccactacgagaactacagagcccagtgcatccagagcatgaccagactggtggtgaaggagagaaacagaaacaagctgaccagagagagcggcaccgacttccccatccccgccgtgccccccggcaccgaccccgagaccgagaagctgatcagagagaaggacgaggagctgagaagaatgcaggagatgctgcacaagatccagaagcagatgaaggagaactactag

SEQ ID NO: 147710 - DNA, 1437 bp, Artificial Sequence
  derived and/or modified sequence
atggatcgaagcctcggctggcaaggaaactcagttcccgaggatcgtacagaggccgggatcaagagattcctggaagatacgacagacgacggcgagctgagtaagtttgtgaaagacttttccggtaacgccagctgtcacccgcccgaagctaagacgtgggcctctaggccgcaagttcccgagcctcggcctcaggccccagacctttacgacgatgacttggaattcagaccgcctagccgcccacagagtagtgacaatcagcagtatttttgcgcacccgcgccactctccccaagcgctaggcctcgatctccgtggggcaaactcgatccttatgatagttccgaggacgacaaagagtatgtgggtttcgccaccctgccaaatcaggttcatcgaaaatcggtgaaaaaaggtttcgattttacgctgatggtggccggagaatccggactgggtaagtccaccctagtcaatagtttgtttctcaccgacctctatcgggaccgaaaactgcttggagctgaggagcggattatgcagaccgttgagatcaccaagcacgccgtggatatcgaagaaaagggcgtcaggctgagactgaccatagtggatactcccggcttcggggacgctgtgaacaacacagaatgttggaagcccgtggccgaatacatagaccagcagttcgaacagtacttccgggacgagtcgggcctgaatcgaaaaaatattcaggacaatagggtgcactgctgtctgtactttatttcgccatttggtcacggcctgcgccccctagacgtggagtttatgaaggccttacaccagcgcgtgaacattgttccaatccttgccaaagccgacacattgactccccccgaagtcgaccacaagaaacgtaagattagagaagaaatcgagcacttcggaatcaagatttatcaattcccagactgcgattccgacgaggatgaggactttaagctccaggaccaggctctcaaggagtccatcccctttgcagttattggaagtaacactgtggttgaagccagggggagaagggtgagaggccggttatatccatgggggatcgtcgaggtggaaaatcctggacattgtgacttcgtcaagctgcgaacaatgctggtacggacacatatgcaggatttgaaggacgtgactcgcgaaacacactacgagaactatagagcccagtgcatccagtcgatgaccagattggttgtcaaagagcggaatcgcaataaattaacaagggaaagcggtacagattttccgatacccgcagtgccccctggaacagaccccgagaccgagaagctaatccgggagaaagatgaagagctgcgccggatgcaggaaatgttgcataagatacaaaagcagatgaaggaaaactattag

SEQ ID NO: 147711 - DNA, 1437 bp, Artificial Sequence
  derived and/or modified sequence
atggacaggagcctgggctggcagggcaacagcgtgcctgaggacagaacagaagctggcatcaagcgcttcctggaggacaccacagatgatggagagctgagcaagtttgtgaaggacttctctggaaatgccagctgccaccccccagaggccaagacctgggccagccggccccaggtgcctgagccccggccccaggccccagacctgtatgatgatgacctggagttccggccccccagccggccccagagcagtgacaaccagcagtacttctgtgccccagcccccctgagccccagcgcccggcccaggagcccctggggcaagctggacccctatgacagcagtgaagatgacaaggagtatgtgggctttgccaccctgcccaaccaggtgcacaggaagtctgtgaagaagggctttgacttcaccctgatggtggccggggagagcggcctgggcaagagcaccctggtgaacagcctcttcctgacagacctgtacagagacaggaagctgctgggcgctgaggagcgcatcatgcagacagtggagatcaccaagcatgctgtggacatcgaggagaagggcgtgcggctgcggctgaccatcgtggacaccccaggctttggagatgctgtgaacaacacagagtgctggaagcctgtggccgagtacatcgaccagcagtttgagcagtacttcagagatgaaagtggcctgaacaggaagaacatccaggacaacagagtgcactgctgcctgtacttcatcagcccctttggacatggcctgcggcccctggatgtggagttcatgaaggccctgcaccagagggtgaacatcgtgcccatcctggccaaggctgacaccctgaccccacctgaggtggaccacaagaagaggaagatccgggaggagattgagcacttcggcatcaagatctaccagttcccagactgtgacagtgatgaagatgaggacttcaagctgcaggaccaggccctgaaggagagcatcccctttgctgtgattggcagcaacacagtggtggaggcccggggccggcgggtgcggggccgcctgtacccctggggcatcgtggaggtggagaaccctggccactgtgactttgtgaagctgcggaccatgctggtgaggacccacatgcaggacctgaaggatgtgacccgggagacccactatgagaactaccgggcccagtgcatccagagcatgacccggctggtggtgaaggagaggaacagaaacaagctgacccgggagagcggcacagacttccccatcccagctgtgcccccaggcacagatcctgagacagagaagctgatccgggagaaggatgaggagctgcggaggatgcaggagatgctgcacaagatccagaagcagatgaaggagaactactag

SEQ ID NO: 147712 - DNA, 1437 bp, Artificial Sequence
  derived and/or modified sequence
atggaccggagcctgggctggcagggcaacagcgtgcccgaggacagaaccgaagctgggataaaacggtttctggaggatacaaccgacgacggcgagttgtcgaagtttgtcaaggacttcagcggcaatgcatcctgtcatccccctgaggcaaaaacctgggcctcgagacctcaagtgcccgaacctcgaccccaagcccctgacctatatgatgacgatctagaatttcgtccgccgagcagaccacaatcaagcgataatcagcagtacttttgtgctcctgctccactgtccccgtccgctcgcccgcgaagtccttggggtaaactcgacccctatgactcatcggaagatgacaaggaatacgtgggatttgcaacacttcctaaccaagtccaccgaaagtctgttaagaaaggctttgattttaccctcatggtggccggggaatccggcttgggcaagtcaacactcgtgaacagcctgttcctgaccgacctctacagggacagaaagctattaggcgctgaagaacggataatgcagactgtggaaattacaaagcatgccgttgacattgaagaaaagggtgtccggctgcgtctgaccattgttgataccccaggctttggcgacgcggtaaacaacactgagtgctggaagcctgttgcggaatatattgaccagcagtttgaacaatatttccgcgatgaaagtggcctgaaccgcaagaatattcaggataaccgcgtccactgctgcctgtactttattagtcccttcggtcacgggctcaggcccctagacgttgagttcatgaaggccttgcaccagcgggtgaacatagtgcccattctggccaaggccgataccctcacaccaccagaggtagaccacaagaagagaaaaatcagggaagagatagagcactttgggattaagatctatcagtttccggattgtgatagtgatgaggacgaggactttaaacttcaagaccaagctctgaaagagtctattccattcgcagtgattggctccaataccgtggtcgaggctcgaggccggagagttcgggggaggctgtacccttggggcatcgtcgaggtcgaaaatcctggacactgcgattttgtcaagttgaggacgatgctcgttcggacccacatgcaggacctgaaggatgtcaccagagaaacacactatgaaaattaccgggcccagtgcatacagtctatgacccgactggtggtgaaagagcggaatcgcaacaagctgacccgagagtcaggcaccgacttccctataccagctgtcccacctggcactgatccggaaaccgaaaaattgattcgcgagaaggacgaggagctgagaaggatgcaggagatgctgcataaaatccaaaagcagatgaaggagaactattag

SEQ ID NO: 147713 - DNA, 1437 bp, Artificial Sequence
  derived and/or modified sequence
atggaccgcagcctgggatggcaaggtaattctgtgcctgaggacagaacagaagcaggaataaaaaggttcctcgaggacaccaccgacgatggtgagctgagcaagtttgtgaaagacttcagcggcaacgcctcgtgtcatcctccagaggccaagacctgggcatcccggcctcaggttcctgagccccgtcctcaagcaccagacctgtacgacgatgacctcgaattccgccctcccagccgccctcaatcgtccgacaaccagcagtatttttgtgctcccgctcccctctctccaagtgcacgtcccagaagtccttggggcaagctagacccctatgatagttctgaagacgacaaggaatacgtgggatttgcaaccctgcccaaccaggtacaccggaaatccgtgaaaaagggcttcgatttcaccttgatggtggctggggagagcggtttgggcaaatcgactctggtcaacagtctgttcctgaccgacctgtatcgggaccgtaagctgctgggggcagaagaaagaataatgcagacggtggagataacaaagcatgcagtcgatatagaggaaaagggagtgaggctgcgcttaactatcgtggatactccaggtttcggtgacgcggtgaataataccgagtgttggaaaccagtggccgagtatatcgatcaacaattcgaacagtattttcgggatgagtccggcctgaataggaagaacatacaagacaaccgagtccactgttgcctgtattttatcagtcccttcggacacggattacgccctttagacgtcgagttcatgaaggcacttcaccaaagagtgaatattgttccaattctcgccaaggccgacacactgacgcctcccgaagtcgaccacaagaaaagaaaaatacgtgaagaaatagagcacttcgggattaagatctatcagttccctgattgcgacagcgatgaagacgaggacttcaagctgcaagatcaggccttgaaagaatccattccttttgcggtgatcggctctaacacagtggttgaggcccgaggtagacgtgttcggggtcggctgtacccatgggggatagttgaggtcgagaaccctggtcactgcgatttcgttaagttgcgcaccatgctggtgcgtacacacatgcaggaccttaaagatgtaacccgtgagacacattatgagaattacagggcgcagtgcatccagtctatgaccaggcttgtggtgaaagagcgaaatcgcaataaattaacccgtgaatctggaaccgacttccctatcccagccgtaccccctggaactgatcccgagaccgaaaagctcattcgcgagaaagatgaagaactaagacgaatgcaggaaatgctgcataagatccaaaagcagatgaaagaaaactactag

SEQ ID NO: 147714 - DNA, 1434 bp, Artificial Sequence
  derived and/or modified sequence
atggacaggagtttgggatggcagggcaacagtgtccccgaagatagaaccgaggccggcattaaacgattcctagaggataccactgatgatggcgaattgtcaaaattcgtcaaggacttttctggaaacgcgtcctgtcaccccccggaggctaaaacctgggccagtaggccgcaggtgccagagccccggcctcaggcgccagacctctacgacgacgatcttgaattccgcccacctagtcggccacagtcatctgacaatcagcagtatttttgtgcacctgctccactttcaccttcggcccggcctaggtcaccttggggcaaactggatccctatgattcaagtgaagacgacaaagaatacgtgggcttcgccacgctgccaaatcaagtccatcgtaagagcgtgaagaagggcttcgattttacactcatggtggccggggaaagtggcctgggaaaatctactctcgttaattctttgtttctgactgacctgtaccgagacagaaaactgctcggggccgaggagaggattatgcagacagtggaaattacaaagcacgcggtggacatagaggaaaagggggtgaggttgcgtttgactatcgtcgatactcctgggttcggcgacgcagtcaataacactgaatgttggaaacccgttgctgaatatattgaccaacagttcgagcagtattttagagacgaatccggactgaacaggaagaacatccaggataacagagtgcattgttgcctctatttcattagtccctttggccatggactgcggcccctagatgttgaattcatgaaagcccttcaccagagggtaaacatcgtgcctattttggctaaagcagacactctaactccaccagaggtcgatcataaaaagaggaagattagagaggagattgagcactttggcatcaagatctaccagttcccagattgcgatagcgatgaagatgaggatttcaagctgcaggatcaggcattgaaagagagtattccttttgcagtgataggttccaacaccgtggtagaggctcgcggaaggcgggtgaggggtaggctgtacccttggggtatagtggaagtcgaaaacccaggccactgcgactttgtcaagctcagaacaatgctggttcgtacccacatgcaggaccttaaagacgtaacgcgggaaactcattacgagaactacagagcgcagtgcatccagtcaatgacaaggctcgtggtcaaagaacgaaacagaaacaaactcactagggagtctggtacggattttccaattcccgcagtgccccccggtacagaccccgaaaccgaaaaactcatccgggagaaggatgaagaactgagacggatgcaggagatgctccacaaaatccagaaacagatgaaagaaaactat

SEQ ID NO: 147715 - DNA, 1434 bp, Artificial Sequence
  derived and/or modified sequence
atggaccggtccttgggctggcaggggaacagcgtgcctgaagaccggaccgaggccgggatcaagaggttcctggaagacactacagacgatggcgagcttagcaagttcgtcaaggacttctcagggaatgcgagttgccaccctcccgaggcaaaaacatgggcttcaaggccccaggtgcctgagcctcgcccacaagcccccgatctgtatgatgacgatcttgagttccggccaccctcaaggccgcagagctcagataaccagcagtacttctgcgcccccgcccccctgagtccctctgctcgtcccagatccccttgggggaagctggacccatacgattcctcagaagacgacaaggaatacgtcggatttgcaactctgcccaaccaggtacatcggaagagtgtcaaaaaagggtttgatttcaccctgatggtcgcaggggaatctggactgggcaaatccacactcgttaattccctcttcctgacggacttgtatagagacagaaagctgctgggcgcagaggaacggatcatgcagaccgttgagatcactaaacacgctgtcgacattgaggagaagggggtaagacttcgtctgactattgtggacactcctggtttcggcgacgccgtaaataatacagagtgctggaagcccgtggcggaatacattgatcaacagtttgagcaatatttccgggacgaatcgggcctcaaccggaaaaatatccaggacaatcgtgtgcactgttgcctgtatttcatctctcctttcggacatggtctgagaccactggatgtagagttcatgaaggctttacaccagagggtaaacatcgtccccatcctggccaaagctgacactcttacgcctcctgaagttgaccacaagaagcgcaaaattagagaagagatcgagcattttggtattaagatttatcagttccctgattgcgatagtgacgaggatgaagatttcaagttgcaggaccaggccctaaaggaaagtatacccttcgcagtcattgggtctaacacagtcgtagaggccaggggaagaagagtccggggacgcctttacccctgggggatcgtcgaagtagagaaccctggacactgcgattttgtaaagctgaggacaatgctagttcgcacccacatgcaggacctgaaagatgtcaccagagagacccactacgagaattatcgggcccagtgcatccagtccatgactcgacttgtagtgaaggaaaggaacaggaacaagctgacacgagaaagtggaaccgattttcctatccccgccgttccacccggtacagatcctgaaacagaaaagcttattcgcgaaaaagacgaggagctcagacgtatgcaggagatgctgcacaagattcagaagcagatgaaggagaattac

SEQ ID NO: 147716 - DNA, 1434 bp, Artificial Sequence
  derived and/or modified sequence
atggaccgaagcctgggctggcagggcaactccgtgcccgaagacagaacagaagcaggaattaaaagattcctagaggacactactgatgacggggaactctcgaagtttgtgaaggactttagcgggaacgctagttgtcatccacctgaagcaaagacctgggcctccagaccacaagtgcctgagccccggcctcaggcgcctgatttatatgatgatgatcttgagtttaggcctcctagtcgccctcagtcttctgacaaccaacagtatttctgcgcccccgcacccctgagtcccagtgctagaccccgatccccatggggaaagctggatccatatgacagtagtgaggacgataaggagtacgtcggtttcgctacgcttcccaatcaggtgcaccgcaagagcgtaaagaagggcttcgactttacactaatggttgccggggaaagcggtctagggaaatccaccctagtgaactctcttttcctaaccgatctgtaccgggacagaaagctgctcggagccgaggaacgtattatgcagaccgtggagatcacaaaacacgccgtggacatagaagaaaaaggcgtgcggctccggctgacaattgtcgacacaccggggttcggcgatgctgtgaataacactgagtgctggaagcccgtcgccgagtacatcgaccagcaattcgaacagtacttcagggatgaaagcgggctcaaccgcaaaaacattcaggataaccgggtgcactgttgcctctactttatctcaccgttcggtcatgggctgagacccttggacgtcgagtttatgaaggctctacaccagcgggtcaacatcgtgcccatcttggcaaaggccgatacgcttaccccccccgaggtggatcacaaaaaaagaaagattcgagaggagattgaacattttggaatcaagatttatcagttccccgattgtgacagcgatgaggacgaagacttcaaactccaagaccaagccttaaaggagagcattcccttcgccgtgattggcagcaacacggtggtggaagccaggggaagacgcgttaggggcaggctatacccttggggtatagtggaggtcgaaaatccaggccactgcgatttcgtcaagcttcggaccatgctagtccgcacccatatgcaagacctcaaggacgtgactagagaaacgcactacgagaattaccgcgcccagtgcattcagtcgatgacaaggctggtggtgaaggaaaggaacaggaataaactcacacgagagtcaggtacagactttccaattcccgcagtgccaccagggaccgaccccgaaactgagaagctgatccgtgaaaaggacgaggagctgaggcggatgcaagagatgcttcacaaaatccagaagcaaatgaaagaaaactat

SEQ ID NO: 147717 - DNA, 1434 bp, Artificial Sequence
  derived and/or modified sequence
atggatcggtcgctggggtggcagggcaactcggtgcctgaggatagaaccgaagcaggaattaagagattcctcgaagatactaccgatgatggcgaactgtcaaaattcgtgaaggacttttcgggtaacgctagctgtcaccctccggaagcaaaaacctgggcctcgcgtcctcaagtgcctgaaccaagaccccaggcacccgatctctacgatgatgatcttgagttcagacctcctagccgtccacaatcgtccgataaccagcagtacttttgtgcaccagccccgctctccccttccgccagacctcgttcaccttggggaaaacttgatccatacgattccagcgaagatgacaaggaatacgtgggctttgcaactctgcctaaccaggtgcaccggaagtccgtcaagaagggttttgattttaccctgatggtggcaggtgaaagcggacttggaaagagcactctcgtcaactcgctctttctcaccgacctgtaccgtgatagaaaattgctgggcgccgaggagcgcatcatgcaaaccgtggagattaccaagcatgcagtcgatatcgaggaaaagggagtgcggttgcggcttactatcgtcgacacccctggattcggcgacgctgtgaacaacacggagtgctggaagccagtggccgagtacatcgaccagcagtttgaacagtactttcgtgatgaatcagggctcaatcgtaagaacatacaagataatagggtgcattgttgtttgtactttatctcgccctttggtcatggattgcgacctttggatgtggaattcatgaaagcacttcaccagcgtgttaacatagtcccaatcctggcgaaggccgatacccttaccccaccagaagttgaccataagaagcgcaaaattcgggaagagattgaacatttcggaattaagatttaccaatttccggattgtgattctgatgaagatgaggactttaagctgcaggatcaagcactcaaggaatcgatcccatttgcagtcatcggatccaacactgtcgtggaagcaagaggtcgacgcgtgagaggacgcctttacccatgggggattgtcgaggtggaaaacccagggcattgtgactttgtcaagctcagaaccatgcttgtccggacccacatgcaggatctgaaggacgtgaccagagagactcattacgaaaactaccgagcccaatgcattcagtccatgactcgcttggtcgtgaaggagcgtaacaggaataaacttactagggaatcagggaccgactttcctattcctgcagtgcccccaggaaccgatccagaaaccgagaagttgattcgggagaaagatgaggaactgcgccgaatgcaagagatgctgcataagatacagaagcagatgaaagaaaactac

SEQ ID NO: 147718 - DNA, 1434 bp, Artificial Sequence
  derived and/or modified sequence
atggatagatccctgggatggcagggcaactccgttcctgaagacaggaccgaggcgggtataaagaggttcctggaggatacgacagatgacggggaactgtccaaatttgtaaaagacttcagcggtaatgctagttgccatccaccagaggcgaagacctgggccagccgcccacaagttccagaaccccggccacaggctcctgatctgtatgacgatgacctggagttccgccccccgtcccgtcctcagagttccgacaaccagcagtacttttgcgccccagcacctctttccccatccgcccgccctagatctccgtggggtaagctcgatccttacgatagttcagaggacgacaaagaatatgtgggctttgctacgctgcctaatcaagtccataggaagtctgtcaagaagggctttgacttcactttaatggtggccggtgaatctggtctagggaagtccaccttagttaatagcttattcttaaccgacctgtatcgagaccgtaaactcctgggggctgaagagcgcatcatgcaaactgtagagataaccaagcatgctgttgacattgaagagaaaggggtaaggctgcggcttaccatagtagacactccaggcttcggggacgctgttaataatactgaatgctggaagcccgtggcggaatacatagaccagcagtttgagcaatattttcgggacgaaagcggactgaacaggaagaacatccaagacaatagagtccattgctgtctgtattttatcagcccctttggccacggactgaggccgctcgacgtggagtttatgaaggccttacaccagcgagtaaacatcgtgccgatcctcgccaaagccgacacattgactcctcctgaggtagaccacaaaaaacgaaaaattcgtgaagaaattgagcacttcggaatcaaaatttaccagtttcccgactgtgatagcgacgaggacgaggactttaagctacaggaccaggcgcttaaggagagcatcccttttgcagtaatagggagtaatactgtggtggaagcaagaggacgcagggttagagggagactctatccatggggcattgtcgaggtggagaatcccggacattgtgactttgtgaaacttcggacaatgctggttagaactcatatgcaggatctgaaggacgtaaccagagaaactcactatgagaactaccgcgctcagtgcatccagtcaatgacccggctggtggtaaaggagcggaaccggaacaaactgacccgggagtcagggaccgactttccgattcctgcagtcccacctgggaccgatcctgaaaccgaaaagctgatccgcgaaaaggatgaggagttgaggaggatgcaggagatgctgcacaaaatacagaaacagatgaaggagaattac

SEQ ID NO: 147719 - DNA, 1434 bp, Artificial Sequence
  derived and/or modified sequence
atggaccggtctcttggatggcagggaaactctgtgccggaggatcgaacggaggcgggcattaaaaggttcctcgaagacactacagatgacggagaattgtctaaatttgtgaaggatttcagcgggaatgcttcgtgccacccgccggaggctaaaacatgggcgagtcgccctcaggtccctgaacccagacctcaggcccctgatctctatgatgacgacctcgaattcagacccccttcacgcccacagtctagcgacaatcaacagtacttttgtgctcccgccccacttagcccgagtgctagacctcgatcaccatgggggaaacttgacccatatgactcctccgaggacgataaagagtacgtcggcttcgctacactgcctaatcaggttcatcgaaagtctgtgaaaaagggctttgatttcactttgatggttgccggcgaatctgggctcggcaagtccacactggttaattcgctgtttctcacagacctgtatagggaccggaagttgcttggcgccgaagaaagaataatgcagacagttgagattaccaagcatgcagtggatatagaagaaaaaggtgtccggctccggctcacgattgttgacactcccggttttggcgatgcagtgaacaatactgaatgttggaaaccagtcgccgagtacattgatcagcagttcgaacagtatttcagagatgaatcaggccttaataggaagaatattcaggataacagggtccattgttgcctctactttattagcccgttcggccacggcttaagacccctggatgtcgaatttatgaaagccctgcatcagcgtgtgaatatagtaccaatactcgcgaaggcagatacactgactccccccgaggttgaccataagaaacgcaaaatccgggaagagatcgagcacttcggaattaagatctatcagtttccggactgcgactccgacgaggatgaagacttcaagctccaggatcaagccctcaaggaaagtataccttttgccgttatcggctctaacactgtcgttgaagcccgcggccgccgggtgcgtgggcggctgtacccttggggaatcgtggaggtggagaaccccggacactgcgactttgttaagctcaggacaatgttggtgcgaactcacatgcaggacctcaaggacgtgacgagagagacccattacgaaaattatcgggctcagtgtatacagagcatgactagactcgtggtgaaggagcggaatcggaacaagttaacccgggaaagcgggaccgatttccccatcccagcggtgcctcccggaactgatcctgagacagagaaactgattcgtgagaaggacgaggaactcaggaggatgcaggagatgctgcacaaaattcagaagcagatgaaagagaattat

SEQ ID NO: 147720 - DNA, 1434 bp, Artificial Sequence
  derived and/or modified sequence
atggaccgatccctgggatggcagggaaatagcgtgcccgaggaccggactgaggccggaatcaagcgctttcttgaggacacaacagacgatggcgagttgagcaagttcgtcaaggacttttctggaaatgcaagttgtcaccccccggaggctaaaacttgggccagcagaccacaggtgcctgagccccgaccccaggcccccgatctctacgacgacgacttggagttcaggcctcctagccgcccccagtcgagcgacaatcagcaatacttctgcgccccagcccctctgagcccatccgctcgaccacgttccccctggggaaagctggacccttatgactcctcggaagatgacaaggaatatgtgggcttcgctaccctgccaaatcaggtgcataggaagtccgtgaaaaagggattcgatttcacactgatggtggcaggagagagtggccttggcaagtccaccctcgtgaattccctgtttttgaccgacctttatagagaccgcaagctactgggcgcagaagaaaggattatgcagacagtggaaattaccaagcacgcggtcgacatcgaggagaaaggcgtacgtctgagactcacaattgtggacacccctggtttcggcgacgccgtgaacaacacggagtgttggaagccggttgccgagtatatagaccagcagtttgagcaatatttccgagacgaaagtggactaaatcgaaagaacattcaagacaaccgtgttcattgctgtttatatttcatatccccattcgggcatgggctgcgcccccttgatgttgagtttatgaaggcccttcatcagcgagttaacatagtccccatactggcgaaagcggacactctgactccacccgaggtggatcataagaaaaggaagatcagggaagagattgaacacttcggtataaagatttatcagtttcccgattgtgacagcgacgaggatgaagactttaagttgcaggatcaagctctgaaagaaagtatccctttcgcggtcattggaagcaacacagttgtagaagctagaggaagaagagtccgagggagactctatccttggggaatcgtggaggtggagaatcccggccactgtgattttgtgaaactccgaactatgttggtacggactcacatgcaggacctgaaggacgtcacaagagaaactcactacgaaaactatagagcgcagtgcattcaaagcatgactaggctagtggtgaaagaaagaaaccgaaacaaacttacgagggagagcggtacagattttcccatccctgcagtgcctccaggaacggaccccgagaccgagaaacttatccgagagaaagacgaggaactgaggagaatgcaagagatgctccacaagatccagaagcagatgaaagaaaactac

SEQ ID NO: 147721 - DNA, 1434 bp, Artificial Sequence
  derived and/or modified sequence
atggaccgctcgctgggttggcagggaaactcggtgcctgaggatcgtactgaggccggcatcaagcgctttctggaggataccactgacgacggtgaactgagcaaatttgtgaaagatttttcaggcaatgctagttgtcatccgcccgaagccaagacctgggcgagcagaccgcaagtgccagagccgcgccctcaggcccctgacctttacgacgacgacctggagtttcgcccaccgtctaggccacagtcaagtgataatcagcagtacttttgtgcgccagctccactctcgccgagtgcgcgcccgcggtccccgtggggaaaactggatccgtacgactcctcggaagatgacaaggaatacgtggggttcgctactctgccaaaccaagtgcacaggaaatcagtcaagaaggggttcgacttcacgctcatggtggcgggggaatctggactgggcaagtcgaccctcgttaattccctgttcctgaccgacctctatagagatcggaaactgctgggcgctgaggagagaatcatgcagactgtggaaatcactaaacacgcagtggacatcgaggagaagggagtgcggctccgcctgaccattgtggatacccccggcttcggggacgccgtgaacaacactgaatgctggaagccggtcgcggaatacatcgaccagcagttcgaacagtacttccgggacgaaagcggattgaatcgaaagaacatccaagataaccgagtgcactgctgcctgtacttcattagccctttcggacacggactgcggccgcttgatgttgaattcatgaaggccttgcaccagcgcgtgaatatcgtcccgattctggcaaaggcagataccttgactccccccgaggtcgaccataagaagagaaagatcagggaagagatcgagcatttcggtatcaaaatctaccagttcccggattgcgattccgatgaggacgaggacttcaaactgcaggaccaagcccttaaggagtcgataccatttgccgtaatcggttcgaacaccgttgtggaagcacgcggaaggcgcgtccggggacggttgtatccttggggcatcgtggaggtcgagaatcctggacattgcgacttcgtgaagttgaggaccatgctggtccgcacgcacatgcaagatcttaaagacgtgacccgcgaaactcactacgagaactaccgcgcgcagtgcatccaatcgatgactaggctggttgttaaggaacggaaccgcaataaacttactagggaaagcggaacggacttccctatccccgccgtgcctccgggaactgatccggaaaccgaaaagctgattcgggaaaaggacgaggaactcagaagaatgcaagaaatgctgcataagatccaaaagcagatgaaggagaactac

SEQ ID NO: 147722 - DNA, 1434 bp, Artificial Sequence
  derived and/or modified sequence
atggatcggagtctgggatggcaggggaattctgtccctgaagatcgcacggaagccggtattaagaggttcctagaggacacgacggatgatggcgaactgtctaagttcgtcaaagattttagcggcaatgcttcttgccatcctcccgaagcaaaaacatgggcgtcacggccgcaagttccagaacctagaccgcaagcacctgacctttacgatgacgatctcgaatttcggccgccgtctagaccgcagtcatccgataaccaacaatatttttgtgcaccggcccctctttcaccttcggctcgtcctcgttccccgtggggaaagctggatccctatgacagctccgaagatgataaagaatacgtcggatttgccaccttgccaaaccaagtgcataggaaatccgtgaaaaaaggttttgacttcacgctgatggttgcaggagagtcaggtcttggaaaatccacgctggtaaatagtttgtttttaacggacctgtatagggatcgcaagttattaggcgcggaggagcgtatcatgcaaacggtcgaaatcacaaagcatgcggtcgatatcgaagaaaaaggcgtcagactgcgcttaactattgttgatacacctggctttggcgatgcggtcaacaacaccgagtgttggaaacctgtggctgaatatattgatcagcaattcgaacaatatttccgggacgaatctgggctaaaccgtaaaaatatacaggataatcgagtgcattgttgcttatactttatttcaccgtttggacacggtttacggcctttagatgttgaatttatgaaagcgcttcatcaacgggtgaatattgtgcctattttagcgaaagccgatacgctgacaccgccagaggttgatcataaaaagagaaaaatcagggaagaaatagaacacttcggaatcaaaatttaccaattcccggattgcgattcagatgaggacgaggatttcaaactacaggatcaggcgctcaaggaatcgatcccgtttgcagtaatcgggagtaacactgtggtagaagcacgggggagacgcgttagagggagattatacccttggggtattgttgaagtagagaatccaggacactgcgattttgtcaaattgcggacgatgctggtccgtactcatatgcaggatctgaaagacgtaacccgtgaaactcactacgaaaattatcgtgcccagtgtattcagagtatgacacggctggtagtcaaagagagaaacagaaataaattgacgagagaatctggcacggattttcctattccggccgtacctccgggtactgaccctgagactgagaagttgatccgggaaaaagatgaagagttgcggcgcatgcaggaaatgctgcataagattcaaaagcagatgaaagaaaattat

SEQ ID NO: 147723 - DNA, 1434 bp, Artificial Sequence
  derived and/or modified sequence
atggaccggagcctcgggtggcagggaaactcagtgcccgaagacaggacggaggcaggcatcaagagatttctcgaggacactacagatgatggagagctttctaagtttgtaaaagactttagtggtaatgcatcctgccacccacctgaagctaagacttgggccagtcgtcctcaggtacccgaaccaaggccccaggcacctgatctttacgacgacgacctggaattccgaccaccgtcccgtcctcaaagctctgacaaccagcagtacttttgcgcccctgcacccctgtctcctagtgccagaccacggtcaccctggggcaagctagatccttatgacagttccgaagatgacaaggagtacgtgggtttcgccacgttgccgaatcaagtccacaggaaatctgtcaagaaggggtttgatttcacattgatggtggccggcgagtccggactggggaagagcactctcgtgaattcactgttcttgaccgacctgtatagggacagaaagctcctaggagccgaagaaagaattatgcagactgtcgaaatcaccaaacatgccgttgatattgaagaaaagggtgtgcggctgcgtctgacaattgtcgatacgcctggctttggagacgctgtgaacaacacggaatgctggaagcccgttgccgagtatatcgatcagcagttcgagcaatactttcgtgacgagtctggcctgaatcgaaagaatattcaggacaatagagtgcattgttgcttatactttatcagcccatttggtcacggccttcgccctttggacgtggagttcatgaaggctctccaccagagagtcaatattgtacccatcttggccaaagcagatacactgactcctcctgaagtcgatcacaaaaaacgaaagatcagggaagaaatcgaacacttcggaattaagatctaccaattcccagattgcgattctgatgaggacgaggattttaaattacaggatcaggccctgaaggagagtattcctttcgctgtgatcgggtccaatacagtggtggaggcgagaggtcgtcgagtcagggggcgtttgtatccctggggaatcgtggaggtggagaaccctggtcactgcgactttgtgaagctgaggacaatgctggtgcgtactcacatgcaggatttgaaggatgttactagggagacgcactatgagaattaccgcgctcagtgcattcagtctatgacgagactggtggtaaaggagaggaaccgcaacaagctgacgcgcgaaagtggaacagacttccctatccccgctgtgcccccgggcaccgaccctgagaccgaaaagcttattcgcgaaaaggacgaagaactccgtaggatgcaggagatgttgcataaaatccaaaagcaaatgaaagagaattat

SEQ ID NO: 147724 - DNA, 1434 bp, Artificial Sequence
  derived and/or modified sequence
atggacaggagcctgggctggcagggaaattctgttcccgaagaccggactgaagctggaattaagcggtttttggaagataccaccgatgatggggagttaagtaaatttgtgaaggacttctccggcaacgccagttgtcacccacctgaagctaaaacatgggcaagtcgccctcaggtcccagaaccccgaccacaggcccctgacctctacgatgacgatcttgagttccggccaccaagtcggccccagtctagcgacaaccaacaatacttttgtgcacccgctcctctcagccccagcgcaagaccacgcagtccttggggcaaactcgacccttacgatagctctgaagacgacaaagaatatgtgggcttcgccactcttcccaatcaggttcaccgaaaatcagtcaagaagggcttcgacttcaccctgatggtggctggggagtccggcctcggaaagagcacactggttaatagcctgtttctcaccgatctgtaccgagatagaaaactgctgggcgcagaagaaagaattatgcagactgtggaaatcacaaaacatgccgtggacatagaggaaaagggtgtcaggctgcgactgacaatagttgacacaccaggatttggtgatgcagttaataatactgagtgctggaagccagtcgcagaatatattgatcagcaattcgaacagtacttcagagacgaaagcggcttaaacagaaagaatatacaggataaccgggtgcattgttgcttatacttcataagcccctttgggcatggtttgaggccactggacgtggaattcatgaaggctctccatcagcgggtgaacatagtgcccatactggccaaggcagacactctgaccccccccgaggtggatcataagaaacgcaaaatccgtgaagagatcgaacacttcgggatcaaaatttatcagttccctgactgtgattccgacgaggacgaagattttaagctacaagatcaggcactaaaggagagtattccattcgctgtcattggatctaatactgtggtggaagcaagaggccgaagagtgcgcgggaggctctacccctggggtatcgttgaggtagaaaacccagggcattgtgactttgtcaagctccgcacaatgctcgtgcggacccacatgcaggatctcaaagatgtgacccgcgaaacacactacgagaactaccgggcacagtgtattcagtccatgacacgtctggtggtgaaggaacggaatcgaaataagctgacccgggaaagtggcactgatttcccaattcccgctgttccacctggcactgatccagagacagaaaaactgatacgcgagaaagacgaggaactgcggcgcatgcaagaaatgttgcataaaattcagaaacaaatgaaagaaaactat

SEQ ID NO: 147725 - DNA, 1434 bp, Artificial Sequence
  derived and/or modified sequence
atggatagaagcctgggatggcaaggaaactccgtgccggaagatcggacggaagctggcatcaagcgctttttggaggataccactgacgacggcgagctgtcgaaattcgtgaaggactttagcggaaatgcatcatgccatcctccggaggccaagacttgggcatcacgtccgcaagtgccggaaccacgccctcaggccccggatctttacgatgatgacctcgagttccgcccaccgagccggccacagagcagtgataatcagcagtatttctgcgctccagcgccactgtcaccatccgcgcgcccccgctcaccttggggcaagctcgatccctacgattcgtccgaggacgacaaagaatacgtgggtttcgcgactttgccaaaccaagtccacaggaagtccgtcaaaaagggattcgatttcacccttatggtggcaggggagtcgggcctcgggaaatcaactctcgttaattccctcttcctgaccgacctctaccgcgacagaaagctcctgggggcggaggagcgtatcatgcagacggtggaaattaccaagcacgccgtcgacattgaagaaaagggtgttcgcctgcgattgaccattgtggacacgccgggctttggagacgccgttaacaataccgaatgctggaagcctgtcgcggagtacatcgatcaacagtttgaacaatacttcagagacgaatcgggcctcaaccgcaagaacatccaggacaatagagtgcactgctgcctgtacttcatctccccgttcggacatggactccgaccgctggatgtagagttcatgaaagcactgcaccagagagtgaatatagtgccgatcctggccaaagctgacactctgactcctcccgaagtggaccacaaaaagagaaaaatccgcgaagagatcgagcattttggaataaagatctatcaattccctgactgcgactctgatgaagatgaggatttcaagctgcaggaccaggcccttaaagaatcaatccccttcgcagtcattggcagcaacaccgtagtggaagcccggggacgcagagtgaggggaagattgtacccgtgggggatcgtggaggttgagaacccaggacactgtgactttgtgaagctccgcactatgctggttagaactcatatgcaagacctcaaggatgtcacccgagaaacccattacgaaaactaccgagcccagtgtatccaatctatgaccagactggtcgtgaaagaacgcaatcggaacaagctgacccgggagtccggcaccgacttcccaatccccgcggtccccccgggtaccgacccggagactgagaagctgatccgggaaaaggacgaggagctgaggcgtatgcaggaaatgctccacaagatccagaagcaaatgaaggaaaactac

SEQ ID NO: 147726 - DNA, 1434 bp, Artificial Sequence
  derived and/or modified sequence
atggaccgatccttgggttggcaaggaaacagcgtgcctgaagaccgaaccgaagctggaataaagcggtttctggaagatacgacagacgatggcgaactgtccaagtttgtgaaggacttctcaggtaacgctagttgccacccccccgaggcaaaaacctgggcatccagacctcaagttccggagcctaggcctcaggcccctgacctgtatgacgatgacctggagtttaggcccccaagcaggccccaatcctctgacaatcaacagtatttttgtgcccccgcccctttgagcccatcggcccgacctcgcagcccctgggggaagctggacccgtacgacagctcagaagatgataaagagtacgttgggttcgctaccttacctaaccaggtccatcgcaagtccgtcaaaaagggctttgattttacactcatggtggctggagagagcggcctggggaaaagtaccctggtgaatagcttgtttctgactgatctatatagggaccgtaagctgctgggagccgaggaacggattatgcagactgtcgagataacaaagcatgccgttgatattgaagagaagggggttaggctgcgtctaacgatagtggacaccccaggatttggagacgcggtgaacaataccgaatgctggaagcctgttgcagagtatatcgatcagcagttcgaacaatatttcagagacgaaagcggattaaacaggaagaatatacaggacaacagggtccactgctgcctttatttcatcagtccattcggtcatgggttgcggccactcgacgtggaatttatgaaggcgctgcaccaacgcgtgaatatcgttcctatcttggcgaaggctgacacgctgacccctcccgaagtggatcacaagaagcgcaagatcagggaagaaattgagcatttcggaattaaaatctaccagttccccgactgtgactcagatgaggatgaggactttaagctccaggaccaggcgcttaaagaaagcatcccctttgccgtaatcgggtccaacacagtcgtggaggcgaggggaagaagagtgagggggagactgtacccgtggggtatcgtggaagtagagaaccctgggcactgtgactttgtaaaactgcgtaccatgctcgttaggacgcacatgcaagatctgaaagacgtgaccagggagactcattacgaaaattacagggcccagtgtatccagtctatgacacgcttagtcgtgaaggaaaggaataggaacaagttgacgcgggaatcaggtactgatttccccatacccgccgtcccccccggaacagaccccgagaccgagaagctaatcagggaaaaagacgaagagctccgccgcatgcaggagatgctgcataagattcaaaaacaaatgaaagaaaactac

SEQ ID NO: 147727 - DNA, 1434 bp, Artificial Sequence
  derived and/or modified sequence
atggatcggtcgctgggttggcagggaaacagcgtccccgaagatcggaccgaagcaggtatcaagcgcttcctggaggacaccacggatgacggcgaattgtccaaatttgtgaaagacttctccggaaacgcctcctgccaccctccggaggccaagacttgggcttcaagacctcaagtgcctgaaccgaggccacaagcgcccgacctctacgatgacgatctggagtttcggccgccaagccgcccgcaatcatcggataaccaacaatacttctgcgcgccggctcctctgtcgccgagcgcccggcctaggtcaccgtggggaaagctggacccatatgattcgtcggaggacgacaaggagtacgtgggattcgccaccctgcccaaccaggtgcacagaaagtcagtcaagaagggtttcgacttcaccttgatggtggcgggcgaatcaggactgggcaagtccaccctcgtcaattcgctgttcctgactgatctctaccgcgatcgcaaattgttgggcgcggaggaacggatcatgcagactgtggagattaccaaacatgccgtggacatcgaggagaaaggagtgcggctgcggctgaccatcgtggatacccctggtttcggtgacgcggtgaacaatactgagtgttggaagcccgtggcagagtacatcgaccaacagtttgagcagtacttcagagacgaatcgggcctcaacaggaagaatattcaggataatcgcgtgcattgctgtctgtacttcatctccccgttcggacacggtctgaggcctctggatgtggaattcatgaaggcacttcaccagagagtcaatatcgtgccaatcctcgctaaggccgacactctgacgcccccagaagtcgaccacaagaagcgcaagatccgggaagaaatagagcatttcggaatcaagatttatcaatttccggactgcgattcagacgaggatgaagatttcaagctgcaggatcaagccttgaaggagtccattcctttcgcagtgatcgggagcaatacggtcgtggaagccaggggacgccgggtgagaggacggctgtacccgtggggaatcgtcgaagtggagaaccctggccattgcgacttcgtgaagctgagaactatgctcgtccgcacccacatgcaggacttgaaggacgtcactcgcgagacgcactacgaaaactaccgggctcagtgcatccagagcatgactcgcctggtggtgaaggagcgcaaccgcaacaagctcacccgcgaatccggcacggactttccgatcccggcggtcccaccgggaacggatccggaaaccgaaaagctgatcagagagaaggacgaggagctgcggagaatgcaggaaatgctgcacaagatccagaagcagatgaaggagaactac

SEQ ID NO: 147728 - DNA, 1434 bp, Artificial Sequence
  derived and/or modified sequence
atggacaggtcactcggttggcagggcaactccgtcccggaggatcgcacggaagccggtatcaagcgcttcctggaagataccaccgacgacggagaactttcaaagttcgtgaaagatttctcgggcaacgccagctgccacccacctgaagcaaagacttgggcctcccgcccacaagtgccggaaccgcgccctcaggcccctgacctgtacgacgacgatttggaattccggccgccgagccggccgcagagttcggacaaccaacagtacttttgtgcaccggcccctctgtcgccgtccgcacggccgagaagcccgtggggaaaactggacccgtacgactcatcggaagatgataaggaatacgtgggtttcgcaactctccctaatcaggtccaccggaaaagcgtgaagaagggattcgacttcaccctcatggtggcaggcgaatccggtcttggaaagtcaactctggtgaactcgctgtttctgacggatttgtacagggaccgcaagctgctgggcgcggaggagcggatcatgcagaccgtggagattaccaagcatgctgtcgatatcgaagagaaaggagtgagactgcggctgaccatcgtggatacgccaggctttggtgacgcggttaacaatactgaatgctggaagccagtggccgaatacatcgatcagcagttcgagcagtacttccgggacgagtcaggcctgaatcggaagaacattcaagacaaccgagtgcactgctgcctctacttcatctcaccctttgggcatggactcagaccgctggacgtggagttcatgaaagcattgcatcagagagtcaatatcgtgcccatcctcgcgaaagccgacactctgactcctccggaagtggatcacaaaaagcggaaaattcgggaagaaattgagcacttcggtatcaaaatctaccagttccctgattgcgactctgatgaggacgaggacttcaagctccaagatcaagcgctcaaggaatcgatcccgtttgctgttatcggttcgaacaccgttgtggaagcacgcggccggcgcgtcagaggacggctgtacccatggggcatcgtcgaggtcgagaacccaggacactgcgacttcgtgaagttgcgcactatgctggtgcggacccacatgcaggacctcaaggacgtcaccagggaaactcactacgagaattaccgcgcccagtgcatccaatcaatgacccggctggtcgtgaaagagcggaaccggaacaaactgaccagggagagcgggacggactttcctatccctgccgttccacctggtaccgatccagaaacggaaaaactcattcgggagaaggacgaagagctgcggagaatgcaggaaatgctgcacaagatccaaaagcagatgaaggagaactac

SEQ ID NO: 147729 - DNA, 1434 bp, Artificial Sequence
  derived and/or modified sequence
atggatcggagcctgggatggcaaggtaactcggtccccgaggatagaactgaagcgggaatcaagcgttttctggaagatacgactgacgatggtgaactgtccaaattcgttaaggatttttcgggaaatgcgtcgtgtcatcccccagaagctaagacctgggctagccggccccaggtgccagaaccgcgtccacaagcaccagatctttacgatgacgatcttgagtttagacctccttcccgccctcaatcatccgataatcagcagtacttttgcgcacctgctccactttcaccatccgcccgccctaggtcgccctggggtaaacttgatccatacgacagctccgaggacgataaagagtacgtcggatttgctaccctgccgaaccaggtccatcgaaagtctgtgaagaagggatttgattttaccctcatggtggccggagaatcaggccttgggaagtccaccttggtgaattccctctttttgacggacttgtacagagatagaaaactcctgggtgccgaagaaagaattatgcaaaccgtcgaaattaccaagcacgcagtggatatcgaggaaaaaggagtccgcctgcgtcttactatagtcgacactcctggatttggtgatgcagtcaacaataccgaatgttggaagcccgtcgccgagtacattgaccagcaattcgagcaatactttcgagatgaatcaggtcttaacaggaagaatattcaagataaccgagtgcattgttgcttgtacttcatctccccttttgggcacggacttcgccccctcgatgtggaattcatgaaggcactgcatcagcgggtgaacatcgtgccgatcctcgcaaaggcagatactcttactccacctgaagtcgatcacaaaaagagaaagatacgtgaagagattgagcattttggaatcaagatataccagtttcctgactgcgacagcgacgaggatgaagatttcaagctgcaggatcaggcgcttaaagagtccatacccttcgcagtgattggatcaaacaccgtggtcgaagcaagaggccgtcgggtgagaggtcgcctctatccctggggcattgtggaggtcgaaaaccccggtcattgtgactttgtgaagctcaggactatgttggtgcgaactcacatgcaggatctcaaggatgtgactagagaaacccattatgagaactaccgggcacaatgtatccagtcaatgactagactcgtcgttaaagaaaggaatcggaataagctgacgcgagagagcggcactgatttcccaattcccgcagtgcctcctggaactgatcctgaaactgagaaactcattcgggaaaaggatgaagaacttcgtcggatgcaggaaatgttgcataagatccaaaagcagatgaaagagaactac

SEQ ID NO: 147730 - DNA, 1434 bp, Artificial Sequence
  derived and/or modified sequence
atggatagatctctgggttggcagggcaacagtgtccccgaggaccgtaccgaggcaggtatcaagcgctttcttgaggacaccaccgatgatggcgagctttccaagttcgtcaaggatttttccggcaacgcctcctgtcaccccccggaagctaagacctgggcctctcgcccccaggtgcccgaaccccgaccgcaagcccccgacctgtacgatgacgatcttgagttccgcccgccatcccgtccgcagtcttcggacaaccagcagtatttctgcgcgccggcccccttgtctccctcggcccgcccacgttcgccgtggggaaagttggatccttacgatagctccgaggacgataaggaatacgtcggtttcgcgactcttccgaaccaggtccacaggaaatccgtcaagaagggtttcgatttcaccctgatggtggccggcgaatccggactcggcaagagtacgctggttaacagccttttcctgacggatttgtaccgggaccgcaagctgctgggcgcggaggagcgaatcatgcaaaccgtcgaaataacgaagcatgctgttgatatcgaagagaagggtgtccgtttgaggctgaccatagtggatacaccgggttttggtgacgccgtgaacaataccgagtgttggaagcctgttgccgagtacatagaccagcagtttgaacagtacttccgcgatgaaagtggtctcaaccgaaagaacattcaggacaaccgtgtccactgctgcttgtacttcatcagcccgttcggtcacggtctcaggccccttgatgtagagttcatgaaggctcttcaccagcgcgtgaacatcgtgccgatcctggccaaggccgacactctcactccgccggaagtggaccacaagaagcgcaaaatccgcgaggaaatcgaacacttcggtatcaagatttatcagttcccggattgcgattccgatgaagacgaggactttaagctacaggatcaggcgctcaaagagtctatcccctttgctgttatcggaagcaacaccgtggtggaggctcgtggccggcgagtgcgcggcaggctctacccctggggtatcgtggaggtggagaaccccggccattgcgattttgtcaagctgcgcaccatgctcgtccgtacacatatgcaggacctgaaggacgttacccgcgaaacccattatgaaaactatcgtgcccagtgcattcagtctatgacgcgcttggtggttaaggagagaaaccggaacaagttgacccgggagtctggaacagatttccccatcccagcagtccctcccggtactgaccctgagaccgaaaagctgatccgtgaaaaggacgaggagctccgccgtatgcaagagatgctccataaaatccagaagcagatgaaggagaactat

SEQ ID NO: 147731 - DNA, 1434 bp, Artificial Sequence
  derived and/or modified sequence
atggacagatctctgggatggcaagggaactcagtgcccgaagatagaacggaggccggtatcaagcgcttcctggaggacaccactgatgacggtgaactcagtaagttcgtgaaggatttttctggcaacgcttcctgccacccgcccgaagctaaaacatgggctagccgaccccaggtacccgagcctcggcctcaggccccggatctgtacgacgacgatctggagtttcgacccccctctaggccacagagttccgacaatcagcagtacttctgtgcccccgcccctttgagcccgagtgcgcgcccacgatccccttggggcaagcttgatccgtatgactcttctgaggatgacaaggagtacgtcggcttcgccacgctgccaaaccaggtgcatcgaaaatcagtgaaaaaaggcttcgacttcaccctcatggtggctggggaaagcgggctgggtaaatcaaccctcgtgaattctctgtttctgactgacctttacagggatcgaaagctgctgggggccgaggagcgaatcatgcagactgtggaaattactaagcacgctgtggatattgaagaaaagggagtacggctgaggctcacaatcgtggacacaccgggcttcggcgacgccgtcaacaacactgagtgctggaaacccgtcgcagaatacattgaccagcagtttgaacaatacttcagagacgaaagcgggcttaataggaagaatatccaggataatcgggttcattgttgcctctactttataagtccgtttggccacgggctcagacctctggacgtagaatttatgaaagcactgcaccagcgcgtcaacatcgttccaatactggcaaaggcggatacacttacaccacccgaggttgaccacaagaagcggaagatacgcgaggagattgaacatttcgggattaagatctaccagttcccagactgtgattccgatgaagatgaggactttaaactgcaggaccaggcgctgaaggagtccatccccttcgcagttatagggtcaaataccgttgtggaggcgcgggggcggagagtcagaggaaggctgtatccatggggcattgtggaagtggaaaaccccggccactgcgacttcgtgaagctccggaccatgttggtcaggacccacatgcaggaccttaaggacgtcacccgggagacgcattatgaaaactaccgcgcgcagtgcattcagtccatgacgcggctcgtggtgaaagagagaaacagaaataaattgacccgagagagtggcactgactttccaatacctgccgttccacctgggactgacccagaaaccgagaaactcattagggagaaagatgaggagttgcgcagaatgcaggagatgcttcataaaatccagaagcagatgaaggagaattat

SEQ ID NO: 147732 - DNA, 1434 bp, Artificial Sequence
  derived and/or modified sequence
atggatagaagcctgggatggcagggaaactccgtccctgaagatagaactgaagccggaatcaaacgcttcctcgaggataccacggacgatggcgagctttccaagtttgtgaaggatttttcgggaaacgcaagctgtcatcctcctgaggcaaagacctgggcctcccggcctcaagtgccagaaccgaggcctcaggcaccagatctgtacgatgatgacctggaatttcggccaccttcgaggccacaatcgtcagataaccaacaatacttttgtgctccagcacctctcagcccctcggcaagacctaggagcccctgggggaagctggacccatacgattcctcggaagatgataaggagtacgtggggtttgcaactttgcctaatcaagtccacaggaagtcggtgaagaaaggatttgattttactcttatggtggcaggagagtcgggactcggcaagagcactcttgtgaattcactgttcctgaccgacttgtacagggatcgcaagctgctgggagcggaagaacggattatgcaaaccgtcgaaatcactaaacatgcagtagacattgaggagaagggcgtgcgacttaggctcactatcgtggacaccccaggatttggagacgcggtgaacaacacggagtgttggaaacctgttgccgaatacattgaccagcagttcgaacaatactttcgagatgaatcaggactcaatcgcaagaacatccaagataaccgagtgcactgctgtctttacttcataagcccttttggccatggactgcgccctctcgatgtggaattcatgaaagcactgcatcaaagagtgaatattgtgcccatccttgcaaaggctgatacccttacccctccagaagtggaccataagaagagaaagattagagaggaaattgaacacttcggaattaagatctaccagttccctgattgtgattcggacgaagatgaggatttcaagctgcaggatcaagccctgaaagaatccatccctttcgcggtgataggatcgaataccgtggtcgaagcccggggaagaagagtgcgggggcggctttatccttggggaatagtggaagtggagaacccgggacattgtgattttgtgaaacttcgcaccatgctggtgagaactcacatgcaggatctgaaggatgtgacccgagaaacccactacgaaaactaccgcgcacaatgcatccagtccatgaccagactggtggtgaaggaaaggaaccgcaataagctcacccgtgagagcgggacggatttcccaattccagcagtcccacctggaaccgaccccgaaaccgagaagctgattagagaaaaggatgaggagctgagaagaatgcaagaaatgctccataagattcaaaaacaaatgaaagaaaactac

SEQ ID NO: 147733 - DNA, 1434 bp, Artificial Sequence
  derived and/or modified sequence
atggatagaagcctcggatggcagggaaacagcgttccggaggacagaactgaggcagggatcaagcgattcctggaggacaccactgatgacggagaattgagcaagttcgtcaaggacttttccggtaacgccagctgccacccgcctgaggccaaaacctgggcctcgcgtccccaggtcccagagcctcgcccacaagcgccggacctctacgatgatgatttggagttccggccgccaagccgcccgcaatcgtccgacaaccagcagtacttttgcgcacccgcccccctgtcaccttcggcacgcccaaggtccccgtggggcaagctggacccatacgactctagtgaagatgataaggaatacgtcggatttgccacccttcctaatcaggtccaccggaaaagcgtgaagaaaggattcgatttcactttgatggtggccggagagagcggtcttggcaagtcgacgttggtgaattctcttttccttaccgacctctaccgggaccgcaagttgctcggagcagaagaacgtatcatgcagactgtggaaatcactaagcacgccgtggacattgaggaaaaaggcgtgcgcctgcggctgaccatcgtcgacactccgggcttcggcgatgcggtgaacaacaccgagtgttggaagccggtggcggaatacatcgatcaacaattcgagcaatactttagggatgagagcggtctgaaccgcaaaaacattcaggacaaccgggtgcattgttgcctgtatttcatcagccctttcggacatggtctgcgcccactggacgtggagttcatgaaagcccttcatcagcgagtcaatatagtcccaattctcgctaaggctgacactctcacgcctccggaggtcgaccacaaaaagcggaagatacgggaggaaatcgaacactttggaataaagatctaccagttcccggactgcgattcagatgaggacgaggactttaagctgcaagaccaggccctcaaagaatcaattccgttcgcggtaatcgggtccaacactgttgtggaggcccgcgggagacgggtgcgcggccgcctgtacccctggggaatcgttgaagtggaaaatccgggacactgcgatttcgtgaagctccggaccatgctcgtgcggactcatatgcaagaccttaaggatgtcacccgagaaacccactatgaaaactaccgggcacagtgcattcagagcatgactcggctcgttgtcaaggagagaaatagaaacaaactgacccgcgaatcggggacggacttccctatccctgctgtgccgccgggaaccgatcccgagacggaaaagctgatccgggaaaaagacgaagagcttcggcggatgcaagagatgttgcacaaaatccagaagcaaatgaaggaaaactac

SEQ ID NO: 147734 - DNA, 1434 bp, Artificial Sequence
  derived and/or modified sequence
atggatcggtcgcttgggtggcaaggaaatagcgtgcctgaagatcggactgaggccggtattaagagatttcttgaagatactactgacgacggagaactctcgaaatttgtgaaggatttttcgggaaacgcaagctgtcatcctcccgaagccaagacgtgggcatcacgccctcaagtgcccgagcctagaccacaggcaccagacctttacgacgacgaccttgagtttcgtccaccttcgcgaccacagtcctctgataaccaacagtacttttgcgcaccagcccctctttcaccatcggcaaggcctcggtcgccctggggaaagctggatccttacgactcgtcggaagatgacaaggaatacgtggggtttgcaacccttcccaaccaagtccatcggaaaagcgtcaagaagggattcgatttcacccttatggtggcaggagaatccggacttggaaagtcgacccttgtgaattcgctctttttgactgacctttaccgggataggaagctcctgggagcggaagagagaatcatgcaaaccgttgagatcactaaacacgcagtcgatatcgaagagaagggagtgagactgcgcctcaccattgtcgatacccctggatttggtgacgcagtgaacaataccgaatgctggaaacctgtggcagaatacatcgatcaacaatttgaacaatacttccgcgatgaaagcggtctgaaccgtaagaacattcaggacaatagagtgcactgttgtctttacttcattagtccttttggtcatggacttcggccactcgatgtcgagtttatgaaggcgctgcatcaaagggtcaacattgtgcctatactggcaaaagccgacactctcaccccacctgaagtcgatcacaaaaaacggaagattcgggaggaaattgaacattttggtatcaagatctaccagttccctgactgtgattctgatgaggatgaagatttcaagctccaagaccaggcactgaaggaatccattcccttcgcagtgattggatcaaacacggtggtggaggctcgtgggcgcagagtgcgcggcagactttatccctggggcatcgtggaagtggagaatccgggtcattgcgactttgtgaagctgcggaccatgctggtgcgaacgcatatgcaggacctcaaagacgtgactagggagactcactacgaaaactacagagcccaatgcattcaatcgatgacgcggcttgtggtgaaggaaagaaaccgcaacaaattgaccagggagtcgggtaccgattttccaatcccagcagtgcctcctggaaccgatcctgagactgaaaagctgattcgggaaaaagatgaggaacttcggcggatgcaagagatgctccacaagatacaaaaacaaatgaaagaaaactat

SEQ ID NO: 147735 - DNA, 1434 bp, Artificial Sequence
  derived and/or modified sequence
atggatagatcgctgggatggcaaggaaacagtgttcctgaggaccgcaccgaagcaggaatcaaacggtttctggaggataccactgatgacggtgagttgtcaaagtttgtgaaagacttcagcggaaatgcatcctgccacccccctgaagcaaagacctgggcttcccgtccacaagtgcccgaacctcggcctcaagctccggatctttacgacgacgatctggaatttcggcctccttcacggccccaaagctcggacaaccaacagtacttctgcgcacccgcaccactgtcaccatccgccagaccaaggagcccctggggtaagctcgacccatacgattcctctgaggatgataaagaatacgtggggtttgccacccttccaaaccaggtccatcgcaagtcggtgaagaaaggctttgatttcaccctcatggtggcaggcgagtcgggactgggtaagtctactctcgtgaatagcctgtttctgactgatctgtacagggatcgtaagctcctcggagcggaagagcgaattatgcagactgtggaaattaccaagcatgcagtcgatattgaagaaaagggtgtgagactgaggctgacgattgtggatactcccggtttcggagatgcggtgaataacaccgaatgttggaagccagtggcggaatacatagatcagcaatttgagcagtatttcagggatgaaagcgggcttaatagaaagaacatccaagacaacagagttcactgttgtctttacttcatcagtccttttggtcatgggctgcgtcctctggatgtcgagtttatgaaagcgctccatcagagagtcaatatagttcccattcttgcaaaggcagacacgctcaccccaccggaggtggatcataagaagagaaagatccgggaggaaatcgagcattttggtatcaagatctaccagtttccagactgtgattccgatgaggacgaggacttcaagctgcaagatcaagctcttaaggaaagcataccgttcgccgtcattggaagtaatacggtcgtggaagcacgcggcagacgagtgcgcggccgcctgtacccttggggcattgtggaagtagagaatccaggacattgcgattttgtgaaactccgcaccatgctcgtcagaacgcatatgcaagatcttaaagacgtgactagggaaactcactacgaaaactaccgcgcccaatgtatacagtctatgactcggctcgtggttaaggagcggaaccggaacaaacttactagagaatcgggtaccgacttccctattcctgccgtgcctccgggaaccgaccccgaaactgaaaaacttattagggaaaaagatgaagaacttaggcgaatgcaggaaatgctccacaagattcagaagcaaatgaaggagaactat

SEQ ID NO: 147736 - DNA, 1434 bp, Artificial Sequence
  derived and/or modified sequence
atggatcgctctttgggctggcagggcaactctgtccctgaagacagaacagaggccggcataaagagattcctggaagataccactgacgatggagagctgagtaagtttgtaaaggactttagcggaaacgcatcatgtcaccctccggaggctaaaacctgggcaagcaggcctcaggtgcctgagccccgcccacaagcacccgatctctatgacgacgaccttgagtttagaccaccatctcgcccgcagagttccgacaaccagcagtatttttgcgctccagcacccctctccccaagcgcacgccctcgctccccatggggaaaactggacccctatgatagctctgaagatgacaaggaatatgttggcttcgccacactcccaaatcaagtgcataggaaatctgtcaagaagggcttcgacttcaccctgatggtagcaggagagagcggcctgggcaagtctacgctcgtgaattctttgttcctgaccgacctctatagggaccgcaaactcttgggtgctgaagagcgcatcatgcagacagtagaaatcactaagcacgctgtcgatatcgaagaaaagggagtaagacttagactgacaattgtcgacacccccggcttcggagatgctgtgaacaatactgaatgttggaagcctgtagctgaatatattgaccagcaatttgagcagtatttcagagacgagtcaggactgaaccgcaagaacatacaggataaccgcgttcactgttgtctctacttcatttcacctttcggccacggactcaggcctttggatgtggagttcatgaaggctctccaccagcgcgtcaatattgtgccgatcctcgccaaggcggacaccctcaccccacccgaagtcgaccataaaaagaggaagatcagggaggagatcgagcattttggcattaagatctatcagttccctgactgtgactcagacgaggatgaggacttcaagttgcaagatcaggcgctcaaggagtccatcccatttgcagttatcggaagcaacactgtagttgaagccaggggcagacgcgtccgcggcaggttgtatccatggggtatagtggaggtcgagaatccgggccattgcgacttcgtgaaacttagaacaatgcttgttaggacccatatgcaagacttgaaggacgtcaccagggaaactcactacgaaaattatagggcccaatgcatccaatccatgactcgcctggttgtcaaggagcgcaaccgcaacaaactgactagagaatctggcacagacttcccaattcccgccgttccgcctggaacagatccagagacagagaagctgatcagggagaaggacgaagagcttagaaggatgcaggagatgctgcacaaaattcagaagcagatgaaggagaactac

SEQ ID NO: 147737 - DNA, 1434 bp, Artificial Sequence
  derived and/or modified sequence
atggatagaagcctcggctggcaaggtaactccgtccctgaggacaggacagaagcaggtatcaaacggtttctcgaagacacaactgacgatggagaattaagcaagttcgtcaaggactttagcggcaatgcctcttgccacccgcctgaggctaagacatgggcatcacggccacaggtgcctgaaccaaggccccaggcccctgacctctatgatgatgacctggagttccggccacctagtaggccacaatcctctgacaaccaacagtacttttgcgcaccagcacctcttagtccaagtgccaggccaaggagcccatgggggaaattagacccttacgacagttctgaagatgataaagagtatgtgggtttcgcaacattgccgaatcaggtgcatcggaagagtgttaagaaaggatttgacttcacattaatggtggcaggggagagcggcctgggaaaaagtactttggttaattcactgttccttactgacctgtatagggatagaaagctgctgggagccgaggagagaatcatgcagaccgtggaaatcacgaaacacgccgttgacatcgaagagaagggcgtgagacttcgcctcacaattgttgatacacctggcttcggcgacgccgtgaacaataccgagtgctggaagcctgtagcagagtacatcgaccaacagttcgaacagtactttcgggatgaatccggcctcaaccggaagaacatacaggacaatagggtgcactgctgcttgtatttcatctccccttttggtcacggtctgcgtcctctggacgttgaattcatgaaggctcttcaccagcgggtgaatatagtgccgattttagctaaggctgatacgctgacgccgcctgaagttgatcacaaaaaaaggaagatccgggaagagattgagcactttgggataaagatctatcagtttcctgattgtgactctgacgaggatgaggacttcaaactgcaggatcaagcactgaaagagtccattccgttcgctgtgattggctcaaatacggtagtggaggctcggggccgtcgagtgcgcggtaggctgtatccttggggaattgttgaagtggaaaaccccgggcattgtgacttcgttaaactgaggaccatgttagtgcgcactcacatgcaagaccttaaagacgtcactcgtgaaacccactacgagaactacagggctcagtgcatacagagtatgacccggctcgtcgtgaaggaacggaaccgcaacaaattgaccagggaaagcggcacagattttcctataccggccgtcccacctggcaccgaccccgaaaccgaaaaacttatcagggagaaagatgaagagctcagaaggatgcaagaaatgctccataaaatccagaagcagatgaaggagaactat

SEQ ID NO: 147738 - DNA, 1434 bp, Artificial Sequence
  derived and/or modified sequence
atggatcgtagtcttggatggcaaggaaatagtgttccagaagatagaactgaagcagggataaaacgtttccttgaagacacaacagatgatggtgaattatctaaatttgttaaagacttttccggtaatgcatcatgtcatcctccagaagctaaaacttgggcctctagaccacaagttcctgaaccaagaccacaagctccagatctttatgatgatgacttagaatttagaccaccatcacgaccacaatcaagtgataatcaacagtatttttgtgcacctgcaccactttcaccaagtgctagacctcgaagtccatggggtaaacttgatccatatgattctagtgaggatgataaagaatatgttggattcgctactttaccaaatcaagtacataggaaaagtgttaaaaaaggatttgatttcacattaatggttgcaggagaatcaggacttggtaagagtactcttgttaatagtttatttcttactgatctttatagagatagaaaattgttaggtgctgaagaaagaattatgcaaacagttgaaataactaaacatgctgttgatattgaagaaaagggtgttagattaagattgacaattgttgatacaccaggatttggagatgcagttaataatactgaatgttggaagcctgttgcagaatatatagatcaacaattcgaacaatattttagagacgaatcaggtttaaacaggaaaaatattcaagataatagagttcattgttgtttatattttatttcaccttttggtcatggacttagaccattagatgttgaatttatgaaggctttacatcaacgtgttaatattgttccaattcttgctaaagctgatactttaactccacctgaagtggatcataagaagagaaaaattagagaagaaatagaacatttcggaattaaaatttatcaatttccagattgtgattcagatgaagatgaagatttcaaattgcaagatcaagcattaaaggaatctattccatttgcagttattggttcaaatactgttgttgaagctagagggagaagagttcgtggaagattgtatccatggggtattgtcgaagtagaaaatccaggacattgcgattttgttaaacttagaactatgttagttagaactcatatgcaagatttaaaagatgttacacgtgaaacacattacgaaaattatagagcacaatgtattcaatctatgactagattagtggtaaaagaaagaaatagaaataaattaacaagagaatcaggaacagattttccaattccagctgttccaccaggaacagatccagagactgaaaagttaattcgtgaaaaagatgaagaacttagaagaatgcaagaaatgttacataaaattcaaaaacagatgaaagaaaattac

SEQ ID NO: 147739 - DNA, 1434 bp, Artificial Sequence
  derived and/or modified sequence
atggaccggtcactgggttggcaaggaaactcggtgccagaagatagaactgaagcagggattaagaggttcttggaagataccaccgacgacggtgaactgtcgaaatttgtgaaggactttagcggaaatgcaagctgtcaccctccagaggcgaaaacgtgggcaagcagacctcaagtgccagaaccccgcccccaagcgcctgacctctacgacgacgatctggaattccgccctccatcccgcccgcagtcatccgataatcaacagtacttttgtgcgccggcgccactttccccctcagcacgtccgcgctcgccctggggtaagctggatccatacgattcgagcgaagatgacaaggaatacgtgggttttgcgacccttcccaaccaggtccaccgcaagagcgtgaagaaagggttcgatttcactctgatggtggcaggcgagtcgggactcgggaaatcgacccttgtgaacagtcttttcctcaccgatctgtacagggatcgcaagctcttgggtgcggaggagaggattatgcaaaccgtcgaaattaccaagcatgcagtcgatattgaagaaaagggagtgaggctgcgacttaccatcgtggatacccctggttttggagatgcggtgaacaacactgaatgctggaagccagtcgctgaatacatagatcagcagtttgagcaatacttccgtgacgaatcagggctgaacaggaagaatatacaggacaacagagtgcactgttgtctctacttcatctccccatttgggcatggactccggccgctggacgtcgaattcatgaaggctcttcaccaacgggtcaacatcgtccctatactggccaaagccgatactctgacccctcctgaagtcgatcacaaaaagcggaagatccgagaggagattgagcatttcggcattaagatttatcagttccccgattgtgatagcgacgaggatgaggactttaagctgcaagatcaggctcttaaggaatccatcccatttgcagtgataggctccaacaccgtggttgaggcccgcggaaggcgagttagaggacgtctctacccatggggtatcgtcgaagtggagaatccgggccactgtgactttgtgaaactgcgcactatgctggtcagaacccatatgcaagacctgaaggacgtcactcgcgaaacccactacgagaactatagggcacagtgtattcaaagcatgacgcggcttgtggtgaaggagcggaatcgtaataagctgacccgggaaagcggaactgattttcctataccagcagtgcccccaggaaccgacccggaaaccgaaaagctgattagagaaaaagacgaagaactccggaggatgcaagaaatgctccacaagattcagaaacaaatgaaggaaaactac

SEQ ID NO: 147740 - DNA, 1434 bp, Artificial Sequence
  derived and/or modified sequence
atggatcgaagcctaggttggcagggcaattccgttccagaagataggaccgaagccggtattaaacggttcctggaggatacaactgacgacggggagttgtcaaaattcgtgaaagatttctctgggaacgctagttgccaccccccagaagctaaaacctgggctagccggccccaggttcctgagcctcgaccccaggcgccagatttgtatgacgatgatctcgaattccggccaccatcacgtccacagtccagcgataatcagcaatacttctgtgccccggccccactttctccatcagcacgcccccgttcaccttggggtaagcttgacccttacgacagctctgaggatgacaaggagtacgtcggattcgctacactgcccaatcaggtccaccgaaaaagcgttaagaaagggtttgatttcaccctgatggttgcgggtgagtctggcctcggcaagtcaaccttggttaactccctgttcctcactgacctataccgggaccgcaaactgcttggggccgaggagcgcattatgcagactgtcgagataaccaagcacgcagttgacatcgaggaaaagggggtccgtctgcgactgacaattgtggatactcccggattcggagatgccgtgaataacaccgagtgttggaagcctgttgcggaatatatcgatcagcagttcgaacaatattttagggacgaaagtggcctcaataggaaaaacatacaagataatcgcgttcattgctgcctctattttatatccccattcgggcacggtctccgcccattggatgttgaatttatgaaggcactccaccagagagtcaatatcgtgcctatcttggctaaagccgatacacttacaccacctgaggtcgatcacaagaagcgcaagattagggaggagatcgaacacttcggcattaaaatttaccaattccctgattgcgatagtgacgaggacgaagactttaagcttcaggaccaggccctgaaagagtccatacctttcgcagtgatagggtccaacactgtcgtggaggcacgcggccggcgcgtacgaggacgcctctacccctggggcatagtcgaagtggagaatcccggccactgtgatttcgtcaaactgcggacaatgttggtccggacccacatgcaggacctgaaggacgtgactcgcgagacacactacgagaattatcgcgcgcaatgcatacagtctatgacccgccttgtggttaaggagcgtaaccggaacaaattgacccgggagtcaggcacagactttcccattccggcagtcccacccggaactgatcccgagactgagaaactcatacgcgaaaaggatgaagagctgcgccgaatgcaggagatgcttcacaagatccaaaagcagatgaaagagaactat

SEQ ID NO: 147741 - DNA, 1434 bp, Artificial Sequence
  derived and/or modified sequence
atggaccggagtctggggtggcagggcaacagtgttcctgaagatcggaccgaggctgggataaaacgattcctagaagacacaacagacgatggcgaactgtcaaagtttgtgaaggatttttcgggaaatgcctcctgccaccccccagaggccaaaacctgggcaagccggccacaagtgccagagccacgccctcaggcgccagacctgtacgacgacgacctggagttccgaccaccttccagaccccaatcttctgacaaccaacagtatttttgcgcccccgctcccctgtcaccctcggccagaccaagatcaccttggggcaaacttgacccatacgatagttctgaagacgataaggaatatgtagggtttgcaaccctgccaaaccaggtgcatcggaagagcgtgaaaaaggggttcgattttactcttatggtggcaggagagagcgggctgggcaagtccaccctggtgaactcactgttccttaccgatctctaccgagaccgtaaactgcttggtgccgaagaacgcataatgcagaccgttgagataacaaagcatgccgttgatattgaagagaaaggcgttaggctcaggttgacaattgtggatactcccggattcggcgatgcggttaataacacagagtgctggaagcctgtggctgaatatatcgatcaacagtttgaacagtacttccgagacgaatcaggcctgaatcgcaagaacattcaggacaacagagtccactgttgtctctacttcatctcccctttcggtcacggcctcagaccacttgacgtagagttcatgaaagccttgcaccaaagagtgaacattgtgcccattcttgctaaagccgacactcttacgcctcccgaggtggatcacaaaaaacgtaagatcagagaggaaatcgagcacttcggcattaaaatttatcaattcccggactgcgattccgacgaagacgaagatttcaagctgcaggaccaggccttaaaagaatctatccctttcgcagtaatcggctccaatacggtcgttgaagctcgcgggcgaagggtgcgtggtaggctctacccatggggaatcgtggaggttgaaaatccaggtcactgcgactttgtaaagctgcggactatgctggtgcgtacccatatgcaggaccttaaggatgttactagggagacacattacgagaactacagggcacagtgtatccagagcatgactaggctggtggttaaggagagaaacagaaataagttaacccgcgagtccgggacggacttcccaattcccgcagtgccgcccgggacggaccccgaaacggagaaactgatcagggagaaggatgaggaattgagacgaatgcaggagatgctgcataaaatccagaagcaaatgaaggagaactat

SEQ ID NO: 147742 - DNA, 1434 bp, Artificial Sequence
  derived and/or modified sequence
atggaccgctctctcggttggcagggaaacagtgtgcctgaggacaggaccgaggctggcataaagcgctttctggaggatacaaccgatgatggtgaactgtccaagttcgtgaaggacttttcaggaaatgcctcttgtcatccgccggaggccaaaacatgggccagtagaccgcaggttccagaaccaaggccacaagctccagacctttatgatgatgacctggagttccgccccccttcacgcccccagagcagcgacaaccagcagtatttttgtgccccggcccctctgtcgccgagtgccagacccagatccccctggggaaagctggacccttacgactcttcagaagacgacaaggagtatgtgggttttgctacgctgccaaatcaggtgcaccggaaatccgtgaagaaaggttttgatttcaccttaatggttgcgggggagtctgggctaggcaagagcacattggtgaacagcttattcctgacagatctgtatcgtgataggaagttgctgggtgccgaagaaaggatcatgcagaccgttgagataactaaacacgccgtagacatcgaggagaaaggggtccgcctgaggttaacgatagtggacaccccgggattcggtgatgctgtgaacaataccgagtgttggaagcccgttgcagagtatatagatcagcagttcgagcagtactttagggacgagagcggtctcaaccgcaaaaatatccaggataatcgggtccactgttgcctgtactttatctcgcccttcggccacggcttgagaccacttgacgtggaattcatgaaggctctgcaccagagggttaatatagttcccatactggccaaggcagacaccctgacacctcccgaagtggaccacaagaagaggaagattcgcgaggaaattgaacacttcggtattaaaatctaccaattccctgactgtgattcagatgaggatgaggattttaagctgcaggaccaggccttgaaggaaagcattccgtttgccgtcatcggaagcaataccgtcgtggaggccagagggagacgggtcagaggtcgtctatatccttggggtatcgtggaagttgagaaccctgggcactgtgatttcgtgaagctaaggacaatgctggtacggacccacatgcaagacctgaaggacgttactcgcgaaacccactacgaaaattatagagcccagtgcattcagtctatgacgcgactggtggtaaaagaacggaatcgaaacaagctaacacgagaaagtggcactgatttcccaattccagctgtgccccctggaacagacccagaaaccgagaagctcatccgcgagaaagacgaagagttaaggaggatgcaggaaatgttacataaaatccagaagcagatgaaagaaaattac

SEQ ID NO: 147743 - DNA, 1434 bp, Artificial Sequence
  derived and/or modified sequence
atggataggtcactgggatggcaaggcaactcagtgccagaagatcggaccgaagcgggaatcaagcggtttttggaggacactaccgacgatggagaactgtcgaaattcgtgaaagacttctcgggcaatgcaagctgtcacccgcccgaagcaaagacttgggcgtcccggccgcaggtgccggaaccgaggccgcaagctccggacctgtacgatgacgatctggaatttaggccgccttccagaccgcaaagttcggacaaccaacaatacttttgcgcccctgccccgctctccccgtccgctagacctagatccccgtgggggaagctggatccatatgactcatccgaggatgataaggagtacgtgggtttcgccacgcttccaaaccaggtgcatcggaaatctgtcaaaaaagggttcgacttcaccctgatggtggctggagagagcggactgggaaagagcactttggtgaattcactcttcctcaccgacctttacagagataggaaactgctcggcgcagaggaacgaatcatgcagactgtcgagatcaccaaacatgcagtggacatagaagaaaagggcgtgcgcctccggctgaccatcgtcgatacgccgggattcggcgacgcggtcaataacaccgaatgttggaagccggtggctgaatacatcgaccagcaattcgaacaatacttcagggacgaatcgggtcttaaccgcaagaatatccaggacaaccgagtccactgctgcctgtacttcatctcgcccttcggtcatggactccgtccattggacgtcgagtttatgaaggcgctccaccaaagagtgaacatcgttccaattctcgcaaaagccgatacgttgacccctccagaggtagaccataagaagcgcaagatccgcgaggaaatcgagcacttcggaatcaagatttaccaatttcctgactgcgacagcgacgaagatgaggacttcaaacttcaggaccaggcactcaaggaatcgatcccatttgcggtgatcggttcgaatactgttgtcgaagcgagaggacggcgcgtccgtgggagactctatccttggggaatcgtggaagtcgaaaatccggggcattgcgatttcgtgaagctccgcactatgctggtgaggacccacatgcaagacctgaaagatgtcactcgagaaacccactacgaaaactaccgggcgcagtgcatccaatctatgactcggctggtggtgaaggagagaaacagaaacaagctgactcgggagtctggaaccgatttcccaatcccggctgtaccgccgggcactgaccctgagactgagaaactgatccgtgaaaaggatgaggagctgcgcagaatgcaggagatgctgcacaaaattcagaagcagatgaaggaaaactac

SEQ ID NO: 147744 - DNA, 1434 bp, Artificial Sequence
  derived and/or modified sequence
atggaccggtcccttggttggcagggtaacagtgttccagaagaccggacggaggcagggattaagagatttctcgaggacactacagatgacggagaactgtctaaattcgtcaaggacttcagcgggaatgcctcgtgccacccacccgaggcgaagacatgggcgtctagaccccaggtgcccgagccaagaccacaggccccagacctgtacgacgatgacctggagttccgacccccatctcgtccacagtcatcagacaatcagcagtacttttgtgctcccgcccctcttagcccctctgccagacctcggtctccatggggcaaattagatccctacgacagctctgaagacgacaaagagtatgttggatttgccacgctccctaatcaagtgcacagaaaaagcgtgaaaaagggtttcgattttaccttaatggttgctggcgaaagtgggctaggaaaaagcacattggtcaactcgctgttcctgactgacttgtatcgtgacagaaaacttctcggggccgaggaacggatcatgcagactgtggagatcactaagcatgcagtggacattgaagagaagggcgtacggctgagattgactattgtggacacccctggctttggtgacgcagttaacaatacagagtgctggaagcccgtcgccgagtatatagaccagcagttcgagcagtacttccgggacgagtcaggactgaaccgcaagaatatccaggacaatagagtccactgctgtctctactttatcagccctttcgggcacgggctgcggcctctcgatgttgagttcatgaaagccttgcaccagagggtaaacattgtaccaatcctggcaaaggcggacaccctcacccccccggaggtggaccacaaaaaaaggaagattcgtgaggagattgagcattttggtattaagatttatcagttccctgattgtgacagcgacgaggacgaggacttcaagctgcaagatcaagcactgaaggaatcaattcccttcgcagtgatcggcagtaataccgttgtggaagcacgtggccgtcgagttcgagggaggttgtacccttggggtatcgtcgaggtcgagaatcctggccactgtgatttcgtgaagcttcgcaccatgctggtgaggacccacatgcaggacctcaaggacgtgacaagggagacacactatgagaattatagggcacagtgtatccagtctatgaccaggcttgtggtcaaggaaagaaacaggaacaaactgaccagggagtctggcaccgatttccctatcccagctgtgccccctgggactgacccagagacggagaagttgataagggagaaagacgaagagctcagaaggatgcaggagatgctgcataagatccagaaacagatgaaagagaattac

SEQ ID NO: 147745 - DNA, 1434 bp, Artificial Sequence
  derived and/or modified sequence
atggaccgcagtctggggtggcagggcaactccgtgcccgaggacaggactgaggcaggcattaagaggtttcttgaagatacgacagatgatggtgaactgtcaaaattcgtgaaggacttcagcggaaacgccagctgccatcccccagaagcaaagacctgggctagtcggcctcaggtgcccgagcctagacctcaggcaccagatctctacgacgatgacctggaattcaggcccccttctcgaccccagagcagcgataaccaacaatacttctgtgcccccgctcctctatctccttcagctcgcccccgttctccttggggtaaattggatccatacgactcaagtgaagatgacaaggagtatgtgggattcgcaactctcccaaatcaggtccaccggaagtctgtgaagaagggatttgacttcaccttgatggtcgcaggcgagagcgggcttgggaaatcgaccctcgtgaattcactttttctgaccgacttgtatcgggaccgtaagcttcttggtgctgaggaacggatcatgcagacggtcgagatcacaaagcacgccgtcgatattgaggagaaaggcgtccgccttagattaactatcgtggacacacctgggtttggcgacgctgtgaacaatacagagtgttggaaaccagtggccgagtacatcgaccagcagtttgaacagtatttccgggatgagtcaggcctgaatcgcaaaaacattcaggacaatcgtgtccactgttgcctgtactttattagccccttcggccatggcctgagaccccttgacgtggagtttatgaaggcactccaccagcgggtgaacattgtaccaatcttggccaaggcagataccctcacaccgcccgaggtcgaccacaagaaacgtaaaattcgagaggaaatcgagcattttggtataaaaatataccagttccccgactgcgacagcgatgaagatgaggatttcaaactgcaggaccaggccctgaaggagagcataccatttgccgttataggcagtaacacagtggtcgaggcgcgcggacggcgagtacgcggcagattgtacccctggggaattgtggaggtcgagaatcccggacactgcgatttcgtgaagctcagaaccatgctcgtccgaacacatatgcaggacctaaaggatgtaacgcgggagactcactacgaaaactaccgcgctcagtgcattcagtccatgacccgactggtggtaaaggaacgaaatcgcaacaaactgacacgtgagagcggcaccgattttccaattcctgcagttccaccgggtacggaccctgaaactgaaaagcttatccgggaaaaagacgaggagcttcgccgaatgcaagagatgctccacaaaatccagaagcagatgaaggagaattac

SEQ ID NO: 147746 - DNA, 1434 bp, Artificial Sequence
  derived and/or modified sequence
atggacaggtctttgggatggcaagggaactccgtgccggaggacaggaccgaagctggaatcaagcgctttctggaagataccaccgacgatggcgaactttccaaattcgttaaggacttctccggaaacgcatcctgtcatccgccagaagccaagacctgggcgtcccgcccgcaggtccctgaaccgcgcccacaggccccagacctgtacgacgacgatctcgaattcaggccaccgagtcggccgcagagctcagataatcagcagtacttctgcgccccggctccgctgtccccttcagcacgtccccgctcaccctggggaaagctggatccgtacgacagctcagaggacgataaggagtacgtgggattcgcgactctgccgaaccaggtccatagaaaatcagtcaagaagggattcgacttcactctgatggtggcgggagagtcgggcttgggaaaatcaaccctcgtgaactccttgttcctcaccgacctgtacagagatcggaagctgctcggagccgaagaaagaatcatgcaaaccgtggagatcaccaagcacgcggtcgacatcgaggaaaaaggagtgcgcctgcgcttgactatcgtggatacccccggcttcggggatgccgtgaacaacaccgaatgttggaaacctgtcgcggagtatatcgatcagcagttcgaacagtactttcgggacgaatccggattgaacaggaagaatattcaggataatcgggtgcactgttgcctctacttcatctccccatttggacacggactccgaccgctggatgtggaattcatgaaagccctgcaccagcgcgtgaacatcgtcccgatcctggcgaaggccgacaccctgaccccacctgaagtcgatcacaagaagcggaagatccgggaagaaatcgaacatttcggtatcaagatctaccagttcccggactgtgattcagatgaggacgaggacttcaagctgcaggatcaagcgctgaaggaaagcatcccgttcgcagtgatcggatcgaatactgtggttgaggcgagagggcggcgagtccgcggacggttgtacccgtggggaatcgtggaggtggaaaacccggggcactgcgactttgtcaagctccggacgatgctggtgcgcactcacatgcaggacctgaaggacgtgacgagagagactcattacgagaactaccgcgctcagtgcatccaatccatgaccagactcgtggtgaaggaacgtaatagaaacaagctgactagagaatcgggcaccgacttcccgatcccggccgtgcctccgggaactgacccggaaacggagaagctcattagagaaaaagatgaggaactccgacggatgcaggagatgctgcataagatccaaaagcagatgaaagagaactac

SEQ ID NO: 147747 - DNA, 1434 bp, Artificial Sequence
  derived and/or modified sequence
atggaccggtccctggggtggcagggaaattcagttcctgaggacagaaccgaggctggcatcaaacgcttcctggaagacactactgatgatggggagctgtcaaaattcgtcaaggatttttctggaaatgccagctgtcaccccccagaggctaaaacgtgggccagtagaccccaggttcctgagccacgaccgcaggcacccgacctgtacgacgatgacctggagtttagaccaccgtccagacctcaaagttctgataaccagcagtacttctgcgcaccagcaccccttagtcctagtgccaggcccagatccccatggggaaagttggacccgtacgacagcagtgaggacgacaaagagtatgtgggcttcgcaaccctcccgaatcaagtccaccgaaagtcagtcaagaagggcttcgactttactctgatggtggcaggcgagtcagggctggggaagtccacactggtgaattctctgtttctgacagacctttacagggataggaagctgctgggggctgaagaacgcattatgcagaccgtggagataaccaagcacgctgttgatatagaggagaaaggagtgcgcttgcggctcacgattgtggacacacctggctttggggatgccgtcaacaacacggagtgttggaagcctgtcgccgagtacattgatcagcaatttgagcaatactttagagatgagtccggactcaatcgaaaaaacattcaggataaccgggtgcactgctgcctgtactttatcagcccatttggtcacgggctgagaccacttgacgtagagttcatgaaggcgctgcatcaacgagtaaatattgttcctattcttgccaaggccgacacgctgactccaccagaagtagaccacaaaaagagaaagatccgcgaagaaattgagcacttcggaattaaaatctaccagttcccggattgtgatagcgacgaggacgaggacttcaaactccaggaccaggccttgaaagagtctataccatttgccgttattggttccaatacggtcgtcgaagctagaggtcggcgcgtcagagggcggctgtatccctggggaattgtggaggtcgagaacccaggccactgcgattttgtgaaactgcgaaccatgctggtgaggacccacatgcaggatctgaaagacgtcacacgcgagacacattacgagaactatcgcgctcagtgcatccagtctatgacccggcttgttgttaaggagagaaatagaaataagctcacccgagagtccggcaccgacttccccatacctgctgtccctcccggcactgaccctgagaccgagaaactgataagagagaaggacgaggaactgcgcagaatgcaggagatgctgcacaagatccagaaacagatgaaggagaactat

SEQ ID NO: 147748 - DNA, 1434 bp, Artificial Sequence
  derived and/or modified sequence
atggacaggtctctaggctggcagggcaactccgtccccgaagatcgaaccgaggccggtatcaagcgcttcttggaagacaccaccgacgatggcgagctgtcaaaatttgtcaaagacttttcaggcaatgctagttgtcacccaccagaagccaagacctgggcttccagaccccaagtacccgaacccaggccgcaggctcccgatctgtatgatgatgatctggaattcaggcctccatcccgcccacagagctctgataaccagcagtacttttgcgcccctgcacctctgagcccctcagcaaggcccagaagcccttggggtaagttggacccttatgattcttcagaggatgataaagaatacgtagggttcgcgacactgcctaatcaggtgcatcggaaatctgtgaaaaaggggttcgactttacactgatggtcgctggagaatccgggctcggaaagtcaacactggtgaactctctgttccttacagacctgtacagggatcgcaaactgctcggggccgaagagagaatcatgcagaccgtggaaatcacgaagcacgctgtggacattgaggaaaagggggtgagactgcgcttaacgattgtggacaccccgggattcggcgacgcagtcaataacaccgagtgctggaaaccagttgcagagtatattgaccaacagttcgaacagtatttcagggacgagtcgggcctcaacaggaaaaatatacaggacaaccgtgtgcattgctgcctgtacttcatatcaccattcggccatggtctcagacccctagatgtagaattcatgaaggccctacaccagagggtcaacattgtgcctattttggctaaggccgacaccttaacccctcccgaggtggatcataaaaagcgaaagatccgtgaggaaattgaacacttcggaatcaagatttaccagtttccagactgcgattcggacgaggacgaagactttaagctgcaggaccaggccttgaaggagtcaattccttttgccgtcataggatctaatacggtggtggaagccaggggcagacgagtcagaggtagactgtacccctggggaatcgtagaggtggaaaacccaggacactgcgatttcgtgaaactacgaaccatgcttgtaagaacccacatgcaagacttgaaagacgtaacccgcgaaactcattacgaaaactatcgggcgcagtgtattcagagcatgaccaggctggtggtgaaagagaggaaccgaaataagctcacccgagaaagtggcacagatttcccaatccccgcagttcctcctggaacagaccctgagacagagaaactaattagagagaaagacgaggagctccgcagaatgcaagagatgctacacaagatacagaagcagatgaaagaaaactat

SEQ ID NO: 147749 - DNA, 1434 bp, Artificial Sequence
  derived and/or modified sequence
atggaccgcagccttggctggcagggaaacagcgtgccggaagatcgtaccgaggctggaatcaaacgctttctcgaggataccactgatgacggagaactgagcaagttcgtcaaggacttctcgggaaatgcctcctgccatcctccagaagcaaagacgtgggcctccagaccgcaagtgccagagcctcgcccgcaggcgcctgatctgtacgacgacgacctggaattccggcccccatcgcggccgcagtcgtcagataaccagcagtacttttgcgccccggcgcctctgtctccgtcggcccgccctcggagtccctggggtaagctcgacccttacgattcgtcggaggacgacaaagagtacgtgggttttgccacgctgccgaaccaagtccacaggaagtctgtgaagaaagggtttgatttcacccttatggtggccggcgaatccggtttgggaaaaagcaccctcgtcaacagcctcttcctcaccgatctctacagagatagaaaactgctgggagcggaggaaagaatcatgcagactgtcgaaatcactaaacacgccgttgacatcgaagagaagggtgtccggttgcgcctgactattgtcgatactcctgggttcggcgacgctgtgaataacaccgagtgctggaagcccgtcgcggaatacatcgaccagcaattcgagcagtactttcgggacgagtcggggctcaaccgcaagaacatccaggacaaccgcgtgcactgctgcctgtacttcatctctcctttcggtcatgggctcagacctcttgatgtggaattcatgaaggcccttcatcaacgagtgaatatcgtgccaattcttgccaaggcagatacgttgacccctcccgaagtggatcacaagaagcggaaaatccgcgaagaaatcgagcatttcgggataaagatctaccagttcccggactgtgattcggatgaggacgaggactttaaacttcaagaccaagcattgaaggaatcaatcccattcgcggtgatcggatcaaatactgtggtggaggcgcgcgggagacgggtgcgcggaaggctgtacccgtggggaatcgtggaggtcgaaaatccggggcactgcgacttcgtgaaactgcgcaccatgctggtaagaacccacatgcaggaccttaaggatgtcactcgggagacgcactatgaaaactacagagcccagtgcatccagtcgatgactcggctcgtggttaaagaacgcaaccggaataagctgactcgcgaatccggaaccgatttcccaatccccgctgtcccccctggaaccgacccggagactgaaaagctgatccgcgagaaagacgaggagttgcggcgcatgcaggagatgctgcacaagatccagaagcagatgaaggagaactac

SEQ ID NO: 147750 - DNA, 1434 bp, Artificial Sequence
  derived and/or modified sequence
atggacagaagcttggggtggcaaggcaatagcgtccctgaagataggacagaggccgggatcaagcggtttctggaagacactactgatgacggcgagctgagcaaattcgtgaaagatttctcaggcaatgcgtcctgccaccctcccgaggccaagacatgggcctcgagacctcaggttccagagccacggccacaggccccagacttgtatgacgacgatctggaattccgacccccgtcccgtcctcagtcctccgacaaccagcagtacttttgtgcacccgctcctctgtctccttccgctaggccaaggagcccatggggaaagctcgatccatatgattctagcgaagacgataaagaatatgtgggctttgctacacttcccaatcaagttcacaggaagtccgtgaagaaggggttcgattttacactcatggtggcaggggagtcaggcctgggcaaatcgacactggttaacagcctcttcttgaccgatctgtaccgggacaggaagctcctgggagccgaggaaagaataatgcaaaccgtggaaattacgaagcacgccgtggacattgaggagaaaggagttcgactgcgcctcaccattgtcgacacccccgggttcggtgatgccgtcaacaataccgaatgttggaaacctgtagctgaatatatcgatcagcagtttgagcagtactttagagacgagagcggtctgaacaggaaaaacatccaagataatcgggtgcactgctgcctgtacttcatttcacccttcggccacgggcttaggcccctcgatgtggaatttatgaaggctttacaccagcgcgttaatatcgtcccgattttagccaaagctgatactctgacaccacctgaggtcgatcataagaagagaaaaattagggaggagatcgagcattttggtattaaaatatatcagttccctgactgcgattcagatgaagacgaagactttaaacttcaggaccaggccctgaaggaatctattccctttgccgtgatcggctccaatacagtggtcgaggctaggggaaggagagtgcggggacggctttacccgtggggcatcgttgaggtcgagaaccccggacactgcgattttgtgaaactaaggacgatgctggtgagaacacacatgcaggacttgaaagacgtgacgagagagacacactatgagaattatcgggcacagtgcatacaatccatgactagacttgtggtgaaggaacgcaaccgaaataaactgaccagggaatccgggactgattttccaattccagctgtaccccccggcactgacccagagacagagaaactcattagggagaaagacgaggaactgcgtcggatgcaggagatgctccataaaatccaaaagcagatgaaggagaattat

SEQ ID NO: 147751 - DNA, 1434 bp, Artificial Sequence
  derived and/or modified sequence
atggacaggtcactgggttggcaaggtaattcagtgccagaagaccggaccgaagcgggcataaaacgatttttagaggatactaccgacgacggggagttgagtaaatttgtaaaggacttcagcgggaatgcttcttgccatccccccgaagctaaaacatgggcgtcaaggccgcaagtacctgaaccgaggccccaggcccccgacttgtacgatgatgatctggaattccgccctcctagccgcccccagtcttcagacaatcaacagtacttttgcgcccccgcacctttgtcaccctctgcaaggcctagaagcccctgggggaagctggatccttacgatagttcagaagatgacaaggagtacgttggcttcgctacactcccaaaccaggtacaccgcaagtcagtcaaaaagggatttgatttcacgctgatggtagccggagaaagcgggttgggtaaatccacgctagtaaactcattattcttgaccgatctgtatcgggatcgtaagctgctgggtgccgaagaaagaatcatgcagaccgtcgaaatcactaagcacgccgtagacatagaggaaaaaggcgttagactccgcttgacaattgtagatacacccggcttcggcgacgctgtcaacaatacggagtgttggaaacccgtcgccgagtatattgaccaacagtttgaacaatactttcgagatgagagtggcctaaacagaaagaacatccaagataatcgcgtgcactgctgcttatatttcatttcaccttttgggcatggactacggcccctagatgtggagtttatgaaggccctgcaccaacgcgtaaacatagtaccgattctggcaaaggccgacactctgactccaccagaagtagatcacaagaagaggaagattcgagaggaaatcgaacactttggaataaaaatctaccagtttccggactgcgattcagacgaagacgaggactttaaactgcaggaccaagcgctaaaagaatccattccttttgccgtaatcggctcgaacacagtggtggaagcgcggggcagacgcgtgaggggcagattgtacccgtggggcattgtggaagtcgagaatcccggccattgtgattttgtgaagctgcgcactatgctggtcagaacccacatgcaggatctgaaagacgtgacccgggaaacacattacgaaaactatagagcacagtgtatccaatcaatgacccgcctggtggtgaaagaaaggaacagaaacaaactcacccgggagtcgggaactgatttcccgatcccagcagtgccgcccggaactgaccccgaaactgagaagctgatcagggaaaaagacgaggagctgcgcagaatgcaggaaatgcttcacaagattcagaagcagatgaaggagaattat

SEQ ID NO: 147752 - DNA, 1434 bp, Artificial Sequence
  derived and/or modified sequence
atggaccgctctctggggtggcagggaaattcagtgccggaggatcgcacggaagcaggcattaagaggtttctggaagatactaccgacgacggagagctgagcaagttcgtgaaggacttctccggcaacgccagctgccaccctccggaagccaagacctgggcgagccggcctcaagtgccagagccgcggccacaagcgccggacctctacgacgatgacctcgagtttcgcccaccatcccgcccgcaatcgtcagataaccaacagtatttctgcgccccggctcctttgtcacctagcgccagaccgcgaagcccttggggcaagctggacccgtacgactccagtgaggacgacaaggaatacgtggggttcgcaactcttcccaaccaggtccaccggaagagcgtgaagaagggatttgacttcacccttatggtcgctggagagtcaggactcggtaagagcaccctcgtgaacagcctgtttcttactgacctctaccgcgatcgcaagctcctcggggcagaggaacgaattatgcagactgtggaaatcactaaacatgcagtcgacatcgaagagaaaggcgtgaggcttaggctgactatcgtggatacccctggcttcggagatgcggttaacaacaccgaatgttggaaaccagtggccgaatacatcgaccaacagttcgagcaatactttcgggatgagagcggactgaaccgcaaaaacatccaagataatcgcgtgcattgctgcctgtacttcatttccccattcggtcatggtttgcgcccgctggatgtggaattcatgaaggctctgcatcagcgggtgaatatcgtgccgatcctggccaaggctgataccctcacgccaccggaggtggatcacaagaagcggaagatccgggaggagatcgagcacttcggcatcaagatctaccagttcccggattgcgacagcgatgaagatgaagatttcaagctccaagatcaggccctgaaggagtcgatcccttttgcagtgatcgggtctaacacggtcgtcgaagcacggggccgcagagttcggggacggctctacccctggggtattgtcgaggtggaaaaccctggtcattgtgacttcgtgaaactgagaaccatgttggtgcgcactcacatgcaggatctgaaagacgtgactcgcgaaacccactatgagaattaccgcgcacaatgcatccaatcgatgactcggctggtcgttaaggaacggaaccgcaacaagctgactcgcgaatccggcactgacttccccataccggctgtgcctccggggactgacccggaaactgagaagttgatccgggaaaaggacgaagaactgcgccggatgcaggaaatgctgcacaagatccagaaacaaatgaaagaaaactac

SEQ ID NO: 147753 - DNA, 1434 bp, Artificial Sequence
  derived and/or modified sequence
atggatagatctctgggatggcaaggtaactcggtgcctgaggatagaactgaggcaggtattaagcgtttcctcgaggatactaccgatgatggtgaacttagcaagtttgtgaaggatttttcaggtaacgcatcgtgtcaccccccagaggcaaagacgtgggcatcaagacctcaagtcccagaaccccggccgcaagcaccagatctgtatgatgatgatcttgaatttcggccgccttcgaggccccaatccagcgataatcaacagtacttctgtgcgccggccccgttgtcgccatctgccaggccgcgttcaccttggggaaaactggacccgtacgattcctcggaagatgacaaagaatatgttggatttgctactctgccaaatcaggtccatcgcaagagcgtcaaaaagggttttgattttaccctgatggtcgcaggggaatctggtctgggaaagagcactcttgtgaactccctgttcctgaccgatctgtacagggataggaaacttcttggtgctgaagaacggatcatgcaaaccgtggagatcactaagcatgcagtggacatcgaagaaaagggagtgcgcttgagacttacgattgtggatactcctggctttggagacgcagtgaataacactgaatgttggaaacctgtggcggagtacatagatcaacaatttgagcagtacttccgggacgaatccggcctcaaccgcaagaatatccaggataatcgggtgcactgttgtctttacttcattagccccttcgggcatggactgcgcccgttggatgttgagtttatgaaagcactgcatcaacgcgtcaacatcgtgcccattcttgctaaggcggacacccttacccctcctgaagtggatcataagaagagaaagatccgcgaagagattgaacatttcgggataaagatttaccagtttccagattgcgattcagatgaggacgaggacttcaaactccaggaccaggcactcaaagaatctatcccatttgctgtgattggaagcaataccgtggtggaagcacggggacgccgcgtccggggtcgtttgtacccttggggcattgtggaggtcgaaaaccccggacactgtgactttgtgaagctgagaactatgcttgtgcgaacccacatgcaagaccttaaagacgtgactagagaaacccactacgaaaactatcgggcccagtgtattcagtccatgacccggctggtcgtgaaagaacgtaatagaaacaaactcactcgagaatcaggtactgatttccctattcctgcggtgccacccgggactgaccctgaaacggaaaagctgataagggagaaagacgaagaacttcgtcgcatgcaggaaatgctgcataagatacaaaaacaaatgaaggagaattac

SEQ ID NO: 147754 - DNA, 1434 bp, Artificial Sequence
  derived and/or modified sequence
atggaccggtcccttggttggcagggaaactcggtccctgaagatagaacggaggcagggattaagcggttcctggaggacaccactgacgacggtgaactctcgaaatttgtgaaggatttttcgggaaacgcgtcctgtcacccgcctgaggccaagacctgggcgagccggccgcaggtgcctgaaccccggcctcaggcccctgatctgtacgatgacgacctcgagtttcgtccaccttcacgcccacagagctcagataatcagcaatacttttgtgctcccgcaccactgtccccatcggcaagacctcgatctccttggggaaaactggacccttacgattcatcggaggacgacaaggagtacgtgggatttgcaacgctgcctaaccaagtgcatcgtaagagcgtgaaaaagggtttcgattttaccctgatggtggcgggagagagtggacttggaaagtccacccttgtgaatagcctttttctgactgatctctacagggacagaaagttgctcggggcggaagaacggattatgcagaccgtcgagattaccaagcatgcagtggacatcgaagaaaagggcgtgaggctccgcctgacgatcgtcgatactcctggattcggggatgccgttaacaacactgagtgctggaagcctgtcgcggaatacattgaccagcaatttgagcagtactttcgtgacgagtcaggccttaaccgcaagaacattcaagataaccgggttcattgttgcctgtactttatcagcccttttggacatggtttgaggcctcttgacgtggaattcatgaaagcccttcatcaaagggtgaacatcgtccctatactggcaaaagcagacactctgactccacctgaagtggaccataagaagcggaagatcagagaagagattgaacacttcggaatcaagatctaccagtttcctgattgcgactcggacgaagatgaggatttcaagctccaggaccaagccctcaaagagagcatcccctttgccgtaattggttcaaatactgtcgtcgaagcacgcggtcgacgcgtgagaggacggttgtatccatggggaatcgtggaagtcgaaaacccgggacattgcgattttgtgaaacttaggactatgcttgtgaggacccacatgcaggacttgaaggacgtcactagagaaacccattacgaaaactatagagcacaatgcattcagagcatgacccggcttgtcgtgaaggagaggaatagaaataagctcactagagagtccggcactgattttcctattccagcagtgccccccggaaccgatcctgaaaccgaaaagctcattagggagaaggatgaggagcttcgacgtatgcaagaaatgctgcacaaaatccagaaacagatgaaggaaaactat

SEQ ID NO: 147755 - DNA, 1434 bp, Artificial Sequence
  derived and/or modified sequence
atggatcgttcgctaggttggcaaggtaattcggttccggaagatcgaacggaagcgggtataaaacgatttttagaagatacgacggatgatggtgaactatcgaaatttgtaaaagatttttcgggtaatgcgtcgtgtcatccgccggaagcgaaaacgtgggcgtcgcgaccgcaagtaccggaaccgcgaccgcaagcgccggatctatatgatgatgatctagaatttcgtccgccgtcgcgtccgcaatcgtcggataatcaacaatatttttgtgcgccggcgccgttatcgccgtcggcgcgtccgcgttcgccgtggggtaaattagatccgtatgattcgtcggaagatgataaagaatatgttggttttgcgacgctaccgaatcaagtacatcgtaaatcggttaaaaaaggttttgattttacgttaatggtagcgggtgaatcgggtctaggtaaatcgacgctagtaaattcgttatttttaacggatctatatcgtgatcgtaaactactaggtgcggaagaacgtataatgcaaacggtagaaataacgaaacatgcggtagatatagaagaaaaaggtgttcgtttacgtttaacgatagtagatacgccgggttttggtgatgcggtaaataatacggaatgttggaaaccggtagcggaatatatagatcaacaatttgaacaatattttcgagatgaatcgggtctaaatcgtaaaaatatacaagataatcgagttcattgttgtctatattttatatcgccgtttggtcatggtctacgtccgttagatgtagaatttatgaaagcgttacatcaacgtgttaatatagtaccgatattagcgaaagcggatacgctaacgccgccggaagttgatcataaaaaacgaaaaatacgtgaagaaatagaacattttggtataaaaatatatcaatttccggattgtgattcggatgaagatgaagattttaaattacaagatcaagcgttaaaagaatcgataccgtttgcggtaataggttcgaatacggttgtagaagcgcgaggtcgtcgagttcgtggtcgactatatccgtggggtatagtagaagtagaaaatccgggtcattgtgattttgttaaattacgaacgatgctagttcgtacgcatatgcaagatttaaaagatgtaacgcgagaaacgcattatgaaaattatcgagcgcaatgtatacaatcgatgacgcgattagtagttaaagaacgtaatcgtaataaactaacgcgagaatcgggtacggattttccgataccggcggtaccgccgggtacggatccggaaacggaaaaactaatacgtgaaaaagatgaagaactacgtcgaatgcaagaaatgttacataaaatacaaaaacaaatgaaagaaaattat

SEQ ID NO: 147756 - DNA, 1434 bp, Artificial Sequence
  derived and/or modified sequence
atggaccggtctctgggttggcagggcaatagcgtgcccgaggatcgaacagaggcgggcatcaaaagattccttgaggacaccacggatgatggggaactgagcaagttcgtcaaggatttttctggtaatgccagttgccaccctccggaggccaaaacatgggccagcagacctcaggtgcccgaaccccgtccccaagctcctgacctctatgatgatgacctggaattccgaccaccaagccgcccccaatcatcagataatcaacagtatttctgtgcaccagcacctctctcccccagtgcccggccacgcagcccatggggcaagttggatccttacgattcttcagaggatgacaaagaatacgtcggctttgccacacttccaaatcaggtgcacaggaagtcggtgaagaaagggtttgactttactctaatggtggctggcgagtcgggcctaggcaaatcaacgctagtcaatagcctgtttctgaccgatctgtacagagaccggaaactcctgggggcagaagaaaggatcatgcagacagttgagattactaaacacgcggtggatattgaagaaaaaggggtgcgactgagattaactattgtcgacactccaggcttcggcgacgctgttaacaacactgagtgttggaaaccagtagcagagtacatcgatcaacagttcgagcaatactttcgggatgagagcgggctgaaccgcaagaatattcaggataaccgggtccactgctgtttgtatttcattagtccttttggccacggcttgcggcccctggatgtggagtttatgaaggcactccatcagcgtgtaaatatagtacccatactcgcaaaggccgacactctgacaccacccgaggtggaccacaagaagaggaagattcgtgaggagatcgagcacttcggaataaagatataccagttccctgactgcgactcagacgaggatgaagactttaagcttcaggatcaggcccttaaggaatccatccccttcgccgttatagggtccaataccgtggtcgaggctaggggccggagagtccgtggacggctctatccatgggggattgtagaggtggagaatccaggacattgtgatttcgtcaagctccggacaatgttggttcgaacgcatatgcaggatctgaaggacgttaccagagaaacccactatgagaactacagggcgcagtgcatccagtccatgactcgcctggtggtgaaggagcggaacaggaataaactgacacgcgaatcgggaaccgacttcccaatccccgctgtcccgcctggaaccgaccctgagaccgagaagctcatccgggaaaaagacgaagaactccgccgaatgcaggaaatgctccacaaaatccagaaacagatgaaagagaactac

SEQ ID NO: 147757 - DNA, 1434 bp, Artificial Sequence
  derived and/or modified sequence
atggaccgttcccttggttggcagggcaacagcgtgccagaagatcgaactgaggcgggaatcaagcgcttcttggaggacacgactgatgatggagaactgtcgaagttcgtcaaggatttctcgggaaacgcatcgtgccatcctccggaagctaaaacttgggcctcaaggccacaggtgcctgagccccggccacaagccccggacctgtacgacgatgacctggagtttagacctccctccagaccgcaatcctccgataaccaacaatacttttgcgcgccagcgccgcttagcccttcggctcgcccacggagcccttggggaaagctggatccctacgactcctcagaagatgacaaagagtacgttggattcgccactctcccgaaccaggtgcacaggaagtccgtgaagaaggggtttgacttcactctgatggtcgctggcgagtctggactcggaaagtctactctcgtcaactctctcttcctgaccgacctgtaccgcgatcgcaaactcctcggggccgaagaaaggataatgcagacggtggaaattaccaagcacgcagtggatatcgaggaaaaaggagtgcggctgcggctgaccatcgtggacactccgggtttcggtgacgctgtcaacaataccgaatgttggaagcctgtggcggagtatattgaccagcagttcgagcagtacttccgcgacgagagcgggctgaatcgcaagaatatccaggacaatcgcgtgcattgctgcttgtatttcatctcgccattcggacacggtctgaggcctttggacgtggaattcatgaaagctctccaccaacgcgtcaacattgtgccgatcctggccaaggccgataccctgaccccgccggaggtcgatcacaaaaagcgtaagatccgggaggaaatcgaacatttcggaatcaagatctaccagtttccggactgcgactcggacgaggacgaggatttcaaactgcaggaccaagcgttgaaggaaagcatcccctttgcagtgatcggatcaaacaccgtcgttgaggcacggggacgacgcgtgagaggccggttgtacccttgggggatcgtggaagtggaaaatcccggccactgtgatttcgtgaagttgagaaccatgctcgtgcggacccatatgcaggacctcaaggacgtgactcgcgaaacccactacgagaattaccgggcccagtgcatacaatcgatgaccaggctcgtcgtcaaagagagaaacagaaacaagctcactagagagagcgggaccgattttccgatccccgccgttccgccaggcactgacccggaaactgagaagctgattcgtgaaaaagatgaggaacttcgtcgcatgcaagaaatgttgcacaagatccagaagcagatgaaagaaaactac

SEQ ID NO: 147758 - DNA, 1434 bp, Artificial Sequence
  derived and/or modified sequence
atggatagatcattgggttggcaaggaaactcggttcctgaggacaggactgaggcgggaataaaaaggtttcttgaggatactactgatgatggagaactttcgaagttcgtcaaagacttctccgggaatgctagctgccatcctcctgaagcgaaaacatgggcctcccgcccacaagtgcctgaacctcgtcctcaagcacctgacttgtacgatgatgatctcgagttcagacccccctctagaccgcagagcagtgataaccaacaatatttttgcgcgcctgcccccttatccccgagtgctcgcccaaggtcgccctggggaaaattggatccgtacgatagttcggaagatgataaggaatatgtcggtttcgccacgttgccaaatcaggtccatcgtaaatccgtaaagaaaggatttgacttcacacttatggttgcaggcgaatccgggttgggtaagagtaccttggttaacagcttgttcttaactgatctctacagggaccggaagcttctaggtgctgaggagagaattatgcaaactgtggagattacaaaacacgcggttgacatcgaggaaaagggtgtgcggcttagattgactatcgtggacaccccgggtttcggagatgcagttaataatacagaatgctggaaacctgtcgccgagtatatcgatcaacagttcgaacaatattttcgcgatgaaagtggacttaatagaaaaaatatccaagataaccgtgtccactgctgtctttactttattagtcctttcggtcatgggttacgccctctcgatgtggagttcatgaaggccctccaccagcgcgtcaatattgttcctattttagccaaagctgataccttgaccccaccagaagtcgatcacaaaaagcgcaagattcgtgaggagattgaacattttggcattaagatttaccaatttcccgattgcgactccgatgaagatgaggacttcaagcttcaagatcaagctcttaaagagtctattccgttcgcagtcattggatccaacacagttgtcgaagctaggggacgcagagtcagaggaaggctttacccttgggggatcgtcgaagtggaaaatccgggtcattgcgattttgttaagttgcgtaccatgctggttcgaactcatatgcaagatcttaaggatgttactcgtgagactcattatgagaactacagagctcagtgtattcaatctatgacgcgactggtggttaaggagcgaaataggaataagctgacacgggaaagcggtacagatttcccaattccagcagttccccctggaactgaccccgaaaccgagaagttaattcgcgagaaagatgaggaattacgtaggatgcaagaaatgctccataagatccagaagcaaatgaaagaaaattac

SEQ ID NO: 147759 - DNA, 1434 bp, Artificial Sequence
  derived and/or modified sequence
atggacagaagcctcggttggcaaggaaattcggtgcctgaggaccggaccgaagcaggaatcaaacgcttcctggaagataccacggacgacggggaactctccaaatttgtcaaagacttttcaggaaacgcgagctgccacccgcctgaggccaaaacttgggcctcgcggcctcaggtgccagaaccaaggccgcaggcgcctgacctctacgatgatgacctggaattccggcccccgtcccgcccgcaatcatcggataaccaacagtacttttgcgcaccagcgcctctgagcccaagcgctcgcccccgctcgccctggggcaagttggacccatacgactcaagcgaggatgacaaggagtatgtcggcttcgcaactctgccgaatcaagtccatcggaagtcagtaaagaaaggattcgacttcaccctcatggtggctggcgagagtggactgggaaagtccactcttgtgaactccttgtttctgacggacctgtaccgagatcgaaagctccttggtgcggaagaacggatcatgcagactgttgaaatcactaagcacgcagtcgacatcgaagaaaaaggcgtcaggctgcgcttgaccattgtggacaccccaggatttggggacgccgtgaacaacactgagtgctggaagccagtcgcagaatacattgatcagcaattcgagcaatacttcagggatgagagcggtcttaatcgcaagaatatccaagacaatagggtgcattgttgtctgtacttcattagcccttttggacacggactccgcccgctcgacgtggaattcatgaaagcccttcatcagcgagtgaatatcgtgccgatcctcgcgaaggccgatactctgaccccgccggaggtggaccacaagaagcgcaaaatcagagaggaaatagaacacttcggaatcaagatatatcagtttccggactgcgatagcgacgaagatgaggacttcaagctgcaggaccaagctctcaaagaatccatcccattcgctgtgatcggctccaacaccgttgtcgaggcccggggtcgcagggttagaggtcgcctgtacccgtgggggatcgtggaagtggagaacccgggccactgcgacttcgtgaagctgcggactatgttggtgaggacccacatgcaggatctgaaagacgtgacccgcgagactcattacgagaattatcgggcacagtgcatccagtcaatgaccaggcttgtggtaaaggagcgaaacaggaacaagctgaccagagaatctgggaccgatttcccgatccccgcagtgccgccgggaacggatcccgaaacggaaaagctcatccgcgagaaagatgaggaactcaggcgcatgcaggagatgctccataagattcagaagcaaatgaaggaaaactac

SEQ ID NO: 147760 - DNA, 1434 bp, Artificial Sequence
  derived and/or modified sequence
atggatcgctctctgggatggcaggggaactctgtgccagaggacagaaccgaagccggaataaagcgctttcttgaagacacaacggatgacggcgagttgtccaagttcgtcaaagacttttccggcaacgcctcctgccacccgcctgaagcgaagacatgggcatcacggccccaagtgcccgaaccaaggccacaagcccctgacctctatgacgatgacctggaatttagacccccttccagacctcagtctagtgataatcagcagtacttttgtgcaccggccccactgtcaccctccgctcgccccagaagtccatggggaaaactggatccatatgacagcagcgaggacgataaggaatacgtcggcttcgctactttacctaaccaagtgcatcgcaaatcagtgaaaaaaggatttgacttcaccctcatggtggccggtgaatccgggttgggcaaaagcactctggtaaattccctatttctcactgatttatacagagatcgaaaactgctgggagccgaggagagaatcatgcaaaccgtggagattactaagcacgctgtagatatcgaagagaaaggcgtgagactacgtctgaccattgtagacacccctgggtttggcgatgctgtcaataatactgagtgttggaaacccgttgctgagtatattgaccagcagttcgagcaatatttccgcgacgagagcgggctcaaccgcaagaatattcaagataatcgcgttcactgctgtttgtacttcatctcgcccttcggccacggcctgagacctctagatgttgagttcatgaaagcgctgcaccagagggtaaacatcgtgccaattctggctaaggctgacacccttacgccgcctgaggttgaccacaaaaaaagaaagatacgggaggaaattgaacactttggtattaagatctaccaattcccggattgtgattccgatgaggacgaggatttcaaacttcaggaccaggctttaaaggagtcaatacctttcgcagttataggatctaatactgtggtggaggcccgcggacgccgggttagaggtcggctgtatccgtggggtattgtagaggtggaaaatcccggccattgtgacttcgtgaaactgagaaccatgctcgtacggacacacatgcaggatttgaaagatgtcaccagggaaacccattacgaaaactaccgcgcccagtgtatccaaagcatgacacggctggtcgtgaaagagcgcaaccgcaataaactgactagagagtccgggacagacttcccaatacccgcggttcccccaggcaccgatccggagactgaaaagctcattcgggaaaaagatgaagagctgagacggatgcaggagatgttgcacaagatacagaaacagatgaaggaaaactac

SEQ ID NO: 147761 - DNA, 1434 bp, Artificial Sequence
  derived and/or modified sequence
atggatcggagtctgggctggcaagggaacagcgttccagaagatcggactgaagcagggatcaagagatttctcgaggatactactgatgatggagaattgtctaagttcgtcaaggatttctcaggaaacgcgtcctgccatccaccagaagctaaaacctgggccagcaggccccaagtgcctgaaccaaggcctcaggccccagatctgtacgacgatgatctggagtttcgccctccgtcgcggccgcagtcatcagataatcagcagtatttctgcgcaccagcccctctgtccccttcggcccgccctcgctcgccttggggaaagctggatccctacgactccagtgaagatgataaggagtacgtcggatttgctacgcttccaaaccaagtgcaccggaaatcggtcaagaaaggctttgactttaccttgatggttgcaggcgagtcggggcttggaaagtctaccctggtgaattccctttttctcactgacctctacagagacaggaaacttctcggagcagaagaacggattatgcaaaccgttgagatcaccaagcatgcagtcgatattgaagaaaagggagtgaggctccggctcactattgtggacacccccggatttggcgacgcagtgaacaatactgagtgttggaaacccgtggcagaatacatcgatcaacaattcgaacagtatttcagagacgaatccggtcttaacaggaagaacattcaagacaatagagtgcattgttgcctgtacttcatatcgcctttcggccacggacttcgtcctctcgacgtggagtttatgaaagccctgcaccagcgggtgaacatcgtgcctattctggctaaggccgacacccttactccccctgaggtcgatcacaagaagaggaaaattcgtgaggagattgaacatttcgggataaagatataccagtttccggactgtgacagtgatgaggatgaagatttcaagttgcaggatcaagcgcttaaggaatcaatcccatttgcagtaataggtagcaacacggtggtggaggcacgcggccgccgcgtgcgtggtagactttacccgtggggaattgtggaagtggaaaatccaggtcattgtgactttgtcaagctgagaactatgctggtgagaacgcatatgcaggaccttaaagatgtgacccgggagacgcattacgaaaactaccgtgcgcaatgtatccagtccatgaccaggcttgtggtgaaggaacgcaataggaacaagctgacccgagagagcggtaccgattttcctatccccgcagtaccccctgggactgacccggaaaccgagaaactgattcgagaaaaggatgaagaactccgaagaatgcaagagatgcttcacaaaatccaaaagcagatgaaggagaattac

SEQ ID NO: 147762 - DNA, 1434 bp, Artificial Sequence
  derived and/or modified sequence
atggaccgctccctgggatggcaggggaactcggtgcccgaagataggaccgaggccggaatcaagagatttctggaagataccaccgacgatggggaactgtcaaagttcgtgaaggatttcagcggaaacgcctcctgccacccgccggaggcaaagacctgggcctcccggccgcaggttccggagccgaggccacaagccccggacctgtatgacgacgacctcgagtttagaccaccaagccggccacagagcagcgataatcaacaatacttctgcgcaccggctccgttgtcaccttcggctagacctcgcagcccgtggggaaagctggatccatacgacagctcggaagatgacaaagaatacgtgggattcgccactttgccgaaccaggtccatcgcaagtcggtgaaaaagggttttgacttcaccctgatggtcgcgggcgaaagcggccttggaaagagcacccttgtgaacagcctgtttcttaccgacctctaccgcgatcggaaacttctgggggcagaggagcgcataatgcagaccgtggaaatcaccaagcacgccgtggacatcgaggaaaaaggggtgcggctgcgcctgactattgtcgacaccccgggattcggagacgcagtgaataacaccgagtgttggaaacctgtggctgaatacatcgatcagcaatttgagcaatacttccgagatgagtcagggctcaaccgaaagaacatccaagataaccgggtgcactgctgtctctactttatctcaccttttggccacggactgcggccgctggacgtggagttcatgaaggcgctgcatcagagggtgaatatcgtccctattctggcaaaggctgacaccctcactccaccagaagtggaccacaagaagcggaagatccgggaagaaatcgaacacttcgggatcaaaatctatcagttccccgactgcgattccgatgaagatgaggactttaaactgcaggaccaagccctcaaggagtcgatcccatttgccgtcatcggcagcaataccgtggtcgaggcaaggggcaggcgggtgcgcggacgtttgtacccgtggggaatcgtcgaagtggagaatcctggacattgcgatttcgtcaagctgcgcactatgctcgtgcgcacgcacatgcaagatctgaaggatgtgaccagggaaactcattacgaaaactacagagcgcagtgcatccaatcgatgaccagactggtggtgaaggaacgcaatcggaacaaattgacccgcgaatcgggaactgactttccgatcccggcggttccgccgggcactgacccggaaactgagaagttgattcgcgagaaagatgaagaactgagaagaatgcaggagatgcttcataagatccaaaagcagatgaaggaaaactac

SEQ ID NO: 147763 - DNA, 1434 bp, Artificial Sequence
  derived and/or modified sequence
atggatcggtcattaggttggcaaggaaatagtgttcctgaggaccgaacggaggcaggcatcaaacgttttttggaggataccacagacgatggtgagctgagcaaattcgtgaaagacttctcaggaaacgcttcatgccatccacctgaggccaagacatgggcatccagaccgcaggttccggagcctcgtccccaggcgcccgatttgtatgacgatgacctcgagttccgcccaccaagccggccacaatcgtcagacaaccaacagtatttctgtgctcccgcgcccctgtcgccatctgccagaccacgaagcccatggggaaagctggatccttacgattcatccgaagacgacaaggagtacgtgggttttgcaacgctacctaatcaggtacatcgaaaatcggtgaagaagggatttgatttcactctcatggttgctggcgaatcagggctcgggaaatcaacactcgttaactccttgttcctcaccgacctataccgggaccgtaagttactaggagccgaggaacgtattatgcagaccgttgagataactaaacacgcagtagacattgaagaaaaaggagtacgattacgattgacgattgtcgacacccctggattcggtgatgctgttaacaacacagaatgctggaagccggtggctgagtatatcgatcagcaattcgagcaatacttcagggacgaaagcggattgaatcgaaagaatattcaggacaaccgcgtgcactgttgtctctacttcatatccccttttggacatggactgcgcccactcgacgtggaattcatgaaggccctccaccagagggttaatatagttccgatactggcgaaggctgacacgttgacgcccccggaggtggaccacaagaagcgcaagatacgcgaggaaatagagcatttcggaattaaaatttatcagttccccgactgcgattccgatgaagacgaagatttcaagcttcaagatcaagccctgaaagagtcaattccgttcgcagtgattggtagcaacactgtggtcgaggcacgaggccgacgcgtgcggggccggttgtatccgtggggtattgtggaagtcgaaaaccccggccattgtgattttgtaaaactccgaactatgcttgtgcgtactcatatgcaggacttgaaggatgtgactcgagagacccactatgaaaactacagagcccagtgtatccagtcaatgactcgcctcgtagttaaggagcgtaatcgaaataaacttaccagagagtcgggcacggactttccaattccggcagtgcctccgggcacggatcctgagaccgaaaagttgattcgggaaaaagacgaggaacttcgcaggatgcaagagatgttacacaagatccagaaacaaatgaaggaaaactac

SEQ ID NO: 147764 - DNA, 1434 bp, Artificial Sequence
  derived and/or modified sequence
atggatcgatcgctgggatggcagggtaattcggttcccgaagaccggaccgaggccggaattaagcgtttcctggaggatacaacagacgatggcgagctcagtaaatttgtgaaggacttttctggcaacgcctcatgccatccccctgaagccaagacgtgggcctcccggccacaagtgcccgagcccaggccacaggcccccgatctatacgacgacgatttggaatttcgtcctccttccaggccacagtcatctgataaccagcaatatttctgtgctcccgctccactgtcgccttcagccagacctaggtcaccttggggaaagctggatccatatgatagctctgaggacgacaaagaatacgtcggattcgctacactacctaaccaggtccacaggaagtcggtcaaaaagggcttcgactttaccctcatggttgccggtgagagcggcctagggaaatctactctggtgaactctcttttccttactgacctatatcgcgaccgcaaactgcttggggccgaggagcggatcatgcagacggtggaaattaccaagcacgccgtggacattgaagaaaagggcgtccgactacggctgacgattgtagatacgccaggctttggagatgctgtgaacaatacagaatgctggaagccggtggctgagtacatcgatcagcaatttgagcagtactttcgggatgagagcggactgaataggaagaacatccaggataatcgcgttcattgctgtttgtatttcataagtccctttgggcacggattgcggccgctcgatgtggaatttatgaaagccctgcaccagcgggttaacatcgttccaattcttgcaaaagccgacactctgacaccgccggaagtcgaccacaagaagcggaagatcagggaagaaatcgaacacttcggcataaaaatttatcaatttcccgactgcgactctgacgaggatgaggactttaaactccaggatcaagccctgaaagagtcaatccccttcgcagtgatcggtagtaacacagttgtggaggccagggggaggcgcgttagaggtagactttacccctggggcatcgttgaagtggaaaatccgggacattgtgacttcgtcaaactgagaacaatgttggtacgaacacatatgcaggatctgaaagacgttacacgagagacacactacgaaaactaccgggcacagtgcatacagtctatgaccagactggttgtaaaggagagaaatcgaaataaactgacccgagagagtggaacggactttcctattcccgccgtgccccctgggactgacccagagacggagaaactcatcagggagaaagatgaggaactgagacgtatgcaggagatgttgcacaagattcagaaacagatgaaggaaaattat

SEQ ID NO: 147765 - DNA, 1434 bp, Artificial Sequence
  derived and/or modified sequence
atggatcgctcccttgggtggcaggggaattccgttccagaggaccggaccgaggctgggatcaaacggttcctggaagacaccaccgacgatggggaacttagtaaatttgtgaaggatttttcaggcaacgctagttgccacccccccgaggccaaaacatgggcttctcgaccccaagtgcctgagccgaggccccaggctcccgatctgtatgacgatgacctggaatttcggccccctagtcggcctcagtcatccgacaaccagcagtatttttgtgcacccgcccctcttagtccttccgcccggcctaggtccccttggggtaagcttgatccctatgactcttctgaggacgacaaggagtacgtggggtttgccacattgccaaaccaggttcatcggaagtctgtgaaaaagggcttcgatttcactctgatggtcgcgggcgaaagtggtctgggaaagtctacactggtcaactccttgtttctcacagatctctatcgagatagaaaactgctcggcgctgaggagcggatcatgcagacagtggaaattacaaagcatgccgttgatatcgaagagaagggggtccggctgcggctgacaattgtggacactccggggttcggggacgcggtgaacaacacagaatgttggaagcccgttgctgagtatatagatcagcaattcgagcagtactttcgggatgagtccgggcttaaccgtaagaatatacaggacaaccgtgttcactgttgtctgtattttatctcgccctttggacacggtctgaggccactcgacgtggaatttatgaaggcactgcaccagagggtaaacatcgttcccatcctggccaaagcagacaccctcaccccccctgaggtggaccacaagaagcgaaagattcgagaagagattgaacactttggcataaagatttaccagttccctgactgtgactctgacgaggatgaagactttaagcttcaggaccaggccttgaaagagtcaattccttttgcggtcatcggtagcaatacagtggttgaagcaaggggacggagagtccggggcagattgtatccctggggaattgtcgaagtagagaatccgggtcattgtgattttgttaagttgcgcacaatgcttgtacggacgcatatgcaggacctcaaagacgtaactagggagacacactacgagaattatcgggcacagtgcatacagtcaatgacgagattggttgtgaaggagagaaacagaaacaaactaaccagggaatctggtactgactttcccatcccagctgtacccccaggaaccgaccccgaaacagagaagctaataagggaaaaggacgaggagttgaggagaatgcaggagatgctacacaagattcagaagcagatgaaagagaactac

SEQ ID NO: 147766 - DNA, 1434 bp, Artificial Sequence
  derived and/or modified sequence
atggacagatcgctgggctggcagggcaactccgtcccggaagataggactgaggctggaattaagcggtttctggaagatacaactgatgatggtgagctgtctaaatttgtcaaggatttctcaggcaacgcctcctgtcatccgccagaagccaaaacttgggctagtaggccacaggtacctgaaccgagacctcaggcgcccgatctatacgatgatgacctggagtttaggcctccaagtcgcccccagtcatcagacaaccagcagtatttttgcgcaccagccccccttagccccagtgccaggcctcggagcccctggggtaagctggatccttacgatagcagtgaggacgacaaggaatacgttggatttgctacactgccaaaccaagtccaccggaagagcgtcaaaaaaggttttgattttaccctgatggtcgcaggtgaaagcggacttgggaagagcacactagtcaactctctgttcctgaccgacctctatcgggaccgaaaattgttaggagctgaggaaagaataatgcaaacagtggagataaccaagcatgcagtcgatatcgaggagaaaggagtgaggcttcgcctgaccatcgtggataccccagggttcggcgacgcagtgaacaataccgaatgctggaaaccagttgccgaatacattgaccagcagtttgaacagtattttcgggatgaaagcgggctgaatagaaaaaacattcaagataacagagttcactgttgtctgtatttcatttcacccttcggacacggtcttcgcccactggacgtggagtttatgaaagcactccatcagcgagtgaacattgtcccaatcctcgctaaggctgacacacttacacctccagaggtggatcacaagaagcgcaaaataagagaagaaatcgagcattttggcatcaagatctaccagttccccgattgcgatagtgatgaggatgaggacttcaagctccaggatcaagccctgaaagagagcatccctttcgctgtgattgggtccaacactgtggtggaggccaggggaagacgtgtccgcggcagactttacccctggggaatcgtggaagttgagaatccagggcattgtgattttgtgaagttacgaacaatgctggtgaggactcacatgcaagatttaaaggacgtgaccagggagacacattatgaaaactacagggcccaatgcatccagtcaatgacacgattggtggtaaaagagcggaacaggaacaagctcaccagggaatctgggaccgatttccctatccctgccgtccctccaggcacagatccagagaccgaaaaactgatcagagaaaaggatgaagagctccgaagaatgcaagaaatgcttcacaaaatccagaagcaaatgaaggaaaactac

SEQ ID NO: 147767 - DNA, 1434 bp, Artificial Sequence
  derived and/or modified sequence
atggatcgttcacttggatggcaaggaaactccgtgcctgaagatcgcacggaggcaggtatcaagcgcttcctcgaagatactacggacgacggcgagctgtcaaagttcgtaaaagatttctcgggaaacgcctcgtgtcatccacctgaggccaagacgtgggcctcccggccgcaagtccccgaaccccgccctcaggcaccagacctctacgatgatgacctggagtttcggcctccatcgaggccccaaagctccgacaaccagcaatacttttgtgcacccgctccactttcaccgagcgcaagaccacgatcgccttggggcaagttggatccttacgattcgagcgaagatgataaagaatacgtgggctttgccaccctgccaaaccaagtgcacagaaagagcgtgaaaaaaggttttgattttactctgatggtcgcaggagaatcggggctgggaaaatcaactttggtgaattcgttgtttttgaccgatctttatagagatcgcaaactgctgggggccgaggaaagaattatgcaaaccgtcgaaattacgaaacatgcagtcgacattgaagaaaaaggtgtcagactccgtcttacgatcgtcgatactcctggatttggagacgcagtgaacaatacggagtgttggaaaccagtggcggagtacatagatcagcagttcgagcaatactttcgggacgagtccggtctgaacagaaagaatatccaggataatagggtgcactgctgtctttacttcattagcccgttcgggcacggactccgcccgctcgacgtggaattcatgaaggcactgcatcagcgtgtcaacatcgtgcctatcctcgcgaaagcagatactcttactccaccagaagttgatcacaagaagcggaaaatccgggaagaaatagaacattttggaataaagatctatcaattcccagactgcgattcggatgaggatgaagatttcaaactgcaggaccaagcactgaaagaatcgattccattcgcagtgattggttcgaatactgtcgtggaggcgagagggcgtagagtgagaggcagactttacccttggggtatcgtggaagttgagaatccgggccattgcgactttgtgaaacttcggaccatgctggtgaggactcacatgcaagatctgaaggacgtgactcgcgagactcattacgagaactaccgcgcacaatgcattcagagcatgaccagactggtggttaaggaaagaaacaggaataaactcacgcgggagagcgggaccgactttcctattcccgcagttcctcctggaactgacccggagacggaaaagctgatacgggaaaaggatgaagagctgcgacgcatgcaagagatgcttcataagattcaaaagcaaatgaaggagaactac

SEQ ID NO: 147768 - DNA, 1434 bp, Artificial Sequence
  derived and/or modified sequence
atggataggtccctgggctggcagggcaattcggttccagaggacaggaccgaggctggaatcaaacgttttctggaggacaccaccgacgacggtgagctgagcaaattcgtcaaggacttctcggggaatgcgagctgccatccacctgaggcaaagacgtgggcatccagaccccaagtgcctgagcccagacctcaggcaccagatctgtacgatgatgatctcgagtttagacctccctcgaggccccaatctagcgataaccaacagtacttttgtgcacctgcccccctttcgccatctgcacgtccacgatcgccttggggaaaacttgatccctacgacagcagcgaagatgataaggaatacgtcggtttcgccactctccctaaccaagtgcatcggaagtcagtcaagaagggtttcgactttactctgatggtcgcaggggagtcaggactgggaaaatcgacccttgtgaactcactgtttttgaccgatctgtatcgcgatcggaagctgctgggtgcagaggagaggatcatgcaaactgtggagataaccaagcacgccgtggatattgaagaaaagggagtgaggctgagactcaccattgtcgacacccctggttttggcgacgcagtcaacaacaccgaatgttggaaacctgtggcagaatacatcgatcaacaattcgaacaatacttccgcgatgaatcgggccttaatagaaagaatatccaagataaccgcgtgcactgttgtctttacttcatctccccttttggacatggtctgcgccccctggacgtggagtttatgaaggcactccaccaaagggtgaatatcgtgcctattctggccaaggccgacacgctcaccccaccagaggtcgatcacaagaaaagaaagatccgcgaggaaattgagcattttggtatcaagatttaccagttccctgactgcgattcggatgaagatgaagatttcaagttgcaggatcaagccctgaaagaatcgatcccatttgcagtcatcggttcgaataccgtcgtggaagcccgcgggcgccgagtgcggggcaggctgtacccctggggaattgtggaggtggaaaaccctggacattgcgactttgtgaaactcaggactatgttggttaggacgcatatgcaggatctgaaggacgtgactcgtgaaacccactacgagaattaccgagcccagtgtattcagtccatgacccgccttgtagtcaaggaacgcaaccgaaacaaacttaccagagagagcgggaccgatttccctatacccgcagtccctcccggcaccgaccctgaaactgaaaagctgattagagagaaggatgaagagctcagacgaatgcaggagatgctgcataagattcaaaagcagatgaaggagaactac

SEQ ID NO: 147769 - DNA, 1434 bp, Artificial Sequence
  derived and/or modified sequence
atggataggtccctcggatggcagggtaatagcgtccctgaggatcggaccgaagccggaattaagcgctttctcgaagataccaccgacgacggggaacttagcaagtttgtgaaggatttctccggaaacgcaagctgtcatcctccagaagcgaaaacgtgggcttcacgaccacaggtcccggaacccagaccccaagcgccagacctttacgacgatgatcttgagtttaggcctcccagccggccccagagctctgataatcagcaatacttctgcgcacctgctcctctttcgcccagcgctagaccacggagcccatggggaaagctggacccgtacgactcctccgaggatgacaaggagtacgtcgggtttgcgactctcccaaaccaggtgcatagaaagagcgtcaagaaaggctttgattttaccctgatggtggcaggagaatccgggctggggaaaagtacgttggtgaactccctgtttctgactgatctctaccgggatagaaaactcctgggtgcagaagaaagaatcatgcaaactgtggaaatcaccaagcacgctgtggatattgaagaaaagggcgtgagactcaggctgactatcgtggatacccctggatttggcgacgcagtgaacaataccgagtgttggaagcctgtggcagaatacattgaccaacagttcgaacagtattttcgtgatgagtccggtctgaaccggaaaaacatacaagataatagggtccactgttgtctgtatttcatctcaccatttgggcatgggctgaggccactggatgtggaattcatgaaggcgctgcatcagagggtcaatatcgtgcctatacttgcaaaggcagacacgcttacccctcctgaggtggaccataagaaaagaaagatcagagaagaaatcgaacatttcggaattaagatatatcaatttccagactgtgattcggacgaggatgaagatttcaaacttcaagatcaggccctcaaagagtccattccattcgcagtgatcgggtcgaacaccgtggtggaagcacgaggtcgacgggtgagaggacggctttacccttggggaatcgtggaggtggaaaacccaggccattgcgattttgtgaaacttcggaccatgcttgtcagaacccatatgcaggacctgaaggacgtgaccagagaaacccactacgagaattaccgtgcccagtgcatacaatccatgactaggctggtggtgaaagaaagaaacagaaataagctgacgcgagagtcgggtactgattttcctattcccgccgtgccacctggtactgatccagagactgaaaagctcattcgcgaaaaggatgaagaactcagacggatgcaggaaatgttgcacaagatccagaagcagatgaaggagaattac

SEQ ID NO: 147770 - DNA, 1434 bp, Artificial Sequence
  derived and/or modified sequence
atggataggtcactcggatggcaggggaattccgtgcctgaagataggactgaagcaggaataaaaagatttctggaagatacaacagacgatggggagctatctaaattcgtaaaagatttcagtgggaacgcgtcgtgtcacccacctgaagctaaaacttgggcatctcggccacaggtacccgagcccagacctcaggctcccgacctttacgatgatgatctcgaattcaggccaccctcgcggcctcagtcttccgataatcagcagtatttttgcgcccccgccccactctcacctagtgccaggcctagatctccatggggaaaactggatccctacgattcctctgaagatgataaagaatacgtggggttcgctacactacccaaccaggtgcaccgaaagtccgtcaaaaaaggatttgactttacacttatggtcgcaggagaatcggggctcggaaaatctactctagtaaacagtttattcctcacagatctttatcgggatcgaaaactgctgggagctgaagaaagaatcatgcagacagtggaaataacaaaacatgccgttgacattgaagaaaagggagtacggctgcgactcactattgttgacactccaggatttggggatgctgtgaataatactgagtgttggaaaccagtcgccgaatatatcgaccagcagttcgaacagtatttccgtgatgaatctggacttaaccgcaaaaatatacaagataatagagtgcactgttgcctatacttcatctcccccttcgggcatgggctaagaccccttgatgtggaattcatgaaagctctacaccagcgggtcaatattgttcccatattggccaaagctgatacacttactccacctgaagtggaccacaaaaaaaggaagatccgggaggaaatagaacattttggaataaaaatttatcagtttccagattgtgactccgatgaagatgaagatttcaaactccaagaccaagctctcaaagaatcaatcccattcgccgttatagggagtaatactgtcgtggaagctcgggggcgccgggtgaggggaagactgtacccctgggggatagtagaagtggaaaaccccgggcattgtgatttcgtcaaacttaggacaatgctggtgcgcacacacatgcaagatttgaaagacgtgacaagggaaactcattatgaaaattatagggctcagtgtatccagtctatgacaagactggttgtgaaagaacgaaataggaacaaactcacacgagaatccggaacagatttcccaattcctgccgtgccccccggaacagatccagaaacagaaaaattgatacgcgaaaaggatgaagaattaagaagaatgcaggaaatgctccataaaattcagaaacagatgaaggaaaattat

SEQ ID NO: 147771 - DNA, 1434 bp, Artificial Sequence
  derived and/or modified sequence
atggaccggagtcttggctggcaggggaatagcgtacctgaagacaggacagaggcaggcataaagagattcctcgaagatactactgacgacggtgaactgtctaaattcgtcaaagatttcagtggaaacgctagctgccacccgccggaggctaaaacatgggccagcaggccacaggtccccgagcctcgaccacaagccccagacttgtacgatgatgaccttgagtttaggcctccttctaggccacagtctagcgataatcaacagtatttctgcgcaccagctcccctgtcccctagcgcgcgcccccggtcaccatggggtaagctggatccttacgatagctctgaggacgacaaggagtacgtgggtttcgctaccctaccaaatcaagtgcaccgcaaatccgtcaaaaaaggctttgattttacactgatggttgctggcgaaagtgggcttgggaagtctaccctggtcaactcactcttcctgacagatctgtatagagatcgcaaacttcttggagcagaggaacgcattatgcagactgtcgaaatcaccaaacacgccgtagacattgaagagaaaggcgttaggcttaggctgaccatcgtggatacaccgggctttggagatgctgtgaacaacactgagtgttggaaacctgtcgcagaatacatagatcagcagttcgagcaatactttagggatgagtctggattgaaccgaaaaaacatccaggacaatagagtacattgctgtttgtactttatcagccctttcggccacggtctcaggcccctggacgtggagttcatgaaggctctccaccaaagagttaatatcgtacctatcttggcaaaggcagatacattaacccccccagaggttgaccacaaaaaaaggaagatcagagaagagattgaacactttggtatcaagatctatcaatttcctgattgcgactctgacgaggacgaagattttaagcttcaggaccaggctctaaaagaatcaattccctttgccgtcatcggcagtaacacagtagttgaggccagaggtcgcagggtcagggggcggctgtatccatggggcatcgtcgaggttgagaaccctggacattgcgatttcgtgaaactaagaacgatgctggttcgcacccatatgcaagatttgaaagatgtcacgcgggagacccattacgaaaactatagggctcagtgcatacaatctatgactagactggtcgtgaaggagagaaacagaaataaactgactcgggagtctggcaccgatttcccgattcctgcagtgccgcccggtactgacccagagacagaaaaacttatccgcgagaaggatgaagaactcaggaggatgcaagagatgctgcacaagattcaaaaacaaatgaaagaaaactac

SEQ ID NO: 147772 - DNA, 1434 bp, Artificial Sequence
  derived and/or modified sequence
atggacagaagtttaggctggcaaggaaatagtgtcccagaagatagaacggaggctggaataaagcgtttcctcgaagatacgactgatgatggagaattgagtaagtttgttaaggatttctctggtaatgcgagctgccatccaccagaagctaagacatgggcttcaagaccacaagtgccggaaccacgcccccaggctccagatctctacgatgacgaccttgagtttcgcccaccatccagaccacaatcttctgataaccagcaatatttctgtgcaccagcaccactttctcctagtgcacgcccgcgatcaccatggggtaagctggatccatacgattcatccgaagatgacaaggagtatgtcggattcgctacgttaccgaatcaagtacaccgaaagagtgttaagaaaggttttgatttcactttgatggtcgccggcgaatcaggacttggtaaaagcacactggtaaatagtctattccttactgatttataccgtgatagaaaacttctcggagcagaagaaagaatcatgcaaactgtggaaataacaaaacatgccgtagatattgaagaaaaaggtgtccgcttgcgattaacaatcgtagataccccaggttttggagatgcagttaacaatacagaatgctggaaaccagtcgccgaatatattgatcaacaatttgagcaatattttcgcgatgaatccggacttaaccgtaagaatattcaagataatagagtacattgctgtttgtatttcatctctcccttcggtcatggattgcgaccacttgatgttgaattcatgaaggcactgcaccaaagggtgaatattgttccgatccttgccaaggctgacacattaacaccgccagaggtcgaccataagaaacgaaaaatacgagaagaaatcgagcatttcggaattaaaatataccaatttccggattgcgatagcgatgaggatgaggattttaagcttcaggaccaggctttaaaggaatcgattccttttgctgtgattggatccaatacggttgtagaagcacgggggcgacgagtgcgcggaagactttatccctggggtatcgtagaagttgaaaatcctggacattgtgatttcgtgaaactccgtacaatgttggtccgaacccatatgcaagatctcaaagatgtaactcgggagactcattatgaaaattatcgagcccaatgtattcagtcaatgaccaggttggtcgttaaggaacgcaatagaaataaactcaccagagagtcgggaacggacttccctatcccggccgttccaccgggtacagatcctgaaacggagaaattaattagagagaaagatgaggaattacgcagaatgcaagagatgcttcacaagattcagaagcaaatgaaagaaaattat

SEQ ID NO: 147773 - DNA, 1434 bp, Artificial Sequence
  derived and/or modified sequence
atggatcgctccctgggatggcaaggtaacagcgtgccggaggacagaaccgaggccggaatcaagcggttcctggaagacactaccgacgacggagaactgtccaaattcgttaaggacttctcgggaaacgccagctgtcacccgccggaagccaagacctgggcttcaaggccgcaagtgccggaaccgaggcctcaggccccggatctgtacgacgacgaccttgagtttagaccaccgtcacggccgcaatcatccgataaccagcagtacttctgcgctccggcgcctctgtcaccctcagcgcgcccgcggtcgccatggggaaagctcgacccgtacgattcgtctgaggacgataaagagtacgtgggcttcgcaaccctgccaaatcaagtccatcgcaagagcgtgaagaagggattcgattttactctgatggtggcaggagagtctggactcggaaagtccacgctcgtcaattcattgttccttactgacttgtaccgggaccggaagttgctcggtgccgaggaacgcatcatgcaaaccgtcgagattaccaaacacgcagtggacatcgaagagaagggagttagactgcggctgactattgtggacacccccggtttcggcgatgctgtcaacaatactgaatgctggaagccggtggcggagtacatcgaccaacaattcgagcagtattttagagacgaatcgggccttaatcgtaagaacatccaggataaccgggtgcactgttgcctgtacttcatcagcccgttcggccatggtcttaggccgctggacgtggaatttatgaaggccctgcaccagagagtcaatatcgtgccgatactggcgaaagctgacaccctgactccgccggaggtggaccataagaaaagaaagattcgcgaagagatcgaacacttcggaatcaaaatctaccaatttccagactgtgactctgatgaggacgaggactttaagttgcaagatcaggctctcaaggaatccatccccttcgccgtcatcggatcgaacacggtcgtcgaagcgagaggccgccgcgtgcgaggaagactgtacccgtggggaattgtggaagtggagaatccaggccactgcgatttcgtgaaacttaggactatgctcgtccgcactcacatgcaggacctcaaggacgtcaccagggaaactcactacgaaaactaccgcgcccaatgcatccaatcaatgacccggctggtcgtgaaggagagaaacagaaacaagctgactagggaatccggcaccgacttcccaatccctgcggtgccgcctggaaccgacccggagacggaaaagctgatcagagaaaaggacgaggaactccgaaggatgcaggaaatgctccacaagattcagaagcagatgaaggagaactac

SEQ ID NO: 147774 - DNA, 1434 bp, Artificial Sequence
  derived and/or modified sequence
atggatcgcagtttagggtggcagggaaactccgtgcccgaagatcgcactgaggcagggatcaaacggttcctggaagatacaactgacgatggagaactatccaaattcgtgaaagatttcagtgggaatgcatcatgccacccccccgaggctaaaacttgggcctcacggcctcaggtgcctgaaccacggccacaggcccccgatctttatgatgatgatcttgaatttagacctccttcaagacctcagtcctccgataaccaacagtacttctgtgctcccgcccccctgtctccatctgcgaggcctcgaagtccctgggggaaactcgatccatatgattcttccgaagatgataaagagtatgtgggattcgccactttgcctaatcaggtgcacaggaaaagtgtaaaaaaagggttcgactttacactgatggtggccggggagtctggactgggaaaaagtacactcgtgaactctttattcctgacagacctatacagggacaggaaactacttggagccgaagaacggattatgcagactgtggaaataactaaacatgccgtcgatatcgaggagaaaggagtacgcctcagactgacaatagtggacactccaggattcggagatgcagtgaataatactgaatgctggaaaccagtagcagaatacatagatcagcagtttgaacagtatttcagagatgaatcggggctcaacaggaaaaatatacaggacaatcgcgtgcattgctgtctctatttcatctctccattcggacatggactgcggcccctggatgtcgaattcatgaaagccctgcatcaaagggtaaatatagtcccaattcttgctaaagcagatactctgacaccaccagaagtcgatcacaaaaaaagaaaaatacgggaagaaattgaacacttcggaataaaaatttaccagtttccagattgtgattccgatgaggacgaggatttcaaactccaggatcaggctttaaaagaatctatacccttcgctgtgataggaagtaacacagtggttgaagcacgcggaagacgagtgcgagggcgactgtatccatgggggattgtagaagtagaaaaccctggacattgtgattttgtcaaattaaggactatgttagtacgaactcatatgcaggatctgaaagatgtgacacgagaaactcattatgagaattacagggcccaatgcatacagtctatgacaaggctcgtagtgaaagagcggaaccgaaacaaattaactcgagaatctgggacagatttcccaatccctgccgttcctcctgggactgatcccgaaacagaaaaactgatccgggaaaaagacgaagaacttcggcgtatgcaggaaatgctgcacaaaatacaaaaacagatgaaggagaattat

SEQ ID NO: 147775 - DNA, 1434 bp, Artificial Sequence
  derived and/or modified sequence
atggatcgaagtcttggatggcagggcaactctgtgccagaagatcgcactgaggccggaattaagcggttcctggaggacaccaccgatgacggagagttgtccaagttcgtcaaggacttcagcgggaacgcatcctgccatccgcccgaggctaagacgtgggcatcaagaccgcaggtgccggaacctcgtccacaggcgccagacttgtatgatgacgacctcgaatttcgtccaccgtcaaggccgcaatcatcggacaatcagcagtatttctgcgctccggccccactctcaccgtcggccaggcctagaagcccgtggggaaagctggatccttacgactcatccgaagatgataaagaatacgtcggatttgctaccctgccgaaccaggtacaccgcaagtccgtgaagaagggatttgacttcactctgatggtggccggggagtccggtcttggtaagtcgaccctggttaactccctctttctgactgatctttaccgcgacaggaaactcctcggggccgaggaacgaatcatgcaaaccgtggaaatcacgaagcatgcggtggacatcgaagagaagggcgtgcgcctccggctgaccattgttgatactccaggattcggagacgctgtgaacaataccgaatgctggaagcccgtcgcagagtacatcgatcagcagttcgaacagtacttcagagacgaatcgggtctgaacagaaagaatattcaagacaaccgcgtgcactgttgcctctacttcatctcgcctttcggccatggacttcgccccctcgacgtagaattcatgaaagcacttcatcagcgcgtgaatatagtgccgatcctggccaaagcggacaccctcactccaccggaagtcgaccacaaaaagcgaaagatccgggaagaaatcgagcattttggcatcaaaatctaccagtttcccgattgcgactccgacgaggatgaggatttcaagctgcaggaccaagccctgaaggaatctatcccattcgcagtgatcgggtccaatactgtcgtcgaagcgcggggccgtcgggtgcgcggccgcctgtacccttggggaatcgtcgaggtggagaacccgggacactgtgacttcgttaagctgcggaccatgcttgtgcgcactcacatgcaggacctgaaggatgtaactcgcgagacgcactacgagaactaccgtgcccaatgcatccaaagcatgacccgcctggtcgtgaaggaacggaacaggaacaaactgactagagaatctggcaccgatttccctatccccgcggtgccacctgggactgatccggaaaccgagaaattgatccgggaaaaagatgaggaactgcgccggatgcaagagatgttgcacaagattcaaaaacaaatgaaggagaattac

SEQ ID NO: 147776 - DNA, 1434 bp, Artificial Sequence
  derived and/or modified sequence
atggataggtctttgggatggcagggtaacagcgtgccggaggacaggactgaggccgggatcaaacggttccttgaggatacaacagatgatggggagttgtctaaattcgtcaaggactttagtggtaatgcaagctgtcaccccccagaggcaaaaacctgggcttcacggcctcaggttcctgagccaagacctcaggctcccgacctgtatgatgacgatctggaattccgaccgccatctaggccacagagctcagataaccagcagtacttttgcgctcctgctccactctcaccaagcgcccgaccccggtccccttggggcaaactggacccttacgattcttctgaggatgataaagagtacgtcgggttcgctacccttcctaatcaggtacaccgaaagtccgtgaagaagggattcgacttcaccctcatggtcgccggggagagcggtctcggaaaatctactttggtcaattccctgttcctgactgacctttacagagacagaaaactgctgggcgctgaggaaaggatcatgcagacagtggaaataaccaagcacgccgtggacatagaggaaaagggtgttaggctgcgcctgactatcgtagacactccagggttcggagatgcggtgaacaataccgagtgctggaagcccgttgctgaatacatcgaccaacagttcgaacagtactttcgcgatgaatctggattgaatcggaagaacatacaggataaccgagtccactgttgcctgtatttcatttcccctttcggccacggcctgcgccctctggatgtggaattcatgaaggccctgcaccagcgggtcaacattgtgcctattttggccaaggccgacacacttactccgccagaggtggatcacaaaaaacgcaaaatccgggaggagattgaacattttggtatcaagatttaccagtttccggactgcgactccgatgaggatgaggacttcaagttgcaggaccaggcccttaaagaatcaatcccttttgctgttattggatctaataccgtggtagaggctagagggcggcgagtgagggggcggctttacccttggggaattgtggaggtcgaaaacccggggcactgcgattttgtgaaactgaggacgatgctggttagaactcacatgcaagaccttaaggatgtgaccagagaaacacactacgaaaactacagggctcagtgtattcaaagtatgacccggcttgtggttaaggaacgcaataggaacaagctcacacgggaatcaggaacagatttccctatccccgccgtgccgccaggtacagacccagagacggagaagttgattcgggagaaagacgaggaactgcggaggatgcaagaaatgttgcataaaattcagaagcagatgaaagaaaactac

SEQ ID NO: 147777 - DNA, 1434 bp, Artificial Sequence
  derived and/or modified sequence
atggatcgctcattgggctggcagggtaactcggtgcctgaggacaggactgaagccggtatcaagaggttcctggaagataccaccgacgatggtgagctgagcaaatttgtgaaggactttagcggcaacgcatcctgccacccgcctgaagctaagacctgggcttcgcggccgcaggtgcccgaacctcgcccgcaagcgccggacctctacgatgacgatctggaattccgccctccgtcgcgccctcagagctcagacaaccagcaatacttctgcgccccggcaccgttgtcgccttctgcccgtccacggtccccgtgggggaagctggatccgtacgactcgtcagaggatgataaggagtacgtgggatttgctacccttccgaaccaggtccatcgcaagagcgtgaagaagggctttgatttcaccctgatggtggctggagagtctggactgggaaagagcactctcgtgaattcgctcttcttgacggatttgtatagagatcggaagctgctgggcgcggaagagagaatcatgcagaccgtggagatcactaaacacgccgtggacattgaagagaagggagtgcgactccgcttgacgattgtggacactcctggtttcggagatgctgtgaacaacacggaatgctggaaaccggttgcggagtacatcgatcaacagttcgaacagtacttccgcgacgagtcgggactgaatcgcaagaacatacaggataacagagtgcactgctgcctgtactttatctcaccattcggccacggcctgcggccactggacgtcgaattcatgaaggcccttcaccagagagtcaacatcgtgcctattctcgccaaggcagataccctcaccccgcccgaggtcgaccacaaaaagcgcaagatccgcgaagagatcgaacactttggtatcaaaatctaccagttcccggattgtgactctgatgaggacgaggacttcaagctccaggaccaggcactcaaggaatcgatccctttcgccgtgatcggatcaaataccgtggtggaagcacggggcaggcgggtgcggggcaggctctacccatgggggatcgtggaagtcgaaaatccgggtcactgcgacttcgtgaagctgcgcactatgcttgtcaggactcatatgcaggatctgaaagacgtgacccgggaaacgcactacgaaaactacagagctcaatgtatccagtcaatgactcggctggttgtgaaagaaaggaatcgcaacaaattgacccgtgaatccggcactgatttcccgatcccagccgtccctcccggaactgatcccgaaactgagaagctgatcagagagaaagatgaggagctgcgcagaatgcaggaaatgctgcacaagatccagaagcaaatgaaagaaaactac

SEQ ID NO: 147778 - DNA, 1434 bp, Artificial Sequence
  derived and/or modified sequence
atggatcgaagcttgggctggcagggaaactccgtgcccgaggaccggaccgaggccggcataaaaaggttcctcgaagacactacagacgacggggagttatccaaatttgtgaaagatttttctggtaatgcctcctgtcatcctcccgaagccaagacctgggcatctcgccctcaggtcccggagcctcggccccaagcccccgatttgtacgatgacgatctggagttcagacctccgtccagaccccagtcaagcgacaaccagcagtacttttgtgcaccagcaccattgagtccgtcagcacgtcctcgctccccatggggaaaactagacccttacgatagtagcgaagacgataaggagtatgtgggcttcgccacgctgccaaatcaagtccaccgtaagtcagttaagaagggattcgattttacactcatggttgcgggtgaatcgggattggggaagtccaccctcgtcaattccctctttctgactgacctgtatcgcgacagaaaacttctcggtgccgaggagagaatcatgcagactgtggaaatcacaaagcatgctgtggatatcgaggagaagggggtgagattgcggctcaccatcgtggatacgcccgggttcggagatgctgttaataacactgaatgttggaagcctgtcgctgagtatatcgatcagcagttcgagcagtactttagggatgaaagcgggctgaatcggaaaaacattcaggataatcgcgtgcactgctgtctttactttatttctcctttcggtcatggactgcgtccactggacgtagagtttatgaaagccctgcaccagagggtaaacattgttcccatattggcaaaggcggacacattaacccctccggaggtggaccataaaaagaggaagatcagagaggaaatagagcattttggcattaagatctaccaatttccagactgcgacagcgacgaggatgaggattttaaactccaggaccaagcccttaaagaatccataccatttgctgtcatcggtagcaatacagttgtggaagcccgcggaagaagagtgcgcggtcgactgtacccatggggcatcgtggaagtcgagaatccgggacactgcgattttgtgaagctgaggacgatgctcgtgcgaacccacatgcaggatcttaaggatgttacgcgcgagacgcattacgagaactacagggctcagtgcatccagagcatgaccagactggttgtaaaggaacgaaacagaaacaaactcacgcgtgagagcggaactgatttccccattcccgcagtccccccaggcaccgaccctgagacggaaaagctgatccgtgagaaggatgaagagctccgcagaatgcaggagatgcttcacaagatacaaaagcagatgaaagagaactat

SEQ ID NO: 147779 - DNA, 1434 bp, Artificial Sequence
  derived and/or modified sequence
atggaccggtccctcggctggcagggcaacagtgttccagaggaccggacagaggctggaatcaaacggttcctggaggataccactgacgatggggagctttccaagttcgtgaaggacttctcggggaatgcgtcctgccacccacctgaagctaagacttgggcttccaggccgcaggtgccagaaccgagaccacaagccccggacttgtacgacgacgatctggagttccgacctccttcacgtccacagtcctcagacaatcagcagtatttctgtgccccggctcccctgagtccatctgctagaccacgcagtccatggggaaagctggatccctatgacagttccgaagatgacaaggagtatgttgggttcgccaccctgccgaatcaagtccataggaagtcggtgaaaaagggcttcgattttaccttgatggtcgcaggagagagtggcctggggaaatcaacccttgtgaattcattattcctcactgatttataccgcgatcgtaaactcttaggagcagaagaaagaattatgcagacagtggaaataaccaaacacgccgtcgatatcgaagagaagggcgtgcgcctgaggctgaccatagttgacacccctgggttcggtgatgccgtaaacaataccgagtgctggaagcccgttgccgagtacatagatcaacaatttgagcaatacttccgagacgagtctggactgaacagaaaaaacattcaggacaatcgagtacactgctgtctttactttatctcccctttcggtcacgggctgcgcccactggatgtagaatttatgaaagccctgcaccagcgggttaatatagttcctattcttgcaaaagccgacaccttgaccccaccagaggtagatcataagaagaggaaaatcagagaagagatcgagcattttgggatcaagatttaccagttcccagactgtgatagtgatgaggacgaagacttcaagctccaggaccaagccctcaaagagtctatcccgttcgctgtaattggttcaaacacagtcgttgaggctcgtggtcgtcgggttcggggccgtctctacccctgggggattgtggaggtcgagaatccaggccactgtgacttcgtgaagctgcggactatgcttgtccggacccacatgcaagatctcaaagacgtgacacgcgagacccactatgagaattaccgcgcacaatgcatccagagcatgactagactagtggtaaaggagcgcaatcgtaacaagttgacccgagagagcggaactgatttcccaatcccggcggtacctccgggcactgaccccgaaacagaaaagctcatccgggagaaggacgaggaactgaggaggatgcaggagatgttgcataaaatccagaagcagatgaaagaaaattac

SEQ ID NO: 147780 - DNA, 1434 bp, Artificial Sequence
  derived and/or modified sequence
atggacaggagcctcggatggcaggggaactcggtgccggaagatcgcacggaggcaggcatcaagcggtttctggaagataccactgacgatggggagctgtccaagtttgtgaaggatttctcaggtaacgcctcttgccaccctccggaggccaagacatgggcttctcggcctcaggtgccagaaccaagacctcaagcacccgatttatacgacgatgacttggagtttcgaccaccatcaaggccccagagtagtgataaccaacagtatttttgcgccccagctcccctaagccccagcgcgagaccccgatctccctggggcaagctggacccctatgacagcagtgaagacgacaaagaatacgtgggtttcgctacgctgccgaatcaagtgcatcgcaaatctgtcaagaaggggtttgacttcaccttgatggtagccggtgagtcagggcttggtaagagtaccctcgtgaactccttgttcttgaccgatctgtatcgggaccggaaactgctgggtgcggaggagaggattatgcagacagtggaaattactaaacacgctgtggatattgaagagaagggagtgaggctgcggcttactattgtggatacccccggctttggggacgccgtgaacaataccgagtgctggaagcctgtggcagagtatatagaccaacagtttgaacaatacttccgagatgaaagcggtctgaatcgcaagaacatccaagacaaccgcgtccattgttgcctgtattttatcagtccgttcggacacgggttgagacctctggatgtggagttcatgaaagccctccaccagagggtcaacatcgtccctattctcgccaaggccgataccctgacaccccctgaagtggatcacaaaaaacggaaaatacgcgaagagatcgagcacttcggcatcaagatatatcagttcccggactgtgattccgacgaggacgaggactttaaattacaggaccaggcgcttaaggaatctatcccttttgctgtgatcggatcgaatacggttgtggaggctcgaggccgcagggtaaggggcagactctatccctggggcatcgtagaggttgaaaatcccgggcactgcgacttcgtgaaactgagaactatgctcgtgaggacacacatgcaagatttaaaggacgtcaccagagaaacccactatgaaaattaccgggcacaatgcatacaaagtatgacgaggcttgtggttaaggagaggaaccgcaacaaactgacgcgggaaagtggtaccgactttcctatccctgctgttccgcccggcacggatccggaaactgaaaagctgattcgcgaaaaggacgaggagctccggaggatgcaggaaatgttgcacaagatccagaaacagatgaaagagaattac

SEQ ID NO: 147781 - DNA, 1434 bp, Artificial Sequence
  derived and/or modified sequence
atggacaggtcattgggctggcaaggaaatagtgtgcccgaagatcgtaccgaagcaggtattaagcgcttcctggaggacactactgacgatggcgaactgagtaagttcgttaaggacttctcgggcaatgcctcctgccatcctcctgaagccaaaacctgggccagtaggccccaagtcccagaaccacggccccaggctcctgatttatatgacgacgacctggagtttcggcccccaagtcggccgcagtcttccgataaccagcagtacttctgtgcacccgcccctttgagcccatcagcaagacctcgatctccctggggaaaactggacccctatgatagcagtgaggatgacaaggagtatgtgggcttcgctactctgcccaatcaggtgcatcgtaagtcggtgaagaaagggttcgactttacacttatggtcgctggggaaagcggactggggaagagtactctggtgaattccctattcttgacagacctgtatcgcgaccggaagctgctgggcgctgaagagagaatcatgcagacagtggagatcaccaagcatgcagtggatatcgaggagaaaggggtaagacttcggttgacgattgtggacacgccagggttcggcgatgccgtgaataatacagagtgttggaaacccgtagcggaatacatcgaccagcagtttgaacagtatttccgagatgagtccggactcaatcgcaaaaacatccaggataaccgcgtgcactgctgcttgtactttatcagtccctttggtcatggattgagacctctcgatgtcgagtttatgaaggccctgcatcagcgtgtgaacattgtgcccattcttgccaaggccgatacccttactcccccagaggtggatcataagaagagaaaaattcgcgaggagattgagcacttcgggatcaaaatctaccagttcccggactgtgactcagacgaggacgaggatttcaagttacaagaccaagccctaaaagaaagcatcccattcgcggtaattggtagcaacaccgtggtggaagcccgcggacgtagggtcagagggcgcctatacccctggggaattgtagaggtcgagaatccaggccattgcgacttcgttaagcttcgcactatgttggtgcgtacccatatgcaggatcttaaggatgttacacgtgaaactcactatgagaattaccgcgctcagtgtatccagagcatgacaaggctggtcgtgaaggagcgcaacaggaataaattgacacgggagtctggtacagatttcccgatcccagctgtgcccccaggcaccgatccagagactgaaaaattgattcgggaaaaggacgaagagctgaggcggatgcaggaaatgctccacaagatacaaaaacagatgaaagaaaactac

SEQ ID NO: 147782 - DNA, 1434 bp, Artificial Sequence
  derived and/or modified sequence
atggacaggagccttggttggcagggaaacagtgtgccagaagacagaacagaagctggaattaagcgttttctcgaagatacaaccgacgatggtgagcttagcaagttcgtcaaagacttcagcggtaatgcaagttgccacccaccagaggctaagacttgggccagccgccctcaggtacccgaaccacgtcctcaggctccagatctctacgatgatgacctggagtttcgtccacctagccgccctcagtcctcagacaaccagcaatatttctgtgcccctgcaccattgagcccatccgcacgtccacgctccccctggggtaaactggacccctatgacagtagcgaggacgacaaagaatatgttggcttcgcaaccctgcccaaccaagtccataggaaatcagttaaaaagggattcgattttaccctgatggtggccggtgagtccggcctgggcaagagcacccttgtaaactctctttttctcactgatctctaccgtgatagaaaactcctcggagcagaggaacgcattatgcaaacagtggagattacaaaacacgccgtggacattgaggagaagggtgtccgcctgcgcctgaccatagtcgatacacccggatttggtgatgctgtcaacaacactgagtgttggaagcctgtggctgagtacattgatcaacagttcgaacaatatttccgtgatgagtctggtctgaacaggaagaacatccaagacaacagagtccattgttgcctgtattttatcagccccttcggacacggcttgaggccactggatgttgagttcatgaaagctctccatcagagagtaaatatcgttcctattttggctaaagctgatacattgaccccccccgaggtcgatcacaagaagcgtaagatacgtgaggaaatcgagcacttcggaattaagatttaccagtttcccgattgcgactctgacgaggatgaggatttcaagctccaggaccaggctctcaaggaatctatccccttcgctgtcattggcagtaataccgtggtcgaagctagaggacgccgcgtccgcggccgcctttacccatggggtattgtggaggtagaaaaccccggacactgcgactttgtgaaactgaggactatgttggtgaggacccatatgcaggacctcaaagacgtcacccgcgagacacactatgagaactatcgcgcacaatgcatacagtctatgacaagactggttgtgaaggaacgtaatagaaataaattgacccgcgaatccggaacagacttccctatacccgcagtgcctccaggtaccgatccagagactgaaaagctgatcagggagaaagacgaggagctgaggaggatgcaagaaatgctgcataaaatacagaagcagatgaaggagaattac

SEQ ID NO: 147783 - DNA, 1434 bp, Artificial Sequence
  derived and/or modified sequence
atggacaggtcccttggatggcaaggcaatagcgtgccggaagatagaaccgaagcaggtataaagagatttctggaagataccactgatgatggcgaactttccaaatttgtgaaggacttttcggggaacgcatcctgtcatccgccagaggcaaagacttgggctagtagacctcaagtgcctgagccgcgtcctcaggcaccagacctctacgacgacgaccttgagtttaggccacctagccggccacaatcatccgataatcaacaatacttttgtgccccagcaccccttagcccttccgctcgcccaagatccccatgggggaaacttgatccctacgattcgtcagaggacgacaaggaatacgtcggatttgctaccctgcctaaccaagtgcatagaaaatccgtgaaaaagggttttgactttactctgatggtcgcaggagaatcgggtcttggcaagagcacgctcgtcaattccctttttctgaccgacctttaccgggataggaagctgctgggtgctgaggaaagaatcatgcaaaccgtcgaaattaccaagcacgccgtcgacattgaagagaagggtgtgcgactccgactcaccattgtggataccccaggattcggagacgcagtgaacaacactgaatgctggaagcctgtggcagaatacattgatcagcaattcgaacagtactttagagacgagtcaggactcaacaggaagaatatacaggataaccgcgtgcactgttgtctgtactttatctccccatttgggcacggcctgaggcccctggatgtggagttcatgaaagcacttcaccaacgagtgaacatcgtgccaattctcgcaaaggctgacactcttactcctcctgaagtcgaccataagaagcgcaaaattcgggaagagattgagcatttcggaataaagatttaccaatttccggattgcgattcagatgaggatgaggactttaaactccaagatcaggcactgaaagaatccattcccttcgcagtgatcggatcgaataccgtcgtcgaagcgcgcgggagacgcgtgcgaggacggctgtacccctggggcattgtcgaggtggaaaaccccggccattgcgactttgtcaaactgcgaactatgctggtccgtacccatatgcaagatctgaaggatgttactagggagactcattacgagaattacagggcacaatgtatacaatctatgactcggcttgtggtgaaggaaaggaaccgtaacaaactgacccgtgagagcggcactgactttccaataccagccgtgccacctggaaccgatccagagactgagaaactgatcagagaaaaggatgaagagcttcgtagaatgcaggaaatgctgcataagatacagaagcaaatgaaggaaaactac

SEQ ID NO: 147784 - DNA, 1434 bp, Artificial Sequence
  derived and/or modified sequence
atggaccgctcgttgggatggcagggaaattcagtgccagaggaccgcactgaagctggcatcaaacgcttcttggaggatactaccgatgatggagagctgtcaaagtttgtgaaagacttctcgggtaacgcttcctgccaccccccggaagccaagacttgggccagccgcccacaggtcccggaaccaagaccacaggcccctgacctttacgatgatgatctggaattccgacctccgagcagaccacagagctcggataaccagcagtacttttgtgcgccggcacccctgtcaccgtcagctagaccacgcagcccgtggggaaagctggatccctacgattcgagcgaggatgacaaggagtacgtgggatttgccaccctcccgaatcaggtgcacaggaagtcggtcaagaagggattcgacttcaccctgatggtggccggagaaagcgggctggggaaatcgactctggtcaactcgctgtttctcactgacctctaccgcgatcgcaaactgctgggagcggaagaaagaatcatgcaaaccgtcgaaatcacgaagcatgccgtggatatcgaagaaaagggtgtcaggctgcggcttaccatcgtggacaccccgggatttggcgacgccgtgaacaatactgagtgctggaagcctgtggctgagtacatcgatcaacagttcgaacaatactttcgggacgagtcgggcctgaacagaaagaatatccaagacaatcgggtgcactgctgcctctactttatctcgccctttgggcatggactgcgcccgttggatgtggagtttatgaaggctctgcatcagcgcgtgaacattgtgcccattctcgcgaaggccgacacccttaccccacctgaggtggaccataagaagcgaaagatcagggaggagatcgaacacttcggaatcaaaatctaccagttcccggactgcgattccgacgaggacgaggacttcaagctgcaggatcaggcactgaaggaatctatcccgttcgcagtgatcggctcgaacaccgtcgtggaagcacgcgggcggagggtgcggggccggctgtacccctggggaatcgtggaggtggagaacccgggacactgcgactttgtgaaactccgtaccatgctggtccggacccacatgcaggatctgaaagatgtgacccgcgaaactcattacgaaaactaccgcgctcagtgcattcagtccatgacgcggctggtggttaaagaaagaaatcgcaacaaactcacccgggagtcaggcactgattttccgattcccgccgtgcctccaggtactgatccagagacggagaagctgatccgcgaaaaggacgaagagttgcggcggatgcaggagatgctgcacaagatccagaaacaaatgaaggaaaactac

SEQ ID NO: 147785 - DNA, 1434 bp, Artificial Sequence
  derived and/or modified sequence
atggatcgttcccttgggtggcagggaaatagtgtgcctgaagaccgaacagaggccgggatcaaacgattccttgaggacacgacagatgacggggaactgtctaaatttgtcaaggacttctcagggaatgcatcctgccaccccccagaggccaagacatgggcttcaaggccccaggtgcccgaacccagaccccaggcccctgatctatatgatgatgacctggaatttcgccctccttctaggccacagtcgtctgataatcagcaatatttctgcgccccggcccctctgtcgcccagcgcccgacccaggtccccctggggcaagttagatccatacgactctagcgaggacgacaaggagtatgtagggttcgccacgctgcctaaccaggtgcatcggaagtcggtcaaaaagggcttcgattttactctgatggtggctggggaaagcggactgggcaaatccacactggtgaattctcttttcctgaccgacctgtacagagatcgcaagttgctgggtgcggaggagcggattatgcagaccgtcgagattacaaagcacgcagtggatatcgaggaaaagggggtccgcttgcgtctgactatcgttgacactcctgggttcggagatgcagtgaacaacacagaatgctggaagccggtggccgaatacattgaccagcaatttgagcagtatttcagggacgaatctggtctcaatcggaagaacatccaggataacagggtgcactgttgcctgtacttcatttcaccctttgggcacggcctacggcctttggatgtggagttcatgaaggcactgcatcagcgtgtgaatattgtcccaatcctagcgaaagcggacactttaaccccccccgaggtcgatcacaaaaagagaaaaatacgcgaagagattgagcacttcggaattaaaatatatcagtttccggactgcgactccgacgaggatgaggactttaagctccaggaccaagcactgaaagagtccataccgtttgccgtcatagggtctaacacagtagtggaagccagagggaggcgggtgcgcggccgcctgtacccatgggggatagtggaagtcgagaatccaggtcactgcgatttcgtcaaattacggaccatgttggtccggactcatatgcaagatctcaaggatgtaactcgtgaaacccattatgaaaactatcgcgctcagtgcatacagtccatgacccgcttggtggtcaaagagcgcaaccgcaataagctaaccagggagagtggcacagacttcccgatcccagccgtccctcctggaactgaccctgagacggagaagctaattagagagaaagatgaggagctgagacggatgcaggagatgctccacaaaattcagaaacaaatgaaggaaaactat

SEQ ID NO: 147786 - DNA, 1434 bp, Artificial Sequence
  derived and/or modified sequence
atggatcggtcgctgggctggcagggcaatagcgtccctgaggaccgcaccgaggcaggaatcaagcggttcctggaggacaccactgatgatggagagctgagcaagttcgtgaaagacttctcaggcaacgcttcctgccatcccccagaagccaagacgtgggcgagcaggccgcaggtgccggagccacggccacaagctccggacctttacgatgacgacttggaattccggccgccgtcgcgcccacagtcctcggataatcagcaatacttctgcgcgccggcccctctctcccctagcgcaaggcctcgcagcccgtggggaaaactggacccctacgactcgtcggaggatgacaaggaatacgtgggatttgccactctcccgaatcaggtgcaccgcaagtcggtcaaaaagggtttcgattttactctcatggtcgcaggggaatccggactggggaagtcaacgttggtgaactctctgtttctcaccgatctgtaccgggatagaaagctgctgggagctgaggagagaataatgcagactgttgaaatcactaagcacgccgttgacatcgaagaaaagggagtccgtctccggctgaccatcgtggatactccaggatttggcgacgcggtcaacaacacggaatgctggaaaccagtggcggaatacatcgatcagcaattcgagcagtacttccgcgatgagtcaggactcaaccgaaaaaatatccaagacaaccgcgtgcactgctgcctgtacttcatctccccttttggtcatggcctgaggccactggacgtggaattcatgaaggccctgcatcagagggtgaatatcgtgccgatcctggccaaagccgataccctcaccccaccggaagtggaccataaaaagcgcaaaattcgcgaagaaatcgaacactttggaattaagatctaccaattccccgactgtgacagcgacgaggatgaggacttcaaactccaagaccaagcgctcaaggagtccattccattcgccgtgattggttccaacactgtcgtggaagctagaggacgccgggtccgcggcagactgtatccctgggggatcgtggaggtggaaaacccgggacattgcgacttcgtaaagctgcggaccatgcttgtgcgcacccacatgcaggacttgaaggatgtcaccagagagactcactatgaaaactacagagcacagtgtatccagtcgatgactaggctcgtcgtgaaggaaagaaatcggaacaaacttactcgcgaatcagggaccgatttccctatccctgccgtgccgccgggcaccgacccggaaaccgaaaagttgatccgagagaaggacgaagagctgcggcggatgcaagagatgcttcacaagatccagaagcagatgaaggaaaactac

SEQ ID NO: 147787 - DNA, 1434 bp, Artificial Sequence
  derived and/or modified sequence
atggaccgttcgttgggatggcaaggcaatagcgtgcccgaagaccgcacggaggccgggatcaagaggttcctggaggacactactgacgacggcgaacttagcaagtttgtcaaggatttttcgggcaacgcttcctgccacccacctgaagccaagacctgggcatcgcgcccccaggtgcccgagccaaggcctcaggctcctgatttgtatgacgatgatctggagtttcgcccgccgtcccgccctcaatcctctgataaccagcagtacttctgcgctccggcccccctgtcgccctctgctcggccgcgttctccgtggggaaaactggacccttacgattccagcgaagatgataaggagtatgtaggttttgccacgctcccgaatcaggtccacaggaagagtgtgaagaaaggctttgatttcactctgatggttgctggcgaaagtggcctaggcaagtcgaccctggtgaacagcctgttcttaacagatctgtatcgagatcggaagctcctgggggcggaggagaggattatgcagaccgtcgaaattaccaagcacgcggtagatatcgaagagaaaggtgttagattgcgcctgacaatcgtcgacacccccgggttcggagacgctgtcaacaacaccgaatgttggaagccggtcgcagagtatatcgatcaacaatttgaacagtattttcgcgacgaaagcggattaaatcgcaagaacatacaagataatcgcgtgcactgctgtctttactttattagccctttcgggcatggactccggccgcttgatgtcgaattcatgaaagctctgcaccagcgggtgaacatcgtgccgatattggccaaggcggataccctgacgccgccagaagtggaccacaagaagcgaaagatcagagaagaaatcgaacacttcggcattaagatctaccaattccccgactgtgatagcgacgaggatgaagattttaagctgcaggatcaagcactgaaggagagtattcccttcgccgtgatcggatctaatactgtcgtggaagcgcgtggtcgtcgagtccggggacgcctctacccgtggggcatcgtggaggtggaaaacccgggtcactgcgattttgtgaaactccgcactatgctggtgagaacccatatgcaagacctcaaagatgtcacacgcgagacgcactacgagaactaccgcgcgcaatgtatccagtcgatgacacgactggtcgtgaaggagcgaaacaggaacaagctcacgcgcgagtcgggtaccgatttcccgatacccgcagttccgcctggaacggatccggaaactgaaaaactaatacgtgaaaaggacgaggaacttcgacgcatgcaggagatgcttcacaaaatccagaagcaaatgaaagagaactac

SEQ ID NO: 147788 - DNA, 1434 bp, Artificial Sequence
  derived and/or modified sequence
atggatcgctcactgggatggcaaggcaattcggtgcccgaagatagaaccgaggcgggaatcaaaaggttcctggaagatactactgacgacggcgaactgtccaagttcgtcaaggatttttcgggaaacgcctcgtgccatccaccagaagcaaagacctgggcgtcgcggccccaggtcccggagccgcgcccgcaagctccagatttgtacgacgacgatcttgagttccggccaccgtcgcgtccgcaatcgtccgataatcaacagtatttctgcgcaccggccccactctccccctccgctcgcccacgctcaccgtggggaaagctggatccgtatgatagctcggaggacgataaggaatacgtcggatttgccaccctgcccaatcaggtccacaggaagtccgtcaagaagggcttcgacttcactctcatggtggctggcgagagcggactcggaaagtcgactctcgtgaattccctctttctcactgacctgtaccgcgatcggaagctgctgggagcggaagagagaatcatgcaaaccgtggagatcaccaagcatgcggtcgatatcgaagagaagggagtgcggctgcggcttactatagtggacaccccgggattcggggacgcagtgaataacaccgaatgctggaagccggtcgcggagtatattgaccaacagttcgaacagtacttccgcgacgaatccggacttaacaggaagaatattcaggataatagggtgcactgctgcctgtacttcatttcccctttcggtcacggcctgaggcccctggatgtcgagtttatgaaggccctgcatcaaagggtgaacatcgtccctattttggccaaggccgacactctgactccgcccgaagttgatcacaagaagcggaaaattcgggaagagatcgaacacttcggaatcaagatctaccaattcccggactgtgactccgatgaagatgaggacttcaagttgcaggatcaagccctcaaagaatccatcccgttcgcagtcatcgggtctaacacggtcgtcgaagctaggggacgacgcgtgcggggacgcctctacccgtggggaatcgtcgaggtggaaaatccaggacactgcgactttgttaagctgcgcaccatgctcgtccgcacgcacatgcaggacctgaaggacgtgacccgagagactcattacgagaactacagagcccaatgcatccagtcaatgactcgcctggtggtgaaggagcgcaacaggaacaagctgacccgggaatcgggtaccgactttccaatcccggcggtgccgccgggaacggacccggaaaccgaaaagctgatccgggagaaggacgaagagctccggagaatgcaggagatgctgcacaagatccagaagcagatgaaagaaaactac

SEQ ID NO: 147789 - DNA, 1434 bp, Artificial Sequence
  derived and/or modified sequence
atggaccgctccctgggttggcaaggcaacagcgtgccagaggaccgcactgaggcgggtattaaacgcttcctggaagacacgacagacgacggtgaattgtccaagttcgtgaaggatttcagcggcaacgcttcttgccaccctccagaagcgaagacttgggccagccgccctcaagtgcctgagccacgtcctcaggctcctgacctgtatgatgatgacctagaattccgccccccgagccgcccccaaagcagcgacaaccaacagtacttctgcgctccagcaccactgagcccaagcgctcgcccgcggtccccatggggtaagttggacccatacgatagctcagaagatgacaaggaatatgtggggtttgcaaccctgcctaatcaagttcatcgtaaatctgtgaagaagggttttgattttactctcatggttgccggcgaatccggtctgggtaaatccaccttagtgaactcactgttcctaacggacctctaccgcgatcgcaaactgctgggtgcagaagaacgcatcatgcagacggtggaaattacgaaacacgccgtggacatcgaggagaagggtgttcgcctgcgattgactattgtggacactccgggattcggagatgcggttaataataccgagtgttggaaaccggtggcggaatatatcgaccaacaattcgaacaatactttagggatgagtctggcctaaatcgcaaaaatatccaagacaatcgcgtgcactgttgcctttactttatttcgccgtttggccacggcttaaggccactggacgttgagttcatgaaagccctgcaccagagagtcaacattgtaccgatcctggccaaggccgatacgctcactcctccggaagtggaccacaaaaagcgcaagattcgggaggaaattgagcacttcgggatcaaaatataccagttccctgattgtgacagcgatgaagacgaggactttaagctgcaggatcaagcactgaaggagagcattcctttcgcagtgattggcagcaacaccgtcgtcgaagcacgtgggcgtcgtgtcagaggcaggctgtatccgtggggtattgtggaggtcgagaacccaggtcactgcgacttcgttaaactgagaactatgctggtgcgcacacacatgcaagatctgaaggatgtgacccgtgagacgcattatgagaactacagagcacagtgtatccagtctatgactcgcctggtagtcaaagaacgcaacaggaacaagttgacccgcgagagcggtaccgatttcccaattccggcagttcctccgggtaccgatccggaaacggaaaagctgattcgtgagaaggatgaggagctacgccgaatgcaggaaatgctgcataagattcagaagcagatgaaggagaactac

SEQ ID NO: 147790 - DNA, 1434 bp, Artificial Sequence
  derived and/or modified sequence
atggatcgatcccttggatggcaaggaaattccgtgccagaggataggactgaggctgggattaagcgatttctcgaagataccactgatgatggagaactctcgaagttcgtgaaggacttttccggaaatgcaagctgtcacccaccagaagcaaagacctgggcaagcaggccacaggtgccagaacctcgaccacaagcacctgacctttacgatgatgaccttgaatttagacccccgagccggcctcagtcatccgacaaccagcagtacttttgcgcacctgcacctctctccccttcagctagacctagatccccctggggcaagctcgacccatacgattcaagcgaagatgataaggaatacgtcggtttcgcaactctgccaaatcaggtgcacaggaagtcagtgaaaaaggggttcgatttcacgcttatggtggccggtgaaagcggactgggaaagtcgactcttgtcaactccctctttctgaccgatttgtacagagatcgaaaactccttggagcagaagagagaattatgcaaaccgtggagatcaccaagcacgcggtcgatatcgaggagaagggtgtgagactgcggctgactattgtggatacccctggctttggcgatgcagtgaataacaccgaatgttggaagccagtggccgagtacattgatcagcaattcgaacaatactttagagacgagtcgggccttaaccgcaaaaacatccaagacaatcgggtccattgctgtttgtactttatcagcccttttggacatggactccggcctctcgatgtggaattcatgaaggctcttcatcaacgcgtgaatattgtgccaatccttgccaaagccgataccctgactccccctgaggtggaccataagaaaagaaaaatccgggaggaaattgaacacttcggcattaagatatatcagttcccagactgtgactctgacgaagatgaggactttaagctgcaagatcaggcccttaaagaaagcataccttttgccgtgattggatcaaataccgtggtggaagcgagaggccggcgagtcagggggagactttacccgtggggaatcgtggaagtggagaaccctgggcattgtgattttgtgaagctcagaaccatgctggtgagaactcatatgcaggatctgaaagacgtgacgagggaaacccactacgagaattaccgcgcccaatgtatccaaagcatgactcgcttggttgtcaaggaacgcaatcgcaataagctgactcgggaatcaggtacggattttcctatccctgcagtgccccctggaactgatcctgaaaccgagaagctgattcgagagaaagatgaagagctccggaggatgcaggaaatgctgcataagatccaaaagcagatgaaggaaaactac

SEQ ID NO: 147791 - DNA, 1434 bp, Artificial Sequence
  derived and/or modified sequence
atggatagatcgctgggctggcagggcaactctgtgccagaagatcgaacagaggcaggcatcaagcggttcctcgaagacactaccgatgacggcgagttgagcaagttcgtgaaagattttagtgggaatgcatcctgtcaccctcctgaagccaagacctgggcgagcaggcctcaagttcccgaacctcgaccacaggcccccgacctttacgatgacgacctcgagtttcgtcctccttcaagaccacagagttccgataatcagcagtacttttgtgctcctgcccctcttagccctagtgcaaggccgagaagtccttgggggaaactggatccatatgactcgtccgaggatgacaaggagtatgtaggtttcgcaactctccccaaccaggtgcacagaaagtccgtgaaaaagggctttgattttaccctcatggtcgccggggagagtggtctcgggaagtctaccctcgtgaactcgttgttcctgactgacctttatagggacaggaaattgctcggggccgaggaaaggatcatgcagaccgtggagattaccaagcatgctgtcgatatcgaggagaaaggtgtgagactgaggctgaccattgtggatactcctgggttcggagacgctgtgaacaacactgaatgctggaagcctgtagcggagtacatagatcagcagtttgaacagtactttcgagacgagtcagggctcaacagaaagaatatccaagacaatagggtgcattgttgcctatatttcatttctccttttggccacggcctgcggcccctggatgttgaattcatgaaggctctgcatcagcgagtaaatatcgttccaatcctggctaaagcggataccctcaccccccctgaggtggaccataagaaacggaaaatcagagaggagatcgagcattttggtatcaagatctaccagtttccggactgtgacagcgatgaggatgaggattttaagctccaggatcaagcattgaaggaaagtattccgttcgcagtgatcgggtcgaatacggtggttgaggctcgtggacgtagagtccgcggtcggctgtatccatggggtatcgttgaggtggagaacccaggacactgtgatttcgtcaagctgagaaccatgctcgttcgcacccacatgcaggatttgaaggatgtcacacgggagactcactacgagaattatcgcgcccagtgtattcagagcatgacccggctggtggtgaaagaaaggaaccggaacaaattgactagggaaagcggaaccgatttcccaatccctgctgttccacccggtaccgaccccgagaccgagaagcttatccgcgagaaggatgaagagctgagaagaatgcaggaaatgctgcataagatccagaagcagatgaaagagaattac

SEQ ID NO: 147792 - DNA, 1434 bp, Artificial Sequence
  derived and/or modified sequence
atggaccggtcgctgggctggcagggtaattcggtaccggaagatagaactgaggccggcatcaagcggttcctggaggacactactgacgacggggaactgtccaagtttgtgaaggatttctccggaaacgccagctgccacccacctgaggctaaaacttgggcgtccagacctcaggtcccggaaccgcgcccacaagcgcccgacctctatgatgatgacttggaattcagaccgccatcgcgcccgcagtccagtgacaatcagcagtacttctgcgctccggcgccgctgtccccaagcgcacgccccaggagcccttgggggaaactggacccgtacgatagttcggaggatgacaaagaatatgtgggattcgcgacccttcctaaccaggtgcacaggaagtctgttaagaaggggtttgatttcactctcatggtggctggagaatcaggactgggtaagagcaccctcgtcaactccctcttcctgacggatttgtaccgcgaccgcaaattgctgggcgccgaggagcgcatcatgcaaacggtcgaaatcactaagcacgccgtggatatcgaagagaagggcgtgagactgaggctcacgattgtcgacaccccggggttcggtgacgccgttaacaatactgaatgctggaaaccagtggcggaatacatcgaccaacaattcgagcagtacttccgcgatgaatccggattgaatcggaagaatatccaggataatcgggtccattgctgtctgtacttcatctcaccattcggtcatggactccgacccctggatgttgagtttatgaaggcactccaccaacgggtgaacatcgtgccgatactggccaaagcagataccctgacgccgccagaagtggaccataagaaacgcaagatcagagaagaaatcgaacactttggaatcaagatttaccaatttcccgattgcgactcggacgaggacgaggacttcaagttgcaggaccaggcccttaaggaatcaatcccattcgctgtcatcggttcaaacactgtagtggaagctcgaggaaggcgcgtgcggggcagactgtacccgtggggtatcgtcgaggtggagaacccagggcattgcgacttcgtcaaattgaggaccatgcttgtcagaacgcacatgcaggatcttaaagacgtgaccagagaaacccattacgaaaactaccgcgcacagtgtatccaaagcatgacccggctcgtggtgaaggagcggaacaggaacaagttgactagagaatctggaaccgactttccaatccccgccgtgccgccaggcaccgatcctgagactgagaagctcattcgggagaaagacgaagagctgcggagaatgcaagaaatgctgcacaagatacagaagcagatgaaggaaaactac

SEQ ID NO: 147793 - DNA, 1434 bp, Artificial Sequence
  derived and/or modified sequence
atggatcgatcactggggtggcaggggaattcggtacctgaagataggacggaagcgggcatcaagaggtttctggaagataccacagatgacggtgagctatcaaaattcgtgaaagatttttcaggtaacgcttcatgccatccgccagaggcaaagacgtgggccagcagaccccaggtcccagagccacggcctcaagcgccagacctgtatgacgacgatctcgaattcagacctccgagcaggccgcagtcctcagataatcagcaatacttctgtgccccggcaccgttgagcccatccgctaggcctcgctctccatggggtaaactggatccctacgatagtagcgaggatgacaaggaatatgtgggcttcgctacactccctaatcaggtgcatcgaaaatcggtcaaaaagggcttcgactttactctcatggtggccggtgagagtgggctcggcaagtctaccttggtgaactccctgttcctgacagatctgtacagggacagaaaactcctcggcgccgaggagcgaatcatgcaaactgtcgagattaccaagcacgctgtcgatatcgaagagaagggcgtgcggctgcggctgacaatcgtggacacccctggtttcggggatgcagtcaataacaccgagtgttggaagccagttgctgaatatatcgatcagcagtttgagcagtacttccgcgacgagtccggactgaatagaaagaacatccaggataatagagtacattgttgtctgtacttcatatccccatttgggcatggcctgcgacctcttgacgtggagttcatgaaggccctgcaccaaagggtgaatatcgtgcccatccttgcaaaggctgacactttgacgccaccggaggtcgatcataagaagcggaaaattcgggaggaaatcgaacacttcggaatcaagatctaccaatttcccgactgcgactctgacgaggatgaagatttcaagctccaagatcaggccttgaaagagagtatcccttttgctgtcattggctctaacaccgtcgtcgaagctcgaggtcgacgcgtgcgcggaagattgtacccttggggaatcgtagaagtcgaaaaccccgggcattgtgattttgttaagttgcggacgatgttggtacggacccacatgcaagatctcaaggatgtgaccagagagacgcactatgagaactaccgagcccagtgcatccagagcatgactcgcttggttgtgaaagaaaggaatcgaaataaactgacaagggagagcggaactgatttccctatacctgccgtccctcccggaactgatcccgaaacggagaaactgatcagggaaaaagatgaggagttacgaaggatgcaggagatgcttcataagatccaaaaacagatgaaggaaaactat

SEQ ID NO: 147794 - DNA, 1434 bp, Artificial Sequence
  derived and/or modified sequence
atggaccgatcgctgggatggcagggaaatagcgtgccagaggataggaccgaagctggaatcaaacggtttcttgaagatactactgatgatggcgaactttccaagttcgtgaaggatttttccggaaacgcctcatgtcatcccccagaggcaaagacctgggcctcccgcccacaggtgcctgagcctcggccacaagctcctgatctgtacgatgatgacctcgaatttcggcctccatcacgcccccagtccagcgataatcagcaatacttttgtgcacctgcccctctgtctccaagtgcccgaccaaggtcgccctggggaaagttggacccttacgatagcagcgaggatgataaggaatacgtgggcttcgcaactttgcctaaccaagttcatagaaagtccgtgaagaagggttttgactttacccttatggttgcaggggagtcggggctggggaagtccacccttgtgaatagcttgttccttaccgacctctatcgggatcggaaactccttggtgcggaagaaagaattatgcaaacggtggaaattaccaagcatgccgtggacatcgaagaaaagggggtgagactccggttgactattgtcgatactcccggtttcggtgatgccgtgaacaacacggaatgctggaagcccgtggcagaatacattgaccaacaatttgaacagtactttagggatgaatcgggtcttaaccgcaaaaacatacaggacaaccgggtccattgttgcctgtactttatcagccctttcggacatggtctgcggccgctggacgtggagtttatgaaggccctccatcagcgagtgaatatagtccctattctcgcaaaggcagataccctgaccccacctgaagtggaccataagaagcgcaagattagggaagaaattgagcatttcggaatcaagatttaccagttcccagattgtgacagcgatgaagatgaggatttcaaactccaagatcaagcgcttaaagaatcgattccatttgccgtcattggctcaaataccgtggtggaagcacgggggagaagggtcaggggacggctgtatccttggggtattgtggaagtggagaaccctggccattgtgatttcgtgaaattgcgaacgatgcttgtgagaactcatatgcaggatctcaaggatgtcaccagggaaactcactacgaaaactacagggcccaatgtatacaatcgatgacgcgtcttgtggtgaaggagaggaacagaaacaagctgacccgagaatcgggaacggacttccctatacccgctgtccctcctgggaccgaccccgagactgagaagctgattcgtgaaaaagacgaggaactgcggcgtatgcaggaaatgttgcacaagatacagaaacaaatgaaggagaactac

SEQ ID NO: 147795 - DNA, 1434 bp, Artificial Sequence
  derived and/or modified sequence
atggatcgtagcctgggatggcaggggaacagtgtacccgaggacagaactgaagcaggaatcaagcggtttctggaagacacaacggatgatggggagctgagcaaattcgttaaggatttcagtggtaacgcctcttgtcacccccccgaagctaaaacttgggctagccgaccacaggtgccagaaccacggccccaggcacccgacctttacgatgatgatctagaatttagacccccctctcggccccagagctcagataaccagcagtacttttgcgcccccgctcctctgtctccatctgcccgtcctcggtctccctggggaaagctcgatccgtacgactcgtctgaggatgataaagaatacgtaggctttgcaaccttgcccaatcaggtgcaccgtaagtcagttaaaaaaggcttcgattttaccctcatggtcgccggagagtcaggattaggaaagtcaacactggttaatagcctgttcctgaccgatctttatagggatagaaaactgttaggcgccgaagaacgaataatgcagactgttgaaattactaagcacgccgtggatattgaggaaaaaggcgtccggctgcgcctcaccatcgtggacactccggggtttggcgatgctgttaataacaccgaatgttggaaaccagtggcggagtacattgaccaacagttcgaacagtatttccgagacgaaagtggtctcaaccgaaaaaatattcaggataatcgggtgcattgctgcctgtatttcatcagcccgtttggccacggcctaaggcccctggacgtggagttcatgaaggctctgcaccagcgagtgaacattgtacccattcttgcaaaggctgacacccttactccacccgaggtcgatcataaaaaaaggaaaatcagagaggaaattgagcactttggtatcaagatttaccaattcccggactgcgactctgatgaagatgaggatttcaagctgcaggaccaagccctcaaagaatcaattccctttgctgtgatcggctcaaacactgtcgtggaggcaagaggcaggagagtgagggggcgcttgtacccatggggtatcgtcgaagttgagaaccccggccattgtgattttgtaaagctcagaactatgctagtgcgcactcacatgcaggatcttaaggacgtcacccgggagactcactacgagaattaccgcgcacagtgtattcagtcaatgactcggctggtggttaaggagcgcaacagaaataaactcacccgcgagtctggtactgacttccctatacctgctgttcccccagggaccgatccagagaccgaaaagctaattcgagagaaggacgaggagctgaggagaatgcaggagatgctccataagattcagaagcagatgaaggagaattat

SEQ ID NO: 147796 - DNA, 1434 bp, Artificial Sequence
  derived and/or modified sequence
atggacaggagcctgggatggcaaggtaattccgtgcctgaggataggaccgaggcaggaattaagcggttcttggaagataccaccgatgacggcgaattgtcgaagttcgtcaaggactttagtggtaatgcatcatgtcatcctccagaagcgaaaacttgggcatcaaggccacaggtgcctgagccacgcccgcaagccccagatctctatgatgatgatttggaattcagaccaccctcaagaccacaatcgtcggacaaccagcaatacttttgcgcgcctgcacccctttccccctccgccaggccacgcagcccttggggcaagctggacccgtatgattcatcggaggatgataaggaatacgtgggatttgcaacccttcctaaccaggtgcatcggaagagcgtgaagaaggggttcgactttacgctgatggtggcaggtgagagcggactcggcaaatcaaccctggtcaactcactttttctcactgatctgtatagggacagaaaacttcttggagcagaggaaagaatcatgcaaaccgttgagatcactaagcacgcagtggatatcgaagagaaaggagtgcgacttagacttaccattgtcgatacccccggattcggtgatgcggtcaataacactgaatgctggaagccagtagcagagtacatcgatcagcagttcgaacaatactttcgagatgaatctggtcttaaccgcaagaatatccaagataaccgcgtgcattgttgtctctacttcattagtccctttggacacggattgcgcccacttgatgtggaattcatgaaggccctccaccagagagtcaatatcgtgccaattctggcaaaggcggatacccttacccctcccgaagtggatcataagaagcgtaagattcgcgaggagattgaacactttggtatcaagatttaccaatttcctgactgtgatagcgacgaggatgaggactttaaacttcaagatcaagcccttaaagaatccataccattcgcagtcatcgggtccaacactgtcgtggaagcacgcggtcggagggtgagagggcgactgtacccctggggcattgtggaagtggaaaaccccggacactgcgactttgtgaaacttagaacgatgctggtgcgcactcatatgcaagatctgaaagatgtgactagagaaacccattacgagaattacagggcacaatgtatccaatcgatgactcgcctggttgtcaaggaacgaaacaggaataagctgacgagggaatctggcactgattttccgatcccagcagtccctcctggtaccgatccggaaactgagaagttgattcgggagaaggacgaagagctgcgaagaatgcaagaaatgctgcacaaaatccagaagcagatgaaggaaaactac

SEQ ID NO: 147797 - DNA, 1434 bp, Artificial Sequence
  derived and/or modified sequence
atggatcgcagcctgggatggcaggggaatagcgttccagaggacaggaccgaagccggaattaaacggtttctggaggacactacagatgatggggagctgtccaagttcgtgaaagatttctctggtaatgccagttgccacccaccggaggctaagacatgggcttcacggccccaggtgcccgagcccaggccgcaggcacctgatctgtacgacgatgacctggaattccgtccaccgagtcgcccgcagtctagtgataatcagcagtatttttgtgctcccgcccccctgtcaccttccgccagacccagatccccctggggcaaactggacccatacgattcttccgaagacgataaagagtacgttgggttcgccactctgcctaatcaggtccaccggaagtctgtgaagaaaggttttgacttcacacttatggtagctggtgaatccggcctgggcaaaagcactttagtgaattcgctcttcctgaccgacctctacagagaccggaagctcctgggagcagaggagaggattatgcagaccgtggagatcaccaagcacgcagtggacattgaggaaaagggcgtgcgcctgagactaaccatagtggatactcccgggtttggcgatgccgtcaacaacactgagtgctggaaacccgttgcggagtatattgatcagcagtttgagcaatattttagggatgagtcaggactgaaccggaagaatattcaggataatcgggtgcattgttgcttgtacttcatctcacccttcggtcatggcctgagaccactcgatgtggagtttatgaaggcgctacaccagcgagtcaatatcgtgcctatactggcaaaggccgataccctgacacccccggaggtggatcataagaagagaaagatccgggaggaaatcgaacattttggaattaagatctaccagttcccggactgcgattctgacgaggacgaagattttaagctgcaggaccaggctctgaaggaaagtatccccttcgccgtgattgggtccaacaccgtggttgaggccaggggcaggcgcgtcagagggcggttgtatccgtggggaatagtggaggtagaaaatcccgggcattgcgacttcgtgaagcttcgtaccatgctggtgagaactcatatgcaggacctcaaggatgtgactcgagagacgcattacgaaaactacagggcgcagtgtattcagagcatgaccagactggtggtaaaagagcgaaacagaaacaagttgacccgagagagcggaacggactttcctatacccgccgtcccaccaggcaccgaccctgagaccgaaaaactaatacgagagaaagacgaggagctcaggcggatgcaagagatgttgcacaaaattcagaagcagatgaaagagaactat

SEQ ID NO: 147798 - DNA, 1434 bp, Artificial Sequence
  derived and/or modified sequence
atggatagatcactcgggtggcagggaaactccgtgcccgaggatcgaactgaggccggcataaaacgatttcttgaggatacgaccgacgacggggaacttagcaaatttgtcaaagatttttccggaaatgcgtcctgtcaccccccagaggcaaaaacctgggcaagcagacctcaagtgccagaacccagaccgcaggcacctgacctgtacgatgacgatctggaatttcgcccgccttcgcgtccacaaagctcagacaaccagcaatacttttgtgcaccagcgcctctttcaccctccgctagacccagatcaccatggggaaagctggatccttacgatagctcggaagatgataaagagtacgttggatttgccaccctgccaaaccaggtgcacagaaagtctgtcaagaaaggttttgattttaccctgatggtggcaggagaaagcggtcttgggaaatcgacccttgtgaactcgctgtttctgactgatctgtacagagatcgaaagctgcttggagccgaagagcgcattatgcaaaccgtcgaaatcaccaagcatgcagtggatatcgaagagaagggtgtccgacttcgcctgacgattgtggatactcctgggtttggagatgcagtgaataacaccgaatgttggaagcctgtcgcagaatacattgaccaacagtttgaacaatacttccgtgacgaaagcggattgaaccgaaagaatatccaggacaatcgtgttcattgctgtctctactttatctcgccattcggacatggccttcgtccactcgatgtggagttcatgaaggcacttcatcaaagagtcaacatcgtccccattctggcaaaagcagataccctgactccacccgaagtggatcataagaagcggaagattcgggaggaaattgaacattttggaataaagatctaccagtttccagattgcgattcggatgaggacgaggatttcaaactgcaagatcaggctcttaaggaaagcattccatttgctgtgatcggctctaacacggtggttgaggcaagaggcagacgtgtgcgcggaaggctgtacccgtggggcattgtcgaagtcgaaaatcccgggcactgtgactttgtgaagctccgtaccatgctggtgcgcactcatatgcaagaccttaaggatgtgactcgagagactcactacgagaattaccgtgcacagtgcatccagtcgatgactagactcgtggtcaaagaacggaaccgaaacaagttgactagagagtcgggaaccgattttcccattccagcggtgccgcccgggactgaccctgaaacggaaaagctgattcgcgaaaaggatgaggaactgcgccgaatgcaagaaatgcttcataagattcaaaaacagatgaaggaaaactat

SEQ ID NO: 147799 - DNA, 1434 bp, Artificial Sequence
  derived and/or modified sequence
atggataggtcgctcggctggcagggcaacagcgtgcccgaggaccgcactgaagctgggataaaacgctttctagaggataccactgacgacggtgagctgtccaaatttgtgaaagacttcagtgggaacgcctcatgtcaccccccagaagccaaaacgtgggctagccggccccaggtgccggaaccacgcccgcaagcgccggacctgtacgatgacgaccttgaattccggccaccctcccggccccagagtagtgacaaccagcagtatttttgcgcgccagccccattaagcccatctgccaggcccagaagcccttggggcaaactggatccctacgattcttccgaagacgataaggaatacgtgggcttcgcgaccctgccaaatcaggtgcatcggaagtccgtgaagaaaggcttcgacttcacactgatggtagcaggcgaaagcgggctgggaaaatccacgctggtgaattctctgtttctgactgatctgtaccgcgatcgcaaacttctgggcgcagaagagaggattatgcaaaccgtcgaaatcacaaagcacgcggttgacattgaggaaaagggtgttcgccttcgcctcactatcgtagatactcctggatttggggacgctgtcaacaatactgagtgttggaagcccgtggccgagtatatcgatcaacagttcgaacagtactttcgcgatgagtccggactcaaccgcaaaaacatacaagacaatcgcgtccactgttgtctgtattttatttctccttttggacatggcttacgtcctctggacgtggagttcatgaaagcattacaccaaagggtgaatatagttcccatcctggccaaagcagatacactgaccccccccgaggtcgaccacaaaaagaggaagatccgggaggaaatagagcatttcggcattaaaatctatcagtttcccgattgtgatagcgatgaggatgaggacttcaaactccaggatcaggcactaaaggagtccatcccttttgccgtcataggttctaacactgtggtcgaggcacgggggcggagagtcagaggtcgcttgtacccgtgggggattgtggaggtagaaaatccggggcattgtgattttgtcaaactacgtacaatgttagtccggactcatatgcaggacttgaaagacgtgacaagagaaacccactacgagaattaccgggcccagtgtatccagagcatgacgcggcttgttgtaaaagagagaaacagaaacaagctgacccgggagagcggtaccgattttccgattccggcagttcctccgggaaccgacccagaaacagaaaagctcatcagagagaaagacgaagagcttcggcgcatgcaggagatgttgcataaaattcaaaagcagatgaaagagaattat

SEQ ID NO: 147800 - DNA, 1736 bp, Artificial Sequence
  derived and/or modified sequence
gaaaggagcaagccaggaagccagacaacaacagcatcaaaacaaggctgtttctgtgtgtgaggaactttgcctgggagataaaattagacctagagctttctgacagggagtctgaagcgtgggacatggaccgttcactgggatggcaagggaattctgtccctgaggacaggactgaagctgggatcaagcgtttcctggaggacaccacggatgatggagaactgagcaagttcgtgaaggatttctcaggaaatgcgagctgccacccaccagaggctaagacctgggcatccaggccccaagtcccggagccaaggccccaggccccggacctctatgatgatgacctggagttcagacccccctcgcggccccagtcctctgacaaccagcagtacttctgtgccccagcccctctcagcccatctgccaggccccgcagcccatggggcaagcttgatccctatgattcctctgaggatgacaaggagtatgtgggctttgcaaccctccccaaccaagtccaccgaaagtccgtgaagaaaggctttgactttaccctcatggtggcaggagagtctggcctgggcaaatccacacttgtcaatagcctcttcctcactgatctgtaccgggaccggaaacttcttggtgctgaagagaggatcatgcaaactgtggagatcactaagcatgcagtggacatagaagagaagggtgtgaggctgcggctcaccattgtggacacaccaggttttggggatgcagtcaacaacacagagtgctggaagcctgtggcagaatacattgatcagcagtttgagcagtatttccgagacgagagtggcctgaaccgaaagaacatccaagacaacagggtgcactgctgcctgtacttcatctcacccttcggccatgggctccggccattggatgttgaattcatgaaggccctgcatcagcgggtcaacatcgtgcctatcctggctaaggcagacacactgacacctcccgaagtggaccacaagaaacgcaaaatccgggaggagattgagcattttggaatcaagatctatcaattcccagactgtgactctgatgaggatgaggacttcaaattgcaggaccaagccctaaaggaaagcatcccatttgcagtaattggcagcaacactgtagtagaggccagagggcggcgagttcggggtcgactctacccctggggcatcgtggaagtggaaaacccagggcactgcgactttgtgaagctgaggacaatgctggtacgtacccacatgcaggacctgaaggatgtgacacgggagacacattatgagaactaccgggcacagtgcatccagagcatgacccgcctggtggtgaaggaacggaatcgcaacaaactgactcgggaaagtggtaccgacttccccatccctgctgtcccaccagggacagatccagaaactgagaagcttatccgagagaaagatgaggagctgcggcggatgcaggagatgctacacaaaatacaaaaacagatgaaggagaactattaactggctttcagccctggatatttaaatctcctcctcttcttcctgtccatgccggcccctcccagcaccagctctgctcaggccccttcagctactgccacttcgccttacatccctgctgactgcccagagactcagaggaaataaagtttaataaatctgtaggtggct

SEQ ID NO: 147801 - DNA, 1709 bp, Artificial Sequence
  derived and/or modified sequence
gacaatgagagttgggggaaacagttcctcttctgagctgaggatggggtagaacaggcttctacagaggagtcagtccattctctgccttccactccctgtgggtcatggttcaggccaggccctctcgtgcactgccggctctgggcagaggggatcaagcgtttcctggaggacaccacggatgatggagaactgagcaagttcgtgaaggatttctcaggaaatgcgagctgccacccaccagaggctaagacctgggcatccaggccccaagtcccggagccaaggccccaggccccggacctctatgatgatgacctggagttcagacccccctcgcggccccagtcctctgacaaccagcagtacttctgtgccccagcccctctcagcccatctgccaggccccgcagcccatggggcaagcttgatccctatgattcctctgaggatgacaaggagtatgtgggctttgcaaccctccccaaccaagtccaccgaaagtccgtgaagaaaggctttgactttaccctcatggtggcaggagagtctggcctgggcaaatccacacttgtcaatagcctcttcctcactgatctgtaccgggaccggaaacttcttggtgctgaagagaggatcatgcaaactgtggagatcactaagcatgcagtggacatagaagagaagggtgtgaggctgcggctcaccattgtggacacaccaggttttggggatgcagtcaacaacacagagtgctggaagcctgtggcagaatacattgatcagcagtttgagcagtatttccgagacgagagtggcctgaaccgaaagaacatccaagacaacagggtgcactgctgcctgtacttcatctcacccttcggccatgggctccggccattggatgttgaattcatgaaggccctgcatcagcgggtcaacatcgtgcctatcctggctaaggcagacacactgacacctcccgaagtggaccacaagaaacgcaaaatccgggaggagattgagcattttggaatcaagatctatcaattcccagactgtgactctgatgaggatgaggacttcaaattgcaggaccaagccctaaaggaaagcatcccatttgcagtaattggcagcaacactgtagtagaggccagagggcggcgagttcggggtcgactctacccctggggcatcgtggaagtggaaaacccagggcactgcgactttgtgaagctgaggacaatgctggtacgtacccacatgcaggacctgaaggatgtgacacgggagacacattatgagaactaccgggcacagtgcatccagagcatgacccgcctggtggtgaaggaacggaatcgcaacaaactgactcgggaaagtggtaccgacttccccatccctgctgtcccaccagggacagatccagaaactgagaagcttatccgagagaaagatgaggagctgcggcggatgcaggagatgctacacaaaatacaaaaacagatgaaggagaactattaactggctttcagccctggatatttaaatctcctcctcttcttcctgtccatgccggcccctcccagcaccagctctgctcaggccccttcagctactgccacttcgccttacatccctgctgactgcccagagactcagaggaaataaagtttaataaatctgtaggtggcttctgg

SEQ ID NO: 147802 - DNA, 1434 bp, Artificial Sequence
  derived and/or modified sequence
atggaccgcagcctgggctggcagggcaacagcgtgcccgaggaccgcaccgaggccggcatcaagcgcttcctggaggacaccaccgacgacggcgagctgagcaagttcgtgaaggacttcagcggcaacgccagctgccacccccccgaggccaagacctgggccagccgcccccaggtgcccgagccccgcccccaggcccccgacctgtacgacgacgacctggagttccgcccccccagccgcccccagagcagcgacaaccagcagtacttctgcgcccccgcccccctgagccccagcgcccgcccccgcagcccctggggcaagctggacccctacgacagcagcgaggacgacaaggagtacgtgggcttcgccaccctgcccaaccaggtgcaccgcaagagcgtgaagaagggcttcgacttcaccctgatggtggccggcgagagcggcctgggcaagagcaccctggtgaacagcctgttcctgaccgacctgtaccgcgaccgcaagctgctgggcgccgaggagcgcatcatgcagaccgtggagatcaccaagcacgccgtggacatcgaggagaagggcgtgcgcctgcgcctgaccatcgtggacacccccggcttcggcgacgccgtgaacaacaccgagtgctggaagcccgtggccgagtacatcgaccagcagttcgagcagtacttccgcgacgagagcggcctgaaccgcaagaacatccaggacaaccgcgtgcactgctgcctgtacttcatcagccccttcggccacggcctgcgccccctggacgtggagttcatgaaggccctgcaccagcgcgtgaacatcgtgcccatcctggccaaggccgacaccctgaccccccccgaggtggaccacaagaagcgcaagatccgcgaggagatcgagcacttcggcatcaagatctaccagttccccgactgcgacagcgacgaggacgaggacttcaagctgcaggaccaggccctgaaggagagcatccccttcgccgtgatcggcagcaacaccgtggtggaggcccgcggccgccgcgtgcgcggccgcctgtacccctggggcatcgtggaggtggagaaccccggccactgcgacttcgtgaagctgcgcaccatgctggtgcgcacccacatgcaggacctgaaggacgtgacccgcgagacccactacgagaactaccgcgcccagtgcatccagagcatgacccgcctggtggtgaaggagcgcaaccgcaacaagctgacccgcgagagcggcaccgacttccccatccccgccgtgccccccggcaccgaccccgagaccgagaagctgatccgcgagaaggacgaggagctgcgccgcatgcaggagatgctgcacaagatccagaagcagatgaaggagaactac

SEQ ID NO: 147803 - DNA, 1600 bp, Artificial Sequence
  derived and/or modified sequence
gggaaataagagagaaaagaagagtaagaagaaatataagagccaccatggaccgttcactgggatggcaagggaattctgtccctgaggacaggactgaagctgggatcaagcgtttcctggaggacaccacggatgatggagaactgagcaagttcgtgaaggatttctcaggaaatgcgagctgccacccaccagaggctaagacctgggcatccaggccccaagtcccggagccaaggccccaggccccggacctctatgatgatgacctggagttcagacccccctcgcggccccagtcctctgacaaccagcagtacttctgtgccccagcccctctcagcccatctgccaggccccgcagcccatggggcaagcttgatccctatgattcctctgaggatgacaaggagtatgtgggctttgcaaccctccccaaccaagtccaccgaaagtccgtgaagaaaggctttgactttaccctcatggtggcaggagagtctggcctgggcaaatccacacttgtcaatagcctcttcctcactgatctgtaccgggaccggaaacttcttggtgctgaagagaggatcatgcaaactgtggagatcactaagcatgcagtggacatagaagagaagggtgtgaggctgcggctcaccattgtggacacaccaggttttggggatgcagtcaacaacacagagtgctggaagcctgtggcagaatacattgatcagcagtttgagcagtatttccgagacgagagtggcctgaaccgaaagaacatccaagacaacagggtgcactgctgcctgtacttcatctcacccttcggccatgggctccggccattggatgttgaattcatgaaggccctgcatcagcgggtcaacatcgtgcctatcctggctaaggcagacacactgacacctcccgaagtggaccacaagaaacgcaaaatccgggaggagattgagcattttggaatcaagatctatcaattcccagactgtgactctgatgaggatgaggacttcaaattgcaggaccaagccctaaaggaaagcatcccatttgcagtaattggcagcaacactgtagtagaggccagagggcggcgagttcggggtcgactctacccctggggcatcgtggaagtggaaaacccagggcactgcgactttgtgaagctgaggacaatgctggtacgtacccacatgcaggacctgaaggatgtgacacgggagacacattatgagaactaccgggcacagtgcatccagagcatgacccgcctggtggtgaaggaacggaatcgcaacaaactgactcgggaaagtggtaccgacttccccatccctgctgtcccaccagggacagatccagaaactgagaagcttatccgagagaaagatgaggagctgcggcggatgcaggagatgctacacaaaatacaaaaacagatgaaggagaactattgataataggctggagcctcggtggccatgcttcttgccccttgggcctccccccagcccctcctccccttcctgcacccgtacccccgtggtctttgaataaagtctgagtgggcggc

SEQ ID NO: 147804 - DNA, 1595 bp, Artificial Sequence
  derived and/or modified sequence
gggaaataagagagaaaagaagagtaagaagaaatataagagccaccatggaccgttcactgggatggcaagggaattctgtccctgaggacaggactgaagctgggatcaagcgtttcctggaggacaccacggatgatggagaactgagcaagttcgtgaaggatttctcaggaaatgcgagctgccacccaccagaggctaagacctgggcatccaggccccaagtcccggagccaaggccccaggccccggacctctatgatgatgacctggagttcagacccccctcgcggccccagtcctctgacaaccagcagtacttctgtgccccagcccctctcagcccatctgccaggccccgcagcccatggggcaagcttgatccctatgattcctctgaggatgacaaggagtatgtgggctttgcaaccctccccaaccaagtccaccgaaagtccgtgaagaaaggctttgactttaccctcatggtggcaggagagtctggcctgggcaaatccacacttgtcaatagcctcttcctcactgatctgtaccgggaccggaaacttcttggtgctgaagagaggatcatgcaaactgtggagatcactaagcatgcagtggacatagaagagaagggtgtgaggctgcggctcaccattgtggacacaccaggttttggggatgcagtcaacaacacagagtgctggaagcctgtggcagaatacattgatcagcagtttgagcagtatttccgagacgagagtggcctgaaccgaaagaacatccaagacaacagggtgcactgctgcctgtacttcatctcacccttcggccatgggctccggccattggatgttgaattcatgaaggccctgcatcagcgggtcaacatcgtgcctatcctggctaaggcagacacactgacacctcccgaagtggaccacaagaaacgcaaaatccgggaggagattgagcattttggaatcaagatctatcaattcccagactgtgactctgatgaggatgaggacttcaaattgcaggaccaagccctaaaggaaagcatcccatttgcagtaattggcagcaacactgtagtagaggccagagggcggcgagttcggggtcgactctacccctggggcatcgtggaagtggaaaacccagggcactgcgactttgtgaagctgaggacaatgctggtacgtacccacatgcaggacctgaaggatgtgacacgggagacacattatgagaactaccgggcacagtgcatccagagcatgacccgcctggtggtgaaggaacggaatcgcaacaaactgactcgggaaagtggtaccgacttccccatccctgctgtcccaccagggacagatccagaaactgagaagcttatccgagagaaagatgaggagctgcggcggatgcaggagatgctacacaaaatacaaaaacagatgaaggagaactattgataataggctggagcctcggtggccatgcttcttgccccttgggcctccccccagcccctcctccccttcctgcacccgtacccccgtggtctttgaataaagtctgagtgg

SEQ ID NO: 147805 - RNA, 1600 nt, Artificial Sequence
  derived and/or modified sequence
gggaaauaagagagaaaagaagaguaagaagaaauauaagagccaccauggaccguucacugggauggcaagggaauucugucccugaggacaggacugaagcugggaucaagcguuuccuggaggacaccacggaugauggagaacugagcaaguucgugaaggauuucucaggaaaugcgagcugccacccaccagaggcuaagaccugggcauccaggccccaagucccggagccaaggccccaggccccggaccucuaugaugaugaccuggaguucagaccccccucgcggccccaguccucugacaaccagcaguacuucugugccccagccccucucagcccaucugccaggccccgcagcccauggggcaagcuugaucccuaugauuccucugaggaugacaaggaguaugugggcuuugcaacccuccccaaccaaguccaccgaaaguccgugaagaaaggcuuugacuuuacccucaugguggcaggagagucuggccugggcaaauccacacuugucaauagccucuuccucacugaucuguaccgggaccggaaacuucuuggugcugaagagaggaucaugcaaacuguggagaucacuaagcaugcaguggacauagaagagaagggugugaggcugcggcucaccauuguggacacaccagguuuuggggaugcagucaacaacacagagugcuggaagccuguggcagaauacauugaucagcaguuugagcaguauuuccgagacgagaguggccugaaccgaaagaacauccaagacaacagggugcacugcugccuguacuucaucucacccuucggccaugggcuccggccauuggauguugaauucaugaaggcccugcaucagcgggucaacaucgugccuauccuggcuaaggcagacacacugacaccucccgaaguggaccacaagaaacgcaaaauccgggaggagauugagcauuuuggaaucaagaucuaucaauucccagacugugacucugaugaggaugaggacuucaaauugcaggaccaagcccuaaaggaaagcaucccauuugcaguaauuggcagcaacacuguaguagaggccagagggcggcgaguucggggucgacucuaccccuggggcaucguggaaguggaaaacccagggcacugcgacuuugugaagcugaggacaaugcugguacguacccacaugcaggaccugaaggaugugacacgggagacacauuaugagaacuaccgggcacagugcauccagagcaugacccgccugguggugaaggaacggaaucgcaacaaacugacucgggaaagugguaccgacuuccccaucccugcugucccaccagggacagauccagaaacugagaagcuuauccgagagaaagaugaggagcugcggcggaugcaggagaugcuacacaaaauacaaaaacagaugaaggagaacuauugauaauaggcuggagccucgguggccaugcuucuugccccuugggccuccccccagccccuccuccccuuccugcacccguacccccguggucuuugaauaaagucugagugggcggc

SEQ ID NO: 147806 - RNA, 1595 nt, Artificial Sequence
  derived and/or modified sequence
gggaaauaagagagaaaagaagaguaagaagaaauauaagagccaccauggaccguucacugggauggcaagggaauucugucccugaggacaggacugaagcugggaucaagcguuuccuggaggacaccacggaugauggagaacugagcaaguucgugaaggauuucucaggaaaugcgagcugccacccaccagaggcuaagaccugggcauccaggccccaagucccggagccaaggccccaggccccggaccucuaugaugaugaccuggaguucagaccccccucgcggccccaguccucugacaaccagcaguacuucugugccccagccccucucagcccaucugccaggccccgcagcccauggggcaagcuugaucccuaugauuccucugaggaugacaaggaguaugugggcuuugcaacccuccccaaccaaguccaccgaaaguccgugaagaaaggcuuugacuuuacccucaugguggcaggagagucuggccugggcaaauccacacuugucaauagccucuuccucacugaucuguaccgggaccggaaacuucuuggugcugaagagaggaucaugcaaacuguggagaucacuaagcaugcaguggacauagaagagaagggugugaggcugcggcucaccauuguggacacaccagguuuuggggaugcagucaacaacacagagugcuggaagccuguggcagaauacauugaucagcaguuugagcaguauuuccgagacgagaguggccugaaccgaaagaacauccaagacaacagggugcacugcugccuguacuucaucucacccuucggccaugggcuccggccauuggauguugaauucaugaaggcccugcaucagcgggucaacaucgugccuauccuggcuaaggcagacacacugacaccucccgaaguggaccacaagaaacgcaaaauccgggaggagauugagcauuuuggaaucaagaucuaucaauucccagacugugacucugaugaggaugaggacuucaaauugcaggaccaagcccuaaaggaaagcaucccauuugcaguaauuggcagcaacacuguaguagaggccagagggcggcgaguucggggucgacucuaccccuggggcaucguggaaguggaaaacccagggcacugcgacuuugugaagcugaggacaaugcugguacguacccacaugcaggaccugaaggaugugacacgggagacacauuaugagaacuaccgggcacagugcauccagagcaugacccgccugguggugaaggaacggaaucgcaacaaacugacucgggaaagugguaccgacuuccccaucccugcugucccaccagggacagauccagaaacugagaagcuuauccgagagaaagaugaggagcugcggcggaugcaggagaugcuacacaaaauacaaaaacagaugaaggagaacuauugauaauaggcuggagccucgguggccaugcuucuugccccuugggccuccccccagccccuccuccccuuccugcacccguacccccguggucuuugaauaaagucugagugg

SEQ ID NO: 147807 - protein, 409 aa, Artificial Sequence
  derived and/or modified sequence
MMMMSLNSKQAFSMPHGGSLHVEPKYSALHSTSPGSSAPIAPSASSPSSSSNAGGGGGGGGGGGGGGGRSSSSSSSGSSGGGGSEAMRRACLPTPPSNIFGGLDESLLARAEALAAVDIVSQSKSHHHHPPHHSPFKPDATYHTMNTIPCTSAASSSSVPISHPSALAGTHHHHHHHHHHHHQPHQALEGELLEHLSPGLALGAMAGPDGAVVSTPAHAPHMATMNPMHQAALSMAHAHGLPSHMGCMSDVDADPRDLEAFAERFKQRRIKLGVTQADVGSALANLKIPGVGSLSQSTICRFESLTLSHNNMIALKPILQAWLEEAEKSHREKLTKPELFNGAEKKRKRTSIAAPEKRSLEAYFAIQPRPSSEKIAAIAEKLDLKKNVVRVWFCNQRQKQKRMKYSAGI

SEQ ID NO: 147808 - DNA, 3141 bp, Artificial Sequence
  derived and/or modified sequence
agtttcgggtgccgaggtctgcagctagcggcaagcggagtcaggcatccgttcagactgacagcagaggcggcgaaggagcgcgtagccgagatcaggcgtacagagtccggaggcggcggcgggtgagctcaacttcgcacagcccttcccagctccagccccggctggcccggcacttctcggagggtcccggcagccgggaccagtgagtgcctctacggaccagcgccccggcgggcgggaagatgatgatgatgtccctgaacagcaagcaggcgtttagcatgccgcacggcggcagcctgcacgtggagcccaagtactcggcactgcacagcacctcgccgggctcctcggctcccatcgcgccctcggccagctcccccagcagctcgagcaacgctggtggtggcggcggcggcggcggcggcggcggcggcggcggaggccgaagcagcagctccagcagcagtggcagcagcggcggcgggggctcggaggctatgcggagagcctgtcttccaaccccaccgagcaatatattcggcgggctggatgagagtctgctggcccgcgccgaggctctggcagccgtggacatcgtctcccagagcaagagccaccaccaccatccaccccaccacagccccttcaaaccggacgccacctaccacactatgaataccatcccgtgcacgtcggccgcctcttcttcatcggtgcccatctcgcacccttccgcgttggcgggcacgcaccaccaccaccaccatcaccaccaccaccaccaccaaccgcaccaggcgctggagggcgagctgctggagcacctgagtcccgggctggccctgggcgctatggcgggccccgacggcgctgtggtgtccacgccggctcacgcgccgcacatggccaccatgaaccccatgcaccaagcagcgctcagcatggcccacgcgcacgggctgccgtcgcacatgggctgcatgagcgacgtggacgccgacccgcgggacctggaggcattcgccgagcgcttcaagcagcgacgcatcaagctgggggtgacccaggcagatgtgggctccgcgctggccaacctcaagatccccggcgtgggctcgcttagccagagcaccatctgcaggttcgagtccctcacactgtcccacaataatatgatcgcgctcaaacccatcctgcaggcatggctcgaggaggccgagaagtcccaccgcgagaagctcaccaagcctgaactcttcaatggcgcggagaagaagcgcaagcgcacgtccatcgctgcgccagagaagcgctcgctcgaagcctactttgccattcagcctcggccctcctctgaaaagatcgccgccatcgcggagaagctggacctgaagaaaaacgtggtgcgcgtctggttctgcaaccagaggcagaaacagaaaagaatgaaatattccgccggcatttagaagactcttggcctctccagagacgcccctttcctcgtccgctcttttctctcctctcttctgcctcttttcacttttggcgactagaaacaattccagtaaatgtgaatctcgacaaatcgaggactgaagagggagcgaacgagcgaacaactgagcccaagccggtgagaatgtgaaacagtttctcaaaggaaagaataacaaaagatggtatttgtctgttgtagcaaagttgtccctttgaaccccacctcggcttcttcagaggaagtgtggagatggctgtttgcaggaaggcagacgagacagtgtttaaaaagtccacaagaatgatcaagtaagatttgtttttattcttacagacatcacccgtgttcaagtttaaaagtacactttgcaactatttttcagaaatagaaattgattcaggactaaaactttaaactagagttgatgcttaatgtgatagagacatctctaaagtattttgaattttaaaaaaagatggcagattttctgcatttacactgtatattatatatatatttttattgtggttcttacccccttttccttctctgaagtgttaatgcttaagaaaagagttgcgcctgctgtgttcactgatcttgaaagctattattagattattgcagaacaaccctctgtaaattattaatttatctctctagcaacttaattttgtgcacattctaattaattaaacttcttccgtctaaaaaaagtgggggaaatgtatagctagtaacgttcaaaaaattttgtttgatgagtttaccgaatttttacagctttcctcctatactgtgttccttttgacccatttgtatattctcacttgaatgaagattgtttttttctttgtttttactggtagtgttctgatttgtgagtcgacactcagtaatggatgtcttaatcgtgtagacctgattcactgtctgaagtattgtttacttcgttacatatttaatggggattcccacattgtccccatgacacatgagcgctctcacttacccttacacacacacacacacacacacacacctctaacagaagggaagaagcagttggaagcatgaccgatgcaccattttctagttttaggtgcatttgccacttggtgtttgcccttcagattttagatttcaccaaggtatttcagtcttccagttttcaattgctttgttggctacatgttaatatttataggaatacttcagtttttccttttggaggtttgtttgtagaaaaactaatttgaactataagaaagacagtgcactgcttgtaaattcacattgtttggaaaaattcttttggaacaaaaaattaggtacatgataactggtaccttatctactgtaaatatttcattaaaaatgatgcacacatagatatattcttacaaattttgctgtattgctgttctctttgaggctctccaaagtcttgagttctgtatatggcctggtttcttgtttttattaatagatggtttatttactatggtaatgtattaatttatttttggtgttgttcgattgtctttcattgaagagataattttaatgttttattggcaacgtatgctgctttttcattaaaatatgctattaaaattaaatggctttta

SEQ ID NO: 147809 - DNA, 1230 bp, Artificial Sequence
  derived and/or modified sequence
atgatgatgatgtcgttaaatagcaagcaagctttctctatgccacacggcggcagtctgcacgtagagcctaaatatagcgcgctgcactcaacttcccctgggagcagtgctcccatcgccccatccgcaagctcaccaagctctagcagcaacgcagggggcgggggtggcggtggcggaggtggaggcggcgggggcggccggagctcgtcatccagctcatctggttcgagcggcggggggggtagcgaggcgatgcgaagagcatgtctgcccacgccaccctccaatatctttggaggactagacgagtccctgcttgcaagggcagaggcactagcagccgtagacatagtgtcacagtccaaaagccaccaccatcaccctcctcatcattcacccttcaagcctgacgcgacctatcacaccatgaacaccatcccatgcacgtctgcagcaagttcctctagtgtccccatttctcacccctcagcacttgctggaacacaccaccaccaccaccaccaccatcaccatcaccatcagcctcaccaggccctggaaggggaattgctggagcatctctcacccggccttgcactcggtgccatggcaggcccggatggcgcagtggtctcaaccccggctcatgcacctcacatggccactatgaatcctatgcaccaggcagcactgtctatggcgcacgctcatggcttgcccagccatatggggtgcatgagcgatgtggatgccgatcctagagatctggaggcgtttgccgagcgtttcaaacagcggcgcataaagttgggggtaactcaggccgacgtgggttcagcgcttgccaacctgaagattcctggagtcggttcactgtctcaaagtactatctgccgcttcgagagcctaaccctctcccacaacaacatgattgcgctcaagcctattttgcaagcctggctcgaagaggcagaaaagtcacaccgggagaaacttacgaagccggaactgtttaacggcgccgaaaaaaagaggaagaggaccagtatcgccgccccggaaaagcggtccctggaggcttactttgccatacagcctcggccaagctcagagaagatcgccgccatcgctgagaagctcgatctgaagaaaaacgtggtccgggtttggttctgtaaccagcggcagaagcagaagcgtatgaagtactctgccgggatatag

SEQ ID NO: 147810 - DNA, 1230 bp, Artificial Sequence
  derived and/or modified sequence
atgatgatgatgagcctgaacagcaagcaggccttctccatgccccacggcggcagcctgcacgtggagcccaagtacagcgccctgcacagcaccagccctggcagcagcgcccccatcgcccccagcgccagcagccccagcagcagcagcaatgccggcggcggcggcggcggcggcggcggcggcggcggcggcggcggccgcagcagcagcagcagcagcagcggcagcagcggcggcggcggcagcgaggccatgaggcgggcctgcctgcccaccccacccagcaacatctttggaggcctggatgagagcctgctggcccgggcagaggccctggccgctgtggacatcgtgtcccagagcaagagccaccaccaccaccccccccaccacagccccttcaagccagatgccacctaccacaccatgaacaccatcccctgcaccagcgctgccagcagcagctctgtgcccatcagccaccccagcgccctggccggcacccaccaccaccaccaccaccaccaccaccaccaccaccagccccaccaggccctggagggggagctgctggagcacctgagccctggcctggccctgggcgccatggccggcccagatggagctgtggtgtccaccccagcccacgccccccacatggccaccatgaaccccatgcaccaggccgccctgtccatggcccacgcccacggcctgcccagccacatgggctgcatgtctgatgtggatgctgacccccgggacctggaggcctttgctgagcgcttcaagcagaggcgcatcaagctgggcgtgacccaggctgatgtgggcagcgccctggccaacctgaagatccctggggtgggcagcctgagccagagcaccatctgccgctttgagagcctgaccctgagccacaacaacatgattgccctgaagcccatcctgcaggcctggctggaggaggccgagaagagccaccgggagaagctgaccaagccagagctgttcaatggagctgagaagaagaggaagaggaccagcattgctgcccctgagaagaggagcctggaggcctactttgccatccagccccggcccagcagcgagaagattgctgccatcgccgagaagctggacctgaagaagaatgtggtgcgggtgtggttctgcaaccagaggcagaagcagaagaggatgaagtacagcgctggcatctag

SEQ ID NO: 147811 - DNA, 3144 bp, Artificial Sequence
  derived and/or modified sequence
agtttcgggtgccgaggtctgcagctagcggcaagcggagtcaggcatccgttcagactgacagcagaggcggcgaaggagcgcgtagccgagatcaggcgtacagagtccggaggcggcggcgggtgagctcaacttcgcacagcccttcccagctccagccccggctggcccggcacttctcggagggtcccggcagccgggaccagtgagtgcctctacggaccagcgccccggcgggcgggaagatgatgatgatgtccctgaacagcaagcaggcgtttagcatgccgcacggcggcagcctgcacgtggagcccaagtactcggcactgcacagcacctcgccgggctcctcggctcccatcgcgccctcggccagctcccccagcagctcgagcaacgctggtggtggcggcggcggcggcggcggcggcggcggcggcggaggccgaagcagcagctccagcagcagtggcagcagcggcggcgggggctcggaggctatgcggagagcctgtcttccaaccccaccgagcaatatattcggcgggctggatgagagtctgctggcccgcgccgaggctctggcagccgtggacatcgtctcccagagcaagagccaccaccaccatccaccccaccacagccccttcaaaccggacgccacctaccacactatgaataccatcccgtgcacgtcggccgcctcttcttcatcggtgcccatctcgcacccttccgcgttggcgggcacgcaccaccaccaccaccatcaccaccaccaccaccaccaaccgcaccaggcgctggagggcgagctgctggagcacctgagtcccgggctggccctgggcgctatggcgggccccgacggcgctgtggtgtccacgccggctcacgcgccgcacatggccaccatgaaccccatgcaccaagcagcgctcagcatggcccacgcgcacgggctgccgtcgcacatgggctgcatgagcgacgtggacgccgacccgcgggacctggaggcattcgccgagcgcttcaagcagcgacgcatcaagctgggggtgacccaggcagatgtgggctccgcgctggccaacctcaagatccccggcgtgggctcgcttagccagagcaccatctgcaggttcgagtccctcacactgtcccacaataatatgatcgcgctcaaacccatcctgcaggcatggctcgaggaggccgagaagtcccaccgcgagaagctcaccaagcctgaactcttcaatggcgcggagaagaagcgcaagcgcacgtccatcgctgcgccagagaagcgctcgctcgaagcctactttgccattcagcctcggccctcctctgaaaagatcgccgccatcgcggagaagctggacctgaagaaaaacgtggtgcgcgtctggttctgcaaccagaggcagaaacagaaaagaatgaaatattccgccggcatttagaagactcttggcctctccagagacgcccctttcctcgtccgctcttttctctcctctcttctgcctcttttcacttttggcgactagaaacaattccagtaaatgtgaatctcgacaaatcgaggactgaagagggagcgaacgagcgaacaactgagcccaagccggtgagaatgtgaaacagtttctcaaaggaaagaataacaaaagatggtatttgtctgttgtagcaaagttgtccctttgaaccccacctcggcttcttcagaggaagtgtggagatggctgtttgcaggaaggcagacgagacagtgtttaaaaagtccacaagaatgatcaagtaagatttgtttttattcttacagacatcacccgtgttcaagtttaaaagtacactttgcaactatttttcagaaatagaaattgattcaggactaaaactttaaactagagttgatgcttaatgtgatagagacatctctaaagtattttgaattttaaaaaaagatggcagattttctgcatttacactgtatattatatatatatttttattgtggttcttacccccttttccttctctgaagtgttaatgcttaagaaaagagttgcgcctgctgtgttcactgatcttgaaagctattattagattattgcagaacaaccctctgtaaattattaatttatctctctagcaacttaattttgtgcacattctaattaattaaacttcttccgtctaaaaaaagtgggggaaatgtatagctagtaacgttcaaaaaattttgtttgatgagtttaccgaatttttacagctttcctcctatactgtgttccttttgacccatttgtatattctcacttgaatgaagattgtttttttctttgtttttactggtagtgttctgatttgtgagtcgacactcagtaatggatgtcttaatcgtgtagacctgattcactgtctgaagtattgtttacttcgttacatatttaatggggattcccacattgtccccatgacacatgagcgctctcacttacccttacacacacacacacacacacacacacctctaacagaagggaagaagcagttggaagcatgaccgatgcaccattttctagttttaggtgcatttgccacttggtgtttgcccttcagattttagatttcaccaaggtatttcagtcttccagttttcaattgctttgttggctacatgttaatatttataggaatacttcagtttttccttttggaggtttgtttgtagaaaaactaatttgaactataagaaagacagtgcactgcttgtaaattcacattgtttggaaaaattcttttggaacaaaaaattaggtacatgataactggtaccttatctactgtaaatatttcattaaaaatgatgcacacatagatatattcttacaaattttgctgtattgctgttctctttgaggctctccaaagtcttgagttctgtatatggcctggtttcttgtttttattaatagatggtttatttactatggtaatgtattaatttatttttggtgttgttcgattgtctttcattgaagagataattttaatgttttattggcaacgtatgctgctttttcattaaaatatgctattaaaattaaatggcttttaaaa

SEQ ID NO: 147812 - DNA, 1230 bp, Artificial Sequence
  derived and/or modified sequence
atgatgatgatgagcctgaacagcaagcaggccttcagcatgccccatggtggctctctgcacgtcgagccaaaatactccgccttgcactctacaagtccaggctcaagtgcacccatcgcaccaagtgcctccagtccgtcatcctcctcgaatgcaggcggtgggggcggcggcgggggcggtggtggaggaggaggaggacggtcctcaagtagtagctcctccggctcttctggggggggcggttctgaggcaatgcgaagagcttgcttgcctaccccgccctctaatattttcggcggtttagacgagtctttgttggctagagcagaagcgctggctgccgtcgacatcgtgtctcagtctaagtctcaccatcatcaccctccccaccactctcctttcaagccagacgccacctaccacactatgaacaccattccatgtacctccgctgcttcttcatccagcgtgccaatttcccaccccagcgccctagccggcacccatcatcatcaccatcaccaccatcaccatcaccatcaaccacatcaggccctggagggcgaactgcttgaacacctaagcccaggtttggccctcggtgccatggcaggcccggacggcgctgtggtgagcaccccagcccatgcacctcacatggccaccatgaaccctatgcaccaggctgccctttctatggcccatgctcatggtctgccctctcacatgggttgcatgtcggacgttgacgcggatccacgggacttagaggcttttgccgagcggttcaagcagagaaggatcaaattaggagttacccaggcagacgtgggcagcgccctggccaatctaaagatccctggagtgggcagtctgagccagtcaaccatttgtcgctttgagtcacttacattaagtcataacaacatgattgctctgaagccaatcctgcaggcctggctcgaggaagccgaaaagtcccatagggaaaaactcacaaagccggagctcttcaacggcgccgaaaaaaagcgcaaacggacatctatagccgcccctgaaaaaagaagccttgaggcatattttgctatccaaccacgcccttcaagtgagaaaatcgccgccatagctgaaaagctggatctaaagaaaaatgtggtcagggtatggttctgcaatcagagacagaagcagaaaaggatgaaatattccgctgggatctag

SEQ ID NO: 147813 - DNA, 1230 bp, Artificial Sequence
  derived and/or modified sequence
atgatgatgatgagtctgaattcgaagcaggccttcagcatgcctcatggcggttccctccatgtagaacccaagtatagcgcactgcactctacgtcacccggaagcagtgcaccaatagccccttccgcgagctccccatcttctagttccaacgccggagggggtggcggaggaggagggggaggcggaggcggaggcggacgctcatctagtagcagctccagcggatctagtggcggaggagggtccgaggctatgagacgggcttgtttacccacacctccttctaatatattcgggggacttgatgagagcctgttggcacgagcggaggctttggccgctgtcgacatcgtcagccagagtaagtcgcatcaccaccacccccctcatcacagtcctttcaagcctgacgcgacctatcataccatgaatactatcccgtgtacgtcagcggcaagctcttcctctgttcctatctcccatcccagtgcactggcaggtactcaccaccatcaccatcatcaccatcatcatcatcaccagccgcatcaggccttagagggcgagctgttagaacatctgagcccgggattggccttgggagccatggctggtcccgatggcgcagtggtttccacacctgcacatgctcctcacatggccacaatgaacccaatgcatcaagcagctctgagcatggcacatgctcacggtctcccatcacacatggggtgcatgtctgacgttgacgcagatcctagagacctggaagctttcgctgaacgatttaaacagaggaggatcaagctgggcgtcacccaagccgatgtcggatctgctctggccaacctgaagataccaggagttgggagtctgtcccagtccactatctgccgttttgagtcgcttactctcagtcacaacaacatgatagctctgaaaccgattctgcaggcttggttggaagaagctgagaagtctcacagggagaagctgacaaagcctgagctgttcaacggtgccgagaaaaagcgtaagcggacgagcatagcagccccagagaaaagaagtctggaggcttacttcgccatccaaccccgaccatcctcagaaaaaatcgcagccatagctgagaagcttgacttaaagaagaacgttgtgcgcgtgtggttctgcaaccaaaggcaaaagcagaaaagaatgaagtacagtgccggaatttag

SEQ ID NO: 147814 - DNA, 1230 bp, Artificial Sequence
  derived and/or modified sequence
atgatgatgatgagcctgaacagcaagcaggccttcagcatgccccacggcggcagcctgcacgtggagcccaagtacagcgccctgcacagcaccagccccggcagcagcgcccccatcgcccccagcgccagcagccccagcagcagcagcaacgccggcggcggcggcggcggcggcggcggcggcggcggcggcggcggcagaagcagcagcagcagcagcagcggcagcagcggcggcggcggcagcgaggccatgagaagagcctgcctgcccaccccccccagcaacatcttcggcggcctggacgagagcctgctggccagagccgaggccctggccgccgtggacatcgtgagccagagcaagagccaccaccaccaccccccccaccacagccccttcaagcccgacgccacctaccacaccatgaacaccatcccctgcaccagcgccgccagcagcagcagcgtgcccatcagccaccccagcgccctggccggcacccaccaccaccaccaccaccaccaccaccaccaccaccagccccaccaggccctggagggcgagctgctggagcacctgagccccggcctggccctgggcgccatggccggccccgacggcgccgtggtgagcacccccgcccacgccccccacatggccaccatgaaccccatgcaccaggccgccctgagcatggcccacgcccacggcctgcccagccacatgggctgcatgagcgacgtggacgccgaccccagagacctggaggccttcgccgagagattcaagcagagaagaatcaagctgggcgtgacccaggccgacgtgggcagcgccctggccaacctgaagatccccggcgtgggcagcctgagccagagcaccatctgcagattcgagagcctgaccctgagccacaacaacatgatcgccctgaagcccatcctgcaggcctggctggaggaggccgagaagagccacagagagaagctgaccaagcccgagctgttcaacggcgccgagaagaagagaaagagaaccagcatcgccgcccccgagaagagaagcctggaggcctacttcgccatccagcccagacccagcagcgagaagatcgccgccatcgccgagaagctggacctgaagaagaacgtggtgagagtgtggttctgcaaccagagacagaagcagaagagaatgaagtacagcgccggcatctag

SEQ ID NO: 147815 - protein, 218 aa, Artificial Sequence
  derived and/or modified sequence
MSQTAMSETYDFLFKFLVIGNAGTGKSCLLHQFIEKKFKDDSNHTIGVEFGSKIINVGGKYVKLQIWDTAGQERFRSVTRSYYRGAAGALLVYDITSRETYNALTNWLTDARMLASQNIVIILCGNKKDLDADREVTFLEASRFAQENELMFLETSALTGENVEEAFVQCARKILNKIESGELDPERMGSGIQYGDAALRQLRSPRRAQAPNAQECGC

SEQ ID NO: 147816 - DNA, 657 bp, Artificial Sequence
  derived and/or modified sequence
atgagtcaaacggccatgtctgagacatatgacttcctgttcaagtttctggtcattggtaacgccggaacagggaagtcttgtcttctgcaccagtttatcgagaaaaagttcaaagacgactccaatcatactatcggggtggaattcgggagcaaaataatcaacgttggcggtaagtacgtaaaacttcaaatttgggatactgctggccaagaacggtttcggtctgtcacccgcagctactatcggggcgccgctggagctctgcttgtgtacgacatcacttccagggaaacttataatgcgttgacgaactggctcaccgatgcacgaatgttagctagtcagaacattgtcatcattctttgcggcaacaagaaagatctggatgccgacagggaggtgaccttcttggaggcttctaggttcgcgcaggaaaacgagctcatgtttttagagacttctgccttgacgggcgagaacgttgaggaggcttttgtccagtgcgccagaaaaatcctcaataagatagaatcaggcgagttggatcccgaaagaatgggcagtgggatccagtatggagacgccgccctgcggcagctgcgatctccaaggagggcacaggcccccaacgcacaagaatgtggatgctag

SEQ ID NO: 147817 - DNA, 657 bp, Artificial Sequence
  derived and/or modified sequence
atgagccagacagccatgtctgagacctatgacttcctgttcaagttcctggtgattggaaatgccggcaccgggaagagctgcctgctgcaccagttcatcgagaagaagttcaaggatgacagcaaccacaccatcggcgtggagtttggcagcaagatcatcaacgtgggcggcaagtatgtgaagctgcagatctgggacacagctggccaggagcgcttccgctctgtgaccaggagctactacagaggagctgctggggccctgctggtgtatgacatcaccagccgggagacctacaatgccctgaccaactggctgacagatgccaggatgctggccagccagaacatcgtcatcatcctgtgtggcaacaagaaggacctggatgctgaccgggaggtgaccttcctggaggccagcagatttgcccaggagaatgagctgatgttcctggagaccagcgccctgactggagaaaatgtggaggaggcctttgtgcagtgtgccaggaagatcctgaacaagattgagagcggggagctggaccctgagaggatgggcagcggcatccagtatggagatgctgccctgcggcagctgcggagcccccggcgggcccaggccccaaatgcccaggagtgtggctgctag

SEQ ID NO: 147818 - DNA, 657 bp, Artificial Sequence
  derived and/or modified sequence
atgagccagaccgccatgagcgagacctacgacttcctgttcaagtttttggtaatcggcaatgctggtacgggaaagtcctgtctgctgcatcagttcatcgagaaaaagttcaaagacgactctaaccacacgattggcgtggaattcgggtccaaaattataaatgtggggggaaagtacgtgaagctccagatttgggatactgcgggtcaggagagattcaggtctgtgacgcggtcctattaccggggggccgctggtgccttactggtctacgacattacctccagggagacatataacgccctgactaattggttgactgatgccagaatgttagcctcacagaacattgtgattattctgtgtgggaataagaaagatctggacgcagatcgggaagttacctttctcgaggcatctcgttttgctcaggaaaacgaactgatgttcctcgagacttctgccctgaccggcgaaaatgtggaggaggctttcgtccaatgcgccagaaagatattgaataagatcgagagcggcgagctcgatcctgagcggatgggatccggcatacagtacggcgatgcagctttacgccagctgagatcccccaggagggcccaggctcctaatgcgcaggaatgcggatgctag

SEQ ID NO: 147819 - DNA, 657 bp, Artificial Sequence
  derived and/or modified sequence
atgagccagactgcaatgagtgaaacctatgactttctgtttaagttcttggtcattggaaacgccggaactggtaaatcttgcctcctgcaccagttcattgagaagaagttcaaagatgacagcaatcacacaattggcgtggaatttgggtcaaagataatcaacgtggggggaaagtacgtgaagctgcagatctgggacacagcagggcaggaacgatttcggagtgtgacaagatcatactaccgaggcgcagctggagccctgctggtttatgacattacttccagagagacatataacgccctgactaattggttgactgacgctcggatgctggccagtcagaacattgtgataatcctgtgtggcaataaaaaggaccttgacgctgaccgtgaagtaacatttctggaggcatcaagattcgcccaggagaatgagctgatgtttctggagacttccgctctcactggcgaaaatgtggaggaggcgtttgtccaatgtgccagaaagattctgaataagatagaaagtggcgaacttgacccagagagaatgggcagcggaatccagtacggagatgccgctctaagacagctgagaagccccagaagagcccaagctcccaacgcccaggaatgcggttgctag

SEQ ID NO: 147820 - DNA, 2966 bp, Artificial Sequence
  derived and/or modified sequence
gccggacggagggtggagggccctgcgcctgcgcggagctggagtccggctgggccgcagccgctgggagaccggcggttgccgtggggaccggtcgggcccctccctcctccggtcccccgccccaggtccttccccaccgagacgcgccggcggaccgcgggcgagtgcagccggtgacccggcgagaggcggcgccgctcccaagatgtcgcagacggccatgtccgaaacctacgattttttgtttaagttcttggttattggaaatgcaggaactggcaaatcttgcttacttcatcagtttattgaaaaaaaattcaaagatgactcaaatcatacaataggagtggaatttggttcaaagataataaatgttggtggtaaatatgtaaagttacaaatatgggatacagcaggacaagaacgattcaggtccgtgacgagaagttattaccgaggcgcggccggggctctcctcgtctatgatatcaccagccgagaaacctacaatgcgcttactaattggttaacagatgcccgaatgctagcgagccagaacattgtgatcatcctttgtggaaacaagaaggacctggatgcagatcgtgaagttaccttcttagaagcctccagatttgctcaagaaaatgagctgatgtttttggaaacaagtgcgctcacaggggagaatgtagaagaggcttttgtacagtgtgcaagaaaaatacttaacaaaatcgaatcaggtgagctggacccagaaagaatgggctcaggtattcagtacggagatgctgccttgagacagctgaggtcaccgcggcgcgcacaggccccgaacgctcaggagtgtggttgttaggagagcacacaggtgttcatacagtggcatttgggacacaatcgttggaacctgaagaatctgaagttttttttaccaccatctttttctactctgtatggaagtagatctttatggggaaaagagaatttggggtgttctgcaagccagtcaaagtggcacagcaaatcatataaatcgaattaaatggacaacaccgttagatgtgtatgtaaaaattttctgtttcatatttttcctttcactttcggtttaaaacatgctatatgtactgtatgtcctgtagcccagtgcggctccacagcatggaatctgatgtatgatatgatagaatgtggcactaaatgcagtttcagattttattttttttaatcatatgaactaaaattgtcaattgtgaggtgtgcttttctcatcatgttggttatattgcacaattggttatatttatgacctgatattcaaagactctggcattgatagccagtgtgttttcttatttaactccgtttactacattctacatggtgtttacgtgatccacacttgaaatactagatcagtagacattcactaatataccaaaataaaatgaaaaattgagtttttccgtgaactttatactgtccagctctgttgattttaaagcctcttcatccaggtcagttcaggaagtatatctggagtacctgctctgtttttggctgtgagactagcactaaggattctggtacctttacccaaacctactgggctactaatacttctctcagcagttgatcaaatacaatagaccatgtaagctggggccgctcatccacttccagtttgctggtctccctgctagaaaacacattgtactgtgctttttctggaattcagtataatggcatcactgcctgtttttcacatcttttgtttcctgttcattttaaggaaacctactaaatccagttaatattaaatggacaccactcattaagaaatttctttatggcttctgctgaatacttaaatgccttactacagttatccagttgacatgtttttaattcatataaggtatattgggtatattgaagtatatattgtattacaaagacttgttcttgtattttaaaatgtcagtgcaaaaaatatatggtggaacctttctttaaagttgaaatgcagtattatttaaatctgaaaggttaaaaagctttcttcaccttatatatgttcttccactgtgactttttagttgaagactagtaaattaacttttagttagaagatgcctactgcttttgttgtttattttaatcagcagagcacagagacacataaaaactctgggaaatgactaggataaaaatatcagtatgtatctgttttagatattttgagttttgctttttttatgccttgaatattttatttcaaaaagtatctgaagcaaattctcagactgaactacttcttagacctcactgtaagaatattttattcaatgtctcatttatgatagatttgcaagctgctcatttttgaacagctttttgcatgggataggagcatgtctattctaacacatcagcttattcaaaagcaagaattttaaaaataagataaatgtaaagttgttttataaacgatcctgttaattaaaccacagacaccatatatccttctgcatcctttggccaataaaagttgctggagaaccaaaccatggtggttcttaatcaggctttgcctttagggagaatgaggaggagagataattgggtattgttcaggctagtaataaatgtcatgtttctatttcccgcaactcattaagttttcaggaagctcttaatttagatttctaggaaagtaattattcagtcttcctagaaaaagattataaagaccatttaaactggagattgtaatttattcttttacagtccagcatttaagtgaaaatgagaacatcacaatttgggaatctgtaatggttttgttgaaaacattacttgtggcttgtataagagtggctgaattcaagaacattgattcttagcagatcaataatagtatttaaagaatctgatgctaaaattagaaacctaaa

SEQ ID NO: 147821 - DNA, 657 bp, Artificial Sequence
  derived and/or modified sequence
atgagccagaccgccatgagcgagacctacgacttcctgttcaagttcctggtgatcggcaacgccggcaccggcaagagctgcctgctgcaccagttcatcgagaagaagttcaaggacgacagcaaccacaccatcggcgtggagttcggcagcaagatcatcaacgtgggcggcaagtacgtgaagctgcagatctgggacaccgccggccaggagagattcagaagcgtgaccagaagctactacagaggcgccgccggcgccctgctggtgtacgacatcaccagcagagagacctacaacgccctgaccaactggctgaccgacgccagaatgctggccagccagaacatcgtgatcatcctgtgcggcaacaagaaggacctggacgccgacagagaggtgaccttcctggaggccagcagattcgcccaggagaacgagctgatgttcctggagaccagcgccctgaccggcgagaacgtggaggaggccttcgtgcagtgcgccagaaagatcctgaacaagatcgagagcggcgagctggaccccgagagaatgggcagcggcatccagtacggcgacgccgccctgagacagctgagaagccccagaagagcccaggcccccaacgcccaggagtgcggctgctag

SEQ ID NO: 147822 - protein, 820 aa, Artificial Sequence
  derived and/or modified sequence
MALLRDVSLQDPRDRFELLQRVGAGTYGDVYKARDTVTSELAAVKIVKLDPGDDISSLQQEITILRECRHPNVVAYIGSYLRNDRLWICMEFCGGGSLQEIYHATGPLEERQIAYVCREALKGLHHLHSQGKIHRDIKGANLLLTLQGDVKLADFGVSGELTASVAKRRSFIGTPYWMAPEVAAVERKGGYNELCDVWALGITAIELGELQPPLFHLHPMRALMLMSKSSFQPPKLRDKTRWTQNFHHFLKLALTKNPKKRPTAEKLLQHPFTTQQLPRALLTQLLDKASDPHLGTPSPEDCELETYDMFPDTIHSRGQHGPAERTPSEIQFHQVKFGAPRRKETDPLNEPWEEEWTLLGKEELSGSLLQSVQEALEERSLTIRSASEFQELDSPDDTMGTIKRAPFLGPLPTDPPAEEPLSSPPGTLPPPPSGPNSSPLLPTAWATMKQREDPERSSCHGLPPTPKVHMGACFSKVFNGCPLRIHAAVTWIHPVTRDQFLVVGAEEGIYTLNLHELHEDTLEKLISHRCSWLYCVNNVLLSLSGKSTHIWAHDLPGLFEQRRLQQQVPLSIPTNRLTQRIIPRRFALSTKIPDTKGCLQCRVVRNPYTGATFLLAALPTSLLLLQWYEPLQKFLLLKNFSSPLPSPAGMLEPLVLDGKELPQVCVGAEGPEGPGCRVLFHVLPLEAGLTPDILIPPEGIPGSAQQVIQVDRDTILVSFERCVRIVNMQGEPTATLAPELTFDFPIETVVCLQDSVLAFWSHGMQGRSLDTNEVTQEITDETRIFRVLGAHRDIILESIPTDNPEAHSNLYILTGHQSTY

SEQ ID NO: 147823 - DNA, 2463 bp, Artificial Sequence
  derived and/or modified sequence
atggccctgctgcgcgatgtatctctccaagacccgcgcgataggtttgagcttttacaacgtgtcggtgccgggacttatggggacgtttacaaggctcgcgatacagtgacaagtgagttagccgcggttaagattgtgaagctagacccaggtgacgacatctcttccctgcaacaggaaataactatactgcgcgagtgtcggcacccaaacgtggtggcttacatcggctcatatctacgcaatgacaggctgtggatttgtatggagttttgcgggggaggctcattgcaggagatttaccatgcgacaggacccctggaggagcgccagatagcatatgtatgtcgagaggcactgaaaggactgcatcatctgcactctcaaggcaaaattcatcgggatatcaagggtgcaaatctcctcttaaccttgcagggagatgtgaagctggctgattttggtgtgagtggagagttaacggcaagtgtggcgaagcggcggagttttattggtactccttattggatggccccagaagtcgctgcagtggagcggaaaggtggttacaatgaattgtgtgacgtctgggctcttgggatcactgcaatcgagctgggagagctccagcccccccttttccacctccacccgatgagggctcttatgctcatgagcaagtccagtttccagcctcccaagctgagagacaagacgcggtggactcagaattttcaccatttcctgaagcttgccctgacgaaaaatcccaagaagcggccaacagccgagaagttacttcagcacccttttacgacacagcagctgccaagagccttattgactcagctgctagacaaggccagcgatcctcacctcggaactccttctcctgaggattgcgagctggagacatacgacatgttcccagacactattcactctcgggggcagcacggccctgctgagaggacaccaagcgagattcagtttcatcaggtgaagttcggggcacctcgaagaaaggagaccgatcctctaaatgaaccttgggaggaggagtggacccttcttgggaaggaggaactgtctggctcactgttacagtccgttcaagaggccctcgaggagagatcactgaccattaggtccgcgagcgagttccaggaattggacagtccagatgatacaatggggaccataaaaagagccccttttctaggaccgctgcccacggaccctcctgcagaagaacccctcagtagccctcccggcactttgcccccaccgccttcaggaccaaatagcagccccttattgcctacagcctgggcaaccatgaagcaaagagaggacccagaacgctcgtcttgccacggtctccccccgacccccaaggtccacatgggagcttgcttttctaaagtgttcaatggctgtccactaagaattcatgctgcggtgacctggatacatcccgtcacacgcgaccaatttctcgtcgtgggcgctgaagagggaatttacactctcaacctccatgagctccatgaagacacattagagaaactcatcagccaccgatgcagctggctctattgcgtgaataatgtgctcctgagcctttccggaaaatcaacccatatatgggcacatgatctgccaggattgttcgaacaacgcaggctacagcaacaggtgccactatctattcctacgaaccggctgacccagcgtataatccctagaagattcgcgctcagcacgaaaattcccgacaccaaagggtgtctacagtgcagggtcgtgcgaaacccatacaccggggccactttcctgcttgccgccctgccaacctctcttctactcctgcagtggtatgagcctcttcagaagtttcttctcctaaaaaacttcagctcccccctgccttccccagcagggatgttggagccgttggtactcgatggaaaagagctgccacaggtctgtgtaggagcagaaggacccgagggtccgggatgtcgggtgctgttccacgtgctgcccctagaagccggtcttacaccagatattttgattcctccggaaggcatccccggatctgcccagcaggtgattcaggtagatcgggataccattctggtctctttcgagcgatgtgttcgaattgtgaacatgcagggcgaaccaaccgcgaccctagcccccgagctgaccttcgattttcccatcgaaacggtcgtttgcttacaggactccgttctcgccttttggtcccacggaatgcaggggagatccctggacactaacgaggttacacaggaaataacagatgaaaccagaatctttcgggtcctcggggcacacagggatattattctggaatccattccaaccgataacccagaagctcatagcaatctctatatcctgacgggccaccaatctacatactag

SEQ ID NO: 147824 - DNA, 2463 bp, Artificial Sequence
  derived and/or modified sequence
atggccctgctgagagatgtgtccctgcaggacccccgggacagatttgagctgctgcagagggtgggcgccggcacctatggagatgtgtacaaggcccgggacacagtgaccagcgagctggccgctgtgaagatcgtgaagctggaccctggagatgacatcagcagcctgcagcaggagatcaccatcctgagagaatgtcgccaccccaacgtggtggcctacatcggcagctacctgagaaatgaccggctgtggatctgcatggagttctgtggcggcggcagcctgcaggagatctaccacgccaccggccccctggaggagcggcagatcgcctacgtgtgccgggaggccctgaagggcctgcaccacctgcacagccagggcaagatccaccgggacatcaagggggccaacctgctgctgaccctgcagggagatgtgaagctggccgactttggagtgtctggagagctgacagcctctgtggccaagaggaggagcttcatcggcaccccctactggatggcccctgaggtggccgctgtggagaggaagggcggctacaatgagctgtgtgatgtgtgggccctgggcatcacagccatcgagctgggggagctgcagcccccactcttccacctgcaccccatgagggccctgatgctgatgagcaagagcagcttccagccccccaagctgcgggacaagacccgctggacccagaacttccaccacttcctgaagctggccctgaccaagaaccccaagaagaggcccacagctgagaagctgctgcagcaccccttcaccacccagcagctgccccgggccctgctgacccagctgctggacaaggccagtgacccccacctgggcacccccagccctgaggactgtgagctggagacctatgacatgtttcctgacaccatccacagccggggccagcacggccctgctgagaggacccccagcgagatccagttccaccaggtgaagtttggagcccccaggaggaaggagacagaccccctgaatgagccctgggaggaggagtggaccctgctgggcaaggaggagctgagcggcagcctgctgcagagcgtgcaggaggccctggaggagaggagcctgaccatccgcagcgccagcgagttccaggagctggacagcccagatgacaccatgggcaccatcaagagggcccccttcctgggccccctgcccacagatcctcctgctgaggagcccctgagcagccccccaggcaccctgcccccacctccttctggccccaacagcagccccctgctgcccacagcctgggccaccatgaagcagcgggaggaccctgagaggagcagctgccacggcctgccccccacccccaaggtgcacatgggcgcctgcttcagcaaggtgttcaacggctgccccctgcgcatccatgctgctgtgacctggatccaccctgtgacccgggaccagttcctggtggtgggcgctgaggagggcatctacaccctgaacctgcacgagctgcacgaggacaccctggagaagctgatcagccaccgctgctcctggctgtactgtgtgaacaacgtgctgctgagcctgagcggcaagagcacccacatctgggcccatgacctgcccggcctgtttgagcagaggcggctgcagcagcaggtgcccctgagcatccccaccaaccggctgacccagaggatcatccccaggagatttgccctgagcaccaagatcccagacaccaagggctgcctgcagtgccgggtggtgaggaacccctacacaggagccaccttcctgctggccgccctgcccaccagcctgctgctgctgcagtggtatgagcccctgcagaagttcctgctgctgaagaacttcagcagccccctgcccagccctgctggcatgctggagcccctggtgctggatggcaaggagctgccccaggtgtgtgtgggcgctgagggccctgagggccctggctgccgggtgctcttccacgtgctgcccctggaggccggcctgaccccagacatcctgatccccccagagggcatccctggcagcgcccagcaggtgatccaggtggaccgggacaccatcctggtgtcctttgagcgctgtgtgagaattgtgaacatgcagggcgagcccacagccaccctggcccctgagctgacctttgacttccccatcgagaccgtggtgtgcctgcaggacagcgtgctggccttctggagccacggcatgcagggccgcagcctggacaccaatgaggtgacccaggagatcacagatgagacccgcatcttccgggtgctgggcgcccaccgggacatcatcctggagagcatccccacagacaaccctgaggcccacagcaacctgtacatcctgaccggccaccagagcacctactag

SEQ ID NO: 147825 - DNA, 2955 bp, Artificial Sequence
  derived and/or modified sequence
cagagccacgggcgcccgccccgccccgcgccgccccgcgccggctccgcagctcgcgcccgcccgcctgccggcccgcccggcgccgggccatggcgctgctgcgggatgtgtcgctgcaggacccgcgggaccgcttcgagctgctgcagcgcgtgggggccgggacctatggcgacgtctacaaggcccgcgacacggtcacgtccgaactggccgccgtgaagatagtcaagctagacccaggggacgacatcagctccctccagcaggaaatcaccatcctgcgtgagtgccgccaccccaatgtggtggcctacattggcagctacctcaggaatgaccgcttgtggatctgcatggagttctgcggagggggctccctgcaggagatttaccatgccactgggcccctggaggagcggcagattgcctacgtctgccgagaggcactgaaggggctccaccacctgcattctcaggggaagatccacagagacatcaagggagccaaccttctcctcactctccagggagatgtcaaactggctgactttggggtgtcaggcgagctgacagcgtctgtggccaagaggaggtctttcattgggactccctactggatggctcccgaggtggctgctgtggagcgcaaaggtggctacaatgagctatgtgacgtctgggccctgggcatcactgccattgagctgggcgagctgcagccccctctgttccacctgcaccccatgagggccctgatgctcatgtcgaagagcagcttccagccgcccaaactgagagataagactcgctggacccagaatttccaccactttctcaaactggccctgaccaagaatcctaagaagaggccgacagcagagaagctcctgcagcacccgttcacgactcagcagctccctcgggccctcctcacacagctgctggacaaagccagtgaccctcatctggggaccccctcccctgaggactgtgagctggagacctatgacatgtttccagacaccattcactcccgggggcagcacggcccagccgagaggaccccctcggagatccagtttcaccaggtgaaatttggcgccccacgcaggaaggaaactgacccactgaatgagccgtgggaggaagagtggacactactgggaaaggaagagttgagtgggagcctgctgcagtcggtccaggaggccctggaggaaaggagtctgactattcggtcagcctcagaattccaggagctggactccccagacgataccatgggaaccatcaagcgggccccgttcctagggccactccccactgaccctccagcagaggagcctctgtccagtcccccaggaaccctgcccccacctccttcaggccccaacagctccccactgctgcccacggcctgggccaccatgaagcagcgggaggatcctgagaggtcatcctgccacgggctccccccaactcccaaggtgcatatgggcgcctgcttctccaaggtcttcaatggctgccccctgcggatccacgctgctgtcacctggattcaccctgttactcgggaccagttcctggtggtaggggccgaggaaggcatctacacactcaacctgcatgaactgcatgaggatacgctggagaagctgatttcacatcgctgctcctggctctactgcgtgaacaacgtgctgctgtcactctcagggaaatccacgcacatctgggcccatgacctcccaggcctgtttgagcagcggaggctacagcaacaggttcccctctccatccccaccaaccgcctcacccagcgcatcatccccaggcgctttgctctgtccaccaagattcctgacaccaaaggctgcttgcagtgtcgtgtggtgcggaacccctacacgggtgccaccttcctgctggccgccctgcccaccagcctgctcctgctgcagtggtatgagccgctgcagaagtttctgctgctgaagaacttctccagccctctgcccagcccagctgggatgctggagccgctggtgctggatgggaaggagctgccgcaggtgtgtgttggggccgaggggcctgaggggcccggctgccgcgtcctgttccatgtcctgcccctggaggctggcctgacgcccgacatcctcatcccacctgaggggatcccaggctcggcccagcaggtgatccaggtggacagggacacaatcctagtcagctttgaacgctgtgtgaggattgtcaacatgcagggcgagcccacggccacactggcacctgagctgacctttgatttccccatcgagactgtggtgtgcctgcaggacagtgtgctggccttctggagccatgggatgcaaggccgaagcctggataccaatgaggtgacccaggagatcacagatgaaacaaggatcttccgagtgcttggggcccacagagacatcatcctggagagcattcccactgacaacccagaggcgcacagcaacctctacatcctcacgggccaccagagcacctactaagagcagcgggcctgtccaggggctccccgccccaccccacgccttagctgcaggcccttttgggcaaaggggcccatcctagaccagaggagcccaggccctggccctgctggggctgaaggtcagaagtaatcctgagaaatgtttcaggcctggggagggaggggagcccccgacgcctctgcaataactggaccagggggagctgctgtcactcccccatccccgaggcagcccagtccctagtgcccaaggcagggaccctgggcctgggccatccattccattttgttccacatttcctttctactctttctgccaagagcctgcccctgcatttgtcctgggaaacacggtatttaagagagaactatattggtattaaagctggtttgtttta

SEQ ID NO: 147826 - DNA, 2463 bp, Artificial Sequence
  derived and/or modified sequence
atggccctgctgcgggacgtgagcctgcaggacccccgggaccggtttgagctattgcagagagttggggccggcacatacggagacgtgtataaggcgcgggatacggtgacttccgagcttgcggccgtgaaaatcgtcaaactcgatccaggcgacgacatctcatcgctgcagcaggaaataaccatcctgcgagagtgtcgtcatcccaatgttgtcgcatacataggatcttacctgcgcaatgatcgtttgtggatttgtatggagttttgcggcgggggttcacttcaggagatatatcacgccacaggccctctcgaggagcggcagattgcttacgtctgtcgagaggccctaaaaggactccaccacctccactctcaggggaaaatccaccgggatattaagggagcaaacctcctgctgaccctccaaggcgatgtgaaattggctgacttcggggtatctggggaactcaccgctagcgtggctaaacgaaggagcttcattgggaccccgtattggatggcacctgaagtcgccgcagttgagcgcaagggaggctacaatgagctatgtgacgtgtgggccctcgggatcaccgcgatcgagctcggagaattacagccccccctgttccatctccatcccatgcgcgccctcatgctgatgtccaagtccagctttcagccaccaaagctaagggataaaacgagatggacacagaacttccaccactttctcaaattggctctcactaagaaccctaagaagaggccgacggcggaaaagctgctccagcacccattcaccacccagcagttgccacgcgccttactgacccagttgctggacaaagcttccgaccctcacctggggaccccaagtccagaagattgcgaattggaaacctacgacatgtttcccgacaccatccactccaggggacagcacggacccgctgaacggacaccttctgaaatccaatttcaccaagtgaagttcggagcgcctagacggaaagaaacagatcctctgaatgagccctgggaagaagagtggacgttgttaggcaaagaggaattatcaggcagccttctccaatcagtccaagaggccctggaggaaaggtctctgaccatcagatcagcatccgagtttcaagaattagactctccagacgatacaatgggaacgataaagcgtgcacctttccttggcccattgcccactgacccacccgcggaagaacccctgagctcaccacccggaaccctcccccctccaccgagcgggccgaattcctccccgttgctgccaactgcgtgggcgacaatgaaacagagggaagaccctgaacggtccagttgtcacggactgccaccaacaccaaaggtgcacatgggggcctgctttagcaaagtgttcaacgggtgtccactcaggattcatgccgcagtgacttggattcatcctgttacccgggaccagtttttagtagtgggggccgaggagggaatatatactctgaacttgcacgagctgcacgaggacactcttgaaaagctgattagccacagatgtagctggctgtactgtgtgaataatgtcctgctgtcactcagtggaaaatccacgcacatctgggctcatgacctgccgggcctatttgagcagagacggctgcagcagcaagttccgctgtccatacctacgaaccgcctgacccaaaggattattccgaggcgttttgctctttcgactaagatacctgacacaaaggggtgtctgcagtgtagggtcgttcgcaacccctataccggggcaacattcctgctagccgctctgcccacctccctcttgctgctgcaatggtatgagccgctccagaaattcctcttgctgaaaaacttcagtagtccactgccatcccctgcggggatgttggagccccttgttctcgacgggaaggagctcccgcaagtttgtgtcggcgctgaaggtcccgaagggcctggttgcagagtgcttttccacgtgcttccattagaagcgggactgactcctgacattctgatcccacccgaaggaattccaggcagcgcacagcaggtcatccaggttgatcgtgacaccattctggtctccttcgagcgctgtgtgcgtatcgtgaacatgcagggagaacccacagccactctggcccccgagctgaccttcgatttcccaattgagaccgtggtttgcctgcaagactcagtgcttgctttctggtcccatggaatgcaggggcgcagcctcgataccaatgaggtcacccaagaaataacagacgaaacccgaatatttagagtgctgggcgctcaccgcgacatcatattggagtctattccgaccgataacccagaagcacactcaaacctttatatcctgacagggcatcaatctacatactag

SEQ ID NO: 147827 - DNA, 2463 bp, Artificial Sequence
  derived and/or modified sequence
atggcattgctccgagacgtgtcattgcaggaccctagagaccgctttgagctgctgcagagggttggggcaggaacttatggcgacgtctataaagctagagacacagtgacatccgagttggccgctgtgaaaatagtgaaactcgaccccggtgatgacatctcttcattacagcaggaaattaccatattaagagagtgtagacaccccaacgtcgtcgcatacatcggttcttaccttcggaatgatcgcctgtggatctgcatggagttttgcggcggtggaagcttacaggagatctaccacgccactggacctctggaggagcggcagattgcttatgtctgtcgagaagctctcaagggcctgcatcatctccactcacaagggaagatccatcgggacatcaagggcgctaacctgttgctgaccctacagggtgacgtcaagctggccgattttggcgtctcaggcgagttaacagcctccgttgcgaaaaggaggtctttcatcggaactccttattggatggcaccggaggttgccgcagtggaacggaaaggcggatataacgagctgtgtgatgtgtgggccctgggtatcaccgccatcgagctcggcgagttacagcctccactcttccacctgcaccctatgcgcgcactgatgctgatgtccaaatccagctttcagccccctaagctgcgggataagaccaggtggactcagaattttcatcatttcctgaagctggccttgactaagaatcctaagaaacgacccactgccgagaagctattgcagcacccctttactacccagcagctgccgagagctctcctgacacagctgttggacaaggcttccgatccccacctgggaacccccagtccagaagactgcgagctggagacatatgatatgtttccggacactattcacagccggggtcagcatggacccgctgaaagaacaccctcggagattcagttccaccaggtgaaatttggcgctccccgtagaaaagagactgaccccctaaacgaaccttgggaggaagagtggacactactaggaaaagaagaacttagcgggagcctgcttcagagcgtgcaggaagctctcgaggagcgaagcctcacaattaggagcgcctcagagttccaggaacttgattccccggatgatacgatgggtactatcaaacgcgcaccgtttcttggacccctcccaaccgacccacccgcagaagagcccctgtcctcaccgccaggtacactaccccctcctcccagtggacccaactcctcaccacttctcccgacagcttgggctactatgaagcaaagggaggatcccgaacgatcatcatgtcacggtctcccaccgacacctaaagtccacatgggggcatgtttctccaaagtgttcaatggttgccccctgagaattcatgcagccgtgacctggatccaccctgtcacccgggaccagtttttagtggtcggcgctgaggagggcatctacacattaaatctacacgagttacacgaagacaccctggaaaagctcatatcccaccggtgcagctggctgtattgtgtcaataacgtcctacttagtctatctgggaaatctacgcacatttgggcccacgatctgcccggactgtttgaacaaagaaggttgcagcagcaggtcccactctcaatcccaacaaacagactaacccagcgaattattcctcggagattcgcactgagtactaagatccctgacactaaaggatgtctgcagtgtagagttgtgcgaaatccttacacaggtgccacctttctcctcgctgcccttccaacatctctcctgctcctacaatggtatgagcctctgcagaaatttttgctgctgaagaattttagctctcccctgcctagcccggcaggaatgctcgagcccctggtgctggacggcaaagaactgccacaggtctgtgtcggtgcagagggacctgaagggccagggtgcagggtactgttccacgtacttccactagaggcgggactgacccccgacattctgattccaccagaaggcattccgggaagtgctcagcaagtgatccaagtggaccgcgatacgatcctggtcagcttcgagcgctgtgtgcgcattgtgaatatgcagggagagcccactgccactctcgcgcctgagcttacattcgactttcccattgagactgtagtatgtcttcaggactcagtgctggcattttggtctcatggtatgcagggacgcagtctggacactaatgaggtgacacaggaaattactgatgaaacgaggatctttagggtgctgggcgcacatagggatattatcttggagtccatcccaaccgacaaccccgaagcacactcaaatctgtacattctgacaggacaccagtcgacttattag

SEQ ID NO: 147828 - DNA, 2463 bp, Artificial Sequence
  derived and/or modified sequence
atggccctgctgagagacgtgagcctgcaggaccccagagacagattcgagctgctgcagagagtgggcgccggcacctacggcgacgtgtacaaggccagagacaccgtgaccagcgagctggccgccgtgaagatcgtgaagctggaccccggcgacgacatcagcagcctgcagcaggagatcaccatcctgagagagtgcagacaccccaacgtggtggcctacatcggcagctacctgagaaacgacagactgtggatctgcatggagttctgcggcggcggcagcctgcaggagatctaccacgccaccggccccctggaggagagacagatcgcctacgtgtgcagagaggccctgaagggcctgcaccacctgcacagccagggcaagatccacagagacatcaagggcgccaacctgctgctgaccctgcagggcgacgtgaagctggccgacttcggcgtgagcggcgagctgaccgccagcgtggccaagagaagaagcttcatcggcaccccctactggatggcccccgaggtggccgccgtggagagaaagggcggctacaacgagctgtgcgacgtgtgggccctgggcatcaccgccatcgagctgggcgagctgcagccccccctgttccacctgcaccccatgagagccctgatgctgatgagcaagagcagcttccagccccccaagctgagagacaagaccagatggacccagaacttccaccacttcctgaagctggccctgaccaagaaccccaagaagagacccaccgccgagaagctgctgcagcaccccttcaccacccagcagctgcccagagccctgctgacccagctgctggacaaggccagcgacccccacctgggcacccccagccccgaggactgcgagctggagacctacgacatgttccccgacaccatccacagcagaggccagcacggccccgccgagagaacccccagcgagatccagttccaccaggtgaagttcggcgcccccagaagaaaggagaccgaccccctgaacgagccctgggaggaggagtggaccctgctgggcaaggaggagctgagcggcagcctgctgcagagcgtgcaggaggccctggaggagagaagcctgaccatcagaagcgccagcgagttccaggagctggacagccccgacgacaccatgggcaccatcaagagagcccccttcctgggccccctgcccaccgacccccccgccgaggagcccctgagcagcccccccggcaccctgccccccccccccagcggccccaacagcagccccctgctgcccaccgcctgggccaccatgaagcagagagaggaccccgagagaagcagctgccacggcctgccccccacccccaaggtgcacatgggcgcctgcttcagcaaggtgttcaacggctgccccctgagaatccacgccgccgtgacctggatccaccccgtgaccagagaccagttcctggtggtgggcgccgaggagggcatctacaccctgaacctgcacgagctgcacgaggacaccctggagaagctgatcagccacagatgcagctggctgtactgcgtgaacaacgtgctgctgagcctgagcggcaagagcacccacatctgggcccacgacctgcccggcctgttcgagcagagaagactgcagcagcaggtgcccctgagcatccccaccaacagactgacccagagaatcatccccagaagattcgccctgagcaccaagatccccgacaccaagggctgcctgcagtgcagagtggtgagaaacccctacaccggcgccaccttcctgctggccgccctgcccaccagcctgctgctgctgcagtggtacgagcccctgcagaagttcctgctgctgaagaacttcagcagccccctgcccagccccgccggcatgctggagcccctggtgctggacggcaaggagctgccccaggtgtgcgtgggcgccgagggccccgagggccccggctgcagagtgctgttccacgtgctgcccctggaggccggcctgacccccgacatcctgatcccccccgagggcatccccggcagcgcccagcaggtgatccaggtggacagagacaccatcctggtgagcttcgagagatgcgtgagaatcgtgaacatgcagggcgagcccaccgccaccctggcccccgagctgaccttcgacttccccatcgagaccgtggtgtgcctgcaggacagcgtgctggccttctggagccacggcatgcagggcagaagcctggacaccaacgaggtgacccaggagatcaccgacgagaccagaatcttcagagtgctgggcgcccacagagacatcatcctggagagcatccccaccgacaaccccgaggcccacagcaacctgtacatcctgaccggccaccagagcacctactag

SEQ ID NO: 147829 - protein, 391 aa, Artificial Sequence
  derived and/or modified sequence
MKCLVTGGNVKVLGKAVHSLSRIGDELYLEPLEDGLSLRTVNSSRSAYACFLFAPLFFQQYQAATPGQDLLRCKILMKSFLSVFRSLAMLEKTVEKCCISLNGRSSRLVVQLHCKFGVRKTHNLSFQDCESLQAVFDPASCPHMLRAPARVLGEAVLPFSPALAEVTLGIGRGRRVILRSYHEEEADSTAKAMVTEMCLGEEDFQQLQAQEGVAITFCLKEFRGLLSFAESANLNLSIHFDAPGRPAIFTIKDSLLDGHFVLATLSDTDSHSQDLGSPERHQPVPQLQAHSTPHPDDFANDDIDSYMIAMETTIGNEGSRVLPSISLSPGPQPPKSPGPHSEEEDEAEPSTVPGTPPPKKFRSLFFGSILAPVRSPQGPSPVLAEDSEGEG

SEQ ID NO: 147830 - DNA, 1176 bp, Artificial Sequence
  derived and/or modified sequence
atgaagtgcctggtgaccggcggcaacgtgaaggtgctgggcaaggccgtgcacagcctgagcagaatcggcgacgagctgtacctggagcccctggaggacggcctgagcctgagaaccgtgaacagcagcagaagcgcctacgcctgcttcctgttcgcccccctgttcttccagcagtaccaggccgccacccccggccaggacctgctgagatgcaagatcctgatgaagagcttcctgagcgtgttcagaagcctggccatgctggagaagaccgtggagaagtgctgcatcagcctgaacggcagaagcagcagactggtggtgcagctgcactgcaagttcggcgtgagaaagacccacaacctgagcttccaggactgcgagagcctgcaggccgtgttcgaccccgccagctgcccccacatgctgagagcccccgccagagtgctgggcgaggccgtgctgcccttcagccccgccctggccgaggtgaccctgggcatcggcagaggcagaagagtgatcctgagaagctaccacgaggaggaggccgacagcaccgccaaggccatggtgaccgagatgtgcctgggcgaggaggacttccagcagctgcaggcccaggagggcgtggccatcaccttctgcctgaaggagttcagaggcctgctgagcttcgccgagagcgccaacctgaacctgagcatccacttcgacgcccccggcagacccgccatcttcaccatcaaggacagcctgctggacggccacttcgtgctggccaccctgagcgacaccgacagccacagccaggacctgggcagccccgagagacaccagcccgtgccccagctgcaggcccacagcaccccccaccccgacgacttcgccaacgacgacatcgacagctacatgatcgccatggagaccaccatcggcaacgagggcagcagagtgctgcccagcatcagcctgagccccggcccccagccccccaagagccccggcccccacagcgaggaggaggacgaggccgagcccagcaccgtgcccggcacccccccccccaagaagttcagaagcctgttcttcggcagcatcctggcccccgtgagaagcccccagggccccagccccgtgctggccgaggacagcgagggcgagggctag

SEQ ID NO: 147831 - DNA, 1176 bp, Artificial Sequence
  derived and/or modified sequence
atgaagtgtctcgtcaccggtggtaatgtgaaggtgcttgggaaagctgttcattccttaagccgcattggagatgagctctacctggaacctttagaggatgggctgtcgcttcgaaccgtgaatagtagtagaagtgcttacgcctgtttcttgtttgcgcccttattttttcagcaatatcaagctgctacgcccggtcaggacttgcttaggtgtaagatcttaatgaagtcttttctctcagtgttccgctccctcgcaatgctggagaaaacagttgagaagtgttgcatcagcctgaatggcaggagctctagactcgtggtgcagttgcattgtaaatttggcgtgcgcaagacgcataatttatcctttcaggattgcgagtcattgcaggccgtttttgatcctgcgagctgccctcacatgttgcgggcgcccgcaagggtgttaggcgaggctgtgctaccattcagtccagctctggccgaggtcaccctcggaattgggaggggaagacgcgtcattctaagaagttatcatgaggaagaggccgattccaccgctaaggccatggtcacagagatgtgcctgggggaagaggactttcagcagctccaggctcaggagggtgtggccataactttttgcctcaaagagtttcgtggcctgctctcttttgccgagagtgcaaaccttaacttgtccatacactttgatgctcccgggcgccccgctatctttaccatcaaggactcactactggacggacacttcgttctggcaactttaagcgataccgacagccactcccaggatcttggatctcctgaacggcaccagccggtgccacaattgcaggcccactctaccccgcaccccgacgacttcgctaatgatgatattgattcctatatgatcgctatggaaacaacgatcggaaatgagggtagccgggtgttgccaagtataagcctcagtcccggaccccagccgcctaagtctcctggtccacattccgaagaagaggatgaggccgaaccttccacggttcccggcactcctcctcctaaaaagttcaggtccctgttcttcgggagtattctggcacctgtgcgctctccacaagggcctagtccagttctcgcggaggactctgaaggagagggatag

SEQ ID NO: 147832 - DNA, 1176 bp, Artificial Sequence
  derived and/or modified sequence
atgaagtgcctggtgactggaggaaatgtgaaggtgctgggcaaggctgtgcacagcctgagcagaattggagatgagctgtacctggagcccctggaggatggcctgagcctgaggacagtgaacagcagccgcagcgcctatgcctgcttcctgtttgcccccctcttcttccagcagtaccaggccgccaccccaggccaggacctgctgcgctgcaagatcctgatgaagagcttcctgagcgtcttccgcagcctggccatgctggagaagacagtggagaagtgctgcatcagcctgaatggccgcagcagccggctggtggtgcagctgcactgcaagtttggagtgaggaagacccacaacctgtccttccaggactgtgagagcctgcaggccgtgtttgatcctgccagctgcccccacatgctgcgggccccagcccgggtgctgggggaggccgtgctgcccttctccccagccctggccgaggtgaccctgggcatcggccggggccggcgggtcatcctgcggagctaccacgaggaggaggccgacagcacagccaaggccatggtgacagagatgtgcctgggggaggaggacttccagcagctgcaggcccaggagggcgtggccatcaccttctgcctgaaggagttccggggcctgctgagctttgctgagagcgccaacctgaacctgagcatccactttgatgcccctggccggcctgccatcttcaccatcaaggacagcctgctggatggccactttgtgctggccaccctgagtgacacagacagccacagccaggacctgggcagccctgagcggcaccagcctgtgccccagctgcaggcccacagcaccccccacccagatgactttgccaatgatgacatcgacagctacatgattgccatggagaccaccatcggaaatgaaggcagccgggtgctgcccagcatcagcctgagccctggcccccagccccccaagagccctggcccccacagcgaggaggaggatgaagctgagcccagcacagtgcccggcaccccaccacccaagaagttccgcagcctcttcttcggcagcatcctggcccctgtgcgcagcccccagggccccagccctgtgctggctgaagattctgagggggagggctag

SEQ ID NO: 147833 - DNA, 1176 bp, Artificial Sequence
  derived and/or modified sequence
atgaagtgcctggtgaccggcggcaacgtgaaggtgctgggcaaggcagtgcattcactcagccgcattggagacgagctgtatctcgagcccctcgaagacggcctgtctcttcgaacagtcaactcaagccgaagcgcctacgcgtgctttttgttcgcccctctgttctttcagcagtaccaggccgccaccccaggacaggacctgctgcggtgtaaaattctaatgaagagctttctctctgtctttcggtccctggcgatgctggaaaagactgtcgaaaagtgttgcatctctctaaatggccgctcatctaggctcgttgtccagctgcactgtaaattcggtgtccggaagacacataacctgagcttccaagattgcgaatcactacaagctgtgttcgatccagctagctgccctcacatgctcagggccccagccagagtgctcggcgaagccgtcctccctttcagtccagccctggcagaggtcactctgggaatagggagaggacgtcgagttatcctgaggtcatatcatgaagaagaggccgattcaaccgctaaagccatggtcacagagatgtgtttgggagaggaagacttccaacaacttcaggcacaggagggtgtggcaatcactttttgcctgaaagagtttagaggtctcctgtctttcgcggagtcagctaatctgaacttatctattcacttcgacgcccctggcagaccagctatattcacaatcaaagacagtctcctagacggtcacttcgtgctagccactctgtctgacaccgattcccactctcaggatctgggctcccctgagcgtcatcagcccgtgccccagctccaggcccactccacaccccacccagatgactttgcaaacgacgatatcgactcatatatgattgctatggaaaccaccatcgggaatgaagggtcgcgagtgttaccttccatcagtctgtctccaggacctcagcctcctaaatctcccgggcctcatagcgaggaggaagatgaggccgagccttccaccgtgcccggaactccgccccctaagaaattcaggagcttattttttgggagtatcctggcccctgttcgttccccccagggcccatccccggtgctcgcagaagatagcgagggcgagggctag

SEQ ID NO: 147834 - DNA, 1176 bp, Artificial Sequence
  derived and/or modified sequence
atgaaatgcctcgtgaccggaggaaacgtgaaggtcctggggaaagccgttcattccctcagccggatcggagatgaactgtacttggagccccttgaagacggattatccttaagaactgtcaacagctcgcgctccgcttatgcttgttttctgttcgctcccttgttttttcagcagtatcaggccgcaacccctgggcaggaccttctccgctgtaagatcctgatgaagagttttctgtccgtctttcggtccctggctatgctggagaaaacagtggaaaagtgttgcatatctcttaatgggaggtccagcagactcgttgtgcagttgcactgtaaattcggagtgcgcaagacacacaacttatcattccaagactgtgagtccctgcaggctgtgtttgacccagcttcatgtccccacatgctgagggcccctgcaagagtacttggggaagccgtcctgccgttctcccctgcgctggcagaagttaccctgggcatcggaagggggcgacgagttatacttcgttcctaccatgaagaggaggctgattctactgccaaggcaatggttaccgaaatgtgcctgggcgaggaggactttcagcagcttcaggcccaggagggggttgcaattaccttttgcctcaaggagttcagaggactcctaagctttgctgagtccgccaacctgaacctctcaatacactttgatgctccaggccgtccggcaattttcaccattaaggatagtctgctggatgggcacttcgtgctggcaacactctctgacactgacagccatagtcaggacttagggtcccccgaacggcatcagcccgtgccccaactccaagctcacagcactccccatccagacgatttcgctaacgatgacatagactcatacatgatcgctatggagacaacaattggcaacgagggatcgcgcgtgctcccttcaattagcctgtctcctggcccacagccaccgaagagcccagggccacactccgaggaagaggatgaggccgagccaagcacggtccctggaacacctcctcctaaaaagtttcgtagtcttttcttcgggtcaatcctggccccagtgcgctcccctcaaggtccttctcccgtgctggcagaggactcagaaggcgagggctag

SEQ ID NO: 147835 - DNA, 2119 bp, Artificial Sequence
  derived and/or modified sequence
gggccggcaggggcggtgcgcgggaagggaccccggacccggaggtcgcggagagctgggcagtgttggccgctggcggagcgctggggcagcatgaagtgcctggtcacgggcggcaacgtgaaggtgctcggcaaggccgtccactccctgtcccgcatcggggacgagctctacctggaacccttggaggacgggctctccctccggacggtgaactcctcccgctctgcctatgcctgctttctctttgccccgctcttcttccagcaataccaggcagccacccctggtcaggacctgctgcgctgtaagatcctgatgaagtctttcctgtctgtcttccgctcactggcgatgctggagaagacggtggaaaaatgctgcatctccctgaatggccggagcagccgcctggtggtccagctgcattgcaagttcggggtgcggaagactcacaacctgtccttccaggactgtgagtccctgcaggccgtcttcgacccagcctcgtgcccccacatgctccgcgccccagcacgggttctgggggaggctgttctgcccttctctcctgcactggctgaagtgacgctgggcattggccgtggccgcagggtcatcctgcgcagctaccacgaggaggaggcagacagcactgccaaagccatggtgactgagatgtgccttggagaggaggatttccagcagctgcaggcccaggaaggggtggccatcactttctgcctcaaggaattccgggggctcctgagctttgcagagtcagcaaacttgaatcttagcattcattttgatgctccaggcaggcccgccatcttcaccatcaaggactctttgctggacggccactttgtcttggccacactctcagacaccgactcgcactcccaggacctgggctccccagagcgtcaccagccagtgcctcagctccaggctcacagcacaccccacccggacgactttgccaatgacgacattgactcttacatgatcgccatggaaaccactataggcaatgagggctcgcgggtgctgccctccatttccctttcacctggcccccagccccccaagagccccggtccccactccgaggaggaagatgaggctgagcccagtacagtgcctgggactcccccacccaagaagttccgctcactgttcttcggctccatcctggcccctgtacgctccccccagggccccagccctgtgctggcggaagacagtgagggtgaaggctgaaccaagaacctgaagcctgtacccagaggccttggactagacgaagccccagccagtggcagaactgggtctctcagccctggggatcagaaaggtgggcttgctggagctgagctgtttcactgcctctcgcaggccccagctggctgtcactgtaaagctgtcccacagcggtcgggcctgggccgttatctccccacaacccccagccaatcaggactttccagacttggccctgaactactgacgttcctacctcttatttctcattgagcctcaggctatactccagctggccaaggctggaaacctgtctccctcaggctcaccttcctaaggaaaatgtcatagtaggtgctgctggcccctggtgatccagcttctctgccaatcatgacctgttccttcctgaagtcctgggcatgcatctgggacccccgtggagctgacaagttttccttgctttcctgatactctttggcgctgacttggaattctaagagccttggacccgagtgtgtggctagggttgccctggctggggcccggtgccgagactcccaagcggctctgtgcagaagagctgccaggcagtgtcttagatgtgagacggaggccatggcgagaatccagctttgacctttattcaagagaccagatgggttgccccaggatccggctgccagccctgaggccaagcacggctggagacccacgacctggcctgccgttgccctgagctgcagcctcggccccaggatcctgctcacagtcaccgcaggtgcaggcaggaagcagccctgggggactggacgctgctattgattcattaaaaaaagaaaagaaaaat

SEQ ID NO: 147836 - protein, 164 aa, Artificial Sequence
  derived and/or modified sequence
MASPHQEPKPGDLIEIFRLGYEHWALYIGDGYVIHLAPPSEYPGAGSSSVFSVLSNSAEVKRERLEDVVGGCCYRVNNSLDHEYQPRPVEVIISSAKEMVGQKMKYSIVSRNCEHFVTQLRYGKSRCKQVEKAKVEVGVATALGILVVAGCSFAIRRYQKKATA

SEQ ID NO: 147837 - protein, 164 aa, Artificial Sequence
  derived and/or modified sequence
MGLPEPKPKPGDLIEIFRLGYEHWALYIGDGYVIHLAPPSEYPGAGSSSVFSVLSNSAEVKRERLEDVVGGCCYRVNNSLDHEYQPRPVEVIISSAKEMVGQKMKYSIVSRNCEHFVTQLRYGKSRCKQVEKAKVEVGVATALGILVVAGCSFAIRRYQKKATA

SEQ ID NO: 147838 - DNA, 495 bp, Artificial Sequence
  derived and/or modified sequence
atggcctcaccccaccaggagcccaagccaggggacctgatagagatcttccgcctcggctatgaacattgggctctgtacataggcgacggatacgttattcacttggctccgccatccgaatatcccggggcgggcagctcatccgtttttagtgtgctgtccaactctgccgaagtcaaacgggagagactggaggatgtggtagggggctgttgctatagagtgaacaactctttagaccacgaataccagcctaggccagtcgaggtcatcatcagctctgccaaagagatggttggccagaagatgaagtacagcatagtttcccgaaactgtgagcacttcgtcacacagcttcgatatggcaaatcccgctgcaagcaggtagagaaagcgaaggtggaggttggcgtagctacagcccttggaatattagtggttgctgggtgctcattcgcgatccgtcggtaccagaagaaggctacagcctag

SEQ ID NO: 147839 - DNA, 495 bp, Artificial Sequence
  derived and/or modified sequence
atgggactgccagaaccgaagcctaagcccggcgacctgattgagatctttaggctggggtatgagcattgggctctctacatcggagacgggtacgtcattcatttggctccccccagtgagtaccccggtgcgggaagcagttccgtgttctcggtgctgtccaacagcgcagaggtaaagcgggaaagactagaggacgtcgtcggtggttgttgttatcgtgtgaataattcactggaccatgaataccagcctagacctgtagaggtgattataagcagcgcaaaggaaatggtaggacagaaaatgaaatattccatcgtttctcgcaactgtgagcacttcgttacgcagttgcgctacgggaagtcacgctgcaaacaggtggagaaagcaaaagtcgaagtgggggtggcaactgctctgggtattctagtagtagccggttgttcatttgcgatacgccgatatcaaaagaaagctaccgcctag

SEQ ID NO: 147840 - DNA, 495 bp, Artificial Sequence
  derived and/or modified sequence
atggccagcccccaccaggagcccaagccaggggacctgattgagatcttccggctgggctatgagcactgggccctgtacatcggagatggctacgtgatccacctggccccacccagcgagtacccaggagctggcagcagctctgtgttttctgtgctgagcaacagcgctgaggtgaagcgggagcggctggaggatgtggtgggcggctgctgctacagagtgaacaacagcctggaccacgagtaccagcccaggcctgtggaggtgatcatcagcagcgccaaggagatggtgggccagaagatgaagtacagcatcgtgtccaggaactgtgagcactttgtgacccagctgcgctatggcaagagccgctgcaagcaggtggagaaggccaaggtggaggtgggcgtggccacagccctgggcatcctggtggtggccggctgcagctttgccatccgccgctaccagaagaaggccacagcctag

SEQ ID NO: 147841 - DNA, 495 bp, Artificial Sequence
  derived and/or modified sequence
atgggcctgcctgagcccaagcccaagccaggggacctgattgagatcttccggctgggctatgagcactgggccctgtacatcggagatggctacgtgatccacctggccccacccagcgagtacccaggagctggcagcagctctgtgttttctgtgctgagcaacagcgctgaggtgaagcgggagcggctggaggatgtggtgggcggctgctgctacagagtgaacaacagcctggaccacgagtaccagcccaggcctgtggaggtgatcatcagcagcgccaaggagatggtgggccagaagatgaagtacagcatcgtgtccaggaactgtgagcactttgtgacccagctgcgctatggcaagagccgctgcaagcaggtggagaaggccaaggtggaggtgggcgtggccacagccctgggcatcctggtggtggccggctgcagctttgccatccgccgctaccagaagaaggccacagcctag

SEQ ID NO: 147842 - DNA, 495 bp, Artificial Sequence
  derived and/or modified sequence
atggccagcccccaccaggagcccaagcccggcgacctgatcgagatcttccgcctgggatatgagcattgggcactctacataggggacggctatgtgatccatctcgcccctccttccgaatatccaggggctggtagcagttccgtcttcagtgtgctcagcaattcagccgaagtcaagagagagcgtcttgaagatgtggtcggaggctgttgctatcgcgtgaacaattcactcgaccatgagtatcagccacgtcctgttgaagtcatcatcagctcggcaaaggagatggttggtcagaaaatgaaatactcaattgtgtccagaaattgcgagcattttgtcacacaactcaggtatgggaagtctaggtgcaagcaggttgagaaagccaaggtggaggttggtgtcgcgactgcgctagggattctagtcgtggcaggatgtagctttgctattaggaggtatcagaagaaggctacagcctag

SEQ ID NO: 147843 - DNA, 495 bp, Artificial Sequence
  derived and/or modified sequence
atgggcctgcccgagcccaagcccaagcccggcgacctgatcgagatttttcgccttggttatgagcattgggccctgtatattggtgatggctacgtgatacacctggcgccaccttctgagtaccctggtgcaggtagtagcagcgttttctccgtgctgtctaattctgcggaggttaagagagagcggctcgaggacgtggtgggcggctgctgttatcgtgtcaacaactccttagatcatgaataccagcctagaccagtggaagtgatcatttcttccgctaaggagatggtgggtcagaagatgaagtacagtatcgtctctcgcaattgtgagcatttcgttacacagctgcggtacgggaaatcacgctgtaaacaggttgaaaaggccaaagtcgaggtcggcgttgccaccgcactgggtattctggtagtagctggttgctcctttgccattcgcagataccagaagaaggcaaccgcctag

SEQ ID NO: 147844 - DNA, 495 bp, Artificial Sequence
  derived and/or modified sequence
atggcctctccgcaccaggagccaaagccaggtgacttaatcgaaattttcaggctggggtacgaacattgggccctttatatcggggatggatatgtgatacacctagcccctcccagcgagtatcctggcgctggaagctcgagtgtatttagcgtgctgtctaattcagcagaagttaaaagggaaagactggaggatgttgttgggggatgctgctatcgcgtcaataattccctcgatcacgagtatcagccccgtcctgtggaagtcatcattagctccgcaaaggagatggtggggcagaagatgaaatatagcattgtgtccagaaactgtgaacatttcgtaacccaactccgctatggcaaatccagatgtaagcaggtcgaaaaggccaaggtggaagtaggtgtcgcaacagccctgggcattctggttgtcgctggatgttcgttcgccatccgccgttatcagaaaaaggccacggcgtag

SEQ ID NO: 147845 - DNA, 495 bp, Artificial Sequence
  derived and/or modified sequence
atggggctcccagagcctaagcccaagccaggcgacctgatcgaaatcttcagactagggtacgaacactgggcactatacatcggcgacggctacgtgatccatctggccccaccttctgagtatccaggagccggtagcagttctgtgttcagcgtgttatcaaactctgcagaggtaaagagagagaggctcgaggacgttgtgggcggatgctgctatcgggtcaacaactcgctcgatcatgagtatcagcctcgccctgttgaggttatcatttctagcgctaaagagatggtgggtcagaaaatgaagtattctattgtatcacggaattgcgaacactttgtcacccagttgagatacgggaaaagccggtgcaaacaggtggagaaggctaaggttgaggtcggcgtggccactgcgctaggaatcctggttgtcgctggttgctccttcgccatacggagataccaaaaaaaagccactgcttag

SEQ ID NO: 147846 - DNA, 749 bp, Artificial Sequence
  derived and/or modified sequence
agctgatccacaaacaagaggagcaccagacctcctcttggcttcgagatggcttcgccacaccaagagcccaaacctggagacctgattgagattttccgccttggctatgagcactgggccctgtatataggagatggctacgtgatccatctggctcctccaagtgagtaccccggggctggctcctccagtgtcttctcagtcctgagcaacagtgcagaggtgaaacgggagcgcctggaagatgtggtgggaggctgttgctatcgggtcaacaacagcttggaccatgagtaccaaccacggcccgtggaggtgatcatcagttctgcgaaggagatggttggtcagaagatgaagtacagtattgtgagcaggaactgtgagcactttgtcacccagctgagatatggcaagtcccgctgtaaacaggtggaaaaggccaaggttgaagttggtgtggccacggcgcttggaatcctggttgttgctggatgctcttttgcgattaggagataccaaaaaaaagcgacagcctgaagcagccacaaaatcctgtgttagaagcagctgtgggggtcccagtggagatgagcctcccccatgcctccagcagcctgaccctcgtgccctgtctcaggcgttctctagatcctttcctctgtttccctctctcgctggcaaaagtatgatctaattgaaacaagactgaaggatcaataaacagccatctgccccttcagaaa

SEQ ID NO: 147847 - DNA, 696 bp, Artificial Sequence
  derived and/or modified sequence
atggggctgcctgaaccaaagcccaaacctggagacctgattgagattttccgccttggctatgagcactgggccctgtatataggagatggctacgtgatccatctggctcctccaagtgagtaccccggggctggctcctccagtgtcttctcagtcctgagcaacagtgcagaggtgaaacgggagcgcctggaagatgtggtgggaggctgttgctatcgggtcaacaacagcttggaccatgagtaccaaccacggcccgtggaggtgatcatcagttctgcgaaggagatggttggtcagaagatgaagtacagtattgtgagcaggaactgtgagcactttgtcacccagctgagatatggcaagtcccgctgtaaacaggtggaaaaggccaaggttgaagttggtgtggccacggcgcttggaatcctggttgttgctggatgctcttttgcgattaggagataccaaaaaaaagcgacagcctgaagcagccacaaaatcctgtgttagaagcagctgtgggggtcccagtggagatgagcctcccccatgcctccagcagcctgaccctcgtgccctgtctcaggcgttctctagatcctttcctctgtttccctctctcgctggcaaaagtatgatctaattgaaacaagactgaaggatcaataaacagccatctgccccttc

SEQ ID NO: 147848 - DNA, 495 bp, Artificial Sequence
  derived and/or modified sequence
atggccagcccccaccaggagcccaagcccggcgacctgatcgagatcttcagactgggctacgagcactgggccctgtacatcggcgacggctacgtgatccacctggccccccccagcgagtaccccggcgccggcagcagcagcgtgttcagcgtgctgagcaacagcgccgaggtgaagagagagagactggaggacgtggtgggcggctgctgctacagagtgaacaacagcctggaccacgagtaccagcccagacccgtggaggtgatcatcagcagcgccaaggagatggtgggccagaagatgaagtacagcatcgtgagcagaaactgcgagcacttcgtgacccagctgagatacggcaagagcagatgcaagcaggtggagaaggccaaggtggaggtgggcgtggccaccgccctgggcatcctggtggtggccggctgcagcttcgccatcagaagataccagaagaaggccaccgcctag

SEQ ID NO: 147849 - DNA, 495 bp, Artificial Sequence
  derived and/or modified sequence
atgggcctgcccgagcccaagcccaagcccggcgacctgatcgagatcttcagactgggctacgagcactgggccctgtacatcggcgacggctacgtgatccacctggccccccccagcgagtaccccggcgccggcagcagcagcgtgttcagcgtgctgagcaacagcgccgaggtgaagagagagagactggaggacgtggtgggcggctgctgctacagagtgaacaacagcctggaccacgagtaccagcccagacccgtggaggtgatcatcagcagcgccaaggagatggtgggccagaagatgaagtacagcatcgtgagcagaaactgcgagcacttcgtgacccagctgagatacggcaagagcagatgcaagcaggtggagaaggccaaggtggaggtgggcgtggccaccgccctgggcatcctggtggtggccggctgcagcttcgccatcagaagataccagaagaaggccaccgcctag

SEQ ID NO: 147850 - protein, 740 aa, Artificial Sequence
  derived and/or modified sequence
MPLAQLADPWQKMAVESPSDSAENGQQIMDEPMGEEEINPQTEEVSIKEIAITHHVKEGHEKADPSQFELLKVLGQGSFGKVFLVKKISGSDARQLYAMKVLKKATLKVRDRVRTKMERDILVEVNHPFIVKLHYAFQTEGKLYLILDFLRGGDLFTRLSKEVMFTEEDVKFYLAELALALDHLHSLGIIYRDLKPENILLDEEGHIKLTDFGLSKESIDHEKKAYSFCGTVEYMAPEVVNRRGHTQSADWWSFGVLMFEMLTGTLPFQGKDRKETMTMILKAKLGMPQFLSPEAQSLLRMLFKRNPANRLGAGPDGVEEIKRHSFFSTIDWNKLYRREIHPPFKPATGRPEDTFYFDPEFTAKTPKDSPGIPPSANAHQLFRGFSFVAITSDDESQAMQTVGVHSIVQQLHRNSIQFTDGYEVKEDIGVGSYSVCKRCIHKATNMEFAVKIIDKSKRDPTEEIEILLRYGQHPNIITLKDVYDDGKYVYVVTELMKGGELLDKILRQKFFSEREASAVLFTITKTVEYLHAQGVVHRDLKPSNILYVDESGNPESIRICDFGFAKQLRAENGLLMTPCYTANFVAPEVLKRQGYDAACDIWSLGVLLYTMLTGYTPFANGPDDTPEEILARIGSGKFSLSGGYWNSVSDTAKDLVSKMLHVDPHQRLTAALVLRHPWIVHWDQLPQYQLNRQDAPHLVKGAMAATYSALNRNQSPVLEPVGRSTLAQRRGIKKITSTAL

SEQ ID NO: 147851 - protein, 133 aa, Artificial Sequence
  derived and/or modified sequence
MDEPMGEEEINPQTEEVSIKEIAITHHVKEGHEKADPSQFELLKVLGQGSFGKVFLVKKISGSDARQLYAMKVLKKATLKVRDRVRTKMERDILVEVNHPFIVKLHYAFQTEGKLYLILDFLRGGDLFTRLSK

SEQ ID NO: 147852 - DNA, 2223 bp, Artificial Sequence
  derived and/or modified sequence
atgcccctggcccagctggccgacccctggcagaagatggccgtggagagccccagcgacagcgccgagaacggccagcagatcatggacgagcccatgggcgaggaggagatcaacccccagaccgaggaggtgagcatcaaggagatcgccatcacccaccacgtgaaggagggccacgagaaggccgaccccagccagttcgagctgctgaaggtgctgggccagggcagcttcggcaaggtgttcctggtgaagaagatcagcggcagcgacgccagacagctgtacgccatgaaggtgctgaagaaggccaccctgaaggtgagagacagagtgagaaccaagatggagagagacatcctggtggaggtgaaccaccccttcatcgtgaagctgcactacgccttccagaccgagggcaagctgtacctgatcctggacttcctgagaggcggcgacctgttcaccagactgagcaaggaggtgatgttcaccgaggaggacgtgaagttctacctggccgagctggccctggccctggaccacctgcacagcctgggcatcatctacagagacctgaagcccgagaacatcctgctggacgaggagggccacatcaagctgaccgacttcggcctgagcaaggagagcatcgaccacgagaagaaggcctacagcttctgcggcaccgtggagtacatggcccccgaggtggtgaacagaagaggccacacccagagcgccgactggtggagcttcggcgtgctgatgttcgagatgctgaccggcaccctgcccttccagggcaaggacagaaaggagaccatgaccatgatcctgaaggccaagctgggcatgccccagttcctgagccccgaggcccagagcctgctgagaatgctgttcaagagaaaccccgccaacagactgggcgccggccccgacggcgtggaggagatcaagagacacagcttcttcagcaccatcgactggaacaagctgtacagaagagagatccacccccccttcaagcccgccaccggcagacccgaggacaccttctacttcgaccccgagttcaccgccaagacccccaaggacagccccggcatcccccccagcgccaacgcccaccagctgttcagaggcttcagcttcgtggccatcaccagcgacgacgagagccaggccatgcagaccgtgggcgtgcacagcatcgtgcagcagctgcacagaaacagcatccagttcaccgacggctacgaggtgaaggaggacatcggcgtgggcagctacagcgtgtgcaagagatgcatccacaaggccaccaacatggagttcgccgtgaagatcatcgacaagagcaagagagaccccaccgaggagatcgagatcctgctgagatacggccagcaccccaacatcatcaccctgaaggacgtgtacgacgacggcaagtacgtgtacgtggtgaccgagctgatgaagggcggcgagctgctggacaagatcctgagacagaagttcttcagcgagagagaggccagcgccgtgctgttcaccatcaccaagaccgtggagtacctgcacgcccagggcgtggtgcacagagacctgaagcccagcaacatcctgtacgtggacgagagcggcaaccccgagagcatcagaatctgcgacttcggcttcgccaagcagctgagagccgagaacggcctgctgatgaccccctgctacaccgccaacttcgtggcccccgaggtgctgaagagacagggctacgacgccgcctgcgacatctggagcctgggcgtgctgctgtacaccatgctgaccggctacacccccttcgccaacggccccgacgacacccccgaggagatcctggccagaatcggcagcggcaagttcagcctgagcggcggctactggaacagcgtgagcgacaccgccaaggacctggtgagcaagatgctgcacgtggacccccaccagagactgaccgccgccctggtgctgagacacccctggatcgtgcactgggaccagctgccccagtaccagctgaacagacaggacgccccccacctggtgaagggcgccatggccgccacctacagcgccctgaacagaaaccagagccccgtgctggagcccgtgggcagaagcaccctggcccagagaagaggcatcaagaagatcaccagcaccgccctgtag

SEQ ID NO: 147853 - DNA, 2223 bp, Artificial Sequence
  derived and/or modified sequence
atgcccctagcgcagctagcagacccttggcaaaaaatggctgtggaatcgccctccgactccgcagaaaacggtcagcagatcatggacgagcccatgggtgaagaggagattaatccccagaccgaagaagtgagtatcaaagagatagccatcacacaccacgtcaaggaaggacacgagaaagcagacccttctcagttcgagctgctgaaagttctcggccagggcagctttggcaaagtgtttctcgttaagaagatttcggggagcgatgcccgccagctgtatgcaatgaaggtacttaagaaggcgaccctcaaagtcagagaccgggttcgcactaagatggagagagacatactggtcgaggttaatcatcccttcatcgttaagctgcattacgcgtttcaaaccgaaggaaaactctacctaatcctggattttcttcgtggtggtgacctttttactcgcctgtctaaggaagttatgttcacagaagaggatgtgaaattctacctcgccgagttggcactcgctctggatcacctacactcattgggcattatttacagagatctcaaaccagagaatatccttctggatgaggagggtcacattaaactcactgactttggactgagcaaggagagtatcgaccacgagaaaaaggcttattcgttctgcggaaccgtggaatatatggctcctgaggtggtgaataggcgcggccacactcaaagtgcggattggtggagctttggcgtgctcatgtttgagatgctgactggaaccctgccgtttcagggcaaggaccgaaaagagactatgaccatgattttaaaagctaaactcggcatgccccagttcctgagccccgaagcccagagcttgctgcggatgctctttaagaggaatcctgcaaacagactgggtgccgggccagatggagtcgaggaaatcaagcgccactcgttcttctctacgattgactggaataagctgtaccgcagagaaattcaccccccctttaaaccggctacgggccgcccagaggacacgttttattttgaccccgaattcaccgctaagactcccaaggatagccctgggattcctcctagcgccaatgcccaccagcttttccggggattttctttcgtcgccatcacatctgacgacgagtctcaggcgatgcagactgtcggggtgcattctattgttcaacagctgcataggaactcaatccagttcacagatgggtatgaggtcaaggaagatatcggcgtcgggagttactctgtgtgcaagaggtgcatccacaaagctacgaacatggagttcgccgtcaagattattgataagtctaagagggatccaactgaggaaatcgaaatactgctcaggtacggacagcatcctaacatcataacactgaaggatgtatacgacgacgggaagtacgtgtacgtggtcactgagctgatgaaggggggtgagcttctggacaagattctcaggcagaagtttttctctgagcgcgaggccagtgctgtgttgttcaccatcactaaaactgtggaatatctccatgctcagggcgtagtccaccgggaccttaagccctccaatattctatatgttgatgagtcaggcaaccccgaatccatccgcatttgcgatttcggttttgcgaagcagttgcgcgctgagaacggcttgttaatgacgccatgctatactgctaacttcgtcgctccagaagtcctgaagaggcagggatacgacgctgcttgcgatatttggtccttgggtgtgctgctctatacaatgctgacaggatacacgccctttgccaatggccctgatgatacacctgaagagattctggcgaggattgggtctgggaagtttagtctttctggaggatattggaactctgtgtctgacacagcaaaagatctggtgtcaaaaatgctgcatgttgatcctcatcagagactgactgccgccctggtgctccgtcatccctggatcgtgcattgggatcaacttccacagtaccagctgaatcgtcaagatgcacctcacctcgtgaagggagccatggcagccacctacagcgccctcaaccgcaatcagtctcccgtactggagcccgtagggaggagtaccctggcccagaggcgcggaatcaagaagattacctctacggccctgtag

SEQ ID NO: 147854 - DNA, 2223 bp, Artificial Sequence
  derived and/or modified sequence
atgcccctggcccagctggccgacccctggcagaagatggctgtggagagccccagcgacagcgcagaaaatggccagcagatcatggatgagcccatgggagaggaggagatcaacccccagacagaggaggtgtccatcaaggagatcgccatcacccaccacgtgaaggagggccacgagaaggctgaccccagccagtttgagctgctgaaggtgctgggccagggcagctttgggaaggtgttcctggtgaagaagatcagcggcagtgatgcccggcagctgtatgccatgaaggtgctgaagaaggccaccctgaaggtgcgggacagagtgaggaccaagatggagcgggacatcctggtggaggtgaaccaccccttcatcgtgaagctgcactacgccttccagacagagggcaagctgtacctgatcctggacttcctgcggggcggggacctcttcacccggctgagcaaggaggtgatgttcacagaggaggatgtgaagttctacctggccgagctggccctggccctggaccacctgcacagcctgggcatcatctacagagacctgaagccagagaacatcctgctggatgaggagggccacatcaagctgacagactttggcctgagcaaggagagcattgaccacgagaagaaggcctacagcttctgtggcaccgtggagtacatggcccctgaggtggtgaacagaagaggccacacccagagcgctgactggtggagctttggagtgctgatgtttgagatgctgaccggcaccctgcccttccagggcaaggacaggaaggagaccatgaccatgatcctgaaggccaagctgggcatgccccagttcctgagccctgaggcccagagcctgctgaggatgctgttcaagagaaatcctgccaaccggctgggcgccggcccagatggagtggaggagatcaagaggcacagcttcttcagcaccatcgactggaacaagctgtacagaagagagatccacccccccttcaagccagccaccggccggcctgaggacaccttctactttgatcctgagttcaccgccaagacccccaaggacagccctggcatccccccatctgccaatgcccaccagctgttccggggcttctcctttgtggccatcaccagtgatgatgagagccaggccatgcagacagtgggcgtgcacagcatcgtgcagcagctgcacagaaattccatccagttcacagatggctatgaggtgaaggaggacatcggcgtgggcagctacagcgtgtgcaagcgctgcatccacaaggccaccaacatggagtttgctgtgaagatcatcgacaagagcaagagggaccccacagaggagattgagatcctgctgcgctatggccagcaccccaacatcatcaccctgaaggatgtgtatgatgatggcaagtatgtgtatgtggtgacagagctgatgaagggcggggagctgctggacaagatcctgcggcagaagttcttcagcgagcgggaggccagcgctgtgctcttcaccatcaccaagacagtggagtacctgcacgcccagggcgtggtgcaccgggacctgaagcccagcaacatcctgtatgtggatgaaagtggcaaccctgagagcatccgcatctgtgactttggatttgccaagcagctgcgggcagaaaatggcctgctgatgaccccctgctacacagccaactttgtggcccctgaggtgctgaagaggcagggctatgatgctgcctgtgacatctggagcctgggcgtgctgctgtacaccatgctgaccggctacaccccatttgccaacggcccagatgacaccccagaggagatcctggccagaattggcagcggcaagttcagcctgagcggcggctactggaacagcgtgtctgacacagccaaggacctggtgtccaagatgctgcacgtggacccccaccagaggctgacagctgccctggtgctgcggcacccctggatcgtgcactgggaccagctgccccagtaccagctgaaccggcaggatgccccccacctggtgaagggggccatggccgccacctacagcgccctgaacagaaaccagagccctgtgctggagcctgtgggccgcagcaccctggcccagaggcggggcatcaagaagatcaccagcacagccctgtag

SEQ ID NO: 147855 - DNA, 2223 bp, Artificial Sequence
  derived and/or modified sequence
atgcccctggcccagctggccgacccctggcagaagatggccgtggagagtcctagtgacagtgcagaaaacggccagcagatcatggatgagccaatgggcgaggaggagataaacccccagaccgaggaggttagcatcaaagagatcgccatcacacaccacgtcaaggagggacatgagaaagctgaccctagccagtttgagctgctcaaggtgctgggccaggggagctttggaaaggtgttccttgtgaagaagatatcagggtctgacgcacgccaattatacgccatgaaagtgcttaagaaggcaacactgaaggtccgtgatcgggtgaggactaagatggagagggatatcctagtggaggtcaaccacccctttatagtgaaactgcactacgcgtttcagaccgaaggcaaattgtatctgatcctggactttctgaggggcggcgatctgttcacgagactgtcaaaggaagttatgtttaccgaggaggatgtgaagttctacctggctgaactggcactggctctggaccacctgcacagcctagggataatttatcgagatctaaagccagagaatattctactggatgaagagggtcacataaagcttaccgacttcgggttatcaaaggagagcatcgatcatgaaaaaaaggcgtactctttttgcgggaccgtggagtatatggctcccgaggtggttaacagacgcggccatacacagtcagcagattggtggtctttcggagtgctgatgtttgagatgcttactggcacactgccatttcagggaaaggataggaaggaaactatgaccatgatactcaaggccaagctgggaatgcctcagtttctgagcccagaggcacagagcctcctgcgtatgctgttcaagagaaatcctgcaaataggttgggcgccgggccagacggagtagaggaaataaagcgccattcattcttcagtacaatcgattggaacaaattgtatcgtagggagatacatcctccatttaaacctgctactggtaggcccgaggacactttctatttcgacccagaattcactgcgaagacccctaaagacagcccaggcattcccccgtctgctaatgcccaccagctctttaggggcttctcattcgtggccattacgtctgacgacgaatcacaggcgatgcagaccgttggggttcacagcattgtccagcagctgcataggaactccattcaattcacggacggatacgaggtaaaagaagatatcggcgtcgggagttatagcgtgtgcaagcggtgtatccacaaggcaactaacatggagttcgcagtgaagatcattgacaaatcaaagcgagatccgactgaagagatcgaaattctgctgcgctacggccagcacccaaatattattacattgaaggacgtatacgatgacggcaagtatgtctatgtggtaactgaacttatgaaggggggagagttgctcgacaaaatactgcgccagaaattcttcagtgaaagggaggcatccgccgtactgttcacaattacaaagaccgtagagtacctacatgcccagggcgtggtgcaccgggatctcaagccctctaacatcctgtacgtggatgagtcagggaaccctgaatctatacgaatctgcgacttcggatttgccaaacagctcagagctgaaaatggactgctaatgaccccgtgttacacagctaacttcgtggcacccgaagtgttgaaacggcaaggatatgacgctgcttgcgacatctggtcactgggtgttttactgtatacgatgctgaccggatacactcctttcgccaacggtcccgacgacacccctgaggagatccttgcgagaatagggtccggtaagttcagcctttcaggaggttactggaacagcgtatcagatacagccaaggaccttgtgagtaagatgctccacgtggatccgcaccaaaggcttacagccgcactcgtgcttaggcatccatggatcgtccactgggatcagttgcctcagtatcagctgaaccgccaggatgctccgcacctcgtgaagggggccatggccgcaacatattccgccctaaaccgtaatcagtctcctgtgctggagcccgtcgggaggagcaccctcgcgcagcgtcgaggcataaaaaaaattacgtccacggcgttgtag

SEQ ID NO: 147856 - DNA, 2223 bp, Artificial Sequence
  derived and/or modified sequence
atgcctttagctcagttggcagatccgtggcagaaaatggccgtcgaaagcccttctgacagtgccgagaatgggcagcaaatcatggatgagcccatgggtgaggaggagataaaccctcaaacagaagaagtttcgattaaggaaattgcaattacacaccacgtgaaagaagggcatgaaaaggcggatccttcacagtttgaactcctaaaggttctcgggcagggcagcttcggcaaggtattcctggtcaaaaagatttcaggaagtgatgcaaggcagctgtacgcaatgaaggtgttgaagaaggctactctgaaggtcagagatagagtgcgtaccaagatggagagagacattttggtggaagtcaaccacccttttatcgtgaagctccactacgcattccaaaccgagggcaaactctacctgatcctagacttcctgaggggtggcgacctgttcacccgattatctaaggaagtaatgtttactgaggaggacgtcaaattctacctggccgagttagctctggcactggatcacttgcactctcttgggattatctatcgagacttaaagccggagaatatcctcctcgatgaagaaggtcacatcaagcttacggacttcgggttatcgaaagagagcattgatcatgagaaaaaggcttattcgttttgcgggactgttgagtacatggcgccagaagtggtcaatcggaggggacatactcagagcgccgactggtggagctttggagtcctgatgtttgagatgcttacggggaccctgccatttcagggcaaggacaggaaggaaacaatgacgatgattcttaaagccaaactggggatgccccagtttttgagccctgaggcccagagccttctcaggatgcttttcaaaaggaaccccgcaaatcgactcggggctgggcctgacggggtggaggagattaagagacacagctttttctccacgattgattggaacaaactataccgacgggagatccaccccccattcaagcccgctactggccgtcccgaagatacattttactttgaccctgaatttactgctaagacgcctaaggattctcccggtattcccccatcggccaatgcccaccagcttttccgcggattctccttcgtggccatcaccagtgacgatgaatctcaagccatgcagaccgtcggcgttcactcaatcgttcagcagttgcatcggaacagcattcaattcaccgatggatatgaggtcaaggaggacataggagtgggcagttatagcgtatgtaaaagatgcatccataaagccacaaatatggagttcgccgtcaaaattatcgacaaatcaaaacgagacccaacagaagaaattgagatattactccgctacgggcagcatccaaacataattactctcaaagacgtgtatgacgacggaaaatacgtttacgtcgtgacagagctcatgaaggggggagagctcctggataagattctaagacagaagtttttttctgagagagaggccagtgccgtcttgtttactattacaaaaactgtggagtacctgcacgcccaaggcgtagtacatcgggacctcaagcctagtaacatcctctatgtggacgagtcaggcaatccagagtctatccgcatttgtgactttggctttgctaagcagctgcgcgctgaaaacggactgctcatgacaccgtgctatacagccaatttcgtggctccagaggtgctcaagcggcaagggtacgacgccgcttgcgatatctggtcgctaggggtgctgctttataccatgctaaccggatatacaccctttgcgaatggcccagacgatactccagaagaaattctggccagaatcggttcaggtaagttttctctaagcggcggttattggaattctgtgagcgacaccgccaaggacctagtatctaaaatgctacacgtggatccacatcagaggctgacggccgcactggtgttaaggcatccctggattgtgcattgggaccagcttccacaatatcagttaaacaggcaagatgctcctcacctggtgaaaggggctatggcggctacctattcggcgctaaacagaaatcagtcgccagtgcttgaacctgtgggccgtagcacattagctcagcgcagaggaattaaaaagatcaccagcaccgcactttag

SEQ ID NO: 147857 - DNA, 7918 bp, Artificial Sequence
  derived and/or modified sequence
aggcgcgcggctttcgggcggtcggcgtcggcgtcgagccctctctggggccgccgccgctgctgctgctgctgccgctgccgctgccgctgccgccgccgccgccgccgccgccgctgccgtggggctcgggcggcgacggagcggggccggccgtggggcgggcggggagggaggaggcggtgaaggcggcgggccgggggggaagatgccgctggcgcagctggcggacccgtggcagaagatggctgtggagagcccgtccgacagcgctgagaatggacagcaaattatggatgaacctatgggagaggaggagattaacccacaaactgaagaagtcagtatcaaagaaattgcaatcacacatcatgtaaaggaaggacatgaaaaggcagatccttcccagtttgaacttttaaaagtattagggcagggatcatttggaaaggttttcttagttaaaaaaatctcaggctctgatgctaggcagctttatgccatgaaggtattgaagaaggccacactgaaagttcgagaccgagttcggacaaaaatggaacgtgatatcttggtagaggttaatcatccttttattgtcaagttgcattatgcttttcaaactgaagggaagttgtatcttattttggattttctcaggggaggagatttgtttacacgcttatccaaagaggtgatgttcacagaagaagatgtcaaattctacttggctgaacttgcacttgctttagaccatctacatagcctgggaataatttatagagacttaaaaccagaaaatatacttcttgatgaagaaggtcacatcaagttaacagatttcggcctaagtaaagagtctattgaccatgaaaagaaggcatattctttttgtggaactgtggagtatatggctccagaagtagttaatcgtcgaggtcatactcagagtgctgactggtggtcttttggtgtgttaatgtttgaaatgcttactggtacactccctttccaaggaaaagatcgaaaagaaacaatgactatgattcttaaagccaaacttggaatgccacagtttttgagtcctgaagcgcagagtcttttacgaatgcttttcaagcgaaatcctgcaaacagattaggtgcaggaccagatggagttgaagaaattaaaagacattcatttttctcaacgatagactggaataaactgtatagaagagaaattcatccgccatttaaacctgcaacgggcaggcctgaagatacattctattttgatcctgagtttactgcaaaaactcccaaagattcacctggcattccacctagtgctaatgcacatcagctttttcgggggtttagttttgttgctattacctcagatgatgaaagccaagctatgcagacagttggtgtacattcaattgttcagcagttacacaggaacagtattcagtttactgatggatatgaagtaaaagaagatattggagttggctcctactctgtttgcaagagatgtatacataaagctacaaacatggagtttgcagtgaagattattgataaaagcaagagagacccaacagaagaaattgaaattcttcttcgttatggacagcatccaaacattatcactctaaaggatgtatatgatgatggaaagtatgtgtatgtagtaacagaacttatgaaaggaggtgaattgctggataaaattcttagacaaaaatttttctctgaacgagaggccagtgctgtcctgttcactataactaaaaccgttgaatatcttcacgcacaaggggtggttcatagagacttgaaacctagcaacattctttatgtggatgaatctggtaatccggaatctattcgaatttgtgattttggctttgcaaaacagctgagagcggaaaatggtcttctcatgactccttgttacactgcaaattttgttgcaccagaggttttaaaaagacaaggctatgatgctgcttgtgatatatggagtcttggtgtcctactctatacaatgcttaccggttacactccatttgcaaatggtcctgatgatacaccagaggaaatattggcacgaataggtagcggaaaattctcactcagtggtggttactggaattctgtttcagacacagcaaaggacctggtgtcaaagatgcttcatgtagaccctcatcagagactgactgctgctcttgtgctcagacatccttggatcgtccactgggaccaactgccacaataccaactaaacagacaggatgcaccacatctagtaaagggtgccatggcagctacatattctgctttgaaccgtaatcagtcaccagttttggaaccagtaggccgctctactcttgctcagcggagaggtattaaaaaaatcacctcaacagccctgtgaagtgacctcagtgagatatttggtaccatggtgtaagctgatagcacaagttctggcgacaggtagcacgtatctgagagacacctgcaagcacacactgtcccagctggtacccataatgctgctgttcctgctgctgctcctgctttcctctcttctcgctttaaatgattgttagcaagttagattttcctggagcttcggaagaaatgaaaatggaaacatgatgaagatatagtcactgaatcaatgagaaaaataatgaacatatgaataccacctaaaaatacactgaataaagtacaccatatagcattatttttataggaaatatttcatgtcccttaaatattctttgttagttatagggatggacagtttatgttaagcacttagcttaaacaatccgtttatattagcactgtatcccttgtgccatccaacattttgtatgtttttgtaaacagttcatatacagtacatttctgtactgctttctttaatgtatacatgccttgtttaacttggaatctattattattaatcaattgactattaaatctggttaaatagttcacctggattaacagtattgttggacagtcctaaaaatggccagattgtggaacagctgttgaatgtaatacttccaaaatgtacatatctttccccacgtctgtttcactggttcgttcatttgtttgtttcttaaagtcaggtgctctgtcagactaacctagagagctgttatggtagagaaagttatcatatgtgtgtggcatgaaatcaagaatacacctatgaagttagtccatatactttgcaactccttagagtacttttttccttaattaaggaagtagtccttgcacttctaatcttacatagcatccatacttagaatttggcatatcatctgggattttgccaatatacgtcaaagccctttaagagtcatggtaaggagatgggtgaaggaaaatttagcaacaggtaattgaagtcctattggatatttcatgtttaaatagatattctatattaaacactaatttaaatgtaataaaggccaaaggcctctgtatgaaattggatttaaactttcttattttagggaataaaacattattgatcaaacagtatctgttctaacctaaaattataggtagggcaggctaagtgaacagcattgagtattttctgaatccctcatgataatttatagccacatactgcttcctttgacttcaggaatgatcagttttcataatggccactgggcctgcttagattgcagtattcattatctgcatctaatttggtagtttccacaatcgtatttgatgaaagaaacttcagtccccattattacctgtgtctttgccaagctgcctagcatacatcagtatgtaatgtaaaagacatatgagcaagaaaaaagtgatttaacttacctcatcaagaatgtgcccctacaggccgggcgcagtggctcacgcctgtaatcccagcattttgggaggccgaggcaggtggatcacctgaggtcaggagtttgagaccagcctggccaacatggtgaaaccccgtctctactaaaaaatacaaaaattagctgggcatggtggcgtgcacctgtaatcctagctactcaggaggctgaggcaggagaatcgcttgaacctgggaggtggtggttgcagtgagccaagatcacaccattgcactccagcctgggtgacagagtgagactctgtctcaagaaggaaaaaaaaaaaaaagaatgtactcatacagatttttgttagtcatcatgtaataagccatttatatcagaaaccttttttcctgccacagaagctttaaattttcccctaagagtacaaagccaagagagtgtggtttatctaaatgtcctgaaatccacttgtcattccttaatttctcctctatgcaattaaagagaaaggggaaatctataacatttcttttgcccaagtgacacaaaaatgattactgcatagaaatcaaatgtaagtttagcttctaaatgaaataatatataggagggatatcagaatgtctagatagagaaagtattttcaaattcttgaatatatggatgctattaaaagctgctttccattgcctggaaagagagcttttttccctcctctattcagtgtttcaaactttggtcatctcaaattattgtcacttttaaaatgttaatgtcattctgagcagaaatagatatattttcagatttttttacactgatgctactccgtaattgcttaggagtattgtccatcatagtattttagaactagaagtaaacacataaatccttataaattacccaatccaactttctcatattgcatgtagagaacctgagacacatatcaaagtctagaatccttaacttctccccattttgtttttttccgcctcatcacaccatgctgcctttccctcatatgatcaccaaccagtagctgagttcaaaaactacatatttcttgggcagtcctctactggtatgtgatgccaacttttatttctttcgaagataattgccttctttgcctagccaagcagccaattttattggagaaaagcaagttatatgttcacaaaatggaaggctttctacctaaatttatttcatctgtggtcctcttattctcttccattgcttttgacatacagtggaaaaacttggccaacgatgtgctctaaatatagtgcttgtgttgggttaacttttccattaatttctcaacatcaattattcaggcccctacagttgtggtattgaggcccctaaaggcttctgcctttcaccaattagtgctgccagttactgaggcttctcccaaaaggtatcagtccagtcttaaagatatttcattgtgaaagaagaaactaaactatcaggcctcttttacaaaatgagagattgaatttaagcttgtcaagcacgtactggaaggtatgaattacactaccatgtgttttgtatcttccctttcaagtgatgatgttaaatgaaggtaagtttttcatccttttttaatttttgttttttataaatcatttcagctttttctggtttatagaggtgtcttatttctaatgcaacagacccccaactttaacagatttgatatggatgcatttattcacaagcaaccccaaaagtccaaaaatgtaataattttgacaaggcccaaagttgagatgctatgaagcttgtgtgtgtgaaaagtcagttatgattgtctggagagaagctgtggtgtgtatgctgtagagtttccacatttcacatgcagtgtactccaaaaagcgggtttgggtcaaccatttcccatctctttttaagaagtgactgctgttggggccaggggacatcatgggaggtggggctgtccagttagctgtgccctgcaccttcagcccaggaaagatttgaacagagcaaaggcttcaagagagggcagaatgtattcggcagaaaagggactcaggtaagcccagcctgggatgagagcagaaaagcattcaagatttgcaggccttgctatggatgcgcttaatcaccatggaggccagcaatacccatctcagcatggctttgatattctctacttcctggcctttaaaaatgacctataatttttcagtttgctttactatattttataaagaaaattctatcttatggttgattgagcattgagacttatgaaggcattaggatagatagctcaggaatgtaaaggttcagaaaaggtctgttttctcagattaacaaatatgatggattccatggctgaccttggtgcttaaaccaggaggtttcaatctagtcctagagttgtgtccctctgaaaggcccaatgccatgtaactaactttaaactggatatatactttgagccttacttaattcacagataagttgacttaactcagtatttttatttcaattaatgaaaacagtcctcttttcaaccccaggttgcttacattttgctggtctccccaagtgaccattggtggagaccaattaatgaaggaatgaaattcactttattgggactgtggtattcaacagagccacacttaaccactttttccaatgaagaatctccagaatgataatgcccaaatatggatggccaagaagaatttgtatctacggtgtgctttatgtgtttttgacactgctgtattctgtgtgatcaagtgatttgcagctggttccaatgtgactgagtgttctcaaagatttctagtaactaagtcaacttaattttcttaagcctggtattactatcagcctcacatttaccactttgattctagttttttaactgttcataacagggcataccgagggttgggatgagagcctacttcctacctcttaaggcactttcctcattattttgccatataatcttgaactgcatgataagctgtttaaatgtccatgacttctcccagagcaactagcaaagtatatgacattttgaatagagattagtggaaaggaaaatgtagagatttaagttcagaggtacaaacctcaataaaacctccttagagcacataccatgagtagagtatatgtaaacgtatatgagaagagagtcgctataatagtcctctctaagtagattagttcattgtctaatggaagtgaacatctttactcctgttatcaccatagtactgaatgaactgtataatgagtttttcaaacaagtatttaaaatagaactttcacgtacaaagcaagggcataaagattttggtttgtgtttctgtaagtgtagtttaccatctaaagctttggtttttaattttaaaaaaagcttcaaggtattgccattccttagcatccttattgattatgggtgatgagtttttaactcttaaaatcatatacgtgtattagtttatcttaactgttgccctaagcaaaagggaaggtatacacctaagggatgtacttattttgcatttttggtcatgggtgggaatggggtgggtgcctacttaaatagtttttaaaaaagaaaaaaatcacaaatatttttctactgttatatatgatcttcctttatactagtttctctctagtaaggcatgccagaagcccaagataccatatcatgaattcttacatattgtaccttttgttggtggttaaatcgcatcagatgcttggcattgctgccataattataaaatgcttgtaaaggatcaaatatcactaaatactttaaattgttttacttaagagtctaatctgggaagttttcaaatcatactattaatgtgtaatctaagctcttcagatgtatccatgaataatcctggaacaatattgcttgtattcctgtcatagaacaggttttgtaatctttaaaagaaatgaaaatttatataataaagtttcaaatcaatgca

SEQ ID NO: 147858 - DNA, 3054 bp, Artificial Sequence
  derived and/or modified sequence
cttggctcgggactgcgcccccggtactttgcccacctccctccccagctgggcggggaccactgttctccctcattcccaaggagcctccgacctccttggacccttggcggtgaaaggctcccagccttcgcccctcctgcctttcccatttctttcccccgcctcccgccgacgcccccagatctgttgggctcgcccttcctgaaagtaggcgaggcccagaagctgaggttggggcgcagaaggaggggggtgggaagagggaggagcggagcgcagcggccgggggcgtgtcttccactagcccagcccctgggtgcgcgcggcggtggtggcggcggccgagcctcgctttgagagacagtataatgagtatgatgaatatcactgtacataagtctttatgcacatctctgatatttccttaggataaatgaggagctgattcttaatcctgtcacattgaatggacagcaaattatggatgaacctatgggagaggaggagattaacccacaaactgaagaagtcagtatcaaagaaattgcaatcacacatcatgtaaaggaaggacatgaaaaggcagatccttcccagtttgaacttttaaaagtattagggcagggatcatttggaaaggttttcttagttaaaaaaatctcaggctctgatgctaggcagctttatgccatgaaggtattgaagaaggccacactgaaagttcgagaccgagttcggacaaaaatggaacgtgatatcttggtagaggttaatcatccttttattgtcaagttgcattatgcttttcaaactgaagggaagttgtatcttattttggattttctcaggggaggagatttgtttacacgcttatccaaagaggtgatgttcacagaagaagatgtcaaattctacttggctgaacttgcacttgctttagaccatctacatagcctgggaataatttatagagacttaaaaccagaaaatatacttcttgatgaagaaggtcacatcaagttaacagatttcggcctaagtaaagagtctattgaccatgaaaagaaggcatattctttttgtggaactgtggagtatatggctccagaagtagttaatcgtcgaggtcatactcagagtgctgactggtggtcttttggtgtgttaatgtttgaaatgcttactggtacactccctttccaaggaaaagatcgaaaagaaacaatgactatgattcttaaagccaaacttggaatgccacagtttttgagtcctgaagcgcagagtcttttacgaatgcttttcaagcgaaatcctgcaaacagattaggtgcaggaccagatggagttgaagaaattaaaagacattcatttttctcaacgatagactggaataaactgtatagaagagaaattcatccgccatttaaacctgcaacgggcaggcctgaagatacattctattttgatcctgagtttactgcaaaaactcccaaagattcacctggcattccacctagtgctaatgcacatcagctttttcgggggtttagttttgttgctattacctcagatgatgaaagccaagctatgcagacagttggtgtacattcaattgttcagcagttacacaggaacagtattcagtttactgatggatatgaagtaaaagaagatattggagttggctcctactctgtttgcaagagatgtatacataaagctacaaacatggagtttgcagtgaagattattgataaaagcaagagagacccaacagaagaaattgaaattcttcttcgttatggacagcatccaaacattatcactctaaaggatgtatatgatgatggaaagtatgtgtatgtagtaacagaacttatgaaaggaggtgaattgctggataaaattcttagacaaaaatttttctctgaacgagaggccagtgctgtcctgttcactataactaaaaccgttgaatatcttcacgcacaaggggtggttcatagagacttgaaacctagcaacattctttatgtggatgaatctggtaatccggaatctattcgaatttgtgattttggctttgcaaaacagctgagagcggaaaatggtcttctcatgactccttgttacactgcaaattttgttgcaccagaggttttaaaaagacaaggctatgatgctgcttgtgatatatggagtcttggtgtcctactctatacaatgcttaccggttacactccatttgcaaatggtcctgatgatacaccagaggaaatattggcacgaataggtagcggaaaattctcactcagtggtggttactggaattctgtttcagacacagcaaaggacctggtgtcaaagatgcttcatgtagaccctcatcagagactgactgctgctcttgtgctcagacatccttggatcgtccactgggaccaactgccacaataccaactaaacagacaggatgcaccacatctagtaaagggtgccatggcagctacatattctgctttgaaccgtaatcagtcaccagttttggaaccagtaggccgctctactcttgctcagcggagaggtattaaaaaaatcacctcaacagccctgtgaagtgacctcagtgagatatttggtaccatggtgtaagctgatagcacaagttctggcgacaggtagcacgtatctgagagacacctgcaagcacacactgtcccagctggtacccataatgctgctgttcctgctgctgctcctgctttcctctcttctcgctttaaatgattgttagcaagttagattttcctggagcttcggaagaaatgaaaatggaaacatgatgaagatatagtcactgaatcaatgagaaaaataatgaacatatgaataccacctaaaaatacactgaataaagtacaccatatagcattatttttataggaaatatttcatgtcccttaaatattctttgttagttatagggatggacagtttatgttaagcacttagcttaaacaatccgtttatattagcactgtatccctt

SEQ ID NO: 147859 - protein, 215 aa, Artificial Sequence
  derived and/or modified sequence
MHRDAWLPRPAFSLTGLSLFFSLVPPGRSMEVTVPATLNVLNGSDARLPCTFNSCYTVNHKQFSLNWTYQECNNCSEEMFLQFRMKIINLKLERFQDRVEFSGNPSKYDVSVMLRNVQPEDEGIYNCYIMNPPDRHRGHGKIHLQVLMEEPPERDSTVAVIVGASVGGFLAVVILVLMVVKCVRRKKEQKLSTDDLKTEEEGKTDGEGNPDDGAK

SEQ ID NO: 147860 - DNA, 648 bp, Artificial Sequence
  derived and/or modified sequence
atgcaccgggacgcttggctgccccgccccgccttctccctgacaggtctttcgttgtttttctccctcgtgcctccgggaaggagcatggaagtaacggttcctgcgaccctcaatgttctaaacgggagcgacgctaggctgccttgtaccttcaattcttgctacacagtcaaccataaacagttcagtctcaattggacctaccaggaatgcaataattgctcggaggaaatgtttctgcagttcaggatgaaaatcatcaacctaaaactcgaacgtttccaggatcgagtcgagttttcgggcaacccctccaagtatgacgtgtctgtcatgttaagaaacgttcagcctgaggacgaggggatttataactgctatattatgaaccctcctgaccggcacaggggccacggtaaaatccatctgcaagtgcttatggaggaacccccagagagggactccaccgtggctgtgatcgtgggggcaagcgtgggcggattcttggcagtggttattttggtgctgatggtggttaagtgtgtgcggcgcaaaaaggagcagaaactgagtaccgacgacctcaaaacggaagaagaggggaaaacagacggcgagggaaaccccgatgatggcgctaaatag

SEQ ID NO: 147861 - DNA, 648 bp, Artificial Sequence
  derived and/or modified sequence
atgcacagagatgcctggctgcccaggcctgccttcagcctgaccggcctgagcctcttcttcagcctggtgcccccaggccgctccatggaggtgacagtgcctgccaccctgaatgtgctgaatggaagtgatgcccggctgccctgcaccttcaacagctgctacacagtgaaccacaagcagttcagcctgaactggacctaccaggagtgcaacaactgcagcgaggagatgttcctgcagttcaggatgaagatcatcaacctgaagctggagcgcttccaggacagagtggagttcagcggcaaccccagcaaatatgatgtgtctgtgatgctgagaaatgtgcagccagaagatgagggcatctacaactgctacatcatgaaccccccagacagacaccggggccacggcaagatccacctgcaggtgctgatggaggagcccccagagcgggacagcacagtggccgtgattgtgggcgcctctgtgggcggcttcctggccgtggtgatcctggtgctgatggtggtgaagtgtgtgcggaggaagaaggagcagaagctgagcacagatgacctgaagacagaggaggagggcaagacagatggagagggcaacccagatgatggagccaagtag

SEQ ID NO: 147862 - DNA, 648 bp, Artificial Sequence
  derived and/or modified sequence
atgcaccgggacgcctggctgccccggcccgccttcagcctgaccggtctgtctctgttctttagcctggttcccccaggccggtctatggaagttaccgtacccgctacacttaatgtgttaaatggctctgacgcgcggcttccatgtaccttcaattcttgttacactgtgaaccacaagcagtttagcctaaactggacttaccaggaatgcaataattgctccgaggaaatgttccttcagtttagaatgaaaatcataaatctgaagcttgaacggtttcaggacagggtggagttcagtggaaacccatcaaagtatgacgtctcagtgatgctcagaaacgtgcagcctgaggatgaaggaatctataattgttacattatgaatcccccagaccggcatcgtggacacggaaagattcacctgcaggtccttatggaagagccgcctgaacgcgatagcacagttgccgttattgtcggagcttccgtgggaggcttccttgccgtagtgatccttgtgctgatggttgtcaaatgcgttcgaagaaagaaagaacaaaaactgagtaccgatgaccttaagactgaggaggaaggcaagactgacggtgagggtaatcctgatgatggggccaagtag

SEQ ID NO: 147863 - DNA, 648 bp, Artificial Sequence
  derived and/or modified sequence
atgcaccgcgatgcttggctgccgaggccagctttttccctgaccggattgtcgttgtttttcagccttgtcccaccgggaagatcaatggaagtcacagtcccagctaccctgaatgtgctgaacggatcagatgccagactgccctgtacctttaactcctgctatactgtgaatcacaaacaattcagtttgaactggacataccaagaatgtaacaactgtagtgaagaaatgtttctccagttccggatgaagattatcaatttgaagctggagcgctttcaggatcgggtggaattctcaggtaacccctccaaatacgacgtgtctgtgatgttgcggaacgtgcagccagaggatgagggcatctacaattgctacatcatgaatcctccagaccgccacagagggcacggcaaaattcaccttcaagtgctgatggaagagcccccagagcgcgattctaccgtggctgtcatcgtgggcgcatccgtgggaggttttcttgcagtcgtcattctggtcctgatggtggtgaaatgcgtccgcagaaaaaaggagcagaagctgtccacagacgacttaaaaactgaggaagaaggcaaaacggacggcgagggaaatcctgacgatggagcgaaatag

SEQ ID NO: 147864 - DNA, 5826 bp, Artificial Sequence
  derived and/or modified sequence
ttttctctcccccccatctctctctctctcctttacacactccctctctctctctttttagcagcaacatacaagccggccatattagagagatggaaataaagcttccttaatgttgtatatgtctttgaagtacatccgtgcatttttttttagcatccaaccattcctcccttgtagttctcgccccctcaaatcaccctctcccgtagcccacccgactaacatctcagtctctgaaaatgcacagagatgcctggctacctcgccctgccttcagcctcacggggctcagtctctttttctctttggtgccaccaggacggagcatggaggtcacagtacctgccaccctcaacgtcctcaatggctctgacgcccgcctgccctgcaccttcaactcctgctacacagtgaaccacaaacagttctccctgaactggacttaccaggagtgcaacaactgctctgaggagatgttcctccagttccgcatgaagatcattaacctgaagctggagcggtttcaagaccgcgtggagttctcagggaaccccagcaagtacgatgtgtcggtgatgctgagaaacgtgcagccggaggatgaggggatttacaactgctacatcatgaacccccctgaccgccaccgtggccatggcaagatccatctgcaggtcctcatggaagagccccctgagcgggactccacggtggccgtgattgtgggtgcctccgtcgggggcttcctggctgtggtcatcttggtgctgatggtggtcaagtgtgtgaggagaaaaaaagagcagaagctgagcacagatgacctgaagaccgaggaggagggcaagacggacggtgaaggcaacccggatgatggcgccaagtagtgggtggccggccctgcagcctcccgtgtcccgtctcctcccctctccgccctgtacagtgaccctgcctgctcgctcttggtgtgcttcccgtgacctaggaccccagggcccacctggggcctcctgaacccccgacttcgtatctcccaccctgcaccaagagtgacccactctcttccatccgagaaacctgccatgctctgggacgtgtgggccctggggagaggagagaaagggctcccacctgccagtccctggggggaggcaggaggcacatgtgagggtccccagagagaagggagtgggtgggcaggggtagaggagggggccgctgtccacctgcccagtgcttggcctggcagtggcttcagagaggacctggtggggagggagggctttcctgtgctgacagcgctccctcaggagggccttggcctggcacggctgtgctcctcccctgctcccagcccagagcagccatcaggctggaggtgacgatgagttcctgaaacttggaggggcatgttaaagggatgactgtgcattccagggcactgacggaaagccagggctgcaggcaaagctggacatgtgccctggcccaggaggccatgttgggccctcgtttccattgctagtggcctccttggggctcccgttggctcctaatcccttaggactgtggatgaggccagactggaagagcagctccaggtagggggccatgtttcccagcggggacccaccaacagaggccagtttcaaagtcagctgaggggctgaggggtggggctccatggtgaatgcaggttgctgcaggctctgccttctccatggggtaaccaccctcgcctgggcaggggcagccaaggctgggaaatgaggaggccatgcacagggtggggcagctttctttggggcttcagtgagaactctcccagttgcccttggtggggtttccacctggcttttggctacagagagggaagggaaagcctgaggccggcataaggggaggccttggaacctgagctgccaatgccagccctgtcccatctgcagccacactactcgctcctctcccaacaactcccttcgtggggacaaaagtgacaattgtaggccaggcacagtggctcacgcctgtaatcccagcactttgggaggccaaggcgggtggattacctccatctgtttagtagaaatgggcaaaaccccatctctactaaaaatacaagaattagctgggcgtggtggcgtgtgcctgtaatcccagctatttgggaggctgaggcaggagaatcgcttgagcccgggaagcagaggttgcagtgaactgagatagtgatagtgccactgcaattcagcctgggtgacatagagagactccatctcaaaaaaaaaaaaaaaaaaaaaaaaaggcaattgtgcggagccaaccatcactgccattacactcacattcaatggaaattgattaggcctgagagaaggagcaagaggcagaaacactgactctgagaccatgaccttggaagatcctcagagatcaactagccaagtcactcacttaaaatggggaaactgaggttccaactgacagaaactgagggtcctgccctcttctctggctcctcagtctccagtttgaagcaacagagccatcattttcccagtgggaggggcctctgtgtcctggtctatgatggggcgagttggaggggtgggcttctctagccctgccccctcccaggagcccagcccctctggccaggactgaggaggagtggagggaagcagggagggagggagcaagtgtgaagggcacagctgctggcaaatgccccattccctgccccagcacttcccagcctttccaggagctctgccccacccctactcaaggagtcaggtgcccagggtagggaataagtctaggaaagggggtggagacaggaccgtgacagtctcagggaccaatccctgcctctgcccatcagattgccaatttggggagacagcaatatcatctgggagattcagcttaatttgcttcaattcagcaaccatttattgagcatctattatgtgccaggcactgtgccgggcactggggatatacacaaagccataagcactggggactgccaggttggcactgtagggaccaagattaactttttggtgcatctaattccacctctgcaagacactgcttccaaggctacagttggggaagatgaagagattctagaatctgtgccctgggaagggagaaacagcagggaagaggggcaatacaacagggtcaagggtgcagaggccaggcagagtgggtgcagagtgggggatgggcaaccagcctggtaacacctgggtgaggtgagcgagtcaagcccatctggaaatgctaaactcatcagctcagtacctaactgccaatcaacacactgccaatgcgggtgggctaagccgccaggatgcctgcagcagatggacgctgcccatccttgagccagccagctgggggcagagaggtgggtggcgggcacctcatgccagctgagaccaagagtggttgtatacatttctgcagcttgcagatttcatttttttggtcaccctttaagtgtccttctctcccaggatgagtgaggagctgtgctgatgttgggaacttatctttttccaggatccataacatttaggggaattatttgcgggctttcctagtgtattctaagaagttctaactctccatcaagaagcccaagattcctggagtctttttttcctctgccctgatcaactggggcccaggaaaagcaatgtctcttcacgggcctcagggccccagcagatggggctgggtcaggaaccatctctgtcccaggtgctcagccctcatatgcattttcttctggagcctcttagaatctcctccagaggactcatagagctgcctcccccaggatggtgaagttgggagcaaaatggggcttctgtaagtagaggtggaaaaccagagagatgtttccacagcagccatttccctaccctgtttcctaacttatgctgacaagttcttcctcttcctaccgtggggttcgagccccacttctggttgcatgttcccaccaccacgctctgctggttttagtcggctgactttctcaactgccccagcctctcctgctctctcagaacctccctctgcccccaccccccatctgtctcttcctcctaattaagggccactgcaaagagagacgggctggctaacccatgggatttagcttataagaacaaagcacaattattcaggactgaactgctttgaggtgccttggaactggctttggaaatagctatctgccccctagctatggactcttcacagttatttccagtttataaaaaggaaaagctgatcggatccatgtttctctctgcgagtctccttggggaggttgggctggtaaatatttgcaaggtcaggttaagcagacagacaattgaaaatactgggcaggtccaaaaggatagttccaggccataggaatggcttggtgcagttaacgggtgatgaagcaagaaatcttccttcctacttatgtcttaaagatggacagcctgtgtctcttgctgtgcctcttgctggcgtcttcctttattgaagcttgctgatgcactgtacatagtctctctctctaggtatagatatattatatatacaaatatcaaacatctcaccacacccaccccaaaagttacactgtgtgtgtgtggggaggtgtaataacttctcagtgttttgagttgattcaccaaaggcaaattttggaatgttcttgcgctttgtgcacttggaggggaaaacccaactacatatgcactttcttggttgtgtgtgctatagagaggttggaaggggtggttggaaggggagagaaactgagatggccctctgtgactcgactgctgggatgtatctgcttttgggagcagactgagtttcttttgcaatttgtcttattgtttgggtctactggcaacaataaactatctcccctgaaaatccctcgagtgtggctttattcaggggttcagggcagggtaggctgatgcttcaccaggatcttaactggaaccctaggtgctcctttcctggtaatcccattggcgctgccagatctccagcatctgagggcctcaatgcccctgcctcacaaggggaaggttgtctaccccacacttgtgcccccacagatgtttcatccctttgccttccccaaccccctggggactccgctcaccctggaacagagtggctgaacacctacttcttggagggctctcgattattttggggatgaagacaaccccggaagctcccaaggctgactgtcatgcggatgttgcctgtcctttgcatgggcagacaggccatccttcctgctctgttccccaaaggtgttggattagacatttcttttgcctcctctggactcagaaagaatagatgacagctggtcagagtctgccctcatgcagttcatggagaagggtggctgtgggaaggttcaggtggctcatgtcccatctacatactgctggatcctatatatatgtgccaaagcagccctaagaagtttaggaccaagggcaacctcctggctaggggctccactgtcccagacaggcctttttttctcccttgctcttcattcttccgtctctttgcatttctccctctctcccttgcaccgctctctctctctctctctctctctctctgtctgtctgtctctctctctcttgcctaggaggcttaccaggcttaccttcctcttcctactctggggttcgagccccacttctggctgcatgctccggccaccacgctctggtggtttcagtctgctgactttct

SEQ ID NO: 147865 - DNA, 648 bp, Artificial Sequence
  derived and/or modified sequence
atgcacagagacgcctggctgcccagacccgccttcagcctgaccggcctgagcctgttcttcagcctggtgccccccggcagaagcatggaggtgaccgtgcccgccaccctgaacgtgctgaacggcagcgacgccagactgccctgcaccttcaacagctgctacaccgtgaaccacaagcagttcagcctgaactggacctaccaggagtgcaacaactgcagcgaggagatgttcctgcagttcagaatgaagatcatcaacctgaagctggagagattccaggacagagtggagttcagcggcaaccccagcaagtacgacgtgagcgtgatgctgagaaacgtgcagcccgaggacgagggcatctacaactgctacatcatgaacccccccgacagacacagaggccacggcaagatccacctgcaggtgctgatggaggagccccccgagagagacagcaccgtggccgtgatcgtgggcgccagcgtgggcggcttcctggccgtggtgatcctggtgctgatggtggtgaagtgcgtgagaagaaagaaggagcagaagctgagcaccgacgacctgaagaccgaggaggagggcaagaccgacggcgagggcaaccccgacgacggcgccaagtag

SEQ ID NO: 147866 - protein, 301 aa, Artificial Sequence
  derived and/or modified sequence
MAMLVLVPGRVMRPLGGQLWRFLPRGLEFWGPAEGTARVLLRQFCARQAEAWRASGRPGYCLGTRPLSTARPPPPWSQKGPGDSTRPSKPGPVSWKSLAITFAIGGALLAGMKHVKKEKAEKLEKERQRHIGKPLLGGPFSLTTHTGERKTDKDYLGQWLLIYFGFTHCPDVCPEELEKMIQVVDEIDSITTLPDLTPLFISIDPERDTKEAIANYVKEFSPKLVGLTGTREEVDQVARAYRVYYSPGPKDEDEDYIVDHTIIMYLIGPDGEFLDYFGQNKRKGEIAASIATHMRPYRKKS

SEQ ID NO: 147867 - protein, 270 aa, Artificial Sequence
  derived and/or modified sequence
MAMLVLVPGRVMRPLGGQLWRFLPRGLEFWGPAEGTARVLLRQFCARQAEAWRASGRPGYCLGTRPLSTARPPPPWSQKGPGDSTRPSKPGPVSWKSLAITFAIGGALLAGMKHVKKEKAEKLEKERQRHIGKPLLGGPFSLTTHTGERKTDKDYLDSITTLPDLTPLFISIDPERDTKEAIANYVKEFSPKLVGLTGTREEVDQVARAYRVYYSPGPKDEDEDYIVDHTIIMYLIGPDGEFLDYFGQNKRKGEIAASIATHMRPYRKKS

SEQ ID NO: 147868 - DNA, 906 bp, Artificial Sequence
  derived and/or modified sequence
atggccatgttagtgctcgttccaggaagagtgatgagacccctcgggggccaactctggcgtttcctgcctaggggtctagagttctggggccctgctgaaggcaccgctcgggtcttgctgcggcagttctgtgcgaggcaggccgaagcttggagggcatccggccgcccaggctactgtctggggacccgccccttgagcaccgccagacctccacccccatggtcccagaaggggcccggtgatagcacccgcccttctaagcctggtcctgttagctggaagagtttggccatcactttcgccattggcggggccttgttagcaggtatgaaacacgtgaagaaggagaaggctgagaaattggaaaaggagaggcagcgccacatcggaaagccactgcttggcgggcccttctctctgactactcacaccggtgagcggaaaacagataaggactatttgggccagtggcttctgatctacttcggatttacccattgccctgacgtgtgcccagaggagcttgaaaagatgatccaggtcgtcgatgagatcgattccattactactctccctgacctgactcctctgtttatatcgatcgaccccgagcgtgatacgaaggaagccattgcaaactatgtgaaagagttctctccaaaactagtcggcttgaccgggacccgggaggaggtagaccaggtcgccagggcctatagggtgtactatagccctgggcctaaagatgaagatgaggattatatcgtagatcatactataatcatgtatctcatcggaccggatggtgaatttcttgattacttcggacaaaacaagcgcaagggagagatagctgcgagtatcgcgacacacatgcgcccctataggaagaaaagttag

SEQ ID NO: 147869 - DNA, 813 bp, Artificial Sequence
  derived and/or modified sequence
atggcaatgctggtgttggtgcctggccgggtcatgcgccccctgggcggccagctgtggcgttttctgccccgcggcctcgagttttgggggccggccgaaggcacagctagagtgttgctccggcagttttgcgcccggcaggccgaagcctggcgcgcaagtgggcgacccggctactgtcttggtacccgacccttgagtacggcccgccctccgccgccttggtctcaaaaagggcctggcgattccacccgcccttctaagcccgggcctgtgagctggaagagtctcgcaatcaccttcgcgattggcggtgcgctgctggctggtatgaagcacgtcaagaaggagaaggccgagaaacttgagaaggagcgacagcgacatatcgggaagcccctgcttggcggacccttctctctgacaacacacaccggcgagcggaagacagacaaggactacctcgattcgataaccaccctacccgatttgaccccacttttcatatccattgatccagagagggacacgaaagaggcaatcgccaactatgtgaaggagtttagccccaaactggtcggcctcacagggactcgggaggaggtcgatcaggtggccagagcatatcgggtttactacagtcctggcccgaaagacgaggatgaggactacatcgtggaccacacgataatcatgtacctgataggccctgacggtgagttcctagactactttggccagaataaacgaaaaggagaaatagcagcgtctatagccacccatatgagaccatacagaaagaagagttag

SEQ ID NO: 147870 - DNA, 906 bp, Artificial Sequence
  derived and/or modified sequence
atggccatgctggtgctggtgcccggccgggtgatgaggcccctgggcggccagctgtggaggttcctgccccggggcctggagttctggggccctgctgagggcacagcccgggtgctgctgcggcagttctgtgcccggcaggccgaggcctggagggccagcggccggcccggctactgcctgggcacccggcccctgagcacagcccggcccccaccaccctggagccagaagggccctggggacagcacccggcccagcaagccaggccctgtgtcctggaagagcctggccatcacctttgccatcggcggggccctgctggccggcatgaagcacgtgaagaaggagaaggccgagaagctggagaaggagcggcagaggcacatcggcaagcccctgctgggcggccccttcagcctgaccacccacactggagagaggaagacagacaaggactacctgggccagtggctgctgatctacttcggcttcacccactgcccagatgtgtgcccagaggagctggagaagatgatccaggtggtggatgaaattgacagcatcaccaccctgcctgacctgacccccctcttcatcagcattgatcctgagcgggacaccaaggaggccatcgccaactacgtgaaggagttcagccccaagctggtgggcctgaccggcacccgggaggaggtggaccaggtggcccgggcctacagagtgtactacagccctggccccaaggatgaagatgaggactacatcgtggaccacaccatcatcatgtacctgattggaccagatggagagttcctggactacttcggccagaacaagaggaaaggagaaattgctgccagcatcgccacccacatgaggccctacaggaagaagagctag

SEQ ID NO: 147871 - DNA, 813 bp, Artificial Sequence
  derived and/or modified sequence
atggccatgctggtgctggtgcccggccgggtgatgaggcccctgggcggccagctgtggaggttcctgccccggggcctggagttctggggccctgctgagggcacagcccgggtgctgctgcggcagttctgtgcccggcaggccgaggcctggagggccagcggccggcccggctactgcctgggcacccggcccctgagcacagcccggcccccaccaccctggagccagaagggccctggggacagcacccggcccagcaagccaggccctgtgtcctggaagagcctggccatcacctttgccatcggcggggccctgctggccggcatgaagcacgtgaagaaggagaaggccgagaagctggagaaggagcggcagaggcacatcggcaagcccctgctgggcggccccttcagcctgaccacccacactggagagaggaagacagacaaggactacctggacagcatcaccaccctgcctgacctgacccccctcttcatcagcattgatcctgagcgggacaccaaggaggccatcgccaactacgtgaaggagttcagccccaagctggtgggcctgaccggcacccgggaggaggtggaccaggtggcccgggcctacagagtgtactacagccctggccccaaggatgaagatgaggactacatcgtggaccacaccatcatcatgtacctgattggaccagatggagagttcctggactacttcggccagaacaagaggaagggggagattgctgccagcatcgccacccacatgaggccctacaggaagaagagctag

SEQ ID NO: 147872 - DNA, 906 bp, Artificial Sequence
  derived and/or modified sequence
atggccatgctggtgctggtgcccggccgggtgatgcggcccctgggaggccaactgtggcgatttctaccaagaggtctagaattctggggtccggcagaaggaaccgcgagagttctcctgcgtcaattctgcgcacgccaggccgaggcatggcgtgcctcagggaggcctggctattgcctgggaacgaggcctctgtcaactgctagacctcctcctccatggtctcagaaggggcctggcgacagtacaagacccagcaagccaggtcctgtgagctggaaatcccttgcaattacctttgccatcggcggtgcattattagctggtatgaaacacgtgaaaaaagaaaaggctgagaaactggagaaagagcggcagaggcacattgggaagccgcttctcggggggcccttttccctgacgacacacaccggtgagagaaagaccgacaaggattacctcgggcagtggttactcatttactttggcttcacccactgccccgatgtatgtccagaagaactggagaaaatgatccaggtagtggacgagatagactccatcactacactgcctgaccttacgcccttatttatttctatcgaccctgagcgcgataccaaagaagctatcgccaattatgttaaggaattttccccaaagctagtcgggctgacagggacacgggaggaagttgatcaagtagcccgggcatatagggtgtactactctcctggcccaaaggacgaggacgaagattacatcgtcgaccacaccataatcatgtatttaataggacctgacggggaattcctggattactttggtcagaataagcgtaaaggagaaatagctgcttcaattgcaacccacatgcgaccatatcggaagaaaagttag

SEQ ID NO: 147873 - DNA, 813 bp, Artificial Sequence
  derived and/or modified sequence
atggccatgctggtgctggtgcccggccgggtgatgcggcccctgggcgggcaattgtggagatttctgccccgcggtctggagttctgggggccagccgaaggcacagcccgggttctgctgagacagttctgcgcgagacaagctgaggcttggagagccagcggccgtcccggctactgtttgggaactaggcccctgtccactgcccggcccccaccaccctggtctcagaaggggcccggtgactcgacccggccaagtaagcctggcccggtgagctggaaatccctcgcgatcaccttcgcgattggaggggctctgttagctgggatgaagcacgttaagaaagagaaggctgaaaagctggaaaaggaaagacagcgtcatattggcaaacccctgttggggggccctttttccctgactacccacaccggggaacgaaagacagataaggactacctcgattcgatcaccactttgccagatctgacaccccttttcatttctatagaccccgagagagatacgaaggaggcgatagctaactatgtgaaagagttttctcctaagctggtcggtctcaccggtactcgggaggaagtggaccaggttgccagggcctaccgggtatactactcccctggccctaaggacgaagacgaggactatatcgtggaccataccattataatgtacttaatcggaccagatggggaattcttggactatttcgggcagaataagcggaagggagagattgccgcctccatagctacgcatatgaggccttatcggaaaaagtcttag

SEQ ID NO: 147874 - DNA, 906 bp, Artificial Sequence
  derived and/or modified sequence
atggcaatgctggtgctagtgcctggacgagttatgcggccactgggcggacaactgtggaggttcttgcccagggggttagaattttggggcccagctgaggggaccgcaagagtgctgctgaggcaattttgtgcgaggcaagccgaagcgtggagagcaagcggacgcccaggctactgtctgggtacacgtcccctttctactgcacgaccaccaccaccttggagtcagaagggtcccggagacagcactcggccatccaaaccgggaccggtcagctggaaatccctcgccattaccttcgctatcggcggagctctgcttgctggcatgaaacatgtcaagaaagagaaggctgagaagctcgagaaggagaggcagcgacatatagggaagcccctgctggggggacccttctctctcaccacgcacacaggagaacgcaagacggacaaagactatctgggccaatggttgctgatttatttcgggtttacacattgcccggatgtatgccctgaggaattggaaaagatgattcaggtggtcgatgagattgactcaattacgaccctgcccgatctgactccactgtttatatccatcgatcctgaaagagacaccaaagaagctatcgccaactatgtcaaagaatttagccctaaacttgtggggcttactggaactagagaagaggtggaccaagtggccagggcttacagggtctactactccccaggcccaaaggatgaagatgaggactatatcgttgaccacactatcatcatgtatctcatcggtccagacggggagtttctggattatttcgggcaaaacaagcgaaaaggagaaatcgcggcatccatcgctactcacatgcgcccatatagaaaaaagtcttag

SEQ ID NO: 147875 - DNA, 813 bp, Artificial Sequence
  derived and/or modified sequence
atggcaatgctggtgctggttccaggccgagttatgcgcccactaggaggacagctgtggcggttcctgccacgcggactagaattttggggacccgctgagggcaccgcacgtgtgctgttgcggcaattctgtgctaggcaggccgaagcatggcgggcttcggggcgaccaggctactgtctaggaactcgccctctgtccacggccaggccgcctcctccttggagccagaagggaccaggcgactccacacgcccttcaaagcccggtcctgtatcatggaagtctctggccattacgttcgctatcggcggagccctcctcgccggaatgaaacacgtgaagaaagaaaaggcggagaaattggaaaaagagcggcagcggcacatcggcaagcccctactagggggacctttctctctgacaacgcatactggtgagcggaaaacagataaagattacttagacagcatcaccaccttaccagacctcacccctttgtttatctctattgatccggagcgcgacacaaaggaagccatcgccaattacgtcaaggagtttagccccaaattggtcggactgacaggaacacgggaagaagtcgatcaggtggcaagggcttatcgggtttactacagtccaggcccaaaagatgaggatgaggattacattgtggaccacaccatcattatgtacctaatcggtcctgacggagagttcctggactacttcgggcagaataagcgcaaaggagagattgcggcttccattgcaacccacatgcgtccctaccgtaagaaaagctag

SEQ ID NO: 147876 - DNA, 1749 bp, Artificial Sequence
  derived and/or modified sequence
ggaagcggaacgctaccggaaatcgcggggagggtcaaaggagacccggtctccgaggctcatggcgatgctggtcctagtacccggacgagttatgcggcctctgggtggccaactttggcgcttcttgcctcgcggactcgagttttggggcccagccgaggggactgcgagagtcttgctgaggcagttctgcgcgcggcaagcggaggcgtggcgtgcctcggggcgccctggctattgcctgggaacccggcccctcagcactgcgaggccgccacccccgtggtcgcagaagggccccggagactccacgcgcccctcgaagcccgggcctgtttcctggaagtctttagcaatcacatttgctattggaggagctttactggctggaatgaagcacgtcaagaaagaaaaggcagagaagttagagaaggaacggcagcgacacatcggcaagcctttacttgggggaccgttttccctcacaactcatactggggagcgtaaaactgacaaggactacttgggtcagtggttattgatttattttggcttcactcattgccctgatgtctgtccagaagaactagaaaagatgattcaagtcgtggatgaaatagatagcattacaactctgccagatctaactccacttttcatcagcattgacccagagagggacacaaaagaagccatcgcaaattatgtgaaagaattttctcccaaactggttggcttgactggcacgagagaagaggtcgatcaagtggccagagcatacagagtgtattacagccctggccccaaggacgaagatgaagactacatagtggatcacacaataataatgtacttgattggaccagatggtgagtttctagattattttggccagaacaagaggaagggagaaatagctgcttcaattgccacacacatgaggccatacagaaaaaagagctagccaaagcagtgttgctggatgcagtattctcttgctaagaggaaggaaactgtctcgcataggagcctatataaatataaacatatatacgtgcactctacagaatggccttcataccatgagaacatttctgttttggatggggatgttacccttgcgttcaaccaaaattgattcttggaactgtaaagattacaacccaaagtctcccaggaagctgtggggagaccagaggatcaagctgaagtgaagccagtgaagagcccacctgtggaaggacatggcggggcgaggcacagccagtgcattcctgcctgcggacaggccctcccagcagctttgccgcctctccatcgtcttgggcccttgctcaaatagctgtgggactgaatttcacagaaaagaatataatttccatagtgctcttgcttgcctcttcttgagttctttgctcttctgagttcttggtggctaataacagtcagattagggtctctgccattcagagttgatgcttgaaaactttagttttccttattaatgaatatcactatcagatttgactaatgaagaggaaatctattgtttgggggaaaaaaaacatcagtttgatttctctaggggttcttttatgtgatttttagctaagtggtgtgccaggttttcagtgacataccaaatggaaataagaggatattgatcacgagtgtgatgctgagtacctttctgcatatactggattgtactttgtgtaaagtaaacatactcagttttgctgttca

SEQ ID NO: 147877 - DNA, 1601 bp, Artificial Sequence
  derived and/or modified sequence
aggagacccggtctccgaggctcatggcgatgctggtcctagtacccggacgagttatgcggcctctgggtggccaactttggcgcttcttgcctcgcggactcgagttttggggcccagccgaggggactgcgagagtcttgctgaggcagttctgcgcgcggcaagcggaggcgtggcgtgcctcggggcgccctggctattgcctgggaacccggcccctcagcactgcgaggccgccacccccgtggtcgcagaagggccccggagactccacgcgcccctcgaagcccgggcctgtttcctggaagtctttagcaatcacatttgctattggaggagctttactggctggaatgaagcacgtcaagaaagaaaaggcagagaagttagagaaggaacggcagcgacacatcggcaagcctttacttgggggaccgttttccctcacaactcatactggggagcgtaaaactgacaaggactacttggatagcattacaactctgccagatctaactccacttttcatcagcattgacccagagagggacacaaaagaagccatcgcaaattatgtgaaagaattttctcccaaactggttggcttgactggcacgagagaagaggtcgatcaagtggccagagcatacagagtgtattacagccctggccccaaggacgaagatgaagactacatagtggatcacacaataataatgtacttgattggaccagatggtgagtttctagattattttggccagaacaagaggaagggagaaatagctgcttcaattgccacacacatgaggccatacagaaaaaagagctagccaaagcagtgttgctggatgcagtattctcttgctaagaggaaggaaactgtctcgcataggagcctatataaatataaacatatatacgtgcactctacagaatggccttcataccatgagaacatttctgttttggatggggatgttacccttgcgttcaaccaaaattgattcttggaactgtaaagattacaacccaaagtctcccaggaagctgtggggagaccagaggatcaagctgaagtgaagccagtgaagagcccacctgtggaaggacatggcggggcgaggcacagccagtgcattcctgcctgcggacaggccctcccagcagctttgccgcctctccatcgtcttgggcccttgctcaaatagctgtgggactgaatttcacagaaaagaatataatttccatagtgctcttgcttgcctcttcttgagttctttgctcttctgagttcttggtggctaataacagtcagattagggtctctgccattcagagttgatgcttgaaaactttagttttccttattaatgaatatcactatcagatttgactaatgaagaggaaatctattgtttgggggaaaaaaaacatcagtttgatttctctaggggttcttttatgtgatttttagctaagtggtgtgccaggttttcagtgacataccaaatggaaataagaggatattgatcacgagtgtgatgctgagtacctttctgcatatactggattgtactttgtgtaaagtaaacata

SEQ ID NO: 147878 - DNA, 906 bp, Artificial Sequence
  derived and/or modified sequence
atggccatgctggtgctggtgcccggcagagtgatgagacccctgggcggccagctgtggagattcctgcccagaggcctggagttctggggccccgccgagggcaccgccagagtgctgctgagacagttctgcgccagacaggccgaggcctggagagccagcggcagacccggctactgcctgggcaccagacccctgagcaccgccagacccccccccccctggagccagaagggccccggcgacagcaccagacccagcaagcccggccccgtgagctggaagagcctggccatcaccttcgccatcggcggcgccctgctggccggcatgaagcacgtgaagaaggagaaggccgagaagctggagaaggagagacagagacacatcggcaagcccctgctgggcggccccttcagcctgaccacccacaccggcgagagaaagaccgacaaggactacctgggccagtggctgctgatctacttcggcttcacccactgccccgacgtgtgccccgaggagctggagaagatgatccaggtggtggacgagatcgacagcatcaccaccctgcccgacctgacccccctgttcatcagcatcgaccccgagagagacaccaaggaggccatcgccaactacgtgaaggagttcagccccaagctggtgggcctgaccggcaccagagaggaggtggaccaggtggccagagcctacagagtgtactacagccccggccccaaggacgaggacgaggactacatcgtggaccacaccatcatcatgtacctgatcggccccgacggcgagttcctggactacttcggccagaacaagagaaagggcgagatcgccgccagcatcgccacccacatgagaccctacagaaagaagagctag

SEQ ID NO: 147879 - DNA, 813 bp, Artificial Sequence
  derived and/or modified sequence
atggccatgctggtgctggtgcccggcagagtgatgagacccctgggcggccagctgtggagattcctgcccagaggcctggagttctggggccccgccgagggcaccgccagagtgctgctgagacagttctgcgccagacaggccgaggcctggagagccagcggcagacccggctactgcctgggcaccagacccctgagcaccgccagacccccccccccctggagccagaagggccccggcgacagcaccagacccagcaagcccggccccgtgagctggaagagcctggccatcaccttcgccatcggcggcgccctgctggccggcatgaagcacgtgaagaaggagaaggccgagaagctggagaaggagagacagagacacatcggcaagcccctgctgggcggccccttcagcctgaccacccacaccggcgagagaaagaccgacaaggactacctggacagcatcaccaccctgcccgacctgacccccctgttcatcagcatcgaccccgagagagacaccaaggaggccatcgccaactacgtgaaggagttcagccccaagctggtgggcctgaccggcaccagagaggaggtggaccaggtggccagagcctacagagtgtactacagccccggccccaaggacgaggacgaggactacatcgtggaccacaccatcatcatgtacctgatcggccccgacggcgagttcctggactacttcggccagaacaagagaaagggcgagatcgccgccagcatcgccacccacatgagaccctacagaaagaagagctag

SEQ ID NO: 147880 - protein, 96 aa, Artificial Sequence
  derived and/or modified sequence
MCCTKSLLLAALMSVLLLHLCGESEAASNFDCCLGYTDRILHPKFIVGFTRQLANEGCDINAIIFHTKKKLSVCANPKQTWVKYIVRLLSKKVKNM

SEQ ID NO: 147881 - DNA, 291 bp, Artificial Sequence
  derived and/or modified sequence
atgtgctgcactaagtccctcctgttggccgcactcatgagtgtgctcctcctgcacttgtgcggagaaagcgaagcagcctccaactttgattgttgtctagggtataccgatcgaatactccaccctaaattcatcgtgggattcactcgtcagctagccaacgagggttgtgacatcaacgccattatcttccatactaaaaaaaaactgagtgtatgtgctaacccaaagcagacctgggtgaagtatattgttcgtctgctgagtaagaaagtaaagaacatgtag

SEQ ID NO: 147882 - DNA, 291 bp, Artificial Sequence
  derived and/or modified sequence
atgtgctgcaccaagagcctgctgctggccgccctgatgtctgtgctgctgctgcacctgtgtggggagagcgaggccgccagcaactttgactgctgcctgggctacacagaccgcatcctgcaccccaagttcatcgtgggcttcacccggcagctggccaatgaaggctgtgacatcaatgccatcatcttccacaccaagaagaagctgtctgtgtgtgccaaccccaagcagacctgggtgaagtacatcgtgcggctgctgagcaagaaggtgaagaacatgtag

SEQ ID NO: 147883 - DNA, 291 bp, Artificial Sequence
  derived and/or modified sequence
atgtgctgcaccaagagcctgctgctggccgccctgatgagcgtgctccttctgcacctgtgtggcgagtctgaggccgccagcaacttcgactgttgccttggctataccgacagaatcctgcaccccaagttcatagtgggattcacgcggcagctcgctaacgaagggtgcgacatcaatgcaatcatatttcacacaaaaaaaaagttaagtgtttgtgcaaacccaaagcagacgtgggtgaagtatattgtgcgactactctcaaagaaggtgaagaacatgtag

SEQ ID NO: 147884 - DNA, 291 bp, Artificial Sequence
  derived and/or modified sequence
atgtgttgtaccaagagtctgcttctggcagcgctgatgtccgttctcttactgcacctctgtggcgaaagcgaagcggcaagtaactttgattgctgtttggggtacactgacaggatcctccatcctaaatttatcgtcggttttactcgccaactggctaacgagggctgtgacattaacgctattattttccataccaaaaagaaactctctgtatgtgccaaccccaagcagacatgggtcaagtatatagtgcgcttattgagcaagaaagtcaaaaatatgtag

SEQ ID NO: 147885 - DNA, 800 bp, Artificial Sequence
  derived and/or modified sequence
cactcccaaagaactgggtactcaacactgagcagatctgttctttgagctaaaaaccatgtgctgtaccaagagtttgctcctggctgctttgatgtcagtgctgctactccacctctgcggcgaatcagaagcagcaagcaactttgactgctgtcttggatacacagaccgtattcttcatcctaaatttattgtgggcttcacacggcagctggccaatgaaggctgtgacatcaatgctatcatctttcacacaaagaaaaagttgtctgtgtgcgcaaatccaaaacagacttgggtgaaatatattgtgcgtctcctcagtaaaaaagtcaagaacatgtaaaaactgtggcttttctggaatggaattggacatagcccaagaacagaaagaaccttgctggggttggaggtttcacttgcacatcatggagggtttagtgcttatctaatttgtgcctcactggacttgtccaattaatgaagttgattcatattgcatcatagtttgctttgtttaagcatcacattaaagttaaactgtattttatgttatttatagctgtaggttttctgtgtttagctatttaatactaattttccataagctattttggtttagtgcaaagtataaaattatatttgggggggaataagattatatggactttcttgcaagcaacaagctattttttaaaaaaaactatttaacattcttttgtttatattgttttgtctcctaaattgttgtaattgcattataaaataagaaaaatattaataagacaaatatt

SEQ ID NO: 147886 - DNA, 291 bp, Artificial Sequence
  derived and/or modified sequence
atgtgctgcaccaagagcctgctgctggccgccctgatgagcgtgctgctgctgcacctgtgcggcgagagcgaggccgccagcaacttcgactgctgcctgggctacaccgacagaatcctgcaccccaagttcatcgtgggcttcaccagacagctggccaacgagggctgcgacatcaacgccatcatcttccacaccaagaagaagctgagcgtgtgcgccaaccccaagcagacctgggtgaagtacatcgtgagactgctgagcaagaaggtgaagaacatgtag

SEQ ID NO: 147887 - protein, 951 aa, Artificial Sequence
  derived and/or modified sequence
MYGASGGRAKPERKSGAKEEAGPGGAGGGGSRVELLVFGYACKLFRDDERALAQEQGQHLIPWMGDHKILIDRYDGRGHLHDLSEYDAEYSTWNRDYQLSEEEARIEALCDEERYLALHTDLLEEEARQEEEYKRLSEALAEDGSYNAVGFTYGSDYYDPSEPTEEEEPSKQREKNEAENLEENEEPFVAPLGLSVPSDVELPPTAKMHAIIERTASFVCRQGAQFEIMLKAKQARNSQFDFLRFDHYLNPYYKFIQKAMKEGRYTVLAENKSDEKKKSGVSSDNEDDDDEEDGNYLHPSLFASKKCNRLEELMKPLKVVDPDHPLAALVRKAQADSSTPTPHNADGAPVQPSQVEYTADSTVAAMYYSYYMLPDGTYCLAPPPPGIDVTTYYSTLPAGVTVSNSPGVTTTAPPPPGTTPLPPPTTAETSSGATSTTTTTSALAPVAAIIPPPPDVQPVIDKLAEYVARNGLKFETSVRAKNDQRFEFLQPWHQYNAYYEFKKQFFLQKEGGDSMQAVSAPEEAPTDSAPEKPSDAGEDGAPEDAAEVGARAGSGGKKEASSSKTVPDGKLVKASFAPISFAIKAKENDLLPLEKNRVKLDDDSDDDEESKEGQESSSSAANTNPAVAPPCVVVEEKKPQLTQEELEAKQAKQKLEDRLAAAAREKLAQASKESKEKQLQAERKRKAALFLQTLKNPLPEAEAGKIEESPFSVEESSTTPCPLLTGGRPLPTLEVKPPDRPSSKSKDPPREEEKEKKKKKHKKRSRTRSRSPKYHSSSKSRSRSHSKAKHSLPSAYRTVRRSRSRSRSPRRRAHSPERRREERSVPTAYRVSRSPGASRKRTRSRSPHEKKKKRRSRSRTKSKARSQSVSPSKQAAPRPAAPAAHSAHSASVSPVESRGSSQERSRGVSQEKEAQISSAIVSSVQSKITQDLMAKVRAMLAASKNLQTSAS

SEQ ID NO: 147888 - DNA, 2856 bp, Artificial Sequence
  derived and/or modified sequence
atgtacggtgcaagtggcggacgcgccaaacccgaacggaaatcaggggcaaaggaagaggctggcccaggcggagccggggggggaggatctagagtggagctgttggtgtttgggtatgcctgtaaactttttagagatgacgagcgggcgctggctcaggagcagggacagcacttgataccttggatgggagatcacaagatcctaatcgaccgttatgacggcagggggcaccttcatgacctatcagaatatgatgcggagtactcaacctggaatcgcgattatcagctctctgaagaggaggccagaatcgaggctctatgtgatgaggaacggtatttggctcttcatacagatctcctagaggaggaggcacggcaagaggaggagtacaaaagactatccgaggcattggctgaagatggttcctataacgcagttgggttcacgtatggatctgattattatgatccctccgaacctactgaagaagaagaacccagcaaacagcgcgagaagaacgaggcggaaaacctggaagagaacgaggagccatttgttgctcctctgggcctgagtgtgccgagtgacgttgaactgccgccaacagccaagatgcacgccatcatcgaaagaactgccagcttcgtttgtcgccagggggctcagttcgaaattatgctcaaggcaaagcaggccagaaacagccaattcgacttcctgaggttcgatcactacttaaacccctattataagtttatccaaaaggctatgaaggaaggaagatataccgtattggctgagaataagtctgacgaaaaaaagaagtcgggagtttcttcagacaacgaggatgacgacgatgaggaagatgggaattacctccaccctagcctgttcgcttccaaaaagtgcaaccggttggaggagctaatgaaaccattgaaggtggtcgaccctgatcaccctctggccgcactggttcggaaggcccaggccgactcttcgaccccaacaccccacaatgcggacggcgcacctgttcaacccagccaagttgagtacaccgctgatagcacagtcgccgctatgtactactcatattacatgctgcccgacgggacttactgtctcgccccaccaccacccggcatcgatgtcacaacttactattcgaccttgcccgccggtgtaaccgtgagcaactcccccggagtcacgacgactgctccccctcctcccggcacaactccacttccccccccaaccacggccgaaactagttctggggcgacgtcaacgacaacgacgacttccgcactagcaccagtagcagcaatcatccccccgcctcctgatgtacaacccgtaatcgacaagctcgctgaatatgtggctagaaacgggctcaaattcgaaacaagcgttagggctaaaaacgaccagcgattcgaatttctgcaaccttggcaccaatacaatgcctattacgaattcaaaaagcagttttttctacagaaggagggtggcgactcaatgcaagccgtcagcgcccccgaagaagctcctactgattcagcacccgaaaagccttccgatgcgggcgaggacggggctcccgaagatgccgccgaggttggggcccgcgcaggctccggcgggaagaaggaagcgagcagtagcaaaacagtccccgatggcaaactcgtcaaggctagcttcgcgcctatctcgtttgcaattaaggccaaagaaaacgaccttctgccattggagaagaaccgggttaagttagacgatgactctgatgacgacgaagaatctaaagaggggcaggagtcaagctcctctgccgccaacacaaacccggccgttgcccctccgtgcgtcgtggtcgaggagaaaaagccacagcttacccaagaggagcttgaagctaagcaggccaagcagaagctggaggacagacttgcagcggccgccagagagaaattggcacaggccagtaaggaatccaaggagaagcaattacaggctgagagaaagagaaaggctgcactattcctgcagaccctcaaaaatccactgcccgaagcggaagccggcaagatagaagagtcccctttttccgtcgaagagtcttctacaaccccgtgtcctctgctaacgggtgggaggccgctaccaactctggaagtgaagccgcccgacagaccctcaagcaagtcaaaggacccacctcgagaggaggagaaagagaagaagaagaagaagcacaagaaaagatcccgaactaggtcacgctctccaaaatatcatagttcaagtaagtctagaagcagatctcacagcaaagctaagcacagcttgcccagtgcctaccggaccgttcggcggagccgatccaggagccggtcacccaggagacgcgctcatagccctgagcgcagacgcgaggagaggtccgtgcctaccgcctatagagtcagccggagtcccggagccagccgaaagcgaactaggagccggtccccacacgagaagaagaagaagaggaggtctcgcagcaggaccaaatccaaagcacgcagccagtctgtgtcccccagcaagcaggccgccccccgccctgccgctccagctgctcattccgcacactccgctagcgtgtcccctgtcgagtctcggggaagcagccaggagagaagtaggggagtgtctcaggagaaagaagcccagatttcttccgccatagtgtccagtgtccagtccaagataacccaggaccttatggctaaggtgcgggcaatgctggccgcatcaaagaatcttcagacttccgcttcctag

SEQ ID NO: 147889 - DNA, 2856 bp, Artificial Sequence
  derived and/or modified sequence
atgtacggggccagcggcggccgggccaagccagagaggaagagcggggccaaggaggaggccggccctggaggagctgggggcggcggcagccgggtggagctgctggtgtttggctacgcctgcaagctgttcagagatgatgagcgggccctggcccaggagcagggccagcacctgatcccctggatgggagaccacaagatcctgattgacagatatgatggccggggccacctgcatgacctgtctgaatatgatgctgagtacagcacctggaacagagactaccagctgtctgaggaggaggcccgcatcgaggccctgtgtgatgaggagcgctacctggccctgcacacagacctgctggaggaggaggcccggcaggaggaggagtacaagaggctgtctgaggccctggccgaggatggcagctacaatgctgtgggcttcacctacggcagtgactactatgaccccagcgagcccacagaggaggaggagcccagcaagcagcgggagaagaatgaagctgagaacctggaggagaatgaggagccctttgtggcccccctgggcctgtctgtgcccagtgatgtggagctgcccccaacagccaagatgcacgccatcatcgagaggacagccagctttgtgtgccggcagggcgcccagtttgagatcatgctgaaggccaagcaggccaggaacagccagtttgacttcctgcgctttgaccactacctgaacccctactacaagttcatccagaaggccatgaaggagggccgctacacagtgctggccgagaacaagagtgatgagaagaagaagtctggagtgtccagtgacaatgaagatgatgatgatgaggaggatggcaactacctgcaccccagcctgtttgccagcaagaagtgcaaccggctggaggagctgatgaagcccctgaaggtggtggaccctgaccaccccctggccgccctggtgaggaaggcccaggccgacagcagcacccccaccccccacaatgctgatggagcccctgtgcagcccagccaggtggagtacacagctgacagcacagtggccgccatgtactacagctactacatgctgcctgatggcacctactgcctggcccctcctcctcctggcattgatgtgaccacctactacagcaccctgcctgctggggtgacagtgagcaacagccctggggtgaccaccacagcccctcctcctcctggcaccacccccctgcccccacccaccacagctgagaccagcagcggggccaccagcaccaccaccaccaccagcgccctggcccctgtggccgccatcatccccccacctccagatgtgcagcccgtcatcgacaagctggccgagtatgtggccagaaatggcctgaagtttgagacctctgtgcgggccaagaatgaccagagatttgagttcctgcagccctggcaccagtacaatgcctactatgagttcaagaagcagttcttcctgcagaaggagggcggggacagcatgcaggccgtgtctgcccctgaggaggcccccacagacagcgcccctgagaagcccagtgatgctggggaggatggagccccagaagatgctgctgaggtgggcgcccgggccggcagcggcggcaagaaggaggccagcagcagcaagacagtgcctgatggcaagctggtgaaggccagctttgcccccatcagctttgccatcaaggccaaggaaaatgacctgctgcccctggagaagaacagagtgaagctggatgatgacagtgatgatgatgaggagagcaaggagggccaggagagcagcagcagcgctgccaacaccaacccagctgtggccccaccctgtgtggtggtggaggagaagaagccccagctgacccaggaggagctggaggccaagcaggccaagcagaagctggaggaccggctggccgccgccgcccgggagaagctggcccaggccagcaaggagagcaaggagaagcagctgcaggccgagaggaagaggaaggccgccctcttcctgcagaccctgaagaaccccctgcctgaggccgaggccggcaagattgaggagagccccttctctgtggaggagagcagcaccaccccctgccccctgctgactggaggccggcccctgcccaccctggaggtgaagcccccagaccggcccagcagcaagagcaaggaccccccccgggaggaggagaaggagaagaagaagaagaagcacaagaagaggagcaggaccaggagccgcagccccaagtaccacagcagcagcaagagccgcagccgcagccacagcaaggccaagcacagcctgcccagcgcctacagaacagtgcggcgcagccgcagccgcagccgcagccccaggagaagagcccacagccctgagaggagaagagaggagaggtctgtgcccacagcctacagagtgagccgcagccctggggccagcaggaagaggaccaggagccgcagcccccatgagaagaagaagaagaggaggagccgcagcaggaccaagagcaaggcccggagccagagcgtgagccccagcaagcaggccgcccccaggcctgctgccccagctgcccacagcgcccacagcgcctctgtgtcccctgtggagagccggggcagcagccaggagaggagcagaggagtgtcccaggagaaggaggcccagatcagcagcgccatcgtgtcctctgtgcagagcaagatcacccaggacctgatggccaaggtgcgggccatgctggccgccagcaagaacctgcagaccagcgccagctag

SEQ ID NO: 147890 - DNA, 2856 bp, Artificial Sequence
  derived and/or modified sequence
atgtacggcgccagcggcggccgggccaagcccgagcggaagagcggtgccaaggaagaggccgggcctggtggggccgggggcggcggcagtcgcgtggaactgttggttttcggctacgcctgcaagctgtttcgggatgatgagcgcgcattggctcaggaacaaggtcagcatctgatcccttggatgggcgaccacaagatactgatcgatagatacgatggacgcggccacctccacgatctgtccgaatatgatgctgaatacagcacctggaacagagactaccagctgtctgaagaggaggcaaggatcgaagcactctgcgacgaggaaagatacctggccttacatactgaccttcttgaagaggaggccaggcaagaagaagaatacaaaaggctgtcggaagcactggctgaagatggatcctacaatgctgtcgggtttacatatggcagcgattactacgaccccagcgaaccaacagaagaggaagagccttccaagcagcgggaaaaaaatgaggccgaaaacttggaagaaaacgaggaaccgtttgtggcacctctggggctttccgttcccagcgatgtggagctcccacctactgcgaaaatgcacgccatcatcgagcgaacagcttcattcgtctgtagacaaggggcccagtttgaaatcatgttgaaagccaagcaggcacgaaacagccagtttgatttcctccgcttcgaccactatttaaacccttactacaagtttattcagaaagccatgaaagaggggaggtatactgtgctggctgagaataaaagcgatgagaagaagaaatcaggtgtgtcctcagacaacgaagatgatgatgatgaggaagatggtaattatctgcacccaagcctgttcgcatctaagaaatgtaaccggcttgaagagctgatgaagccattgaaggtggttgaccccgatcatcctctcgctgccttagttcgaaaagcccaggccgattcatctacacccaccccgcacaatgcggatggtgcaccagttcagccctcgcaagttgaatacactgccgacagtaccgtggcagccatgtactactcctactacatgttaccagatgggacttattgcctcgcacccccaccccccgggatcgacgttaccacatattactctacccttcccgcaggcgttaccgtgagtaattcgccaggagtcactaccaccgctccacccccacctgggacgacgcctctccccccccccactacagcagagactagcagcggggcaaccagcactaccaccacaacatccgcccttgcaccagtcgcggcaatcatcccccctcctccagatgtgcaaccggttattgacaaacttgcggagtatgttgccagaaatggtctgaagtttgaaacttctgtgagagccaaaaatgatcagcggtttgagtttttacaaccctggcatcagtacaacgcctattacgaattcaagaagcagtttttcttacagaaagaaggaggggacagtatgcaggccgtctcggcaccagaggaagctcctaccgactccgctcccgagaaaccatcagatgccggtgaagatggagctcccgaggatgcagcggaggttggagcaagggccgggagtggcgggaagaaagaggcatcaagctcaaagaccgtgcccgatggtaaactggtgaaggcttccttcgcccctatatcttttgccattaaggctaaggaaaacgacctccttccattggagaaaaatagagtgaaacttgatgatgacagtgacgatgacgaagaatctaaggaagggcaagaatcgagttcttccgccgccaataccaaccctgccgttgcccccccctgcgtagttgtcgaagaaaagaaaccccaattgactcaggaggagctcgaggctaagcaggctaagcagaaattggaagacaggctggccgctgctgcgcgggaaaaactagcacaagcaagcaaagagtctaaggaaaagcagctccaggccgagagaaaacggaaagccgccctgttcttacagaccttgaagaatccattgccagaagccgaagcgggtaagattgaagagtcacctttttccgtcgaggagtcatctactaccccgtgccctcttttgacaggcggtagaccactccctactctagaagtcaagcctcccgatcgaccttcctctaagtccaaggaccccccccgtgaggaagagaaagagaaaaaaaaaaaaaaacataagaagaggtcaaggactcgttcacgtagtccaaagtatcatagctctagcaaatcacgctctcgttctcactctaaagccaaacattctctgccttccgcatatcgcaccgttcgccgcagcaggtcaagaagcagatcgcctaggaggagagcccactctcccgagcgtaggcgggaggaaagatctgtgcccacggcttatcgcgtttctcggagcccaggagcctcaagaaagcgtacccgttccagatccccacacgagaagaaaaaaaagaggagaagtaggtctcgcacaaagtcaaaagccagatcccagagcgtgagtccaagcaagcaggcagcaccacgacccgctgccccagcggcccacagcgctcattcagcttccgtgagtcccgtggagagccggggctcgtcccaggagaggagccggggcgtgagccaggaaaaggaagcccagatatcatcagctatcgtgtccagtgtccaaagcaagatcacccaggatctgatggcgaaggtgagggcaatgctggctgcatcaaaaaatctgcaaaccagcgccagttag

SEQ ID NO: 147891 - DNA, 3246 bp, Artificial Sequence
  derived and/or modified sequence
cattttgtggcccgctatggcggcggtgttgaggttgggtacgggatgcggggtctttgactgaaggggtaggccaagtggaggtatcagggacgtcgcgcggcacagaagaggaccagcctggacgccggggacgctgtcatgtacggcgcgagcgggggccgcgccaaacccgagaggaaaagcggcgcgaaggaggaggccgggccaggcggtgccggcggtgggggcagccgagtggagctcttggttttcggctatgcctgcaagctgttccgggacgacgagcgggccctggctcaggaacagggacagcacctcatcccctggatgggggaccacaagatcctcatcgacagatatgatggacgtggtcacctgcatgacctttctgagtacgatgctgagtattccacgtggaacagagattatcagctgtctgaagaggaggcgcgaatagaggccctgtgtgatgaagagaggtatttagccttgcatacggacttgcttgaggaggaggcaaggcaagaggaagaatacaagcgattgagtgaagcactagcagaggatgggagctacaatgccgtggggttcacttacggtagcgactattacgacccgtcagagccgacggaggaggaggagccttccaaacagagagaaaaaaatgaggccgaaaatttagaggaaaatgaagagcccttcgttgcccccttaggattgagcgtcccgtctgacgtggagttgccaccaaccgctaaaatgcacgccatcatcgagcgcacggccagcttcgtgtgcaggcagggagcacagtttgagatcatgctgaaggccaagcaggcccggaactcccagtttgactttctgcgcttcgaccactacctcaacccctactataagttcatccagaaagccatgaaagagggacgctacactgtcctggcagaaaacaaaagtgacgagaaaaaaaaatcaggagtcagctctgacaatgaagatgatgatgatgaagaagatgggaattaccttcatccctctctctttgcctccaagaagtgtaaccgccttgaagagctgatgaagcccttgaaggtagtggacccagatcatcccctcgcagcacttgttcgtaaggcacaggctgacagttccactcccaccccacacaacgcagacggtgcgcctgtgcagccctcccaggtggagtacacggcagactcgaccgtggcagccatgtattacagctactacatgctaccggacggcacttactgcctggcgccgccccctcccggaatcgacgtgactacttactacagcacccttcctgctggcgtgaccgtgtctaactcccctggagtgacgaccaccgccccaccacctcctgggaccacaccactaccgcccccaaccacagcagagactagcagcggggccacctccacaaccaccaccacaagtgcacttgcccccgtggccgccatcatccccccgccccccgacgtccagcccgtgattgacaagctggccgagtatgtcgccaggaacggcctgaagttcgagaccagtgttcgtgccaagaatgatcaaagatttgagttcctgcagccgtggcaccagtataatgcttattatgagtttaagaagcagttcttcctccagaaagaagggggcgatagcatgcaggctgtgtctgcaccagaagaggctcccacagactctgctcccgagaagccaagtgatgctggggaggatggcgcgcctgaagacgcagccgaggtgggagcacgggcaggctcaggcgggaagaaggaggcatcgtccagtaagaccgtcccggacgggaagctggtgaaagcttcctttgctccaataagctttgcaatcaaggccaaagaaaatgatctgcttcccctggaaaaaaatcgtgttaagctagatgatgacagtgatgatgatgaagaaagcaaagaaggccaagaaagttctagtagtgctgcaaacactaacccagcagttgccccaccctgtgtagttgttgaggagaagaagcctcaacttacccaggaggagctagaagcaaagcaagcaaagcaaaagctggaagatcgcctcgcagctgctgcccgggaaaagctggcccaggcgtctaaggagtcaaaagagaaacagcttcaagcagaacgtaaaaggaaagcggcgttatttttacagaccctcaaaaatcctctgccggaagcagaagctgggaaaattgaggagagtcctttcagtgtcgaggaatccagcactacgccctgccctctactgactggaggcaggcctctgcctactttagaagttaaaccacccgataggccttcgagcaaaagcaaagatccaccgagagaagaagagaaagaaaagaaaaagaaaaagcacaaaaaaagatctcgaacaagatcacgttctcccaagtaccattcgtcatccaagtccaggtctagatcacactcaaaagcaaagcattctcttcccagtgcctatcggacagtgcggcggtcgaggtcccgctcccggtcccctcggaggagagcccactcccctgagagacggagggaagagaggagtgtgcccactgcctaccgcgtgagccgcagccctggggccagtaggaagcggacccgctccagaagtccccacgagaagaagaagaagaggcggtcccggtcgcggaccaagtccaaggccaggtctcagtcggtgtcacccagcaagcaggcagcgccccggcccgcggcccccgcggcccactcggcgcactcagccagcgtctcccctgtggagagtcggggctccagccaggagcgctccaggggagtctctcaggaaaaagaagcccagatctcttcagcaatcgtttcttccgtgcagagcaaaatcactcaggatctcatggccaaagtcagagcgatgcttgcagcttccaaaaacctgcaaaccagcgcttcctgagacggggccagcggaggcagagccgggaggctgcgtgggcttctgggcaggctcacgcagacgccggccacaccatccacctggccgcctccatggacccttggtggcttttgtaaattaatttttgatgacattttgagttttaagatttctgaccagcagtctcttacctgtatatttgtaaatatatcatgtttctgtgaaaatgtattatgaaataaaatgggaggaaacaccttttctagctag

SEQ ID NO: 147892 - DNA, 2856 bp, Artificial Sequence
  derived and/or modified sequence
atgtatggagccagcggcggtcgggcaaaacccgagcgtaaatcaggcgctaaggaggaagccggtccagggggagcagggggtggtggcagtagggtcgaattgttagtgttcggatatgcttgtaagctctttagggacgacgaacgcgctctggctcaggagcaaggacaacacttaattccatggatgggggaccacaagattctgattgatcgttacgacggacgcggtcatctccatgatctctcggagtacgatgcagaatactccacttggaatcgggactatcagttgagcgaagaggaggctcggatcgaggcgctgtgcgatgaggagcggtacctggctctccatacagacctgctcgaagaggaggcaaggcaggaggaggaatacaaaagactgtccgaagcacttgcggaagacgggtcttacaacgccgtgggattcacatatggttccgactactacgaccccagtgagcctaccgaggaggaagagcctagtaagcaaagagaaaagaatgaggcggagaatctggaggagaacgaagagccctttgtggcccctctggggctctctgtcccttctgacgtcgaattaccccctactgctaaaatgcacgccattattgagcggaccgcaagtttcgtgtgtcgtcaaggagcccagttcgaaatcatgcttaaggcaaagcaggcgaggaattcccaattcgatttcctgcggttcgaccattatctgaatccttattacaaatttattcagaaagccatgaaggagggaaggtatacagtgctggccgagaacaaaagtgatgaaaaaaagaagtctggcgtgtctagtgacaacgaggatgatgatgacgaagaagatggcaactatttgcatccctcattattcgcaagtaaaaagtgtaatagactggaggagcttatgaaacctctgaaggtggtcgaccctgaccaccccttggctgcattggtccggaaagcgcaagcagactctagcacccctaccccgcacaatgcggacggcgctcccgtgcagccctctcaggtcgagtacactgctgattctaccgtagctgccatgtactattcatactacatgctaccggacgggacttattgtctcgccccaccgccacctgggatcgacgtcacgacttactactctaccctccccgctggagtgaccgtatcaaactcccctggtgtaaccacgaccgctccaccccctcctgggacaaccccgctccctccccctacgaccgctgagacaagtagcggcgctacctccacgactactacaacaagcgctctcgcacccgttgctgccatcatcccccctccaccggacgttcaaccagtgatagataagctggctgaatatgtggctcgtaacgggctgaaattcgaaacctcggtgagagccaagaacgaccagagatttgaatttctccaaccttggcatcaatacaatgcctattatgagttcaaaaaacagttctttttgcagaaagagggcggtgacagcatgcaggccgttagcgctccggaagaagcccctaccgatagtgctccggaaaagcccagtgatgccggagaagatggggctccggaagacgctgctgaagttggtgcaagggccggttcaggcggaaaaaaggaagcctctagcagtaagaccgtgccagatggcaaactcgtgaaggcgagctttgctccgatttcatttgctatcaaggcaaaagaaaacgacctactgccgttggagaagaaccgcgtgaagctggatgatgattcggacgacgacgaggagagcaaagaaggacaagaatctagttcatctgcagccaatacaaatcctgcggtggctcccccttgtgtcgtcgttgaggagaagaagccccaactcacccaagaagagttggaggccaaacaggccaaacagaaacttgaggatagactcgcagcagcagcaagagagaagctcgcccaggcaagtaaagagtcgaaggagaaacagctgcaagccgaaaggaagcgcaaagctgccctgttccttcagactctaaaaaaccctctcccggaggccgaggcaggcaagatcgaggaaagcccattcagcgtagaagagtcatcaacaactccctgcccgttactgacgggaggacgacccctaccaacactggaagtgaagccgcctgataggccctcctcaaagtctaaggaccctccccgagaagaggagaaggaaaagaagaagaagaagcacaaaaagcgcagtaggacaagaagccgctcccctaaataccattcttcttcaaagtccaggagtaggtcccatagtaaggcgaaacactccttaccctctgcctatcgaaccgtgagaaggagcaggtcccgtagtcgtagtccacggaggcgcgctcacagtcccgagaggagaagagaagagcgatcagtgccaaccgcctacagggtgtcaagaagccctggggcatccagaaaacggactcgttcccgcagccctcacgaaaaaaaaaaaaagagaagatcacgctctaggactaagagtaaggcccgttcccaaagtgtgagcccatccaaacaggcggctccaaggcctgctgcccctgcggctcactccgcccacagtgcttccgtgtctcctgtagagagtcggggttcaagtcaggagcgaagtcgcggtgtgagtcaggagaaggaggctcagatttcctctgcaatcgtgagttccgtgcagtcaaagataacccaggatcttatggctaaagtccgggctatgctcgcagcaagcaaaaacttgcaaaccagcgcctcctag

SEQ ID NO: 147893 - DNA, 2856 bp, Artificial Sequence
  derived and/or modified sequence
atgtacggcgccagcggcggcagagccaagcccgagagaaagagcggcgccaaggaggaggccggccccggcggcgccggcggcggcggcagcagagtggagctgctggtgttcggctacgcctgcaagctgttcagagacgacgagagagccctggcccaggagcagggccagcacctgatcccctggatgggcgaccacaagatcctgatcgacagatacgacggcagaggccacctgcacgacctgagcgagtacgacgccgagtacagcacctggaacagagactaccagctgagcgaggaggaggccagaatcgaggccctgtgcgacgaggagagatacctggccctgcacaccgacctgctggaggaggaggccagacaggaggaggagtacaagagactgagcgaggccctggccgaggacggcagctacaacgccgtgggcttcacctacggcagcgactactacgaccccagcgagcccaccgaggaggaggagcccagcaagcagagagagaagaacgaggccgagaacctggaggagaacgaggagcccttcgtggcccccctgggcctgagcgtgcccagcgacgtggagctgccccccaccgccaagatgcacgccatcatcgagagaaccgccagcttcgtgtgcagacagggcgcccagttcgagatcatgctgaaggccaagcaggccagaaacagccagttcgacttcctgagattcgaccactacctgaacccctactacaagttcatccagaaggccatgaaggagggcagatacaccgtgctggccgagaacaagagcgacgagaagaagaagagcggcgtgagcagcgacaacgaggacgacgacgacgaggaggacggcaactacctgcaccccagcctgttcgccagcaagaagtgcaacagactggaggagctgatgaagcccctgaaggtggtggaccccgaccaccccctggccgccctggtgagaaaggcccaggccgacagcagcacccccaccccccacaacgccgacggcgcccccgtgcagcccagccaggtggagtacaccgccgacagcaccgtggccgccatgtactacagctactacatgctgcccgacggcacctactgcctggccccccccccccccggcatcgacgtgaccacctactacagcaccctgcccgccggcgtgaccgtgagcaacagccccggcgtgaccaccaccgccccccccccccccggcaccacccccctgcccccccccaccaccgccgagaccagcagcggcgccaccagcaccaccaccaccaccagcgccctggcccccgtggccgccatcatcccccccccccccgacgtgcagcccgtgatcgacaagctggccgagtacgtggccagaaacggcctgaagttcgagaccagcgtgagagccaagaacgaccagagattcgagttcctgcagccctggcaccagtacaacgcctactacgagttcaagaagcagttcttcctgcagaaggagggcggcgacagcatgcaggccgtgagcgcccccgaggaggcccccaccgacagcgcccccgagaagcccagcgacgccggcgaggacggcgcccccgaggacgccgccgaggtgggcgccagagccggcagcggcggcaagaaggaggccagcagcagcaagaccgtgcccgacggcaagctggtgaaggccagcttcgcccccatcagcttcgccatcaaggccaaggagaacgacctgctgcccctggagaagaacagagtgaagctggacgacgacagcgacgacgacgaggagagcaaggagggccaggagagcagcagcagcgccgccaacaccaaccccgccgtggcccccccctgcgtggtggtggaggagaagaagccccagctgacccaggaggagctggaggccaagcaggccaagcagaagctggaggacagactggccgccgccgccagagagaagctggcccaggccagcaaggagagcaaggagaagcagctgcaggccgagagaaagagaaaggccgccctgttcctgcagaccctgaagaaccccctgcccgaggccgaggccggcaagatcgaggagagccccttcagcgtggaggagagcagcaccaccccctgccccctgctgaccggcggcagacccctgcccaccctggaggtgaagccccccgacagacccagcagcaagagcaaggacccccccagagaggaggagaaggagaagaagaagaagaagcacaagaagagaagcagaaccagaagcagaagccccaagtaccacagcagcagcaagagcagaagcagaagccacagcaaggccaagcacagcctgcccagcgcctacagaaccgtgagaagaagcagaagcagaagcagaagccccagaagaagagcccacagccccgagagaagaagagaggagagaagcgtgcccaccgcctacagagtgagcagaagccccggcgccagcagaaagagaaccagaagcagaagcccccacgagaagaagaagaagagaagaagcagaagcagaaccaagagcaaggccagaagccagagcgtgagccccagcaagcaggccgcccccagacccgccgcccccgccgcccacagcgcccacagcgccagcgtgagccccgtggagagcagaggcagcagccaggagagaagcagaggcgtgagccaggagaaggaggcccagatcagcagcgccatcgtgagcagcgtgcagagcaagatcacccaggacctgatggccaaggtgagagccatgctggccgccagcaagaacctgcagaccagcgccagctag

SEQ ID NO: 147894 - protein, 188 aa, Artificial Sequence
  derived and/or modified sequence
MSTRRRHVGNRANPDPNCCLGVFGLSLYTTERDLREVFSKYGPIADVSIVYDQQSRRSRGFAFVYFENVDDAKEAKERANGMELDGRRIRVDFSITKRPHTPTPGIYMGRPTYGSSRRRDYYDRGYDRGYDDRDYYSRSYRGGGGGGGGWRAAQDRDQIYRRRSPSPYYSRGGYRSRSRSRSYSPRRY

SEQ ID NO: 147895 - protein, 288 aa, Artificial Sequence
  derived and/or modified sequence
MSDSGEQNYGERESRSASRSGSAHGSGKSARHTPARSRSKEDSRRSRSKSRSRSESRSRSRRSSRRHYTRSRSRSRSHRRSRSRSYSRDYRRRHSHSHSPMSTRRRHVGNRANPDPNCCLGVFGLSLYTTERDLREVFSKYGPIADVSIVYDQQSRRSRGFAFVYFENVDDAKEAKERANGMELDGRRIRVDFSITKRPHTPTPGIYMGRPTYGSSRRRDYYDRGYDRGYDDRDYYSRSYRGGGGGGGGWRAAQDRDQIYRRRSPSPYYSRGGYRSRSRSRSYSPRRY

SEQ ID NO: 147896 - DNA, 564 bp, Artificial Sequence
  derived and/or modified sequence
atgggatgctgcggttgtagtggcggatgcggatccggatgtggtggatgtggcagcggctgcggagggtgtggtagctcctgttgcgttccaatctgctgctgcaagcctgtttgttgttgtgttcctgcatgttcatgtagctcttgtgggtcttgcggaggctccaaaggaggacgcggatcatgcggtggttcgaaaggcgactgtggatcctgtggcggatctaaagggggctgtggatcgtgtggatgttcccaatgttcgtgttataaaccatgttgttgttcctccggatgcggatctagttgttgccaatctagctgctgcaagccctgctgcagtcagtcctcttgttgtaagccatgtagttgctcttctggatgtggctcaagttgttgtcaaagttcctgctgtaagccatgttgttctcagtcctcttgctgcaaaccctgttgttgctcctctggctgtggatcgtcttgctgtcagtcaagttgctgtaagccctgctgttcccagtcttcttgctgcgtccccatctgctgtcagtgcaagatttag

SEQ ID NO: 147897 - DNA, 117 bp, Artificial Sequence
  derived and/or modified sequence
atgagcgacagcggcgagcagaactacggcgagagagtgaacgtggaggagggcaagtgcggcagcagacacctgaccagcttcatcaacgagtacctgaagctgagaaacaagtag

SEQ ID NO: 147898 - DNA, 117 bp, Artificial Sequence
  derived and/or modified sequence
atgagcgatagtggcgagcagaattatggcgagagagttaatgtcgaggagggaaagtgcggctcccgccatctgacctccttcattaacgaatacctcaaacttaggaacaaatag

SEQ ID NO: 147899 - DNA, 117 bp, Artificial Sequence
  derived and/or modified sequence
atgtctgacagcggggagcagaactatggagagcgggtgaatgtggaggagggcaaatgtggcagccgccacctgaccagcttcatcaatgagtacctgaagctgaggaacaagtag

SEQ ID NO: 147900 - DNA, 117 bp, Artificial Sequence
  derived and/or modified sequence
atgagcgacagcggcgagcagaactacggcgagcgggtgaacgtggaggaagggaagtgtggcagtcgacacctgaccagcttcattaatgagtacttgaagctgcgcaacaaatag

SEQ ID NO: 147901 - DNA, 117 bp, Artificial Sequence
  derived and/or modified sequence
atgtcggacagtggcgaacagaattacggcgagagggttaacgtggaggaaggaaagtgtggttcacgtcacctcactagctttatcaatgaatacctgaagttgcgcaacaagtag

SEQ ID NO: 147902 - DNA, 288 bp, Artificial Sequence
  derived and/or modified sequence
gagcccgtgcggaggcggtgcggagcatttcggctctgagcggctgggcgaccggcgcgtcgtgcggggctgcggcggagcctccttaaggaaggtgcaagaggttggcagcttcgattgaagcacatcgaccggcgacagcagccaggagtcatgagcgacagcggcgagcagaactacggcgagcgggttaatgttgaagaaggaaaatgcggaagtcgtcatttgacaagttttataaatgagtatttgaagctcaggaataagtgaagctgaaatttgaaaaaa

SEQ ID NO: 147903 - RNA, 564 nt, Artificial Sequence
  derived and/or modified sequence
augggaugcugcgguuguaguggcggaugcggauccggaugugguggauguggcagcggcugcggagggugugguagcuccuguugcguuccaaucugcugcugcaagccuguuuguuguuguguuccugcauguucauguagcucuugugggucuugcggaggcuccaaaggaggacgcggaucaugcggugguucgaaaggcgacuguggauccuguggcggaucuaaagggggcuguggaucguguggauguucccaauguucguguuauaaaccauguuguuguuccuccggaugcggaucuaguuguugccaaucuagcugcugcaagcccugcugcagucaguccucuuguuguaagccauguaguugcucuucuggauguggcucaaguuguugucaaaguuccugcuguaagccauguuguucucaguccucuugcugcaaacccuguuguugcuccucuggcuguggaucgucuugcugucagucaaguugcuguaagcccugcuguucccagucuucuugcugcguccccaucugcugucagugcaagauuuag

SEQ ID NO: 147904 - protein, 896 aa, Artificial Sequence
  derived and/or modified sequence
MLRAALSLLALPLAGAAEEPTQKPESPGEPPPGLELFRWQWHEVEAPYLVALWILVASLAKIVFHLSRKVTSLVPESCLLILLGLVLGGIVLAVAKKAEYQLEPGTFFLFLLPPIVLDSGYFMPSRLFFDNLGAILTYAVVGTLWNAFTTGAALWGLQQAGLVAPRVQAGLLDFLLFGSLISAVDPVAVLAVFEEVHVNETLFIIVFGESLLNDAVTVVLYKVCNSFVEMGSANVQATDYLKGVASLFVVSLGGAAVGLVFAFLLALTTRFTKRVRIIEPLLVFLLAYAAYLTAEMASLSAILAVTMCGLGCKKYVEANISHKSRTTVKYTMKTLASCAETVIFMLLGISAVDSSKWAWDSGLVLGTLIFILFFRALGVVLQTWVLNQFRLVPLDKIDQVVMSYGGLRGAVAFALVILLDRTKVPAKDYFVATTIVVVFFTVIVQGLTIKPLVKWLKVKRSEHHKPTLNQELHEHTFDHILAAVEDVVGHHGYHYWRDRWEQFDKKYLSQLLMRRSAYRIRDQIWDVYYRLNIRDAISFVDQGGHVLSSTGLTLPSMPSRNSVAETSVTNLLRESGSGACLDLQVIDTVRSGRDREDAVMHHLLCGGLYKPRRRYKASCSRHFISEDAQERQDKEVFQQNMKRRLESFKSTKHNICFTKSKPRPRKTGRRKKDGVANAEATNGKHRGLGFQDTAAVILTVESEEEEEESDSSETEKEDDEGIIFVARATSEVLQEGKVSGSLEVCPSPRIIPPSPTCAEKELPWKSGQGDLAVYVSSETTKIVPVDMQTGWNQSISSLESLASPPCNQAPILTCLPPHPRGTEEPQVPLHLPSDPRSSFAFPPSLAKAGRSRSESSADLPQQQELQPLMGHKDHTHLSPGTATSHWCIQFNRGSRL

SEQ ID NO: 147905 - protein, 435 aa, Artificial Sequence
  derived and/or modified sequence
MRRSAYRIRDQIWDVYYRLNIRDAISFVDQGGHVLSSTGLTLPSMPSRNSVAETSVTNLLRESGSGACLDLQVIDTVRSGRDREDAVMHHLLCGGLYKPRRRIELRTEPCGMLLKTFLQTDMDQAFLGTKPAAVATSSQRMRRSGRTRRSSSRMKRRLESFKSTKHNICFTKSKPRPRKTGRRKKDGVANAEATNGKHRGLGFQDTAAVILTVESEEEEEESDSSETEKEDDEGIIFVARATSEVLQEGKVSGSLEVCPSPRIIPPSPTCAEKELPWKSGQGDLAVYVSSETTKIVPVDMQTGWNQSISSLESLASPPCNQAPILTCLPPHPRGTEEPQVPLHLPSDPRSSFAFPPSLAKAGLAVRAALTSPSSRSCSPSWATRTTPISAQAPLPPTGASSSTEAAGCSSRPRGGAGGGIPVGSAPWVMGRALET

SEQ ID NO: 147906 - DNA, 57 bp, Artificial Sequence
  derived and/or modified sequence
tgcaagcagagctgtgtgtccatcgccagctgtgaggccgctgagctgaacctgtag

SEQ ID NO: 147907 - DNA, 2691 bp, Artificial Sequence
  derived and/or modified sequence
atgctgagagccgccctgagcctgctggccctgcccctggccggcgccgccgaggagcccacccagaagcccgagagccccggcgagcccccccccggcctggagctgttcagatggcagtggcacgaggtggaggccccctacctggtggccctgtggatcctggtggccagcctggccaagatcgtgttccacctgagcagaaaggtgaccagcctggtgcccgagagctgcctgctgatcctgctgggcctggtgctgggcggcatcgtgctggccgtggccaagaaggccgagtaccagctggagcccggcaccttcttcctgttcctgctgccccccatcgtgctggacagcggctacttcatgcccagcagactgttcttcgacaacctgggcgccatcctgacctacgccgtggtgggcaccctgtggaacgccttcaccaccggcgccgccctgtggggcctgcagcaggccggcctggtggcccccagagtgcaggccggcctgctggacttcctgctgttcggcagcctgatcagcgccgtggaccccgtggccgtgctggccgtgttcgaggaggtgcacgtgaacgagaccctgttcatcatcgtgttcggcgagagcctgctgaacgacgccgtgaccgtggtgctgtacaaggtgtgcaacagcttcgtggagatgggcagcgccaacgtgcaggccaccgactacctgaagggcgtggccagcctgttcgtggtgagcctgggcggcgccgccgtgggcctggtgttcgccttcctgctggccctgaccaccagattcaccaagagagtgagaatcatcgagcccctgctggtgttcctgctggcctacgccgcctacctgaccgccgagatggccagcctgagcgccatcctggccgtgaccatgtgcggcctgggctgcaagaagtacgtggaggccaacatcagccacaagagcagaaccaccgtgaagtacaccatgaagaccctggccagctgcgccgagaccgtgatcttcatgctgctgggcatcagcgccgtggacagcagcaagtgggcctgggacagcggcctggtgctgggcaccctgatcttcatcctgttcttcagagccctgggcgtggtgctgcagacctgggtgctgaaccagttcagactggtgcccctggacaagatcgaccaggtggtgatgagctacggcggcctgagaggcgccgtggccttcgccctggtgatcctgctggacagaaccaaggtgcccgccaaggactacttcgtggccaccaccatcgtggtggtgttcttcaccgtgatcgtgcagggcctgaccatcaagcccctggtgaagtggctgaaggtgaagagaagcgagcaccacaagcccaccctgaaccaggagctgcacgagcacaccttcgaccacatcctggccgccgtggaggacgtggtgggccaccacggctaccactactggagagacagatgggagcagttcgacaagaagtacctgagccagctgctgatgagaagaagcgcctacagaatcagagaccagatctgggacgtgtactacagactgaacatcagagacgccatcagcttcgtggaccagggcggccacgtgctgagcagcaccggcctgaccctgcccagcatgcccagcagaaacagcgtggccgagaccagcgtgaccaacctgctgagagagagcggcagcggcgcctgcctggacctgcaggtgatcgacaccgtgagaagcggcagagacagagaggacgccgtgatgcaccacctgctgtgcggcggcctgtacaagcccagaagaagatacaaggccagctgcagcagacacttcatcagcgaggacgcccaggagagacaggacaaggaggtgttccagcagaacatgaagagaagactggagagcttcaagagcaccaagcacaacatctgcttcaccaagagcaagcccagacccagaaagaccggcagaagaaagaaggacggcgtggccaacgccgaggccaccaacggcaagcacagaggcctgggcttccaggacaccgccgccgtgatcctgaccgtggagagcgaggaggaggaggaggagagcgacagcagcgagaccgagaaggaggacgacgagggcatcatcttcgtggccagagccaccagcgaggtgctgcaggagggcaaggtgagcggcagcctggaggtgtgccccagccccagaatcatcccccccagccccacctgcgccgagaaggagctgccctggaagagcggccagggcgacctggccgtgtacgtgagcagcgagaccaccaagatcgtgcccgtggacatgcagaccggctggaaccagagcatcagcagcctggagagcctggccagccccccctgcaaccaggcccccatcctgacctgcctgcccccccaccccagaggcaccgaggagccccaggtgcccctgcacctgcccagcgaccccagaagcagcttcgccttcccccccagcctggccaaggccggcagaagcagaagcgagagcagcgccgacctgccccagcagcaggagctgcagcccctgatgggccacaaggaccacacccacctgagccccggcaccgccaccagccactggtgcatccagttcaacagaggcagcagactgtag

SEQ ID NO: 147908 - DNA, 2691 bp, Artificial Sequence
  derived and/or modified sequence
atgttaagggcagcccttagtctgttggccttgcctcttgccggggcagccgaggaacccacccagaagcctgagagccctggtgaaccacctccgggcctcgaactgttccggtggcagtggcatgaagttgaggctccttacctggtagctctgtggattttagtggccagcctagccaagatagtatttcatctttccaggaaagtcaccagtctggtcccagagagctgcctgctaatactactgggcctggtactaggcggcattgtcctcgcagtagcaaagaaggccgagtatcagctggagcccgggaccttctttttgttcctcttgccccccatcgttctggactcaggttactttatgccttctcgtttatttttcgataatctgggtgcgatcctcacctatgccgtcgtgggcaccctgtggaacgcattcacaaccggggctgcactttggggtctacagcaggccggtttggtggcacctagggtgcaggctgggctcctggacttcctgctatttgggtcacttatcagcgcagtcgatcccgtggcggtattggcagtcttcgaggaggtccacgtgaacgaaacactgtttatcatcgtgtttggcgagtctttactaaacgacgcggttactgtggtgctgtacaaggtttgcaactccttcgtggagatgggaagcgctaatgtgcaggctacggattacctcaagggcgtggcgtccctgtttgtggtaagtctggggggagctgctgtgggcctggtcttcgctttcctgcttgccctaacaacccgtttcaccaagcgagtacgcataatagagcccctgctcgtttttttactggcctacgcagcctacttgacggccgagatggcgtcactgagtgcaatcttggctgtcacgatgtgtggtctgggttgtaagaaatatgtggaagctaatatttcgcataagtcacgcacaactgtgaaatacactatgaaaactctggccagttgtgccgagaccgtcatcttcatgttacttggtatttcagcagtggactcatccaaatgggcgtgggatagcggtctcgtgctaggtactctgattttcattttgttcttccgtgcattaggggtagttttacaaacatgggtgctgaatcagttcaggctggtgccccttgacaagattgatcaggtggtgatgtcatatggcgggctcagaggcgctgtagcattcgctctggttatactgttggaccgcacaaaggtgccagcgaaggactatttcgtcgcaaccaccattgttgtggttttcttcacggtgatcgttcagggtctgaccattaaacctctggtgaaatggctcaaagtgaaacgaagcgaacaccataagcctaccctgaaccaggagctacatgagcacacttttgaccatatcctcgccgccgtggaggacgtagtgggccaccatggctatcattattggcgcgatcggtgggaacagttcgacaaaaagtatctgtcccaactgttaatgcgccgttccgcctacaggattcgggaccagatttgggatgtgtattataggttaaacattagggatgcaatatcatttgttgatcagggcgggcacgtgttatcaagcaccggcctaactctgccctcgatgcccagtagaaatagcgttgctgagacaagcgtgactaacctgctgcgtgagtccggaagcggggcatgtctcgaccttcaggtgattgatactgtgcgatcaggtagagatagggaagacgccgtgatgcaccatctgctgtgcgggggactgtacaagcccaggaggcggtataaggcctcttgtagccggcatttcatctctgaggacgctcaggagcggcaagacaaagaggtcttccagcagaatatgaagcgtaggcttgaatcgttcaaatctacaaagcataatatctgttttacaaaaagcaaaccccgccctcggaagactggacgccggaagaaagatggcgtcgcaaatgcagaagcaaccaatggaaaacacagaggattgggattccaggatacagcagccgtgatactgacggtcgaatcagaagaggaagaggaggaaagcgattcctcggaaaccgaaaaggaggatgatgaaggcataatattcgtcgcgcgggcgaccagcgaggttctgcaggaaggcaaggtctcagggagtttagaagtatgtccttccccccgcatcataccaccttcacctacttgtgctgaaaaggaactgccctggaagagtggacagggcgatctcgccgtatatgtttcctccgaaactacaaaaatcgtgcctgtggatatgcaaaccggatggaaccagagcatcagtagcttagagagtctagctagccccccctgcaaccaggctcccattctaacttgcctgccaccccatcccagaggaaccgaagaacctcaagtaccattgcatttgccctctgacccaaggagttcgtttgctttccctccctctctggcgaaagccggcaggtcacgaagcgagtctagcgcggatctgccccaacagcaggaactgcagcctcttatgggccacaaggaccacacccatctgtccccaggtacggcaaccagccattggtgcatccaatttaaccggggctccaggctgtag

SEQ ID NO: 147909 - DNA, 2691 bp, Artificial Sequence
  derived and/or modified sequence
atgctgcgggccgccctgagcctgctggccctgcccctggccggggctgctgaggagcccacccagaagccagagagccctggagagcccccacctggcctggagctgttccgctggcagtggcatgaggtggaggccccctacctggtggccctgtggatcctggtggccagcctggccaagatcgtgttccacctgagcaggaaggtgaccagcctggtgcctgagagctgcctgctgatcctgctgggcctggtgctgggcggcatcgtgctggccgtggccaagaaggccgagtaccagctggagcccggcaccttcttcctgttcctgctgccccccatcgtgctggacagcggctacttcatgcccagccgcctcttctttgacaacctgggcgccatcctgacctatgctgtggtgggcaccctgtggaatgccttcaccaccggggccgccctgtggggcctgcagcaggccggcctggtggccccccgggtgcaggccggcctgctggacttcctgctgtttggcagcctcatctctgctgtggaccctgtggccgtgctggccgtgtttgaggaggtgcacgtgaatgagaccctcttcatcatcgtgtttggagagagcctgctgaatgatgctgtgacagtggtgctgtacaaggtgtgcaacagctttgtggagatgggcagcgccaacgtgcaggccacagactacctgaagggcgtggccagcctgtttgtggtgtccctgggcggcgctgctgtgggcctggtgtttgccttcctgctggccctgaccacccgcttcaccaagagggtgcgcatcatcgagcccctgctggtgttcctgctggcctatgctgcctacctgacagctgagatggccagcctgagcgccatcctggccgtgaccatgtgtggcctgggctgcaagaagtatgtggaggccaacatcagccacaagagcaggaccaccgtgaagtacaccatgaagaccctggccagctgtgccgagaccgtcatcttcatgctgctgggcatctctgctgtggacagcagcaagtgggcctgggacagcggcctggtgctgggcaccctcatcttcatcctcttcttccgggccctgggcgtggtgctgcagacctgggtgctgaaccagttccggctggtgcccctggacaagattgaccaggtggtgatgtcctatggaggcctgcggggagctgtggcctttgccctggtgatcctgctggacaggaccaaggtgcctgccaaggactactttgtggccaccaccatcgtggtggtgttcttcaccgtgattgtgcagggcctgaccatcaagcccctggtgaagtggctgaaggtgaagaggtctgagcaccacaagcccaccctgaaccaggagctgcacgagcacacctttgaccacatcctggccgctgtggaggatgtggtgggccaccacggctaccactactggagggaccgctgggagcagtttgacaagaagtacctgagccagctgctgatgagaagaagtgcctaccgcatccgggaccagatctgggatgtgtactaccgcctgaacatcagagatgccatcagctttgtggaccagggcggccacgtgctgagcagcacaggcctgaccctgcccagcatgcccagcaggaacagcgtggccgagacctctgtgaccaacctgctgcgggagagcggcagcggggcctgcctggacctgcaggtgattgacacagtgcgcagcggccgggaccgggaggatgctgtgatgcaccacctgctgtgtggcggcctgtacaagccccggcggcgctacaaggccagctgcagccgccacttcatcagtgaagatgcccaggagcggcaggacaaggaggtgttccagcagaacatgaagaggcggctggagagcttcaagagcaccaagcacaacatctgcttcaccaagagcaagccccggcccaggaagacaggaagaaggaagaaggatggagtggccaatgctgaggccaccaacgggaagcaccggggcctgggcttccaggacacagctgctgtgatcctgactgtggagagcgaggaggaggaggaggagagtgacagcagcgagacagagaaggaggatgatgagggcatcatctttgtggcccgggccaccagcgaggtgctgcaggagggcaaggtgtctggcagcctggaggtgtgccccagcccccgcatcatcccccccagccccacctgtgccgagaaggagctgccctggaagagcggccagggcgacctggccgtgtatgtgtcctctgagaccaccaagatcgtgcctgtggacatgcagacaggctggaaccagagcatcagcagcctggagagcctggccagccccccctgcaaccaggcccccatcctgacctgcctgcccccccacccccggggcacagaggagccccaggtgcccctgcacctgcccagcgaccccaggagcagctttgccttcccccccagcctggccaaggccggccgcagccgctctgagagcagcgctgacctgccccagcagcaggagctgcagcccctgatgggccacaaggaccacacccacctgagccctggaacagccaccagccactggtgcatccagttcaacagaggcagccggctgtag

SEQ ID NO: 147910 - DNA, 2691 bp, Artificial Sequence
  derived and/or modified sequence
atgctgcgggccgccctgagcctgctggccctgcccctggccggcgcggctgaggaacccacacagaaacctgaatctcctggagagcctccaccggggctggagctctttcggtggcagtggcacgaagttgaggccccctatctggtggcgttgtggattctggtcgcgtctcttgcaaaaatcgtgtttcatctgtctcgcaaggtgacttcactggtccccgagagctgcctgctcattctgttgggcctggtacttggaggcatcgtgctcgccgttgcaaaaaaggctgaatatcaactggaacctgggacctttttcctctttctgctgcctcctatcgtgctggatagtggctactttatgcctagcaggctgtttttcgataacctaggcgctattctcacgtatgcggttgtgggcaccctctggaacgctttcaccaccggagccgcgctgtggggcctgcagcaggccggcctagtcgcgccaagggtccaagccgggctgctggatttcttactgtttggaagcctgatttctgcagttgatccggtggctgtcttggccgtgtttgaggaagtacatgttaatgagacgctcttcataattgtgtttggagagtccctgcttaatgatgccgtgaccgtggtgttatataaagtttgtaacagcttcgtggagatgggatccgcaaacgttcaggccacagactacctgaaaggtgtggcctctctgttcgtcgtcagtctgggaggcgccgcagttggactagtgttcgccttcctgctcgccctaactacacgtttcaccaaaagagtacgcattatcgagccgctgctggtctttttgctagcatacgctgcttatctcactgccgagatggcttccttaagcgctattcttgccgtgaccatgtgtgggcttggctgtaagaaatatgtcgaagccaacatttcacataagtctcgaacaactgttaagtatacaatgaagaccctcgccagctgtgcagaaacagtgatctttatgcttctcgggatcagtgccgtagactcgagcaagtgggcgtgggatagcgggttggtactaggcactcttatttttattctgtttttccgcgcactaggggtcgttttacagacatgggtccttaatcaattcagactggtgccattggataaaattgaccaggtcgtgatgtcctatggagggctgcgcggcgcagtggctttcgctctcgtaatcctgcttgatcgcactaaggtccctgcaaaagactactttgtcgcaactaccatagtcgtcgtattcttcacagtcattgttcaaggacttacaatcaaaccactggtgaagtggctcaaagttaagaggtcagagcaccataagcctacgctgaaccaggagttgcacgaacatacctttgatcatattctggccgccgtggaggacgtagttggccatcatgggtaccattattggagagaccggtgggagcagttcgataaaaagtacctgtcccagctcttgatgaggaggtccgcatacaggatcagggaccagatctgggacgtgtattacaggttaaacattagggacgcaatctctttcgtcgaccagggaggtcatgttttatcttccaccgggttaactctgccatcaatgccttctaggaactcagtcgccgaaacctcagtgactaatctgcttagagaatctggctctggggcctgccttgaccttcaagtgattgacactgttcgctcgggcagggacagagaagacgctgtaatgcaccatctgttatgtggaggcctgtataagccacgtcgtcggtacaaagcctcatgttcacggcacttcatttccgaggacgctcaagagcgccaggataaggaggtgtttcagcaaaacatgaagagacggcttgaatcttttaagtcaactaaacataacatatgttttaccaagtccaagccgaggccccggaagactggtcgcaggaaaaaggacggcgtggccaacgcggaggcgacaaacggcaagcaccgaggtctgggcttccaagacacagccgccgtcatcctaaccgtggagtccgaggaggaagaggaggaaagtgacagcagtgagacagagaaggaggatgatgagggtatcattttcgtcgcccgcgccacctcggaggtgcttcaggaaggaaaagtgagcggctctctagaggtgtgcccaagccctcgcatcattccgccctcccccacctgtgctgagaaggagctgccatggaagtcaggccagggggacttagctgtgtatgtatctagcgagaccaccaagatcgtaccagtggatatgcagactggctggaaccagagcatctctagcttggaaagcctggcaagcccgccctgcaatcaggcccccattctgacctgtttgcctccccatccgcggggcacagaggaaccccaagtcccactgcatctcccctcagaccccagatctagctttgcctttcccccttccctggcaaaagcagggaggagtaggtccgagagctccgccgatctaccccaacaacaggagctccagccccttatggggcacaaggaccatacacatttatcgccaggtacagcaacatctcactggtgtattcagtttaaccgggggtctaggctatag

SEQ ID NO: 147911 - DNA, 2691 bp, Artificial Sequence
  derived and/or modified sequence
atgctccgtgctgctttgagtctgcttgctctgcctttggctggagccgctgaagagccaacacagaaacctgaatcccctggtgagccaccgccagggctcgagctgtttaggtggcaatggcacgaggtggaagcgccttacctcgtggctctctggatcctggtggcttccttagccaagatcgtgtttcacctgagccggaaggtcaccagcttggtcccagaatcctgcctgctgatcttactagggttagtgctggggggtatagttttagccgttgccaaaaaagctgaataccagttagagcccggaaccttcttcttattccttttgccccctatcgtgctcgacagtggttactttatgcctagtaggctgttctttgataacctgggagctatcctgacatacgccgttgtgggcaccctatggaatgcctttactaccggggctgccctatggggcctccagcaggctggcctggtggctccaagggtgcaggctggtttgcttgacttcctactgtttggctcattaatttcagcagtcgatcccgtcgcagtcctggctgtgtttgaggaagttcatgtgaacgagactctgttcatcatcgtcttcggggagtctcttctcaatgatgcggtgaccgtggtcctatacaaagtgtgtaattcttttgttgagatggggagcgcaaacgtgcaggctacagactatctcaagggcgttgcctctctatttgtggtcagcctcggaggcgctgccgtagggttggtgttcgctttccttctggctctgactacgcgatttactaaaagagtgcgaatcattgagcccttactcgttttcctcctggcctatgctgcctacttaactgctgagatggccagcctgtctgccatattggcagtgacaatgtgtggcttaggatgcaaaaaatacgtcgaagcaaatattagccacaagtctcgtaccactgtcaaatatactatgaagactctggcatcttgcgcagaaaccgtcatcttcatgctgttgggaatttccgcagtcgacagctcaaagtgggcctgggacagcggacttgtcctgggaaccctgattttcatcttattcttcagagctcttggagtcgtgctgcagacctgggttcttaaccagtttcggctggtgcccctggataaaatagatcaggtcgtgatgagctatggcggactacggggagccgtggcattcgccctggtgatcttgttggatcgtacgaaagtccctgctaaggactacttcgttgcaacaacgattgtagttgtgtttttcacagtgatcgtgcaagggctgacaataaagcctctcgtgaaatggctgaaggttaagaggagcgaacatcataaacctaccctcaaccaggagcttcacgaacacactttcgaccatatactagcggcagtggaggacgttgtgggccaccatggctaccattactggcgcgaccgttgggagcagtttgacaagaaatatttaagtcagctcctcatgcgccgatcagcatacagaatccgggatcagatttgggacgtatattatcgcttgaacattagggacgcaattagctttgttgaccaggggggtcatgtcctcagcagcaccggactgacactcccttctatgccttcccggaattctgtagctgaaacatctgtgactaatttgttgcgcgaatctggtagcggggcttgcctggacctccaagtgatcgatacagtaaggagtggaagagaccgggaagatgctgtgatgcatcacctgttgtgtggcggactgtacaagccccgaagacgatacaaggcatcatgctccaggcacttcataagcgaggacgctcaggagaggcaggacaaggaagtctttcaacagaacatgaagaggcggttggagtcctttaagagtaccaaacacaatatctgtttcactaagagcaagccaagaccaaggaagaccggaagaagaaaaaaagacggtgttgccaacgcagaagctacaaacggaaagcatcgaggcttgggctttcaggatactgcagcggtgatcttgactgtggaatctgaggaggaagaggaagaatcggactctagtgaaacggaaaaggaggatgacgaagggattatcttcgtggctcgggcaacatcagaggttctgcaggaagggaaagtgagcgggtcactggaggtttgtccttcacctcgcattatacctccctcgcctacgtgtgccgagaaagagctgccatggaagtccggccaaggcgacctcgccgtatacgtctcctccgagaccactaagatcgtacccgtagacatgcagaccggatggaaccagtctatttcctcattagagagtttagccagccccccatgcaatcaggcacctattctaacttgcctccctcctcaccctcggggtacagaggagccccaagtacccctgcacttgccttccgatccgaggagttcattcgcctttccgcctagtcttgctaaggctggacgaagccgatctgaaagctctgctgatttgccccagcagcaggagttgcaacccctcatggggcacaaggaccacacacacttgtcacctggaactgcaacatctcattggtgcatccagtttaacagaggatccaggttgtag

SEQ ID NO: 147912 - DNA, 3734 bp, Artificial Sequence
  derived and/or modified sequence
ggcggcggcgacgcggggccggcggccgtgcggtgccgggagggcggctgggcaggcggcaggatgctgcgcgccgccctgtccctgctcgcgctgcccctggcgggggcggccgaagagcccacccagaagccagagtccccgggcgagcctcccccaggcttagagctcttccgctggcagtggcacgaggtggaggcgccctacctggtggccctgtggatcctggtggccagtctggccaaaatcgtgtttcacctgtctcggaaagtaacatctctggtccctgagagctgcctgctgattttgctgggcctggtgctagggggaattgttttggctgtggccaagaaagctgagtaccagctggagccaggcaccttcttcctcttcctgctgcctcctattgtgttggactcaggctatttcatgcctagcaggctgttctttgacaacttgggtgccatcctcacctatgccgtggtaggcacactctggaatgccttcacaacaggcgctgccctctggggcttgcagcaggctggacttgtagcccctagggtgcaggctggcttactggacttcctgctgtttgggagcctcatctcggcggtggaccccgtggccgtgctagctgtctttgaggaggtgcacgtcaatgagactctctttatcatcgtctttggcgagtccctgctcaacgatgctgtcaccgtggtgctgtacaaggtctgcaactcctttgtggagatgggctctgccaatgtgcaggccactgactacctgaagggagtcgcctccctgtttgtggtcagtctgggcggggcagccgtgggcttagtctttgccttcctcctggccctgaccacacgcttcaccaagcgggtccgcatcatcgagccgctgctggtcttcctcctcgcctacgcagcctacctcactgctgaaatggcctcgctctccgccattcttgcggtgaccatgtgtggcctgggctgtaagaagtacgtggaggccaacatctcccataagtcacgcacaactgtcaaatatacaatgaagactctagccagctgtgctgagaccgtgatcttcatgctgcttggcatctcagccgtggactcttctaagtgggcctgggattctgggctggtgctgggcaccctcatcttcatcctgttcttccgagccctcggcgtagtcctgcagacctgggtgctgaatcagttccggctagtccctctggacaagattgaccaagtggtgatgtcctatgggggcctgcggggggctgtggcctttgctctcgtcatcctactggataggaccaaggtccctgccaaggactactttgtagccaccactattgtagtggtcttcttcacagtcatcgtgcagggcttgaccatcaagccactggtcaaatggctgaaggtgaagaggagtgagcatcacaaacccaccctgaaccaggagctgcatgaacacacttttgaccacattctggctgcagtggaggacgttgtggggcaccatggctaccactactggagggacaggtgggagcagtttgacaagaaatacctgagtcagctgctgatgcgacgatcagcctaccgcatccgggaccagatctgggatgtgtactacaggcttaacatccgggatgccatcagctttgtggaccagggaggccacgtcttgtcttccacaggtctcactctgccttctatgcccagccgcaattctgtggcagaaacttctgtcaccaacctgctgagggagagtggcagtggagcgtgtctggatctgcaggtgattgacacagtacgcagcggccgggatcgtgaggatgctgtgatgcatcatctgctctgcggaggcctctacaagccgcgccgtaggtacaaagccagctgcagtcgccacttcatctcagaggatgcgcaggagcggcaggacaaggaggtcttccagcagaacatgaagcggcggctggagtcctttaagtccaccaagcacaacatctgcttcaccaagagcaagccacgaccccgcaagactggccgcaggaagaaggatggtgtggcgaatgctgaggctacaaatgggaaacatcgaggcctgggctttcaggacacagctgctgtgatattaaccgtggagtctgaggaggaggaggaggagagcgacagttcagagacagagaaggaggacgatgaggggatcatctttgtggctcgtgccaccagtgaggttctccaagagggcaaggtctcaggaagccttgaggtgtgcccaagcccacgaatcattcccccctccccaacctgtgcagaaaaggagctcccctggaagagtgggcagggggacctggcagtgtacgtgtcctcggaaaccaccaagattgtgcctgtggacatgcagacgggttggaaccagagcatctcatccctggagagcctagcgtcccctccctgtaaccaggccccaattctgacctgcctgcctccccatccacggggcactgaagagccccaggtccctctccacctaccttctgatccacgctctagcttcgccttcccaccgagcctggccaaggctggccgctctcgcagtgagagcagcgctgacctcccccagcagcaggagctgcagcccctcatgggccacaaggaccacacccatctcagcccaggcaccgctacctcccactggtgcatccagttcaacagaggcagccggctgtagctcaaggcctcggggaggagcaggaggtggaatccctgtgggaagtgctccctgggtgatgggtagagccctcgaaacttgacatggggccagaagggcctgggttgaagtagtaattgggcttccttggagctagtcagaggggtcacctaagctggtcctcacaggggcctttctcaccacctccctgctcctaacccctgccactttctgtttcattaaggcctctactctggctcaggacccagtccaggccttctacgggctaggcccagagacttgggttgctggtcccccttccctagtgggttttcccggggactctataggcagctgctcctgcccgcaaagcaagagcatcattcctattcttcagtggatgccagccttccctgccccaactccctccccagcactgggtcagtggtgtcctggcagtgaggctccgtgaggggctggcccttagaggaactggggtgggaggtggggcaggcctcacccttgggctttgctgccctgttgggtcagctacccatagtccatttttttagggcagtgggaacctctgcctccacttcctgctttagccccttccctttgctgccaggtattggggtaatatttcctccttttccaagaccaaggccaagaggctgggccaggcttcagttcaggcctgttgcttaactggggtcaccctgggatctgctgctctgggtctaagtctagacctttctgatccttgggtctgggttttttgaggaggggacatagtggcctctgggctgccatgtcaccacctgaacattccccaaacagagaaggaacccagcatctcagggccactgctccattgctctgggggctgggatgcctggctaagcaggggctgacagggtggcaggtgactttctagggatcagcacctgccctgtgttttgtaccttgaacctaagatatattaaacatctctcagatgg

SEQ ID NO: 147913 - DNA, 3805 bp, Artificial Sequence
  derived and/or modified sequence
ggcggcggcgacgcggggccggcggccgtgcggtgccgggagggcggctgggcaggcggcaggatgctgcgcgccgccctgtccctgctcgcgctgcccctggcgggggcggccgaagagcccacccagaagccagagtccccgggcgagcctcccccaggcttagagctcttccgctggcagtggcacgaggtggaggcgccctacctggtggccctgtggatcctggtggccagtctggccaaaatcgtgtttcacctgtctcggaaagtaacatctctggtccctgagagctgcctgctgattttgctgggcctggtgctagggggaattgttttggctgtggccaagaaagctgagtaccagctggagccaggcaccttcttcctcttcctgctgcctcctattgtgttggactcaggctatttcatgcctagcaggctgttctttgacaacttgggtgccatcctcacctatgccgtggtaggcacactctggaatgccttcacaacaggcgctgccctctggggcttgcagcaggctggacttgtagcccctagggtgcaggctggcttactggacttcctgctgtttgggagcctcatctcggcggtggaccccgtggccgtgctagctgtctttgaggaggtgcacgtcaatgagactctctttatcatcgtctttggcgagtccctgctcaacgatgctgtcaccgtggtgctgtacaaggtctgcaactcctttgtggagatgggctctgccaatgtgcaggccactgactacctgaagggagtcgcctccctgtttgtggtcagtctgggcggggcagccgtgggcttagtctttgccttcctcctggccctgaccacacgcttcaccaagcgggtccgcatcatcgagccgctgctggtcttcctcctcgcctacgcagcctacctcactgctgaaatggcctcgctctccgccattcttgcggtgaccatgtgtggcctgggctgtaagaagtacgtggaggccaacatctcccataagtcacgcacaactgtcaaatatacaatgaagactctagccagctgtgctgagaccgtgatcttcatgctgcttggcatctcagccgtggactcttctaagtgggcctgggattctgggctggtgctgggcaccctcatcttcatcctgttcttccgagccctcggcgtagtcctgcagacctgggtgctgaatcagttccggctagtccctctggacaagattgaccaagtggtgatgtcctatgggggcctgcggggggctgtggcctttgctctcgtcatcctactggataggaccaaggtccctgccaaggactactttgtagccaccactattgtagtggtcttcttcacagtcatcgtgcagggcttgaccatcaagccactggtcaaatggctgaaggtgaagaggagtgagcatcacaaacccaccctgaaccaggagctgcatgaacacacttttgaccacattctggctgcagtggaggacgttgtggggcaccatggctaccactactggagggacaggtgggagcagtttgacaagaaatacctgagtcagctgctgatgcgacgatcagcctaccgcatccgggaccagatctgggatgtgtactacaggcttaacatccgggatgccatcagctttgtggaccagggaggccacgtcttgtcttccacaggtctcactctgccttctatgcccagccgcaattctgtggcagaaacttctgtcaccaacctgctgagggagagtggcagtggagcgtgtctggatctgcaggtgattgacacagtacgcagcggccgggatcgtgaggatgctgtgatgcatcatctgctctgcggaggcctctacaagccgcgccgtaggatagagctgaggacagagccctgtggcatgctactaaagactttcctccagactgacatggatcaagcatttttgggtacaaagccagctgcagtcgccacttcatctcagaggatgcgcaggagcggcaggacaaggaggtcttccagcagaatgaagcggcggctggagtcctttaagtccaccaagcacaacatctgcttcaccaagagcaagccacgaccccgcaagactggccgcaggaagaaggatggtgtggcgaatgctgaggctacaaatgggaaacatcgaggcctgggctttcaggacacagctgctgtgatattaaccgtggagtctgaggaggaggaggaggagagcgacagttcagagacagagaaggaggacgatgaggggatcatctttgtggctcgtgccaccagtgaggttctccaagagggcaaggtctcaggaagccttgaggtgtgcccaagcccacgaatcattcccccctccccaacctgtgcagaaaaggagctcccctggaagagtgggcagggggacctggcagtgtacgtgtcctcggaaaccaccaagattgtgcctgtggacatgcagacgggttggaaccagagcatctcatccctggagagcctagcgtcccctccctgtaaccaggccccaattctgacctgcctgcctccccatccacggggcactgaagagccccaggtccctctccacctaccttctgatccacgctctagcttcgccttcccaccgagcctggccaaggctggcctcgcagtgagagcagcgctgacctcccccagcagcaggagctgcagcccctcatgggccacaaggaccacacccatctcagcccaggcaccgctacctcccactggtgcatccagttcaacagaggcagccggctgtagctcaaggcctcggggaggagcaggaggtggaatccctgtgggaagtgctccctgggtgatgggtagagccctcgaaacttgacatggggccagaagggcctgggttgaagtagtaattgggcttccttggagctagtcagaggggtcacctaagctggtcctcacaggggcctttctcaccacctccctgctcctaacccctgccactttctgtttcattaaggcctctactctggctcaggacccagtccaggccttctacgggctaggcccagagacttgggttgctggtcccccttccctagtgggttttcccggggactctataggcagctgctcctgcccgcaaagcaagagcatcattcctattcttcagtggatgccagccttccctgccccaactccctccccagcactgggtcagtggtgtcctggcagtgaggctccgtgaggggctggcccttagaggaactggggtgggaggtggggcaggcctcacccttgggctttgctgccctgttgggtcagctacccatagtccatttttttagggcagtgggaacctctgcctccacttcctgctttagccccttccctttgctgccaggtattggggtaatatttcctccttttccaagaccaaggccaagaggctgggccaggcttcagttcaggcctgttgcttaactggggtcaccctgggatctgctgctctgggtctaagtctagacctttctgatccttgggtctgggttttttgaggaggggacatagtggcctctgggctgccatgtcaccacctgaacattccccaaacagagaaggaacccagcatctcagggccactgctccattgctctgggggctgggatgcctggctaagcaggggctgacagggtggcaggtgactttctagggatcagcacctgccctgtgttttgtaccttgaacctaagatatattaaacatctctcagatgg

SEQ ID NO: 147914 - protein, 366 aa, Artificial Sequence
  derived and/or modified sequence
MAAARHSTLDFMLGAKADGETILKGLQSIFQEQGMAESVHTWQDHGYLATYTNKNGSFANLRIYPHGLVLLDLQSYDGDAQGKEEIDSILNKVEERMKELSQDSTGRVKRLPPIVRGGAIDRYWPTADGRLVEYDIDEVVYDEDSPYQNIKILHSKQFGNILILSGDVNLAESDLAYTRAIMGSGKEDYTGKDVLILGGGDGGILCEIVKLKPKMVTMVEIDQMVIDGCKKYMRKTCGDVLDNLKGDCYQVLIEDCIPVLKRYAKEGREFDYVINDLTAVPISTSPEEDSTWEFLRLILDLSMKVLKQDGKYFTQGNCVNLTEALSLYEEQLGRLYCPVEFSKEIVCVPSYLELWVFYTVWKKAKP

SEQ ID NO: 147915 - protein, 275 aa, Artificial Sequence
  derived and/or modified sequence
MKELSQDSTGRVKRLPPIVRGGAIDRYWPTADGRLVEYDIDEVVYDEDSPYQNIKILHSKQFGNILILSGDVNLAESDLAYTRAIMGSGKEDYTGKDVLILGGGDGGILCEIVKLKPKMVTMVEIDQMVIDGCKKYMRKTCGDVLDNLKGDCYQVLIEDCIPVLKRYAKEGREFDYVINDLTAVPISTSPEEDSTWEFLRLILDLSMKVLKQDGKYFTQGNCVNLTEALSLYEEQLGRLYCPVEFSKEIVCVPSYLELFLLQFWRVRSSKCALEG

SEQ ID NO: 147916 - protein, 311 aa, Artificial Sequence
  derived and/or modified sequence
  misc_feature (1)..(1): Xaa can be any naturally occurring amino acid
XGGRAEAALLLAPRSVPAAARGLQGQSRVPAGRAALPGPGRPPALPRGLAAFALPLGESPGCRARADPPWDEGCRDCGGARRDPRGEPGLGACAERGCPRDLFLFLQAADGETILKGLQSIFQEQGMAESVHTWQDHGYLATYTNKNGSFANLRIYPHGLVLLDLQSYDGDAQGKEEIDSILNKVEERMKELSQDSTGRVKRLPPIVRGGAIDRYWPTADGRLVEYDIDEVVYDEDSPYQNIKILHSKQFGNILILSGDVNLAESDLAYTRAIMGSGKEDYTGKDVLILGGGDGGILCEIVKLKPKMVTMV

SEQ ID NO: 147917 - DNA, 1101 bp, Artificial Sequence
  derived and/or modified sequence
atggccgccgccagacacagcaccctggacttcatgctgggcgccaaggccgacggcgagaccatcctgaagggcctgcagagcatcttccaggagcagggcatggccgagagcgtgcacacctggcaggaccacggctacctggccacctacaccaacaagaacggcagcttcgccaacctgagaatctacccccacggcctggtgctgctggacctgcagagctacgacggcgacgcccagggcaaggaggagatcgacagcatcctgaacaaggtggaggagagaatgaaggagctgagccaggacagcaccggcagagtgaagagactgccccccatcgtgagaggcggcgccatcgacagatactggcccaccgccgacggcagactggtggagtacgacatcgacgaggtggtgtacgacgaggacagcccctaccagaacatcaagatcctgcacagcaagcagttcggcaacatcctgatcctgagcggcgacgtgaacctggccgagagcgacctggcctacaccagagccatcatgggcagcggcaaggaggactacaccggcaaggacgtgctgatcctgggcggcggcgacggcggcatcctgtgcgagatcgtgaagctgaagcccaagatggtgaccatggtggagatcgaccagatggtgatcgacggctgcaagaagtacatgagaaagacctgcggcgacgtgctggacaacctgaagggcgactgctaccaggtgctgatcgaggactgcatccccgtgctgaagagatacgccaaggagggcagagagttcgactacgtgatcaacgacctgaccgccgtgcccatcagcaccagccccgaggaggacagcacctgggagttcctgagactgatcctggacctgagcatgaaggtgctgaagcaggacggcaagtacttcacccagggcaactgcgtgaacctgaccgaggccctgagcctgtacgaggagcagctgggcagactgtactgccccgtggagttcagcaaggagatcgtgtgcgtgcccagctacctggagctgtgggtgttctacaccgtgtggaagaaggccaagccctag

SEQ ID NO: 147918 - DNA, 936 bp, Artificial Sequence
  derived and/or modified sequence
tgaggcggcagagccgaggccgccctgctgctggcccccagaagcgtgcccgccgccgccagaggcctgcagggccagagcagagtgcccgccggcagagccgccctgcccggccccggcagaccccccgccctgcccagaggcctggccgccttcgccctgcccctgggcgagagccccggctgcagagccagagccgaccccccctgggacgagggctgcagagactgcggcggcgccagaagagaccccagaggcgagcccggcctgggcgcctgcgccgagagaggctgccccagagacctgttcctgttcctgcaggccgccgacggcgagaccatcctgaagggcctgcagagcatcttccaggagcagggcatggccgagagcgtgcacacctggcaggaccacggctacctggccacctacaccaacaagaacggcagcttcgccaacctgagaatctacccccacggcctggtgctgctggacctgcagagctacgacggcgacgcccagggcaaggaggagatcgacagcatcctgaacaaggtggaggagagaatgaaggagctgagccaggacagcaccggcagagtgaagagactgccccccatcgtgagaggcggcgccatcgacagatactggcccaccgccgacggcagactggtggagtacgacatcgacgaggtggtgtacgacgaggacagcccctaccagaacatcaagatcctgcacagcaagcagttcggcaacatcctgatcctgagcggcgacgtgaacctggccgagagcgacctggcctacaccagagccatcatgggcagcggcaaggaggactacaccggcaaggacgtgctgatcctgggcggcggcgacggcggcatcctgtgcgagatcgtgaagctgaagcccaagatggtgaccatggtgtag

SEQ ID NO: 147919 - DNA, 1101 bp, Artificial Sequence
  derived and/or modified sequence
atggcagccgcccggcacagtacgctggattttatgctgggggccaaggctgacggcgaaacaattctcaagggactgcagagtattttccaagaacaaggcatggccgagagtgtccatacctggcaagaccacggatacctggcaacgtatactaataagaacggctcctttgcaaatctgaggatataccctcatggacttgttcttctggatctacagtcctatgacggcgatgcccagggaaaggaggaaatagactcgatcttgaataaagttgaggagagaatgaaagaattaagccaggactcgactggccgagtgaagcgcctcccccctattgttcggggaggagccatcgataggtattggcctacggccgacggaaggctcgttgaatacgacattgacgaggttgtctatgatgaggattccccttaccagaacataaagatattacacagtaagcaatttggaaacattctcattcttagcggggatgtcaatctggcagagtccgacctggcctatacgagggctattatgggctcaggtaaggaagactacaccggaaaggacgtgttgattttgggcggaggtgacggcggcatactctgtgagattgtgaagctaaagccaaagatggttacgatggtcgagattgatcagatggttattgacggttgcaaaaagtatatgagaaaaacatgtggcgacgttctagacaatttgaagggggattgctatcaggtcctgatcgaagactgtatcccagtcctgaagcgatacgcgaaggaaggccgggagtttgattacgttataaacgatctcaccgctgtccccatctcaacctctccagaagaggactcgacgtgggagttccttcgtctcatcctggacttatctatgaaagtgctgaagcaggacggtaagtacttcacccaaggcaattgtgtaaatctgaccgaagccttaagtctatatgaagagcagctgggtagactgtattgccccgtggagtttagcaaagaaatcgtctgtgtgccttcatatctcgagctgtgggtattttataccgtgtggaaaaaggcgaagccctag

SEQ ID NO: 147920 - DNA, 936 bp, Artificial Sequence
  derived and/or modified sequence
tgaggcggtagggcagaggccgcactgcttctggccccgaggtccgtgcccgcagcagcccgtggtctgcagggacagagccgggttcctgccgggagagccgctcttccaggcccaggaagacctcccgctcttccgaggggacttgccgccttcgctcttcccctcggcgagtccccgggttgccgggcccgcgccgacccaccttgggatgaagggtgtagggattgcgggggcgcccgtcgcgacccccgaggagaacccggcctcggcgcctgcgcagagcggggttgcccccgagatctgtttctttttctccaggccgcggacggcgaaactattctgaaaggactccagagcattttccaggaacagggcatggccgagtccgttcatacttggcaggaccatggatacctcgccacctataccaacaagaacgggagcttcgctaatctgaggatttatcctcacggcttggtgttattggatcttcaatcatacgatggcgatgcccaaggaaaggaagagatcgacagcatcctcaataaagtggaggaaaggatgaaggagctgagccaggactcgacgggcagagttaaacgcctccccccaatcgttagggggggcgctatcgacaggtactggcccactgctgatggcagactagtggagtatgatatagacgaagtggtgtacgatgaggacagcccataccaaaacattaaaatactacattctaaacagtttgggaacatacttattctgtccggggacgttaacctggccgagtccgacttagcttacacacgcgcgatcatgggctctggcaaggaagactacacgggcaaagacgtcttgattctcggagggggtgatggcggcatcttgtgcgagatcgtcaagctgaaacctaagatggtgaccatggtgtag

SEQ ID NO: 147921 - DNA, 1101 bp, Artificial Sequence
  derived and/or modified sequence
atggctgctgcccggcacagcaccctggacttcatgctgggcgccaaggcagatggagagaccatcctgaagggcctgcagagcatcttccaggagcagggcatggccgagagcgtgcacacctggcaggaccacggctacctggccacctacaccaacaagaatggcagctttgccaacctgcgcatctacccccacggcctggtgctgctggacctgcagagctatgatggagatgcccagggcaaggaggagattgacagcatcctgaacaaggtggaggagaggatgaaggagctgagccaggacagcacaggccgggtgaagaggctgccccccatcgtgcggggcggggccatcgaccgctactggcccacagcagatggccgcctggtggagtatgacattgatgaggtggtgtatgatgaggacagcccctaccagaacatcaagatcctgcacagcaagcagtttggaaacatcctgatcctgtctggagatgtgaacctggccgagagtgacctggcctacacccgggccatcatgggcagcggcaaggaggactacaccgggaaggatgtgctgatcctgggcggcggagatggcggcatcctgtgtgagatcgtgaagctgaagcccaagatggtgaccatggtggagattgaccagatggtgattgatggctgcaagaagtacatgaggaagacctgtggagatgtgctggacaacctgaagggggactgctaccaggtgctgattgaggactgcatccctgtgctgaagagatatgccaaggagggccgggagtttgattatgtgatcaatgacctgacagctgtgcccatcagcaccagccctgaggaggacagcacctgggagttcctgcggctcatcctggacctgtccatgaaggtgctgaagcaggacggcaagtacttcacccagggcaactgtgtgaacctgacagaggccctgagcctgtatgaggagcagctgggccgcctgtactgccctgtggagttcagcaaggagatcgtgtgtgtgcccagctacctggagctgtgggtgttctacacagtgtggaagaaggccaagccctag

SEQ ID NO: 147922 - DNA, 936 bp, Artificial Sequence
  derived and/or modified sequence
tgaggaggccgggcagaggccgccctgctgctggcccccaggtctgtgcctgctgctgcccggggcctgcagggccagagccgggtgcctgctggccgggccgccctgcccggccctggccggcccccagccctgccccggggcctggccgcctttgccctgcccctgggggagagccctggctgccgggcccgggctgaccccccctgggatgagggctgccgggactgtggcggggcccggcgggaccccagaggagagcccggcctgggcgcctgtgccgagcggggctgcccccgggacctcttcctgttcctgcaggccgcagatggagagaccatcctgaagggcctgcagagcatcttccaggagcagggcatggccgagagcgtgcacacctggcaggaccacggctacctggccacctacaccaacaagaatggcagctttgccaacctgcgcatctacccccacggcctggtgctgctggacctgcagagctatgatggagatgcccagggcaaggaggagattgacagcatcctgaacaaggtggaggagaggatgaaggagctgagccaggacagcacaggccgggtgaagaggctgccccccatcgtgcggggcggggccatcgaccgctactggcccacagcagatggccgcctggtggagtatgacattgatgaggtggtgtatgatgaggacagcccctaccagaacatcaagatcctgcacagcaagcagtttggaaacatcctgatcctgtctggagatgtgaacctggccgagagtgacctggcctacacccgggccatcatgggcagcggcaaggaggactacaccgggaaggatgtgctgatcctgggcggcggagatggcggcatcctgtgtgagatcgtgaagctgaagcccaagatggtgaccatggtgtag

SEQ ID NO: 147923 - DNA, 1101 bp, Artificial Sequence
  derived and/or modified sequence
atggccgccgcccggcacagcaccctggacttcatgctgggcgccaaagcggatggtgaaaccatcctcaaagggttacagagcatttttcaggaacaggggatggcggaaagcgtacacacttggcaagatcatgggtacctggcaacctacacaaacaaaaacggatcatttgccaaccttaggatttacccacatggattggttctcctggacctacagtcatatgacggggatgctcagggaaaggaagagatcgactcaattctaaacaaggttgaggagcgcatgaaggaactgtctcaggactcaacagggcgagtgaaaagactaccacccatcgtgaggggcggggccattgacaggtattggccaacagctgatggcagactcgtggagtatgatatcgacgaagtcgtctacgacgaggacagcccttaccagaacattaagatactgcactccaagcaatttgggaacatcctgatactcagtggggatgtgaatctggcagaatcggacctggcctacactcgggccatcatgggcagcggcaaggaagattacaccggcaaggatgtgctcattctcggggggggcgacggtgggatactctgcgaaatagtgaagctgaagccaaaaatggtgactatggttgagattgatcagatggttatcgatgggtgtaaaaagtatatgcgaaaaacctgtggcgacgtattggacaacctcaaaggcgattgctaccaggtcctcattgaggactgtatccctgtactgaaacggtacgctaaggagggaagagagtttgactatgttattaatgacctaaccgctgtccccatcagcacatcgcccgaagaggactccacctgggagtttctgcgactgattctggacctcagcatgaaggtcctgaagcaagatgggaagtattttacgcagggaaactgtgtaaacctgactgaagcattgagtctgtacgaggagcagctgggtagactgtattgccctgtcgagttcagcaaagaaattgtgtgtgtcccttcatatctggagttgtgggtcttctacacggtatggaaaaaggctaaaccttag

SEQ ID NO: 147924 - DNA, 936 bp, Artificial Sequence
  derived and/or modified sequence
tgaggcggccgggccgaggccgccctgctgctggccccccggagcgtgccagcagcggcacgcggactccaggggcagtcccgagtacctgcaggcagggcagccctaccaggtcctggccgaccccccgctcttccaagaggcctcgccgcattcgccctaccactgggggagtcccccgggtgcagagcccgcgccgaccctccgtgggacgaaggctgtagagactgtggaggtgctaggcgtgatccccgaggcgagcccggcctcggtgcttgtgctgagcgcggctgtcccagagatttatttctgtttcttcaggcagctgatggggaaaccattctgaaggggctgcagtctatattccaagagcagggtatggccgagagtgtccatacttggcaggaccacgggtacctcgccacttacactaataaaaatggatcatttgctaaccttcggatctatcctcatggtctagtgctactcgacctacaatcctatgatggcgacgcccaaggaaaggaggaaatcgactccatccttaacaaagtggaagagcggatgaaagagttgagtcaagactcaaccgggcgggtcaagcgcttgccgccaattgttcgagggggggccattgaccgatactggccaacggcagatgggcgtctggtggagtatgatatcgacgaagtcgtgtacgatgaggattccccttaccagaatataaagattctgcatagcaagcagtttggaaacatattaatcttatccggcgatgtcaacctggccgaaagcgaccttgcctatactagggccatcatggggtctgggaaggaggattacaccggcaaagacgttctaatacttggcggaggggacgggggaatactctgcgaaatcgtaaaattgaagccaaaaatggtgaccatggtttag

SEQ ID NO: 147925 - DNA, 1101 bp, Artificial Sequence
  derived and/or modified sequence
atggctgccgcaaggcactcaacgctggacttcatgctgggggcaaaagccgatggcgaaacgatattgaagggactccagtcaatctttcaggaacaaggaatggctgagtccgtgcatacttggcaggatcacggctacctggccacgtataccaataagaatggctctttcgccaacttgaggatttacccccacggcttggttttgttagacctccagtcctacgatggcgacgcccagggtaaggaagagattgacagcatcctgaataaggtcgaagaaaggatgaaggagctgagccaggactctaccggtagggtcaaaaggttgccacccattgtgcgcggaggagcaattgatcgatattggccgactgctgacggacgtcttgttgagtatgacattgatgaggtagtctacgatgaagactctccatatcagaatatcaagatccttcactcaaaacagtttggaaatatcttgatactgagtggagatgtcaatctggccgaatcagacttagcgtacaccagggccattatgggcagcggaaaagaggattacactggtaaggacgtgctgattctggggggaggagacggtggtatactatgcgagatcgtcaaactgaaacctaagatggtgaccatggtggagatcgaccagatggtgatcgacggatgcaagaaatacatgcgaaagacctgcggggatgtactcgataatctgaaaggagactgctaccaggttctaatcgaagactgcatccccgtgcttaaaaggtatgccaaggaaggtcgggagtttgactatgtgattaatgatctcaccgccgtgccaatctccaccagccccgaggaggactcgacttgggaatttctccgactgatcctggacctctccatgaaggtgcttaagcaggatggaaagtacttcactcagggtaactgtgttaacttaaccgaagctctgtcactgtatgaggagcagcttggtagactgtattgtcctgtggagttctcgaaggagattgtgtgcgtgcccagctacttggagctgtgggtgttctacacagtgtggaagaaagctaaaccatag

SEQ ID NO: 147926 - DNA, 936 bp, Artificial Sequence
  derived and/or modified sequence
taaggtggcagggccgaagccgcactgcttctggcccctcgaagtgtacccgcagccgctagaggcctgcaggggcagtcacgggtgccggctggaagggccgctctgccaggacccggaagaccacccgcattaccacggggattagccgcattcgctcttccactcggagagagccccggttgcagagccagggccgaccctccatgggacgaagggtgtagagactgtggaggtgcccgacgagatccgaggggagagccaggcctcggtgcgtgtgccgaaagaggatgtccacgggacctgttcctgtttctgcaagccgctgacggggaaaccattctgaaaggcttgcagagcatattccaggaacaaggcatggccgaatccgtgcacacctggcaggatcacggatacctggccacctacaccaacaagaacgggtctttcgccaacttaaggatctatccccatggtttggtgttgctggacctgcagtcctatgatggggacgcccagggaaaggaggagatcgactctattctgaacaaggtagaggagagaatgaaagaactgtcacaggactcaaccggtcgagtgaagaggctacccccaatagtgcgaggcggtgccatcgaccgttactggcctactgcggatggacgactggttgagtacgacattgatgaggtggtctacgacgaggattccccatatcagaatatcaaaatccttcactctaagcagttcgggaacattttgattctgagcggcgatgtcaatctcgcggaatccgacctcgcgtatactcgcgcaataatgggcagtgggaaggaggattacactgggaaagatgtgctgatccttggtgggggtgacggcggtatcttgtgcgagattgttaaactaaagcccaaaatggtgacgatggtttag

SEQ ID NO: 147927 - DNA, 1837 bp, Artificial Sequence
  derived and/or modified sequence
gtttccaccattagcgaggcctcacacccggcgctccaagttcggggctggaggcgtcccggcttcctccctcccggagcgggaccggccccgcccccgcgccccgggtcgctcccggcggcccctcccacctcctagtcctggcctccccgggcgcagcacactcccagccggccgcagcctgacacgccgcgcggccccccagtctcccgcggctgctcccccaggcatggcacagggcctcgcctcactatggcagcagcacggcacagcacgctcgacttcatgctcggcgccaaagctgatggtgagaccattctaaaaggcctccagtccattttccaggagcaggggatggcggagtcggtgcacacctggcaggaccatggctatttagcaacctacacaaacaagaacggcagctttgccaatttgagaatttacccacatggattggtgttgctggaccttcagagttatgatggtgatgcgcaaggcaaagaagagatcgacagtattttgaacaaagtagaggaaagaatgaaagaattgagtcaggacagtactgggcgggtgaaacgattaccacccatagtgcgaggaggagccatcgacagatactggcccaccgccgacgggcgcctggttgaatatgacatagatgaagtggtatatgacgaagattcaccttatcaaaatataaaaattctacactcgaagcagtttggaaatattctcatccttagtggggatgttaatttggcagagagtgatttggcatatacccgggccatcatgggcagtggcaaagaagattacactggcaaagatgtactcattctgggaggtggagacggaggcatattgtgtgaaatagtcaaactaaaaccaaagatggtcactatggtagagattgaccaaatggtgattgatgggtgtaagaaatacatgcgaaaaacgtgtggcgatgtcttagacaatcttaaaggagactgctatcaggttctaatagaagactgtatcccggtactgaagaggtacgccaaagaagggagagaatttgattatgtgattaatgatttgacagctgttccaatctccacgtctccagaagaagattccacatgggagtttctcagactgattcttgacctctcaatgaaagtgttgaaacaggatgggaaatattttacacaggggaactgtgtcaatctgacagaagcactgtcgctctatgaagaacagctggggcgcctgtattgtcctgtggaattttcaaaggagatcgtctgtgtcccttcatacttggaattgtgggtattttacactgtttggaagaaagctaaaccctgaagatcagtagcccctaatcacatgtgctgcaaatagccttcctgacctccatatgctgtacatgacatcaaaatgagtcaggcaattgattgtgaattccttaaagttttcctttttttaataattatttttaatttaaaaaagcaaatggaaaatgtatattttgatgagcttagggtgttttttttttgaaagtcagctgaaggatggttagacagcacagcgaagactgctaaatgcactgaccccccccattagaatgtgatttttgttcctttttatttctctgtgggcttttgtttttgtttttgttttggtagatcttcaatttggatatttggaggagtgaacatcgttgttttgctggagggaagatcttgatggtgtttctttccccaaaaattgacttagatattaaaatttggtgcttataagagagagttaaaaaaaaataggattgcttcaattaaaattacaaaagaga

SEQ ID NO: 147928 - DNA, 931 bp, Artificial Sequence
  derived and/or modified sequence
cggcggtcgggcggaggccgcgctcctgctggctccgcgctccgtcccggccgcagctcggggcctgcaggggcagtcccgggtgcccgccggccgcgccgcccttccgggccctggccgtccacccgcgctcccacgcgggctcgccgccttcgcgctcccgctcggggagtccccgggctgccgggcgcgggcggaccccccatgggacgagggttgcagggactgcggcggagcgaggcgtgacccgcgcggcgagcccgggctgggggcgtgcgccgagcggggctgcccgcgcgaccttttcctgttcttgcaggcggctgatggtgagaccattctaaaaggcctccagtccattttccaggagcaggggatggcggagtcggtgcacacctggcaggaccatggctatttagcaacctacacaaacaagaacggcagctttgccaatttgagaatttacccacatggattggtgttgctggaccttcagagttatgatggtgatgcgcaaggcaaagaagagatcgacagtattttgaacaaagtagaggaaagaatgaaagaattgagtcaggacagtactgggcgggtgaaacgattaccacccatagtgcgaggaggagccatcgacagatactggcccaccgccgacgggcgcctggttgaatatgacatagatgaagtggtatatgacgaagattcaccttatcaaaatataaaaattctacactcgaagcagtttggaaatattctcatccttagtggggatgttaatttggcagagagtgatttggcatatacccgggccatcatgggcagtggcaaagaagattacactggcaaagatgtactcattctgggaggtggagacggaggcatattgtgtgaaatagtcaaactaaaaccaaagatggtcactatggta

SEQ ID NO: 147929 - protein, 282 aa, Artificial Sequence
  derived and/or modified sequence
MAVPETRPNHTIYINNLNEKIKKDELKKSLYAIFSQFGQILDILVSRSLKMRGQAFVIFKEVSSATNALRSMQGFPFYDKPMRIQYAKTDSDIIAKMKGTFVERDRKREKRKPKSQETPATKKAVQGGGATPVVGAVQGPVPGMPPMTQAPRIMHHMPGQPPYMPPPGMIPPPGLAPGQIPPGAMPPQQLMPGQMPPAQPLSENPPNHILFLTNLPEETNELMLSMLFNQFPGFKEVRLVPGRHDIAFVEFDNEVQAGAARDALQGFKITQNNAMKISFAKK

SEQ ID NO: 147930 - protein, 203 aa, Artificial Sequence
  derived and/or modified sequence
MAVPETRPNHTIYIIAKMKGTFVERDRKREKRKPKSQETPATKKAVQGGGATPVVGAVQGPVPGMPPMTQAPRIMHHMPGQPPYMPPPGMIPPPGLAPGQIPPGAMPPQQLMPGQMPPAQPLSENPPNHILFLTNLPEETNELMLSMLFNQFPGFKEVRLVPGRHDIAFVEFDNEVQAGAARDALQGFKITQNNAMKISFAKK

SEQ ID NO: 147931 - DNA, 306 bp, Artificial Sequence
  derived and/or modified sequence
atgtcccacgagaaatcttttctggtatctggagacaactatcctcctcccaaccctggctaccccggcggaccgcagccgccaatgccaccttacgcccagcctccctatcccggggcgccttacccacagcctccctttcagccttccccgtatgggcagccggggtacccccacgggcctagcccgtatccccagggaggttatccccagggtccatatcctcagggcggatacccacagggaccttacccacaagaagggtacccccaaggtccatacccccagggcggttatccacagtag

SEQ ID NO: 147932 - DNA, 849 bp, Artificial Sequence
  derived and/or modified sequence
atggctgtcccagagactcgaccaaatcacactatatacataaataacctgaatgagaaaattaagaaagacgaacttaaaaagagcttgtatgctatttttagccagtttggccagattctcgacatcctggtgagccgctccctcaagatgcgcgggcaggccttcgtaatcttcaaggaggtatctagcgcaaccaatgccctgaggtctatgcagggattccccttctacgataaacctatgaggatacaatacgccaagacggatagcgacatcatagctaaaatgaagggtacatttgtggagcgggaccgcaaacgtgaaaagcgcaagcctaaatcgcaggagactcctgccacaaagaaggccgtgcaggggggtggcgctacccctgtcgtaggtgctgtccaaggcccagtgcccgggatgcctccaatgacacaggccccgcggattatgcaccatatgccagggcagcccccttacatgcctccgccaggcatgatacctccacctggtctggccccaggtcagatccctcccggcgcaatgccaccccagcagctgatgccaggccagatgccccctgcccagccactctccgaaaatccacccaaccatatcctgtttcttaccaatttacctgaggagaccaacgaactcatgctctcaatgctgttcaatcagttccccggatttaaggaggtgagactggtccccggccggcacgatatcgcctttgtggaatttgacaacgaggttcaggccggcgcagctcgggacgccttacagggattcaagatcactcagaataacgccatgaagatctcctttgctaaaaagtag

SEQ ID NO: 147933 - DNA, 612 bp, Artificial Sequence
  derived and/or modified sequence
atggccgtccccgaaaccaggccaaatcacaccatctacataattgcgaaaatgaaagggacattcgtggagcgggaccggaagagggaaaaaaggaagcctaagtcccaggagacccccgcgaccaagaaggcagtccagggcggcggtgccacacccgtcgtgggtgccgttcagggacccgtccctggaatgcctccaatgactcaggcaccaaggatcatgcaccacatgcctggccaacctccttatatgccgccgccgggcatgatccccccccctgggctcgcccccggtcagatccctcctggcgcaatgcccccccaacagttgatgccaggtcagatgccgcccgcacaacctctgtcagaaaatccgcccaaccatattctgttcctaaccaacctgcctgaggaaacaaacgaactgatgcttagcatgctattcaaccaatttcctggcttcaaggaggtgagacttgttcccggccggcatgatattgctttcgtggagttcgataatgaggtccaggccggggcggcgagggacgcactgcaaggtttcaagattacccagaacaacgcgatgaagatcagcttcgccaagaagtag

SEQ ID NO: 147934 - DNA, 849 bp, Artificial Sequence
  derived and/or modified sequence
atggctgtgcctgagacccggcccaaccacaccatctacatcaacaacctgaatgagaagatcaagaaggatgagctgaagaagagcctgtatgccatcttcagccagtttggccagatcctggacatcctggtgagccgcagcctgaagatgaggggccaggccttcgtcatcttcaaggaggtgagcagcgccaccaatgccctgcgctccatgcagggcttccccttctatgacaagcccatgaggatccagtatgccaagacagacagcgacatcatcgccaagatgaagggcacctttgtggagcgggacaggaagcgggagaagaggaagcccaagagccaggagaccccagccaccaagaaggctgtgcagggcggcggggccacccctgtggtgggcgctgtgcagggccctgtgcccggcatgccacccatgacccaggccccccgcatcatgcaccacatgcctggccagcccccctacatgcctcctcctggcatgatccccccacctggcctggcccctggccagatccccccaggggccatgccaccccagcagctgatgcctggccagatgcccccagcccagcccctgtctgaaaatccacccaaccacatcctcttcctgaccaacctgcctgaggagaccaatgagctgatgctgtccatgctgttcaaccagtttcctggcttcaaggaggtgcggctggtgcccggcagacatgacatcgcctttgtggagtttgacaatgaggtgcaggccggggccgccagagatgccctgcagggcttcaagatcacccagaacaatgccatgaagatcagctttgccaagaagtag

SEQ ID NO: 147935 - DNA, 612 bp, Artificial Sequence
  derived and/or modified sequence
atggctgtgcctgagacccggcccaaccacaccatctacatcatcgccaagatgaagggcacctttgtggagcgggacaggaagcgggagaagaggaagcccaagagccaggagaccccagccaccaagaaggctgtgcagggcggcggggccacccctgtggtgggcgctgtgcagggccctgtgcccggcatgccacccatgacccaggccccccgcatcatgcaccacatgcctggccagcccccctacatgcctcctcctggcatgatccccccacctggcctggcccctggccagatccccccaggggccatgccaccccagcagctgatgcctggccagatgcccccagcccagcccctgtctgagaacccccccaaccacatcctcttcctgaccaacctgcctgaggagaccaatgagctgatgctgtccatgctgttcaaccagtttcctggcttcaaggaggtgcggctggtgcccggcagacatgacatcgcctttgtggagtttgacaatgaggtgcaggccggggccgccagagatgccctgcagggcttcaagatcacccagaacaatgccatgaagatcagctttgccaagaagtag

SEQ ID NO: 147936 - DNA, 849 bp, Artificial Sequence
  derived and/or modified sequence
atggccgtgcccgagacccggcccaaccacaccatctacatcaacaacctgaatgagaaaatcaagaaagacgaactgaagaagtccctgtacgccatttttagccagttcggtcaaatacttgatatattggttagtcggagtctgaagatgaggggtcaagctttcgttatctttaaagaggtgtcctctgcaacaaacgccctgcgctccatgcaaggctttcctttctatgacaagccaatgaggatccagtacgcgaaaacagactccgatatcatcgcgaaaatgaaaggaacattcgtggaacgcgaccgtaagagagagaaacgtaagccaaaaagccaggaaacgcctgctacgaaaaaagccgttcagggcgggggagctactcccgtggtcggagcggtgcaggggcctgttccaggcatgccgcccatgacgcaagctccacggataatgcatcacatgccaggacagccgccatatatgccacccccaggcatgattcccccaccaggtctggcccctgggcagattccacccggggctatgccccctcaacaactcatgcctggtcagatgcctcccgcacaacctctctcagagaacccccctaaccacattcttttcctgactaacttgcctgaagaaactaatgagttgatgctctctatgttgttcaaccagttcccggggttcaaagaggtgagactggtgcctggaagacacgacatcgcctttgtggagttcgacaatgaagttcaggccggagctgctcgcgatgcacttcagggcttcaaaataactcagaataatgccatgaagatttcatttgcaaagaaatag

SEQ ID NO: 147937 - DNA, 612 bp, Artificial Sequence
  derived and/or modified sequence
atggccgtgcccgagacccggcccaaccacaccatctacatcatcgcaaagatgaagggcacatttgtcgaacgggatcggaagcgggagaaaaggaagccaaagagccaagaaaccccagccaccaagaaggctgtgcagggcggcggtgccacccctgtggtaggggccgtgcaggggcccgttccgggcatgccaccgatgactcaggcgccacgaatcatgcaccatatgcctggacagcccccctacatgccccctccgggaatgatacctccacccgggctggctcctgggcaaattcctcccggagccatgccaccacaacagctgatgcctggccagatgcctccagcccagccactgtctgagaatcctcctaaccacattttgttcttgactaacctgccagaagaaacgaatgagttaatgctttccatgctatttaaccagtttccggggttcaaggaggtgcgcctcgtgcctggaagacacgacatagccttcgtcgagttcgacaatgaagttcaggcaggcgctgcccgagatgctttgcagggattcaaaataacccagaacaatgctatgaaaattagctttgcaaagaagtag

SEQ ID NO: 147938 - DNA, 849 bp, Artificial Sequence
  derived and/or modified sequence
atggcagtccctgagacccgccctaaccacacaatttatattaacaatctgaatgagaaaatcaagaaggacgaactaaaaaaatcgttgtacgccattttctctcagtttggtcagatcctggacattctggtctcacggtcactcaaaatgagaggacaagcttttgtgattttcaaagaggtttctagcgccacgaatgcactaagaagcatgcagggtttccccttctacgacaaacccatgcggatacagtacgcgaagactgactctgatatcatcgccaagatgaagggtacctttgttgaaagggaccgaaagagggaaaagaggaagccaaaatctcaggaaacccctgctaccaaaaaggctgtgcaggggggtggggctactccagtcgtgggagctgttcagggcccagtgcccggaatgccacctatgacccaagcccctaggatcatgcaccatatgcccggtcagccaccatacatgcctcctccaggcatgataccgcctccgggactggcaccagggcaaatcccgccaggggcaatgcccccacaacagctcatgcccggtcagatgccccctgctcagccattaagcgagaatccacccaaccacattctctttcttactaatctgccagaggaaactaacgaactgatgttaagcatgctcttcaatcagtttcccggattcaaagaagtgcgattggttccaggccgtcacgacattgcctttgttgagtttgataatgaagttcaagctggcgctgccagagacgcgctgcaaggctttaaaataactcaaaataacgctatgaaaatcagcttcgctaagaagtag

SEQ ID NO: 147939 - DNA, 612 bp, Artificial Sequence
  derived and/or modified sequence
atggccgtgcccgagactcggccaaaccatacaatctatattatcgccaagatgaaggggacattcgtggaacgagaccgcaaaagagagaaacgtaagcctaagtctcaggagacccctgctactaagaaagccgtgcagggagggggtgctactccagtggtaggcgcagtgcaggggcctgtgcctggcatgcccccaatgacccaagcccctaggattatgcatcatatgcccggacaacccccatacatgcctcccccaggaatgatacccccacctggtctggctccaggccaaattccccctggtgcaatgccaccgcagcagctgatgccaggacagatgcctccagctcagcccctttccgagaaccctccaaaccacattctcttccttacgaatttgcctgaggaaaccaacgaactgatgctgtcaatgctgttcaatcagttcccagggttcaaggaggttcgactggtgccaggtcgtcatgacatcgcttttgtggaatttgacaacgaagtgcaagctggcgctgccagagacgcactgcaaggattcaaaataacgcagaacaatgcaatgaagatctcttttgcgaagaaatag

SEQ ID NO: 147940 - DNA, 1628 bp, Artificial Sequence
  derived and/or modified sequence
ggcggggccaggagagaaagctttgtggtttggtctcagggaagtagcaggcgccggttgagagaactacggccctgtcggaaggtaacctccggtgcaaacgaccatcggcggcaggcgagcggtacgcttggcgtccgggccttcctgggcccgtctgaggaaacttgctgctcgaggccaggctgcctaggacctgtcccttttttctatactggctcccacatccgggttttttctccgggacggcccttcggatgcttgggccaatgggaatcgccatttagggtgctccgcccaccgggtcgcgtagagcatcctggaagtcgtagtaaatctctcgagagttctctccgcacgcgggctggagaagcgggtcctacgcacgctttgttgtcgcgctttgcctccgtccttgcccctactcccgccttacctgacttccttttcggaggaagatccttgagcagccgacgttgggacaaaggatttggagaaacccagggctaaagtcacgtttttcctcctttaagacttacctcaacacttcactccatggcagttcccgagacccgccctaaccacactatttatatcaacaacctcaatgagaagatcaagaaggatgagctaaaaaagtccctgtacgccatcttctcccagtttggccagatcctggatatcctggtatcacggagcctgaagatgaggggccaggcctttgtcatcttcaaggaggtcagcagcgccaccaacgccctgcgctccatgcagggtttccctttctatgacaaacctatgcgtatccagtatgccaagaccgactcagatatcattgccaagatgaaaggcaccttcgtggagcgggaccgcaagcgggagaagaggaagcccaagagccaggagaccccggccaccaagaaggctgtgcaaggcgggggagccacccccgtggtgggggctgtccaggggcctgtcccgggcatgccgccgatgactcaggcgccccgcattatgcaccacatgccgggccagccgccctacatgccgccccctggtatgatccccccgccaggccttgcacctggccagatcccaccaggggccatgcccccgcagcagcttatgccaggacagatgccccctgcccagcctctttctgagaatccaccgaatcacatcttgttcctcaccaacctgccagaggagaccaacgagctcatgctgtccatgcttttcaatcagttccctggcttcaaggaggtccgtctggtacccgggcggcatgacatcgccttcgtggagtttgacaatgaggtacaggcaggggcagctcgcgatgccctgcagggctttaagatcacgcagaacaacgccatgaagatctcctttgccaagaagtagcaccttttccccccatgcctgccccttcccctgttctggggccacccctttcccccttggctcagccccctgaaggtaagtccccccttgggggccttcttggagccgtgtgtgagtgagtggtcgccacacagcattgtacccagagtctgtccccagacattgcacctggcgctgttaggccggaattaaagtggctttttgaggtttggtttttcacaatc

SEQ ID NO: 147941 - DNA, 971 bp, Artificial Sequence
  derived and/or modified sequence
gagaagcgggtcctacgcacgctttgttgtcgcgctttgcctccgtccttgcccctactcccgccttacctgacttccttttcggaggaagatccttgagcagccgacgttgggacaaaggatttggagaaacccagggctaaagtcacgtttttcctcctttaagacttacctcaacacttcactccatggcagttcccgagacccgccctaaccacactatttatatcattgccaagatgaaaggcaccttcgtggagcgggaccgcaagcgggagaagaggaagcccaagagccaggagaccccggccaccaagaaggctgtgcaaggcgggggagccacccccgtggtgggggctgtccaggggcctgtcccgggcatgccgccgatgactcaggcgccccgcattatgcaccacatgccgggccagccgccctacatgccgccccctggtatgatccccccgccaggccttgcacctggccagatcccaccaggggccatgcccccgcagcagcttatgccaggacagatgccccctgcccagcctctttctgagaatccaccgaatcacatcttgttcctcaccaacctgccagaggagaccaacgagctcatgctgtccatgcttttcaatcagttccctggcttcaaggaggtccgtctggtacccgggcggcatgacatcgccttcgtggagtttgacaatgaggtacaggcaggggcagctcgcgatgccctgcagggctttaagatcacgcagaacaacgccatgaagatctcctttgccaagaagtagcaccttttccccccatgcctgccccttcccctgttctggggccacccctttcccccttggctcagccccctgaaggtaagtccccccttgggggccttcttggagccgtgtgtgagtgagtggtcgccacacagcattgtacccagagtctgtccccagacattgcacctg

SEQ ID NO: 147942 - DNA, 849 bp, Artificial Sequence
  derived and/or modified sequence
atggccgtgcccgagaccagacccaaccacaccatctacatcaacaacctgaacgagaagatcaagaaggacgagctgaagaagagcctgtacgccatcttcagccagttcggccagatcctggacatcctggtgagcagaagcctgaagatgagaggccaggccttcgtgatcttcaaggaggtgagcagcgccaccaacgccctgagaagcatgcagggcttccccttctacgacaagcccatgagaatccagtacgccaagaccgacagcgacatcatcgccaagatgaagggcaccttcgtggagagagacagaaagagagagaagagaaagcccaagagccaggagacccccgccaccaagaaggccgtgcagggcggcggcgccacccccgtggtgggcgccgtgcagggccccgtgcccggcatgccccccatgacccaggcccccagaatcatgcaccacatgcccggccagcccccctacatgcccccccccggcatgatccccccccccggcctggcccccggccagatcccccccggcgccatgcccccccagcagctgatgcccggccagatgccccccgcccagcccctgagcgagaacccccccaaccacatcctgttcctgaccaacctgcccgaggagaccaacgagctgatgctgagcatgctgttcaaccagttccccggcttcaaggaggtgagactggtgcccggcagacacgacatcgccttcgtggagttcgacaacgaggtgcaggccggcgccgccagagacgccctgcagggcttcaagatcacccagaacaacgccatgaagatcagcttcgccaagaagtag

SEQ ID NO: 147943 - DNA, 612 bp, Artificial Sequence
  derived and/or modified sequence
atggccgtgcccgagaccagacccaaccacaccatctacatcatcgccaagatgaagggcaccttcgtggagagagacagaaagagagagaagagaaagcccaagagccaggagacccccgccaccaagaaggccgtgcagggcggcggcgccacccccgtggtgggcgccgtgcagggccccgtgcccggcatgccccccatgacccaggcccccagaatcatgcaccacatgcccggccagcccccctacatgcccccccccggcatgatccccccccccggcctggcccccggccagatcccccccggcgccatgcccccccagcagctgatgcccggccagatgccccccgcccagcccctgagcgagaacccccccaaccacatcctgttcctgaccaacctgcccgaggagaccaacgagctgatgctgagcatgctgttcaaccagttccccggcttcaaggaggtgagactggtgcccggcagacacgacatcgccttcgtggagttcgacaacgaggtgcaggccggcgccgccagagacgccctgcagggcttcaagatcacccagaacaacgccatgaagatcagcttcgccaagaagtag

SEQ ID NO: 147944 - protein, 439 aa, Artificial Sequence
  derived and/or modified sequence
MPAIAVLAAAAAAWCFLQVESRHLDALAGGAGPNHGNFLDNDQWLSTVSQYDRDKYWNRFRDDDYFRNWNPNKPFDQALDPSKDPCLKVKCSPHKVCVTQDYQTALCVSRKHLLPRQKKGNVAQKHWVGPSNLVKCKPCPVAQSAMVCGSDGHSYTSKCKLEFHACSTGKSLATLCDGPCPCLPEPEPPKHKAERSACTDKELRNLASRLKDWFGALHEDANRVIKPTSSNTAQGRFDTSILPICKDSLGWMFNKLDMNYDLLLDPSEINAIYLDKYEPCIKPLFNSCDSFKDGKLSNNEWCYCFQKPGGLPCQNEMNRIQKLSKGKSLLGAFIPRCNEEGYYKATQCHGSTGQCWCVDKYGNELAGSRKQGAVSCEEEQETSGDFGSGGSVVLLDDLEYERELGPKDKEGKLRVHTRAVTEDDEDEDDDKEDEVGYIW

SEQ ID NO: 147945 - protein, 139 aa, Artificial Sequence
  derived and/or modified sequence
MPAIAVLAAAAAAWCFLQVESRHLDALAGGAGPNHGNFLDNDQWLSTVSQYDRDKYWNRFRDDDYFRNWNPNKPFDQALDPSKDPCLKVKCSPHKVCVTQDYQTALCVSRKHLLPRQKKGNVAQKHWVGPSNLVKCKPC

SEQ ID NO: 147946 - DNA, 4846 bp, Artificial Sequence
  derived and/or modified sequence
cgagccagcgagcgagcagagcacatcgctgcgggctcacaaagcggccagacgctcggcggcggcgtgtggcaggagcgcaggggcgcgagccggcgatcagccttcccggcgaccgtgccgcgggagctcgagcaactcggactaggggacccgggccggcccccaagatgccggcgatcgcggtgttggcggcggccgccgcggcgtggtgcttcctccaagtcgagagccggcacctggacgcgctcgccggaggcgcgggccccaaccacggcaatttcctagacaatgaccagtggctgagcaccgtctcccagtacgaccgggacaagtactggaaccgctttcgagacgatgattatttcagaaactggaatcccaacaagccctttgaccaagccctggacccatccaaggacccctgcctgaaggtaaaatgcagccctcacaaagtgtgtgtgacccaggactaccagaccgccctgtgtgtcagccgcaagcacctgctccccaggcaaaagaaggggaacgtggcccagaaacactgggttggaccttcgaatttggtcaagtgcaagccctgtcccgtggcacagtcagccatggtctgcggctcagatggccactcctacacatccaagtgcaaattggagttccatgcttgttctactggcaaaagcctcgccaccctctgtgatgggccctgtccctgtctcccagagcctgagccaccaaagcacaaggcagaaaggagtgcctgcacagacaaggagttgcggaaccttgcctcccggctgaaggattggtttggagctctccacgaggatgcgaacagagtcatcaagcccaccagctccaacacagcccaaggcaggtttgacactagcatcctgcccatctgcaaggactccctgggctggatgttcaacaagttggacatgaactatgacctcctgcttgacccttcagagatcaatgccatctacctggataagtacgagccctgtatcaagcctcttttcaactcgtgtgactccttcaaggatggcaagctttctaacaatgagtggtgctactgcttccagaagcctggaggtctcccttgccagaatgaaatgaacagaattcagaagctgagtaaggggaaaagcctgttgggggccttcatacctcggtgtaatgaggagggctattacaaagccacacagtgccacggcagcacggggcagtgctggtgtgtggacaaatatgggaatgagttggctggctccaggaaacagggtgctgtgagctgtgaagaggagcaggaaacctcaggggattttggcagtggtgggtccgtggtcctgctggatgacctagaatatgaacgggagctgggaccaaaggacaaagaggggaagctgagggtgcacacccgagccgtgacagaggatgatgaggatgaggatgatgacaaagaggatgaggtcgggtacatatggtagtgcccacaagaaagaggacacaagttttgcacaaaattgcaagtcacttcctattcctgcatttgtatctaagactccaaggcaccaaggtctcttctccattgttgctctctatacccgacctaaggtttggaagacaactgcttgttcccagaggattctgattttgcatatgtttgtatgggagaaagggtgttgtgttttttttttgttgttgtttattttttggatagggaagtcattggcttaattagagcctccttcctttctgtgagatttttccaacaagcatgtgatttacgtggaattctgacagtgcagggagccccaaccctcttaaatgtcaaagaccctttttgattacccacactggtggttattacagcatggttcccagccttacagtgtctaagtgcttctcttgtgtcctgtagatgttgtgaaaaagaaaaaaacaaaaaatacaccacactgtactttttccccctgcccccgttactgccggtgattattattaaaaattagtttttttcacatcattatatctggcttcctataaacaacagccttaattcagtcaagactccctttggggaattcattttattaaaaattggtgtctggatacttccctgtacatgcataaatatgcatgcatgtacagaaagactgtatgtgtgtgccttgcacacacacccatacctctcagaaaaagtgtttgggtatcttaaaaactcgaaaaacaatgataaatttctcagcttgtccagacctggaacaaaatttctggaataagaaatttgtattaaagtccttttttgcactaacagttggctcttgtagcctgcaggctgaggaagtctcttctctgtgcatcagcagagttactgaaagcctctgattgagaaaaaacctccgtctgcctaaatcacttttctcgcagaagccatgcgactcccacacgacacgggcagcttcacaagccatctctttcatttctgcttgaagccccttggctgcagcaatcctgtctgccataggtttcttccttccttacctactcaagggctttttctaaggcatgcacacatatctcctgttctctgagagtaccatggtgttccttaaaagaagaaaatttctaattctgaactcaatgttttgcttttactccctttctactgacaaatcatgataagggcacaaaagctgtacagatttttttttttaaccactcaatcccaaatggaggcctacaaagaacatcgtaataacacatggaagcaaaccctgggtttttaagagcaaattctgtccccccctcactcccccaagtgacaagatactaatgaagaaagttcttcaccatagtgtttgttttaactaaactcattggagtctagttccaaatttggtagggtcatcatctctacattccttaggatttctctccctatcaagctggcccagatacaagtaccaaacagtagtctctgaagttcccccatttccttcagtaccagtctataagctactgtccgccactgattttcatttatcagggtgtcctaatcagaatcagccacccaagcaagcctctctggcccacatatctatctcttgccttcccccatgaacttcagcctgtccacacaaaagccacataaactcaagcaagaaatatgttcagccaaaacatgattatagtggcagctgaccaatcccccatcccaaattgaccatttagatgtaccaactcaccttaaattagcatgttccaatccagtcggcattgcctgaatacagtagcatcatacctatagttggtcttagataagaaatgaactacttgatatagcaaagtcctttggcttcgtaaataaccctgaggttttgtacttactttccccataggaagacagaccataggcaaactctgttttgggatctcaactccatcacctttgtttcaatattttttttctctcttgaacaaaactgagataatttagaaaacaggtgcttaattgcaataaaattactatgaagtatattaaaaatcacgacattgtaaaatctcactttagatcatcaaagaaaaccattgttactatctcctttgagcttaggaaaatgtacaagagaacaaattaaaattgaaaaattgatttcacttagaaaaacttctaggaacagggtgaaccactgattttaatttgcctaattatcttatgacaagtatcaaattaagatgacacttaaagatccttagcattaacttaatgatggagaagagtgctcaatagacagttcccagtaaggtaatgagatgccattttcagagacattctaagaagatattttgattcattaaaacattaaataaaaagccctcctcagattggaacccccaaatcgatggagccacattaataatacttttcatgcctcactttgacatgacagcattcgatttttttaaagatctttaatactttccatgagtactaaagattgtaatgagttaccttatccttagaagtagaatgtttgctttcttcttcttggaaatagtcctccaaaaagtccacttgtaccagtgacaagaagtcacttgtatagtgaccaagtacacataaaatactgattataaaaatattgtaataaaccacttcctcatttgatacaggtattaagctgaatcctcactaattcacttttgaaaagttcttaatgaacagttttattcttattccatgaacagctcttttaatacaatttccttggtatccaacttaaatcccagaattttgttccaccatggttagttatttgccatatgaatgtattcttgtttctaccaatattctaggcatgagaataccttaatactgagttggagattttgtatctgtttctcctcctttacgcccattttcctacccacagcagcaaatgacaacgtgtctgtccaggtctgtccccctgctcatcccaggatgccactcacatttttttcttcttgttaccttgaccacgctgtacagtaacatccaagagcccattctacagtgggtggttttggtctttttataactttttctcaaagtcactgatgtttgttcctgttaaatgtatagcattgtaatgagagcccatcaaatcctgagtgtcagtttgttgtccctattgtagatgaaatagtgatgtagcaaaaacctagtaaattctgaatgcttttccacgtagacttatctggaatgtgaacacaactctttggttaatagtaaatgcttaactgtagtcctgagtaggtgcatttctgtctgtctcaataaattttactttgtctgcaa

SEQ ID NO: 147947 - DNA, 1320 bp, Artificial Sequence
  derived and/or modified sequence
atgcctgcaatagccgtcctggccgcagccgcagcggcttggtgcttcctccaggtggaaagccggcatctggacgcgctagccggtggcgcaggacccaatcatggtaactttttggataacgaccagtggttgtcaaccgtctcacagtacgacagggataagtactggaaccgctttagagatgatgattacttccggaactggaatcccaacaaaccgtttgaccaggctctagatcccagcaaagatccctgtctgaaggtgaaatgttctccgcacaaggtgtgtgtgacgcaggattatcaaacagccttgtgtgtgagcaggaaacatctgctgccaagacagaagaagggcaatgtagctcaaaagcattgggtggggccttctaacctggtgaaatgcaagccgtgtcctgtcgctcagtccgccatggtgtgcggaagcgatggacatagctatacgtccaagtgtaagctggagttccacgcctgtagtacgggaaagtcgctggcgacactgtgtgacggtccctgtccttgcctgcccgaacctgaaccccctaagcataaagcagagaggtctgcatgcaccgataaggagctgaggaatctggcttcgcggctgaaggattggttcggagccctgcatgaggacgccaaccgagttatcaaacccacatcctctaatacagcccagggaagatttgatacgagtatcctcccaatctgtaaggactccctcggatggatgttcaataagttagatatgaattacgatttactcctggatcccagtgagatcaacgctatttatttggacaagtacgagccttgcattaagccgctatttaactcctgtgacagctttaaggatggtaagctgagcaataacgaatggtgttactgcttccaaaaacccggtggcctgccatgccagaacgagatgaaccgcatccaaaaattaagtaaaggcaagtccttgctgggggcattcattccgagatgcaacgaagaggggtattacaaagcaactcagtgccatggctcaactggccagtgttggtgtgtggacaaatatgggaatgaactcgcgggaagcagaaagcaaggagctgtgtcttgcgaggaggaacaagagacgtcaggggatttcggttctggcggttccgtggtgctcctcgacgatctggaatatgagcgcgagctggggcctaaggacaaggagggcaagctcagagttcatacacgcgcagtcacagaagacgatgaggacgaggatgacgacaaagaggacgaagttgggtacatctggtag

SEQ ID NO: 147948 - DNA, 1320 bp, Artificial Sequence
  derived and/or modified sequence
atgccagctatcgccgtactggcagccgcagcagctgcctggtgttttctgcaggtggagtcaaggcatttggacgcattagcgggaggcgcaggacccaaccacggaaactttctggataatgaccagtggcttagtaccgtgagtcagtacgatcgcgacaagtactggaaccgattccgtgacgacgactacttccgcaattggaatcccaacaaaccatttgatcaggccctggatccgtccaaggatccctgtctgaaggttaaatgttcacctcacaaggtctgtgtcactcaggactatcagacagccctctgcgtaagtaggaaacaccttctcccgagacagaagaagggaaatgtcgctcagaagcactgggtaggcccatctaatttggtgaaatgtaaaccatgtccagtggcccaatcagccatggtgtgtggctctgatggacactcttacacttccaagtgtaaacttgaatttcatgcgtgctcaaccggaaagtccttagctacactgtgtgacggcccatgtccctgtttacccgagccggaacctcctaaacataaggctgagagaagcgcatgcacagacaaggaactgcggaacctcgccagtcggctgaaagactggtttggcgcactgcacgaggacgccaatagagttatcaaacccactagctcaaatacggcacaaggaagatttgacacctctatcttacctatctgcaaggatagtctgggctggatgtttaacaaactcgacatgaactatgatttgctgttggatccttcggagatcaatgctatttatctggataagtatgagccatgtatcaagccgctgtttaactcctgcgacagttttaaggacggaaagctctccaataatgaatggtgctactgtttccagaaacccggtggattgccttgtcaaaacgaaatgaataggatccaaaagctctctaagggaaagtccctcctgggtgcctttatccctcggtgtaacgaagagggctactacaaggctactcaatgtcacggatccactggacagtgttggtgtgtagacaaatacgggaatgaactcgcaggttctaggaagcaaggcgcagtcagctgtgaggaagaacaggagacttcaggcgacttcgggagcggtgggtcggtggtcctactggatgacttggagtatgagagggagctgggccctaaggacaaagaagggaagctccgggtgcacacaagagctgtaactgaagatgatgaggatgaagacgacgacaaggaagacgaagtaggctacatttggtag

SEQ ID NO: 147949 - DNA, 420 bp, Artificial Sequence
  derived and/or modified sequence
atgccagctatcgctgtgctagctgcggcagccgctgcctggtgttttctccaagtggagtccagacacttggatgcactggctgggggtgctggaccaaatcacggaaactttctagataatgatcagtggctatcaacagtcagtcagtacgaccgggacaaatactggaatagatttagggatgacgattacttccggaattggaatccaaacaagccattcgaccaggcactggatccctccaaggacccgtgtttgaaggtaaaatgcagccctcacaaagtctgcgtaacccaggactatcagaccgccctgtgcgtgtcccggaaacacttgctccctcgccagaagaaggggaatgtcgctcagaaacactgggtgggaccaagcaatctggtgaagtgtaaaccgtgctag

SEQ ID NO: 147950 - DNA, 1320 bp, Artificial Sequence
  derived and/or modified sequence
atgccagctatcgcagtactggccgccgccgccgccgcctggtgctttttacaagtggaatctcggcatctcgacgctctagccggtggagccggccctaaccacgggaatttcctggataatgatcaatggctcagcactgtgtctcagtatgatcgagataagtactggaaccgatttagggacgatgactatttccgaaattggaaccccaacaaacctttcgaccaggctcttgatccatctaaggatccttgcctaaaagtaaagtgttctcctcataaggtatgcgttacgcaggactatcagaccgctctttgcgtgagtcgtaaacacctgttgcctcgccagaagaagggaaacgtcgcacagaagcactgggtcggtccttctaacctcgtgaaatgtaaaccttgtcccgtggctcagagcgcaatggtttgcgggagcgacgggcactcctatacttcaaaatgcaaactcgagtttcatgcttgctccactggcaaatcgttggcaactctgtgcgacggcccctgtccttgccttccggaacccgaaccgcccaagcacaaggcagaaaggtctgcatgcacggacaaggagctgcgtaatctggcatctcggttgaaggattggtttggagccctgcatgaagatgccaatcgggtgattaaaccaactagttctaacaccgcccagggaagatttgacacttcgatcctgcctatttgcaaggattccctcgggtggatgttcaacaagctggacatgaattatgaccttctgctcgatccaagtgagattaatgcgatctatctcgacaaatacgaaccttgcatcaagccattgttcaactcatgtgatagcttcaaggacgggaaactgtctaacaacgagtggtgctactgcttccagaaacctggtgggcttccctgtcagaatgagatgaacagaatccagaagctaagcaaaggaaaatcgctattgggcgctttcattcccaggtgtaatgaagagggttactacaaagcaacacagtgtcatggtagtaccgggcaatgttggtgtgtcgataagtatggcaatgaactggctgggagcagaaaacagggcgctgtcagctgtgaggaagagcaggaaacaagtggagacttcggaagtggaggctcggtggtgcttttggatgacctagaatatgagagggagctcggccccaaggacaaggagggaaagcttagagtccataccagagctgtgacggaagacgacgaggacgaggatgacgacaaagaagatgaagttgggtatatttggtag

SEQ ID NO: 147951 - DNA, 1320 bp, Artificial Sequence
  derived and/or modified sequence
atgccagccatcgccgttcttgccgctgcggcagctgcatggtgtttcctgcaagtggagtctaggcacctggatgctctagcaggtggcgccgggcccaaccatggcaattttctggataacgatcagtggctaagcacggtctctcagtatgatagggacaagtactggaatcgcttccgcgatgatgactactttagaaattggaacccaaacaagccctttgatcaagccctcgacccctcgaaggatccatgtttaaaagtaaagtgttccccacataaagtatgtgtcacacaggattaccagaccgccctgtgcgtcagccggaaacatctcctgcctagacaaaagaaaggcaacgtggcccagaagcattgggtgggcccatccaatttagtgaagtgcaagccatgccctgtggctcagtcagcaatggtatgtgggtcagacggccacagctacacatccaaatgcaaactagaattccatgcttgttcgaccggtaaatctctggcaacactctgcgacggcccttgtccttgcttgcccgagccagaaccgccgaaacacaaggccgagcgatctgcatgtaccgacaaagagctacggaacctggcctctaggttgaaggattggtttggcgcactgcacgaggacgctaacagggtgatcaaaccgacctcttccaacactgcacagggccgtttcgacacaagcattcttccaatatgtaaagatagcttgggctggatgttcaataagctggacatgaactacgatctcctgttagatccctcagagatcaatgctatctatctagataaatacgaaccttgtatcaaaccgttgttcaattcgtgtgattcttttaaggacggtaaactttctaataacgaatggtgctactgttttcagaaacccggcgggcttccatgtcaaaacgagatgaataggatacaaaagctgtcaaagggcaagtcccttctgggcgccttcatcccgaggtgcaacgaggagggctattacaaggccactcagtgtcacggctcgaccggtcagtgctggtgcgtggacaagtatggcaatgagttagccggaagtagaaaacagggggccgttagctgcgaggaggaacaagagacttccggggattttggttcagggggttcggtggtactgctagatgacttggagtatgagagagagctgggacccaaagataaagaagggaaacttagagtgcatacacgcgctgttactgaggacgacgaggatgaagatgatgacaaggaagatgaggtgggctacatctggtag

SEQ ID NO: 147952 - DNA, 420 bp, Artificial Sequence
  derived and/or modified sequence
atgcccgcgatcgccgtcctcgctgccgctgctgccgcatggtgtttccttcaggtagaaagccgtcatttagacgctctcgcaggcggagccgggccaaaccacggcaattttttggacaacgaccaatggctctccaccgtttcgcagtacgaccgggacaagtactggaaccgatttcgcgatgatgattactttaggaactggaacccaaacaagccctttgaccaggccctcgatccctctaaagatccctgtctgaaggtgaagtgctccccccacaaagtgtgcgtgactcaggactaccagaccgcgctctgcgtctcccggaaacacctgttacctaggcaaaagaagggtaatgtcgcccagaagcactgggtaggtccatctaatctggtgaagtgtaaaccttgctag

SEQ ID NO: 147953 - DNA, 1320 bp, Artificial Sequence
  derived and/or modified sequence
atgccagctatcgcagtactggccgccgccgccgccgcctggtgctttttacaagtggaatctcggcatctcgacgctctagccggtggagccggccctaaccacgggaatttcctggataatgatcaatggctcagcactgtgtctcagtatgatcgagataagtactggaaccgatttagggacgatgactatttccgaaattggaaccccaacaaacctttcgaccaggctcttgatccatctaaggatccttgcctaaaagtaaagtgttctcctcataaggtatgcgttacgcaggattatcaaacggccctttgcgtatccagaaagcacttactaccccgtcagaagaaaggcaatgtcgctcaaaagcattgggttggcccatccaacctagtgaagtgtaaaccatgtccagtggcccaatcagctatggtgtgcggatccgacgggcactcatacacctctaagtgtaagctcgagtttcatgcttgttcaaccggcaaatccctggcaacgttatgcgacggcccatgcccatgtctcccagaaccggagcctcctaagcacaaagcggaacgctccgcatgtaccgacaaggaactgcgaaatctggcgtcacggctgaaagactggttcggagcgttgcatgaggacgccaacagagttattaaaccaacatcatctaacacggcacagggaagattcgacaccagtatcctgcccatttgtaaggactctctaggctggatgttcaacaagttagatatgaattacgatctactacttgatccatccgagattaatgctatttatctggacaagtatgagccatgtatcaaacctcttttcaacagctgcgattcttttaaggacggaaaactttcgaacaacgagtggtgctactgcttccagaaacctggtgggcttccctgtcagaatgagatgaacagaatccagaagctaagcaaaggaaaatcgctattgggcgctttcattcccaggtgtaatgaagagggttactacaaagcaacacagtgtcatggtagtaccgggcaatgttggtgtgtcgataagtatggcaatgaactggctgggagcagaaaacagggcgctgtcagctgtgaggaagagcaggaaacaagtggagacttcggaagtggaggctcggtggtgcttttggatgacctagaatatgaaagagagctggggccaaaagataaagagggtaagttgagggttcacacgagggctgtcactgaagatgatgaagatgaggacgacgataaagaggatgaggtaggttacatatggtag

SEQ ID NO: 147954 - DNA, 1320 bp, Artificial Sequence
  derived and/or modified sequence
atgcccgccattgcagtgttggctgctgccgcggctgcatggtgtttccttcaagtagaaagccgccacctcgacgccctggctggaggcgctggcccaaatcatggcaacttcctcgataacgatcagtggttgagcacagtgagccagtacgaccgcgacaagtattggaatagattcagggatgatgattatttcagaaattggaacccgaacaagcccttcgatcaggcactcgacccttccaaagacccgtgccttaaagtgaagtgctctcctcacaaggtatgcgtgacacaggattaccagacagccctctgtgtttcacgcaaacacctgttgccacgccagaaaaagggaaatgttgctcaaaagcactgggtcggcccttcaaacctcgttaaatgtaaaccgtgcccggtggcacagtcagcaatggtgtgcggtagtgacggccactcctacacttccaaatgcaaactggagttccacgcctgtagcacaggaaagagcctcgcaaccttgtgcgacggcccctgtccatgtttgcccgagcccgagccaccaaaacataaagccgaaaggtcagcatgtaccgataaggaactacgaaacttggccagcagactgaaggattggttcggggccctccacgaggatgccaaccgcgtaataaagcctacgagcagcaatactgcacaaggcagatttgacacttccattttacccatttgcaaggattccctagggtggatgtttaataaattagatatgaattatgacctcctgctggacccatcggagataaacgctatatacttggacaaatatgagccttgtatcaaacctttgttcaacagctgtgactctttcaaagacggtaagttatcaaacaacgagtggtgttattgttttcaaaaacccggtggactgccgtgtcagaacgaaatgaatcgcatccagaagctgagtaagggtaagtccctgctgggggcgtttattccacggtgtaacgaagaaggttactacaaggccacacagtgtcacgggtccacaggtcagtgctggtgcgtggataagtacgggaacgaactcgctggttcgagaaaacagggggccgtatcatgtgaggaagagcaagagactagcggcgatttcggcagtggggggagcgtggtgttactagacgatctggaatacgaacgagaactcggacctaaagacaaggagggcaaattaagggtgcacacgcgggcggtaacagaggacgatgaagatgaggacgatgacaaggaagacgaggtgggatacatttggtag

SEQ ID NO: 147955 - DNA, 420 bp, Artificial Sequence
  derived and/or modified sequence
atgcccgcgatcgccgtcctcgctgccgctgctgccgcatggtgtttccttcaggtagaaagccgtcatttagacgctctcgcaggcggagccgggccaaaccacggcaattttttggacaacgaccaatggctctccaccgtttcgcagtacgaccgggacaagtactggaaccgatttcgcgatgatgattactttaggaactggaacccaaacaagccctttgaccaggccctcgatccctctaaagatccctgtctgaaggtgaagtgctccccccacaaagtgtgcgtgactcaggattaccaaacagccttatgtgtctcgcgcaaacacctcttaccccggcagaagaaaggaaatgtcgcacagaagcactgggtgggaccatctaacctcgtcaagtgtaagccttgttag

SEQ ID NO: 147956 - DNA, 453 bp, Artificial Sequence
  derived and/or modified sequence
ctcttcgctcatcgccctgcgcgccctgccccgcagatgccggcgatcgcggtgttggcggcggccgccgcggcgtggtgcttcctccaagtcgagagccggcacctggacgcgctcgccggaggcgcgggccccaaccacggcaatttcctagacaatgaccagtggctgagcaccgtctcccagtacgaccgggacaagtactggaaccgctttcgagacgatgattatttcagaaactggaatcccaacaagccctttgaccaagccctggacccatccaaggacccctgcctgaaggtaaaatgcagccctcacaaagtgtgtgtgacccaggactaccagaccgccctgtgtgtcagccgcaagcacctgctccccaggcaaaagaaggggaacgtggcccagaaacactgggttggaccttcgaatttggtcaagtgcaagccctgt

SEQ ID NO: 147957 - DNA, 1361 bp, Artificial Sequence
  derived and/or modified sequence
atgccggcgatcgcggtgttggcggcggccgccgcggcgtggtgcttcctccaagtcgagagccggcacctggacgcgctcgccggaggcgcgggccccaaccacggcaatttcctagacaatgaccagtggctgagcaccgtctcccagtacgaccgggacaagtactggaaccgctttcgagacgatgattatttcagaaactggaatcccaacaagccctttgaccaagccctggacccatccaaggacccctgcctgaaggtaaaatgcagccctcacaaagtgtgtgtgacccaggactaccagaccgccctgtgtgtcagccgcaagcacctgctccccaggcaaaagaaggggaacgtggcccagaaacactgggttggaccttcgaatttggtcaagtgcaagccctgtcccgtggcacagtcagccatggtctgcggctcagatggccactcctacacatccaagtgcaaattggagttccatgcttgttctactggcaaaagcctcgccaccctctgtgatgggccctgtccctgtctcccagagcctgagccaccaaagcacaaggcagaaaggagtgcctgcacagacaaggagttgcggaaccttgcctcccggctgaaggattggtttggagctctccacgaggatgcgaacagagtcatcaagcccaccagctccaacacagcccaaggcaggtttgacactagcatcctgcccatctgcaaggactccctgggctggatgttcaacaagttggacatgaactatgacctcctgcttgacccttcagagatcaatgccatctacctggataagtacgagccctgtatcaagcctcttttcaactcgtgtgactccttcaaggatggcaagctttctaacaatgagtggtgctactgcttccagaagcctggaggtctcccttgccagaatgaaatgaacagaattcagaagctgagtaaggggaaaagcctgttgggggccttcatacctcggtgtaatgaggagggctattacaaagccacacagtgccacggcagcacggggcagtgctggtgtgtggacaaatatgggaatgagttggctggctccaggaaacagggtgctgtgagctgtgaagaggagcaggaaacctcaggggattttggcagtggtgggtccgtggtcctgctggatgacctagaatatgaacgggagctgggaccaaaggacaaagaggggaagctgagggtgcacacccgagccgtgacagaggatgatgaggatgaggatgatgacaaagaggatgaggtcgggtacatatggtagtgcccacaagaaagaggacacaagttttgcacaaaattgca

SEQ ID NO: 147958 - DNA, 1320 bp, Artificial Sequence
  derived and/or modified sequence
atgcccgccatcgccgtgctggccgccgccgccgccgcctggtgcttcctgcaggtggagagcagacacctggacgccctggccggcggcgccggccccaaccacggcaacttcctggacaacgaccagtggctgagcaccgtgagccagtacgacagagacaagtactggaacagattcagagacgacgactacttcagaaactggaaccccaacaagcccttcgaccaggccctggaccccagcaaggacccctgcctgaaggtgaagtgcagcccccacaaggtgtgcgtgacccaggactaccagaccgccctgtgcgtgagcagaaagcacctgctgcccagacagaagaagggcaacgtggcccagaagcactgggtgggccccagcaacctggtgaagtgcaagccctgccccgtggcccagagcgccatggtgtgcggcagcgacggccacagctacaccagcaagtgcaagctggagttccacgcctgcagcaccggcaagagcctggccaccctgtgcgacggcccctgcccctgcctgcccgagcccgagccccccaagcacaaggccgagagaagcgcctgcaccgacaaggagctgagaaacctggccagcagactgaaggactggttcggcgccctgcacgaggacgccaacagagtgatcaagcccaccagcagcaacaccgcccagggcagattcgacaccagcatcctgcccatctgcaaggacagcctgggctggatgttcaacaagctggacatgaactacgacctgctgctggaccccagcgagatcaacgccatctacctggacaagtacgagccctgcatcaagcccctgttcaacagctgcgacagcttcaaggacggcaagctgagcaacaacgagtggtgctactgcttccagaagcccggcggcctgccctgccagaacgagatgaacagaatccagaagctgagcaagggcaagagcctgctgggcgccttcatccccagatgcaacgaggagggctactacaaggccacccagtgccacggcagcaccggccagtgctggtgcgtggacaagtacggcaacgagctggccggcagcagaaagcagggcgccgtgagctgcgaggaggagcaggagaccagcggcgacttcggcagcggcggcagcgtggtgctgctggacgacctggagtacgagagagagctgggccccaaggacaaggagggcaagctgagagtgcacaccagagccgtgaccgaggacgacgaggacgaggacgacgacaaggaggacgaggtgggctacatctggtag

SEQ ID NO: 147959 - DNA, 420 bp, Artificial Sequence
  derived and/or modified sequence
atgcccgccatcgccgtgctggccgccgccgccgccgcctggtgcttcctgcaggtggagagcagacacctggacgccctggccggcggcgccggccccaaccacggcaacttcctggacaacgaccagtggctgagcaccgtgagccagtacgacagagacaagtactggaacagattcagagacgacgactacttcagaaactggaaccccaacaagcccttcgaccaggccctggaccccagcaaggacccctgcctgaaggtgaagtgcagcccccacaaggtgtgcgtgacccaggactaccagaccgccctgtgcgtgagcagaaagcacctgctgcccagacagaagaagggcaacgtggcccagaagcactgggtgggccccagcaacctggtgaagtgcaagccctgctag

SEQ ID NO: 147960 - DNA, 1320 bp, Artificial Sequence
  derived and/or modified sequence
atgccagctattgcggtcctggccgctgcggccgcagcctggtgttttctccaagttgaatctcggcatctcgatgctctcgctggaggggccggcccaaatcacggaaattttctcgacaacgaccagtggctgtccaccgtttctcaatatgatcgcgacaagtactggaatcgctttcgagatgatgactatttccgaaattggaaccccaacaagcccttcgaccaggctttggatccatctaaagacccctgcttgaaagttaagtgctccccccacaaggtgtgtgtaacgcaagattaccaaaccgccttatgtgtgagcaggaagcacctgctgccgcggcaaaagaagggaaacgtcgcccagaagcattgggttggaccttccaatctggtcaagtgcaaaccttgtccggtggcccagagtgccatggtgtgtggctccgacgggcactcctacactagcaaatgcaagctcgagttccacgcctgctccaccgggaagagcctcgccaccctgtgcgatggcccctgcccgtgcctgccagaacccgaacctcccaaacataaggcagagcgctcggcatgtactgacaaagagctgcgaaaccttgcctcgcgcttgaaagattggttcggagccctgcatgaggacgcaaaccgtgtcatcaagccaacatcttctaacaccgctcagggccggtttgataccagcattctgcccatttgcaaagatagtctgggatggatgttcaataagctagacatgaattatgacttacttcttgatcctagtgagattaacgccatctatcttgataaatacgagccctgtataaagccgctgtttaactcttgcgattctttcaaagacggaaagctgtcgaacaatgagtggtgttattgcttccagaagcctggcgggctcccatgccagaacgaaatgaacagaatccagaagctctccaaagggaaatcactgctcggagcttttataccaaggtgcaacgaggaaggatattacaaggcaacacagtgccatggatccacgggacagtgttggtgtgttgacaaatacggcaatgaactcgcaggaagccggaagcagggagcagtaagctgtgaagaagaacaggagacatccggagacttcggtagcgggggttcagtcgttttgttggacgaccttgaatatgagcgcgaattaggcccgaaggataaggaaggcaaactccgcgtgcatacacgagcagtgaccgaggatgacgaggacgaggatgacgataaagaggatgaggtaggttacatctggtag

SEQ ID NO: 147961 - DNA, 1320 bp, Artificial Sequence
  derived and/or modified sequence
atgcccgcaattgcggtgctggcagcagccgctgctgcctggtgctttctccaggtggaaagtagacacttggacgctcttgcggggggcgcaggcccgaaccacggaaattttttggacaatgaccagtggctctcaaccgtgagccagtacgaccgggataagtattggaataggttcagggatgacgactactttcgaaactggaaccccaataaacccttcgatcaggcactggatccatcaaaagacccttgcttgaaggtcaagtgcagccctcacaaagtgtgcgtgactcaggactaccaaacagcactctgtgtttcacggaagcacctacttcctcgccagaagaaaggcaacgtggcacagaaacactgggtgggaccaagtaatctcgttaagtgcaaaccttgtcctgtggctcagagcgcaatggtgtgcggcagtgacggtcatagctacacctctaagtgtaaattagaatttcacgcctgtagtaccggaaagagtctcgcgaccctctgcgatggcccttgtccctgcttaccggagccagagcctcccaagcacaaggccgaaagatccgcatgtaccgacaaggagcttaggaacctcgcttcccgattaaaggattggttcggcgcattacacgaagatgccaatcgcgtgatcaaacctacgtcttctaatactgcacagggcagattcgacacctcgatcttaccaatttgtaaggattctctgggctggatgtttaataaactggacatgaattatgacctgctattagatccttccgagattaatgctatttatcttgacaaatatgagccatgcatcaagccgctgtttaattcctgtgattccttcaaggacggcaagctctccaacaatgagtggtgctattgttttcaaaaacctggggggttgccctgccagaatgagatgaatagaatccagaagctaagtaagggaaagtctctactgggtgccttcatccctcgttgtaacgaggagggttactacaaggccactcagtgccatggatccaccggtcagtgttggtgcgtggataaatacggcaacgagctggctgggtcacgcaagcagggcgccgttagctgcgaggaagaacaagagacttcaggggattttggcagtggaggttcagtcgtgttattggatgatttggaatacgagcgagagctggggcccaaggacaaagagggaaagctccgggtgcacactagagccgtcacagaggatgacgaagacgaggatgatgacaaagaggatgaggtcggttacatctggtag

SEQ ID NO: 147962 - DNA, 420 bp, Artificial Sequence
  derived and/or modified sequence
atgcccgccattgccgtgctcgctgctgcagccgccgcgtggtgctttctccaggtagagagcaggcatctcgacgctctggcaggtggagccggaccaaaccacgggaacttcctcgataacgaccagtggctgtctactgttagccaatacgatagggacaagtactggaataggtttcgcgacgatgattacttccgaaattggaaccctaataaaccattcgatcaggcactggatccaagcaaagacccctgcctcaaggtcaagtgcagcccacacaaggtctgcgtgactcaggactaccagactgcactctgcgtttcccggaagcatctgttaccgaggcaaaagaaaggaaatgtggctcagaagcactgggtcggcccaagcaacctggtcaaatgcaaaccttgttag

SEQ ID NO: 147963 - DNA, 1320 bp, Artificial Sequence
  derived and/or modified sequence
atgcctgccatcgctgtgctggccgctgctgctgctgcctggtgcttcctgcaggtggagagccgccacctggatgccctggccggcggggccggccccaaccacggcaacttcctggacaatgaccagtggctgagcacagtgtcccagtatgaccgggacaagtactggaaccgcttcagagatgatgactacttcaggaactggaaccccaacaagccctttgaccaggccctggaccccagcaaggacccctgcctgaaggtgaagtgcagcccccacaaggtgtgtgtgacccaggactaccagacagccctgtgtgtgtccaggaagcacctgctgccccggcagaagaagggaaatgtggcccagaagcactgggtgggccccagcaacctggtgaagtgcaagccctgccctgtggcccagagcgccatggtgtgtggcagtgatggccacagctacaccagcaagtgcaagctggagttccacgcctgcagcacaggcaagagcctggccaccctgtgtgatggcccctgcccctgcctgcctgagcctgagccccccaagcacaaggccgagaggtctgcctgcacagacaaggagctgaggaacctggccagccggctgaaggactggtttggagccctgcatgaagatgccaacagagtcatcaagcccaccagcagcaacacagcccagggccgctttgacaccagcatcctgcccatctgcaaggacagcctgggctggatgttcaacaagctggacatgaactatgacctgctgctggaccccagcgagatcaatgccatctacctggacaagtatgagccctgcatcaagcccctcttcaacagctgtgacagcttcaaggatggcaagctgagcaacaatgagtggtgctactgcttccagaagccaggcggcctgccctgccagaatgagatgaaccgcatccagaagctgagcaagggcaagagcctgctgggcgccttcatcccccgctgcaatgaggagggctactacaaggccacccagtgccacggcagcacaggccagtgctggtgtgtggacaagtatggaaatgagctggccggcagcaggaagcagggcgctgtgtcctgtgaggaggagcaggagaccagcggggactttggcagcggcggctctgtggtgctgctggatgacctggagtatgaaagagagctgggccccaaggacaaggagggcaagctgcgggtgcacaccagggctgtgacagaagatgatgaagatgaagatgatgacaaggaggatgaggtgggctacatctggtag

SEQ ID NO: 147964 - DNA, 420 bp, Artificial Sequence
  derived and/or modified sequence
atgcctgccatcgctgtgctggccgctgctgctgctgcctggtgcttcctgcaggtggagagccgccacctggatgccctggccggcggggccggccccaaccacggcaacttcctggacaatgaccagtggctgagcacagtgtcccagtatgaccgggacaagtactggaaccgcttcagagatgatgactacttcaggaactggaaccccaacaagccctttgaccaggccctggaccccagcaaggacccctgcctgaaggtgaagtgcagcccccacaaggtgtgtgtgacccaggactaccagacagccctgtgtgtgtccaggaagcacctgctgccccggcagaagaagggaaatgtggcccagaagcactgggtgggccccagcaacctggtgaagtgcaagccctgctag

SEQ ID NO: 147965 - DNA, 1320 bp, Artificial Sequence
  derived and/or modified sequence
atgcccgccatcgccgtgctggccgccgccgccgccgcctggtgctttcttcaagtggaatcacgtcatctcgatgcactggcagggggagctggcccaaatcatggtaactttctcgataatgaccagtggctgtcaactgtgtcacagtatgaccgcgataagtactggaaccggttcagagatgacgattacttcagaaattggaatcccaacaagccattcgatcaggccctcgacccctctaaggatccatgtctgaaggtcaagtgctctcctcacaaggtttgtgtcacccaggactaccagactgcactgtgcgtgtccagaaagcacttgctccccaggcaaaagaaaggaaatgtagcccagaagcactgggtcggaccttccaaccttgtgaaatgcaagccctgcccggttgctcagtcggccatggtgtgtggtagcgacggccactcttatacctcaaaatgtaagctcgagttccatgcctgcagtactggtaaatcactggcaaccctgtgtgacgggccatgcccttgcctacccgagccggaacctcccaagcacaaggcggaaagaagcgcatgcaccgacaaggagcttagaaacttggcatctaggttgaaggattggtttggggctctgcatgaggacgcaaatcgggtcatcaagccaactagctccaatacagcacaaggaagattcgacacatctatcctgccgatctgcaaggatagcctgggctggatgttcaacaaacttgacatgaactatgacctgttgctcgacccaagtgaaattaatgccatttacctggacaagtatgaaccgtgcatcaagccacttttcaactcctgcgattcattcaaggatggcaaactgtctaacaacgaatggtgttattgcttccagaagcccggcggcctgccatgtcagaacgagatgaacaggattcagaaactgtccaaaggcaaatccctcctgggagcttttatcccccgttgtaacgaagaggggtactataaagccacacaatgtcatgggagcaccggacagtgctggtgtgtggataaatacgggaatgaattggcaggttcaagaaaacagggcgccgttagctgcgaggaggagcaggagacaagtggcgacttcggtagtgggggatcagtcgtgcttctcgacgacctggagtacgagagagagctcggacccaaggacaaagaaggcaaactgagagtgcacacaagggcagtcactgaggacgatgaggatgaagacgacgacaaagaagatgaggtgggctacatttggtag

SEQ ID NO: 147966 - DNA, 1320 bp, Artificial Sequence
  derived and/or modified sequence
atgcccgccatcgccgtgctggccgccgccgccgccgcctggtgctttttgcaggtggagtctcggcacctggacgccctggccggcggcgcaggcccaaatcatggcaatttcttggataacgaccagtggctgtccacagttagccagtatgaccgagacaaatattggaatcgtttccgggacgatgattatttccggaattggaatcctaacaagccctttgaccaggctttagacccctccaaagacccttgcttaaaagtgaaatgttccccacataaagtatgcgtcacccaggactatcagacagctctatgtgtttccaggaaacacctccttccaaggcagaagaaaggcaatgttgcccaaaagcattgggtgggcccctccaatcttgtaaaatgtaaaccgtgccccgtggcgcagagtgccatggtctgtgggtcagacggccacagttacactagtaaatgcaagctggaattccatgcgtgttcgaccggtaagtccctagccaccctgtgcgacggcccgtgtccatgtttgccagagcctgaacccccaaaacacaaagccgagcggagcgcgtgcacagacaaagagctgagaaacttggcaagtcggctcaaagactggttcggagctcttcacgaagacgcaaacagggtgatcaagccaactagttccaacacagcacagggtcgcttcgatacttctatcctgccaatctgcaaggatagcctggggtggatgtttaacaagctggatatgaactacgacttactgttggaccctagcgaaataaacgccatctaccttgacaagtatgaaccctgtattaagcctctctttaactcctgcgactcctttaaagatggaaaactgagcaacaacgagtggtgctattgttttcagaagccaggaggactgccctgccagaacgagatgaataggatccagaagcttagcaagggcaagtcgttactgggagcatttataccccgatgcaacgaagaaggctattacaaggcaacacagtgccatggttccaccggacagtgctggtgcgttgataagtatggtaacgaattggccgggtccagaaaacaaggagctgtctcgtgcgaagaggagcaagagacaagcggcgactttgggtcaggaggatctgtggtgctgctagacgatctcgaatacgaaagagagcttggtcccaaagataaagagggcaagctccgggtgcatacgcgcgccgttacagaggatgatgaagacgaagatgacgacaaggaggacgaagtgggctacatatggtag

SEQ ID NO: 147967 - DNA, 420 bp, Artificial Sequence
  derived and/or modified sequence
atgcccgccatcgccgtgctggccgccgccgccgccgcctggtgctttcttcaggttgagagcaggcatctcgatgcgctcgccggaggcgccggccccaaccatggcaattttctggacaatgaccagtggctcagcaccgtctcccaatatgacagggataaatactggaaccgtttcagggatgatgactatttccgcaattggaatccaaacaagccttttgatcaggccttggacccctcaaaagacccgtgtttgaaggtcaaatgtagcccgcataaggtgtgcgtgacgcaggattaccagaccgccctctgtgtgtcacgaaagcacctactgccaagacagaaaaagggcaatgtcgcccagaaacactgggttggaccctccaacctcgtgaagtgcaagccatgctag

SEQ ID NO: 147968 - DNA, 432 bp, Artificial Sequence
  derived and/or modified sequence
atggccacgccactcgataattgcctcaggcccttccctgaccctatggtcaaggtcacagctgaaacgaagaagattagtgaggtgtcctcttatgtgtcagctaacaataaaaaaaacagcttttggggatcaggactgttatatcccgtcgccctgcttaggtgccaggattgttgggccggacaccagacgcacgtcctctccaaggaattcacctcatacttctcttctggcgcaggtcgtgaggcacagcaccagcctagtgccgttcttggctctcttatttggttgaggcgcgtgtacctgttacgtgccatggttgtccatggaggatctcagccctgtcagagatggctcgtgattcggatggaagtagggggacatccaagttttcccggtcacgcctggctgacctttcacttgaattag

SEQ ID NO: 147969 - RNA, 1320 nt, Artificial Sequence
  derived and/or modified sequence
augccagcuaucgcaguacuggccgccgccgccgccgccuggugcuuuuuacaaguggaaucucggcaucucgacgcucuagccgguggagccggcccuaaccacgggaauuuccuggauaaugaucaauggcucagcacugugucucaguaugaucgagauaaguacuggaaccgauuuagggacgaugacuauuuccgaaauuggaaccccaacaaaccuuucgaccaggcucuugauccaucuaaggauccuugccuaaaaguaaaguguucuccucauaagguaugcguuacgcaggacuaucagaccgcucuuugcgugagucguaaacaccuguugccucgccagaagaagggaaacgucgcacagaagcacugggucgguccuucuaaccucgugaaauguaaaccuugucccguggcucagagcgcaaugguuugcgggagcgacgggcacuccuauacuucaaaaugcaaacucgaguuucaugcuugcuccacuggcaaaucguuggcaacucugugcgacggccccuguccuugccuuccggaacccgaaccgcccaagcacaaggcagaaaggucugcaugcacggacaaggagcugcguaaucuggcaucucgguugaaggauugguuuggagcccugcaugaagaugccaaucgggugauuaaaccaacuaguucuaacaccgcccagggaagauuugacacuucgauccugccuauuugcaaggauucccucggguggauguucaacaagcuggacaugaauuaugaccuucugcucgauccaagugagauuaaugcgaucuaucucgacaaauacgaaccuugcaucaagccauuguucaacucaugugauagcuucaaggacgggaaacugucuaacaacgaguggugcuacugcuuccagaaaccuggugggcuucccugucagaaugagaugaacagaauccagaagcuaagcaaaggaaaaucgcuauugggcgcuuucauucccagguguaaugaagaggguuacuacaaagcaacacagugucaugguaguaccgggcaauguuggugugucgauaaguauggcaaugaacuggcugggagcagaaaacagggcgcugucagcugugaggaagagcaggaaacaaguggagacuucggaaguggaggcucgguggugcuuuuggaugaccuagaauaugagagggagcucggccccaaggacaaggagggaaagcuuagaguccauaccagagcugugacggaagacgacgaggacgaggaugacgacaaagaagaugaaguuggguauauuugguag

SEQ ID NO: 147970 - RNA, 1320 nt, Artificial Sequence
  derived and/or modified sequence
augccagccaucgccguucuugccgcugcggcagcugcaugguguuuccugcaaguggagucuaggcaccuggaugcucuagcagguggcgccgggcccaaccauggcaauuuucuggauaacgaucaguggcuaagcacggucucucaguaugauagggacaaguacuggaaucgcuuccgcgaugaugacuacuuuagaaauuggaacccaaacaagcccuuugaucaagcccucgaccccucgaaggauccauguuuaaaaguaaaguguuccccacauaaaguaugugucacacaggauuaccagaccgcccugugcgucagccggaaacaucuccugccuagacaaaagaaaggcaacguggcccagaagcauugggugggcccauccaauuuagugaagugcaagccaugcccuguggcucagucagcaaugguaugugggucagacggccacagcuacacauccaaaugcaaacuagaauuccaugcuuguucgaccgguaaaucucuggcaacacucugcgacggcccuuguccuugcuugcccgagccagaaccgccgaaacacaaggccgagcgaucugcauguaccgacaaagagcuacggaaccuggccucuagguugaaggauugguuuggcgcacugcacgaggacgcuaacagggugaucaaaccgaccucuuccaacacugcacagggccguuucgacacaagcauucuuccaauauguaaagauagcuugggcuggauguucaauaagcuggacaugaacuacgaucuccuguuagaucccucagagaucaaugcuaucuaucuagauaaauacgaaccuuguaucaaaccguuguucaauucgugugauucuuuuaaggacgguaaacuuucuaauaacgaauggugcuacuguuuucagaaacccggcgggcuuccaugucaaaacgagaugaauaggauacaaaagcugucaaagggcaagucccuucugggcgccuucaucccgaggugcaacgaggagggcuauuacaaggccacucagugucacggcucgaccggucagugcuggugcguggacaaguauggcaaugaguuagccggaaguagaaaacagggggccguuagcugcgaggaggaacaagagacuuccggggauuuugguucaggggguucggugguacugcuagaugacuuggaguaugagagagagcugggacccaaagauaaagaagggaaacuuagagugcauacacgcgcuguuacugaggacgacgaggaugaagaugaugacaaggaagaugaggugggcuacaucugguag

SEQ ID NO: 147971 - RNA, 420 nt, Artificial Sequence
  derived and/or modified sequence
augcccgcgaucgccguccucgcugccgcugcugccgcaugguguuuccuucagguagaaagccgucauuuagacgcucucgcaggcggagccgggccaaaccacggcaauuuuuuggacaacgaccaauggcucuccaccguuucgcaguacgaccgggacaaguacuggaaccgauuucgcgaugaugauuacuuuaggaacuggaacccaaacaagcccuuugaccaggcccucgaucccucuaaagaucccugucugaaggugaagugcuccccccacaaagugugcgugacucaggacuaccagaccgcgcucugcgucucccggaaacaccuguuaccuaggcaaaagaaggguaaugucgcccagaagcacuggguagguccaucuaaucuggugaaguguaaaccuugcuag

SEQ ID NO: 147972 - RNA, 1320 nt, Artificial Sequence
  derived and/or modified sequence
augccagcuaucgcaguacuggccgccgccgccgccgccuggugcuuuuuacaaguggaaucucggcaucucgacgcucuagccgguggagccggcccuaaccacgggaauuuccuggauaaugaucaauggcucagcacugugucucaguaugaucgagauaaguacuggaaccgauuuagggacgaugacuauuuccgaaauuggaaccccaacaaaccuuucgaccaggcucuugauccaucuaaggauccuugccuaaaaguaaaguguucuccucauaagguaugcguuacgcaggauuaucaaacggcccuuugcguauccagaaagcacuuacuaccccgucagaagaaaggcaaugucgcucaaaagcauuggguuggcccauccaaccuagugaaguguaaaccauguccaguggcccaaucagcuauggugugcggauccgacgggcacucauacaccucuaaguguaagcucgaguuucaugcuuguucaaccggcaaaucccuggcaacguuaugcgacggcccaugcccaugucucccagaaccggagccuccuaagcacaaagcggaacgcuccgcauguaccgacaaggaacugcgaaaucuggcgucacggcugaaagacugguucggagcguugcaugaggacgccaacagaguuauuaaaccaacaucaucuaacacggcacagggaagauucgacaccaguauccugcccauuuguaaggacucucuaggcuggauguucaacaaguuagauaugaauuacgaucuacuacuugauccauccgagauuaaugcuauuuaucuggacaaguaugagccauguaucaaaccucuuuucaacagcugcgauucuuuuaaggacggaaaacuuucgaacaacgaguggugcuacugcuuccagaaaccuggugggcuucccugucagaaugagaugaacagaauccagaagcuaagcaaaggaaaaucgcuauugggcgcuuucauucccagguguaaugaagaggguuacuacaaagcaacacagugucaugguaguaccgggcaauguuggugugucgauaaguauggcaaugaacuggcugggagcagaaaacagggcgcugucagcugugaggaagagcaggaaacaaguggagacuucggaaguggaggcucgguggugcuuuuggaugaccuagaauaugaaagagagcuggggccaaaagauaaagaggguaaguugaggguucacacgagggcugucacugaagaugaugaagaugaggacgacgauaaagaggaugagguagguuacauaugguag

SEQ ID NO: 147973 - RNA, 1320 nt, Artificial Sequence
  derived and/or modified sequence
augcccgccauugcaguguuggcugcugccgcggcugcaugguguuuccuucaaguagaaagccgccaccucgacgcccuggcuggaggcgcuggcccaaaucauggcaacuuccucgauaacgaucagugguugagcacagugagccaguacgaccgcgacaaguauuggaauagauucagggaugaugauuauuucagaaauuggaacccgaacaagcccuucgaucaggcacucgacccuuccaaagacccgugccuuaaagugaagugcucuccucacaagguaugcgugacacaggauuaccagacagcccucuguguuucacgcaaacaccuguugccacgccagaaaaagggaaauguugcucaaaagcacugggucggcccuucaaaccucguuaaauguaaaccgugcccgguggcacagucagcaauggugugcgguagugacggccacuccuacacuuccaaaugcaaacuggaguuccacgccuguagcacaggaaagagccucgcaaccuugugcgacggccccuguccauguuugcccgagcccgagccaccaaaacauaaagccgaaaggucagcauguaccgauaaggaacuacgaaacuuggccagcagacugaaggauugguucggggcccuccacgaggaugccaaccgcguaauaaagccuacgagcagcaauacugcacaaggcagauuugacacuuccauuuuacccauuugcaaggauucccuaggguggauguuuaauaaauuagauaugaauuaugaccuccugcuggacccaucggagauaaacgcuauauacuuggacaaauaugagccuuguaucaaaccuuuguucaacagcugugacucuuucaaagacgguaaguuaucaaacaacgagugguguuauuguuuucaaaaacccgguggacugccgugucagaacgaaaugaaucgcauccagaagcugaguaaggguaagucccugcugggggcguuuauuccacgguguaacgaagaagguuacuacaaggccacacagugucacggguccacaggucagugcuggugcguggauaaguacgggaacgaacucgcugguucgagaaaacagggggccguaucaugugaggaagagcaagagacuagcggcgauuucggcaguggggggagcgugguguuacuagacgaucuggaauacgaacgagaacucggaccuaaagacaaggagggcaaauuaagggugcacacgcgggcgguaacagaggacgaugaagaugaggacgaugacaaggaagacgaggugggauacauuugguag

SEQ ID NO: 147974 - RNA, 420 nt, Artificial Sequence
  derived and/or modified sequence
augcccgcgaucgccguccucgcugccgcugcugccgcaugguguuuccuucagguagaaagccgucauuuagacgcucucgcaggcggagccgggccaaaccacggcaauuuuuuggacaacgaccaauggcucuccaccguuucgcaguacgaccgggacaaguacuggaaccgauuucgcgaugaugauuacuuuaggaacuggaacccaaacaagcccuuugaccaggcccucgaucccucuaaagaucccugucugaaggugaagugcuccccccacaaagugugcgugacucaggauuaccaaacagccuuaugugucucgcgcaaacaccucuuaccccggcagaagaaaggaaaugucgcacagaagcacugggugggaccaucuaaccucgucaaguguaagccuuguuag

SEQ ID NO: 147975 - protein, 1141 aa, Artificial Sequence
  derived and/or modified sequence
MDDSGELGGLETMETLTELGDELTLGDIDEMLQFVSNQVGEFPDLFSEQLCSSFPGSGGSGSSSGSSGSSSSSSNGRGSSSGAVDPSVQRSFTQVTLPSFSPSAASPQAPTLQVKVSPTSVPTTPRATPILQPRPQPQPQPQTQLQQQTVMITPTFSTTPQTRIIQQPLIYQNAATSFQVLQPQVQSLVTSSQVQPVTIQQQVQTVQAQRVLTQTANGTLQTLAPATVQTVAAPQVQQVPVLVQPQIIKTDSLVLTTLKTDGSPVMAAVQNPALTALTTPIQTAALQVPTLVGSSGTILTTMPVMMGQEKVPIKQVPGGVKQLEPPKEGERRTTHNIIEKRYRSSINDKIIELKDLVMGTDAKMHKSGVLRKAIDYIKYLQQVNHKLRQENMVLKLANQKNKLLKGIDLGSLVDNEVDLKIEDFNQNVLLMSPPASDSGSQAGFSPYSIDSEPGSPLLDDAKVKDEPDSPPVALGMVDRSRILLCVLTFLCLSFNPLTSLLQWGGAHDSDQHPHSGSGRSVLSFESGSGGWFDWMMPTLLLWLVNGVIVLSVFVKLLVHGEPVIRPHSRSSVTFWRHRKQADLDLARGDFAAAAGNLQTCLAVLGRALPTSRLDLACSLSWNVIRYSLQKLRLVRWLLKKVFQCRRATPATEAGFEDEAKTSARDAALAYHRLHQLHITGKLPAGSACSDVHMALCAVNLAECAEEKIPPSTLVEIHLTAAMGLKTRCGGKLGFLASYFLSRAQSLCGPEHSAVPDSLRWLCHPLGQKFFMERSWSVKSAAKESLYCAQRNPADPIAQVHQAFCKNLLERAIESLVKPQAKKKAGDQEEESCEFSSALEYLKLLHSFVDSVGVMSPPLSRSSVLKSALGPDIICRWWTSAITVAISWLQGDDAAVRSHFTKVERIPKALEVTESPLVKAIFHACRAMHASLPGKADGQQSSFCHCERASGHLWSSLNVSGATSDPALNHVVQLLTCDLLLSLRTALWQKQASASQAVGETYHASGAELAGFQRDLGSLRRLAHSFRPAYRKVFLHEATVRLMAGASPTRTHQLLEHSLRRRTTQSTKHGEVDAWPGQRERATAILLACRHLPLSFLSSPGQRAVLLAEAARTLEKVGDRRSCNDCQQMIVKLGGGTAIAAS

SEQ ID NO: 147976 - protein, 684 aa, Artificial Sequence
  derived and/or modified sequence
MDDSGELGGLETMETLTELGDELTLGDIDEMLQFVSNQVGEFPDLFSEQLCSSFPGSGGSGSSSGSSGSSSSSSNGRGSSSGAVDPSVQRSFTQVTLPSFSPSAASPQAPTLQVKVSPTSVPTTPRATPILQPRPQPQPQPQTQLQQQTVMITPTFSTTPQTRIIQQPLIYQNAATSFQVLQPQVQSLVTSSQVQPVTIQQQVQTVQAQRVLTQTANGTLQTLAPATVQTVAAPQVQQVPVLVQPQIIKTDSLVLTTLKTDGSPVMAAVQNPALTALTTPIQTAALQVPTLVGSSGTILTTMPVMMGQEKVPIKQVPGGVKQLEPPKEGERRTTHNIIEKRYRSSINDKIIELKDLVMGTDAKMHKSGVLRKAIDYIKYLQQVNHKLRQENMVLKLANQKNKLLKGIDLGSLVDNEVDLKIEDFNQNVLLMSPPASDSGSQAGFSPYSIDSEPGSPLLDDAKVKDEPDSPPVALGMVDRSRILLCVLTFLCLSFNPLTSLLQWGGAHDSDQHPHSGSGRSVLSFESGSGGWFDWMMPTLLLWLVNGVIVLSVFVKLLVHGEPVIRPHSRSSVTFWRHRKQADLDLARGVYGKKSGATHSIEEELNIHISRGTRTRTLLSSRRFCSCCRQPTNLPGSFGPGTAHLPPGPGLQPLLERDPLQPAEATPGALAAQESLPVPAGHASH

SEQ ID NO: 147977 - protein, 1102 aa, Artificial Sequence
  derived and/or modified sequence
MDDSGELGGLETMETLTELGDELTLGDIDEMLQFVSNQVGEFPDLFSEQLCSSFPGSGGSGSSSGSSGSSSSSSNGRGSSSGAVDPSVQRSFTQVTLPSFSPSAASPQAPTLQVKVSPTSVPTTPRATPILQPRPQPQPQPQTQLQQQTVMITPTFSTTPQTRIIQQPLIYQNAATSFQVLQPQVQSLVTSSQVQPVTIQQQVQTVQAQRVLTQTANGTLQTLAPATVQTVAAPQVQQVPVLVQPQIIKTDSLVLTTLKTDGSPVMAAVQNPALTALTTPIQTAALQVPTLVGSSGTILTTMPVMMGQEKVPIKQVPGGVKQLEPPKEGERRTTHNIIEKRYRSSINDKIIELKDLVMGTDAKMHKSGVLRKAIDYIKYLQQVNHKLRQENMVLKLANQKNKLLKGIDLGSLVDNEVDLKIEDFNQNVLLMSPPASDSGSQAGFSPYSIDSEPGSPLLDDAKVKDEPDSPPVALGMVDRSRILLCVLTFLCLSFNPLTSLLQWGGAHDSDQHPHSGSGRSVLSFESGSGGWFDWMMPTLLLWLVNGVIVLSVFVKLLVHGEPVIRPHSRSSVTFWRHRKQADLDLARGDFAAAAGNLQTCLAVLGRALPTSRLDLACSLSWNVIRYSLQKLRLVRWLLKKVFQCRRATPATEAGFEDEAKTSARDAALAYHRLHQLHITGKLPAGSACSDVHMALCAVNLAECAEEKIPPSTLVEIHLTAAMGLKTRCGGKLGFLASYFLSRAQSLCGPEHSAVPDSLRWLCHPLGQKFFMERSWSVKSAAKESLYCAQRNPADPIAQVHQAFCKNLLERAIESLVKPQAKKKAGDQEEESCEFSSALEYLKLLHSFVDSVGVMSPPLSRSSVLKSALGPDIICRWWTSAITVAISWLQGDDAAVRSHFTKVERIPKALEVTESPLVKAIFHACRAMHASLPGKADGQQSSFCHCERASGHLWSSLNVSGATSDPALNHVVQLLTCDLLLSLRTALWQKQASASQAVGETYHASGAELAGFQRDLGSLRRLAHSFRPAYRKVFLHEATVRLMAGASPTRTHQLLEHSLRRRTTQSTKHGEVDAWPGQRERATAILLACRHLPLSFLPCLQPS

SEQ ID NO: 147978 - DNA, 4325 bp, Artificial Sequence
  derived and/or modified sequence
gccctttctgtgcggcgcccgggcgcaacgcaaacatggcggcgggtggcacccgtcggtgaggcggtgccgggcgggggttgtcgggtgtcatgggcggtggcgacggcaccgcccccgcgtctccctgagcgggacggcagggggggcttctgcgctgagccgggcgatggacgacagcggcgagctgggtggtctggagaccatggagaccctcacggagctgggcgacgagctgaccctgggagacatcgacgagatgctgcaatttgtcagtaatcaagtgggagagttccctgacttgttttcagaacagctgtgtagctcctttcctggcagtggtggtagtggtagcagcagcggcagcagtggcagcagcagcagcagcagcaatggcaggggcagcagcagcggagctgtggacccttcagtgcaacggtcattcacccaggtcacattaccttccttctctccctcggcggcctccccacaggctccaactctgcaagtcaaggtttctcccacctcagttcccaccacacccagggcaactcctattcttcagccccgcccccagccccagcctcaacctcaaactcagctgcaacaacagacggtaatgatcacgccaacattcagcaccactccgcagacgaggatcatccagcagcctttgatataccagaatgcagctactagctttcaagtccttcagcctcaagtccaaagcctggtgacatcctcccaggtacagccggtcaccattcagcagcaggtgcagacagtacaggcccagcgggtgctgacacaaacggccaatggcacgctgcagacccttgccccggctacggtgcagacagttgctgcgccacaggtgcagcaggtcccggtcctggtccagcctcagatcatcaagacagattcccttgttttgaccacactgaagacagatggcagccctgttatggctgcggtccagaacccggccctcaccgccctcaccacccctatccagacggctgcccttcaagtaccaaccctggtgggcagcagtgggaccattctgaccacaatgcctgtaatgatggggcaagagaaagtgcccattaagcaggtacctgggggagtcaagcagcttgagccccccaaagaaggagaaaggcggacaacccataatatcattgagaaacgatatcgctcctccatcaatgacaaaatcatcgaattgaaagacctggtcatggggacagacgccaagatgcacaagtctggcgttctgaggaaggccattgattacatcaaatacttgcagcaggtcaatcataaactgcgccaggagaacatggtgctgaagctggcaaatcaaaagaacaagcttctaaagggcatcgacctaggcagtctggtggacaatgaggtggacctgaagatcgaggactttaatcagaatgtccttctgatgtcccccccagcctctgactcagggtcccaggctggcttctctccctactccattgactctgagccaggaagccctctattggatgatgcaaaggtcaaagatgagccagactctcctcctgtggcgctgggcatggtagaccgctcacggattcttctgtgtgtcctcaccttcctgtgcctctcctttaaccccctgacttccctgctgcagtggggaggggcccacgactctgaccagcacccacactcaggctctggccgcagtgtcctgtcattcgagtcaggttctgggggctggtttgactggatgatgcctactcttctcttatggctggtaaatggtgtgattgtcctgagcgtctttgtgaagctgctggttcatggggagccagtgatccggccacactcgcgctcctcggtcaccttctggaggcaccggaaacaggcagatctggatctcgccagaggagattttgcagctgctgccggcaacctacaaacctgcctggcagttttgggccgggcactgcccacctcccgcctggacctggcctgcagcctctcctggaacgtgatccgctacagcctgcagaagctacgcctggtgcgctggctgctcaagaaagtcttccagtgccggcgggccacgccagccactgaggcaggctttgaagacgaagctaagaccagcgcccgggatgcggctctggcctatcaccggctgcaccagctgcacatcacagggaagcttcctgcaggatccgcctgttccgatgtacacatggcgttgtgtgccgtgaacctggctgaatgtgcagaggagaagatcccaccgagcacactggttgagatccatctgactgctgccatggggctcaagacccggtgtggaggcaagctgggcttcctggccagctacttcctcagccgagcccagagcctgtgtggccccgagcacagtgctgttcctgactccctgcgctggctctgccaccccctgggccagaagtttttcatggagcggagctggtctgtgaagtcagctgccaaggagagtctatactgtgcccagaggaacccagctgaccccattgcgcaggtccaccaggccttctgcaagaacctgctggagcgagctatagagtccttggtgaaacctcaggccaagaagaaggctggagaccaggaagaagagagctgtgaattctccagtgctctggagtacttgaaattacttcattcttttgtggactctgtgggggttatgagccccccactctccaggagctccgtgctcaagtccgccctgggtccagacatcatctgtcggtggtggacgtctgcaatcactgtggccatcagctggctccagggagacgatgcagctgtgcgctctcattttaccaaagtggaacgcatccccaaggccctggaagtgacagagagccccctggtgaaggccatcttccatgcctgcagagccatgcatgcctcactccctgggaaagcagatgggcagcagagttccttctgccattgcgagagggccagtggccacctatggagcagcctcaacgtcagtggggccacctctgaccctgccctcaaccacgtggtccagctgctcacctgtgacctgctactgtcgctacggacagcgctctggcaaaaacaggccagtgccagccaggctgtgggggagacctaccacgcgtcaggcgctgaactggcgggcttccaacgggacctgggcagcctgcgcaggctggcacacagcttccgcccagcataccgcaaggtgttcctgcatgaagccaccgtgcgcctgatggcaggagccagccccacccgcacccaccagctgctggaacacagcctgcggcggcgcaccacgcagagcaccaagcacggagaggtggatgcctggcccggccagcgagagcgggccaccgccatcctgctggcctgccgccacctgcccctctccttcctctcctccccgggccagcgggcagtgctgctggccgaagctgcccgcaccctggagaaggtgggcgaccggcgctcctgcaacgactgccagcagatgattgttaagctgggtggtggcactgccattgccgcctcctgaccaccaggctcagcccacccctccacctctctctcgatttctctctctccccctcagcatcttcccgctgagagtggtggggaagagccttgtcttcttagctgtcacctgccgaggcttctgggccactcaggccagtgcacccctgggcagagccccttaaagctgctgtcactagatgcccatggtccagggcctggtgggcgtgagaggataggtggcagggcagaaactgggcagccctgacttgatagcagcagggggagctcccaagctgccaagcccctgcctccagccttcctgagtttctctctcctgaaccctactctctcctttttgcttcctcagtttttatcaggctttctctgggggacagcagtctctgagcaccagggagcagttgccctcaggcctgtgcccagcatgccctcccctttttatacgaatgttttctaccagtgtgcttgggtttgccatgatgcgaggctgagttgctgtagcgtcttgattctctccctgggtctgcgttccctcccctgggcctgactgagcctgctcattgtttttccctttattacacaggacagccaggggaggaggggggcccagccctgggaggctggtgggaggcagggggcaggcctgcggatgcatgaaataatgttggcattattttttaattttttaaaaaataaatggtatcttatttaaaaaaaaaaaaaaaaaaaaa

SEQ ID NO: 147979 - DNA, 3426 bp, Artificial Sequence
  derived and/or modified sequence
atggacgacagcggcgagctgggcggcctggagaccatggagaccctgaccgagctgggcgacgagctgaccctgggcgacatcgacgagatgctgcagttcgtgagcaaccaggtgggcgagttccccgacctgttcagcgagcagctgtgcagcagcttccccggcagcggcggcagcggcagcagcagcggcagcagcggcagcagcagcagcagcagcaacggcagaggcagcagcagcggcgccgtggaccccagcgtgcagagaagcttcacccaggtgaccctgcccagcttcagccccagcgccgccagcccccaggcccccaccctgcaggtgaaggtgagccccaccagcgtgcccaccacccccagagccacccccatcctgcagcccagaccccagccccagccccagccccagacccagctgcagcagcagaccgtgatgatcacccccaccttcagcaccaccccccagaccagaatcatccagcagcccctgatctaccagaacgccgccaccagcttccaggtgctgcagccccaggtgcagagcctggtgaccagcagccaggtgcagcccgtgaccatccagcagcaggtgcagaccgtgcaggcccagagagtgctgacccagaccgccaacggcaccctgcagaccctggcccccgccaccgtgcagaccgtggccgccccccaggtgcagcaggtgcccgtgctggtgcagccccagatcatcaagaccgacagcctggtgctgaccaccctgaagaccgacggcagccccgtgatggccgccgtgcagaaccccgccctgaccgccctgaccacccccatccagaccgccgccctgcaggtgcccaccctggtgggcagcagcggcaccatcctgaccaccatgcccgtgatgatgggccaggagaaggtgcccatcaagcaggtgcccggcggcgtgaagcagctggagccccccaaggagggcgagagaagaaccacccacaacatcatcgagaagagatacagaagcagcatcaacgacaagatcatcgagctgaaggacctggtgatgggcaccgacgccaagatgcacaagagcggcgtgctgagaaaggccatcgactacatcaagtacctgcagcaggtgaaccacaagctgagacaggagaacatggtgctgaagctggccaaccagaagaacaagctgctgaagggcatcgacctgggcagcctggtggacaacgaggtggacctgaagatcgaggacttcaaccagaacgtgctgctgatgagcccccccgccagcgacagcggcagccaggccggcttcagcccctacagcatcgacagcgagcccggcagccccctgctggacgacgccaaggtgaaggacgagcccgacagcccccccgtggccctgggcatggtggacagaagcagaatcctgctgtgcgtgctgaccttcctgtgcctgagcttcaaccccctgaccagcctgctgcagtggggcggcgcccacgacagcgaccagcacccccacagcggcagcggcagaagcgtgctgagcttcgagagcggcagcggcggctggttcgactggatgatgcccaccctgctgctgtggctggtgaacggcgtgatcgtgctgagcgtgttcgtgaagctgctggtgcacggcgagcccgtgatcagaccccacagcagaagcagcgtgaccttctggagacacagaaagcaggccgacctggacctggccagaggcgacttcgccgccgccgccggcaacctgcagacctgcctggccgtgctgggcagagccctgcccaccagcagactggacctggcctgcagcctgagctggaacgtgatcagatacagcctgcagaagctgagactggtgagatggctgctgaagaaggtgttccagtgcagaagagccacccccgccaccgaggccggcttcgaggacgaggccaagaccagcgccagagacgccgccctggcctaccacagactgcaccagctgcacatcaccggcaagctgcccgccggcagcgcctgcagcgacgtgcacatggccctgtgcgccgtgaacctggccgagtgcgccgaggagaagatcccccccagcaccctggtggagatccacctgaccgccgccatgggcctgaagaccagatgcggcggcaagctgggcttcctggccagctacttcctgagcagagcccagagcctgtgcggccccgagcacagcgccgtgcccgacagcctgagatggctgtgccaccccctgggccagaagttcttcatggagagaagctggagcgtgaagagcgccgccaaggagagcctgtactgcgcccagagaaaccccgccgaccccatcgcccaggtgcaccaggccttctgcaagaacctgctggagagagccatcgagagcctggtgaagccccaggccaagaagaaggccggcgaccaggaggaggagagctgcgagttcagcagcgccctggagtacctgaagctgctgcacagcttcgtggacagcgtgggcgtgatgagcccccccctgagcagaagcagcgtgctgaagagcgccctgggccccgacatcatctgcagatggtggaccagcgccatcaccgtggccatcagctggctgcagggcgacgacgccgccgtgagaagccacttcaccaaggtggagagaatccccaaggccctggaggtgaccgagagccccctggtgaaggccatcttccacgcctgcagagccatgcacgccagcctgcccggcaaggccgacggccagcagagcagcttctgccactgcgagagagccagcggccacctgtggagcagcctgaacgtgagcggcgccaccagcgaccccgccctgaaccacgtggtgcagctgctgacctgcgacctgctgctgagcctgagaaccgccctgtggcagaagcaggccagcgccagccaggccgtgggcgagacctaccacgccagcggcgccgagctggccggcttccagagagacctgggcagcctgagaagactggcccacagcttcagacccgcctacagaaaggtgttcctgcacgaggccaccgtgagactgatggccggcgccagccccaccagaacccaccagctgctggagcacagcctgagaagaagaaccacccagagcaccaagcacggcgaggtggacgcctggcccggccagagagagagagccaccgccatcctgctggcctgcagacacctgcccctgagcttcctgagcagccccggccagagagccgtgctgctggccgaggccgccagaaccctggagaaggtgggcgacagaagaagctgcaacgactgccagcagatgatcgtgaagctgggcggcggcaccgccatcgccgccagctag

SEQ ID NO: 147980 - DNA, 2055 bp, Artificial Sequence
  derived and/or modified sequence
atggacgacagcggcgagctgggcggcctggagaccatggagaccctgaccgagctgggcgacgagctgaccctgggcgacatcgacgagatgctgcagttcgtgagcaaccaggtgggcgagttccccgacctgttcagcgagcagctgtgcagcagcttccccggcagcggcggcagcggcagcagcagcggcagcagcggcagcagcagcagcagcagcaacggcagaggcagcagcagcggcgccgtggaccccagcgtgcagagaagcttcacccaggtgaccctgcccagcttcagccccagcgccgccagcccccaggcccccaccctgcaggtgaaggtgagccccaccagcgtgcccaccacccccagagccacccccatcctgcagcccagaccccagccccagccccagccccagacccagctgcagcagcagaccgtgatgatcacccccaccttcagcaccaccccccagaccagaatcatccagcagcccctgatctaccagaacgccgccaccagcttccaggtgctgcagccccaggtgcagagcctggtgaccagcagccaggtgcagcccgtgaccatccagcagcaggtgcagaccgtgcaggcccagagagtgctgacccagaccgccaacggcaccctgcagaccctggcccccgccaccgtgcagaccgtggccgccccccaggtgcagcaggtgcccgtgctggtgcagccccagatcatcaagaccgacagcctggtgctgaccaccctgaagaccgacggcagccccgtgatggccgccgtgcagaaccccgccctgaccgccctgaccacccccatccagaccgccgccctgcaggtgcccaccctggtgggcagcagcggcaccatcctgaccaccatgcccgtgatgatgggccaggagaaggtgcccatcaagcaggtgcccggcggcgtgaagcagctggagccccccaaggagggcgagagaagaaccacccacaacatcatcgagaagagatacagaagcagcatcaacgacaagatcatcgagctgaaggacctggtgatgggcaccgacgccaagatgcacaagagcggcgtgctgagaaaggccatcgactacatcaagtacctgcagcaggtgaaccacaagctgagacaggagaacatggtgctgaagctggccaaccagaagaacaagctgctgaagggcatcgacctgggcagcctggtggacaacgaggtggacctgaagatcgaggacttcaaccagaacgtgctgctgatgagcccccccgccagcgacagcggcagccaggccggcttcagcccctacagcatcgacagcgagcccggcagccccctgctggacgacgccaaggtgaaggacgagcccgacagcccccccgtggccctgggcatggtggacagaagcagaatcctgctgtgcgtgctgaccttcctgtgcctgagcttcaaccccctgaccagcctgctgcagtggggcggcgcccacgacagcgaccagcacccccacagcggcagcggcagaagcgtgctgagcttcgagagcggcagcggcggctggttcgactggatgatgcccaccctgctgctgtggctggtgaacggcgtgatcgtgctgagcgtgttcgtgaagctgctggtgcacggcgagcccgtgatcagaccccacagcagaagcagcgtgaccttctggagacacagaaagcaggccgacctggacctggccagaggcgtgtacggcaagaagagcggcgccacccacagcatcgaggaggagctgaacatccacatcagcagaggcaccagaaccagaaccctgctgagcagcagaagattctgcagctgctgcagacagcccaccaacctgcccggcagcttcggccccggcaccgcccacctgccccccggccccggcctgcagcccctgctggagagagaccccctgcagcccgccgaggccacccccggcgccctggccgcccaggagagcctgcccgtgcccgccggccacgccagccactag

SEQ ID NO: 147981 - DNA, 3309 bp, Artificial Sequence
  derived and/or modified sequence
atggacgacagcggcgagctgggcggcctggagaccatggagaccctgaccgagctgggcgacgagctgaccctgggcgacatcgacgagatgctgcagttcgtgagcaaccaggtgggcgagttccccgacctgttcagcgagcagctgtgcagcagcttccccggcagcggcggcagcggcagcagcagcggcagcagcggcagcagcagcagcagcagcaacggcagaggcagcagcagcggcgccgtggaccccagcgtgcagagaagcttcacccaggtgaccctgcccagcttcagccccagcgccgccagcccccaggcccccaccctgcaggtgaaggtgagccccaccagcgtgcccaccacccccagagccacccccatcctgcagcccagaccccagccccagccccagccccagacccagctgcagcagcagaccgtgatgatcacccccaccttcagcaccaccccccagaccagaatcatccagcagcccctgatctaccagaacgccgccaccagcttccaggtgctgcagccccaggtgcagagcctggtgaccagcagccaggtgcagcccgtgaccatccagcagcaggtgcagaccgtgcaggcccagagagtgctgacccagaccgccaacggcaccctgcagaccctggcccccgccaccgtgcagaccgtggccgccccccaggtgcagcaggtgcccgtgctggtgcagccccagatcatcaagaccgacagcctggtgctgaccaccctgaagaccgacggcagccccgtgatggccgccgtgcagaaccccgccctgaccgccctgaccacccccatccagaccgccgccctgcaggtgcccaccctggtgggcagcagcggcaccatcctgaccaccatgcccgtgatgatgggccaggagaaggtgcccatcaagcaggtgcccggcggcgtgaagcagctggagccccccaaggagggcgagagaagaaccacccacaacatcatcgagaagagatacagaagcagcatcaacgacaagatcatcgagctgaaggacctggtgatgggcaccgacgccaagatgcacaagagcggcgtgctgagaaaggccatcgactacatcaagtacctgcagcaggtgaaccacaagctgagacaggagaacatggtgctgaagctggccaaccagaagaacaagctgctgaagggcatcgacctgggcagcctggtggacaacgaggtggacctgaagatcgaggacttcaaccagaacgtgctgctgatgagcccccccgccagcgacagcggcagccaggccggcttcagcccctacagcatcgacagcgagcccggcagccccctgctggacgacgccaaggtgaaggacgagcccgacagcccccccgtggccctgggcatggtggacagaagcagaatcctgctgtgcgtgctgaccttcctgtgcctgagcttcaaccccctgaccagcctgctgcagtggggcggcgcccacgacagcgaccagcacccccacagcggcagcggcagaagcgtgctgagcttcgagagcggcagcggcggctggttcgactggatgatgcccaccctgctgctgtggctggtgaacggcgtgatcgtgctgagcgtgttcgtgaagctgctggtgcacggcgagcccgtgatcagaccccacagcagaagcagcgtgaccttctggagacacagaaagcaggccgacctggacctggccagaggcgacttcgccgccgccgccggcaacctgcagacctgcctggccgtgctgggcagagccctgcccaccagcagactggacctggcctgcagcctgagctggaacgtgatcagatacagcctgcagaagctgagactggtgagatggctgctgaagaaggtgttccagtgcagaagagccacccccgccaccgaggccggcttcgaggacgaggccaagaccagcgccagagacgccgccctggcctaccacagactgcaccagctgcacatcaccggcaagctgcccgccggcagcgcctgcagcgacgtgcacatggccctgtgcgccgtgaacctggccgagtgcgccgaggagaagatcccccccagcaccctggtggagatccacctgaccgccgccatgggcctgaagaccagatgcggcggcaagctgggcttcctggccagctacttcctgagcagagcccagagcctgtgcggccccgagcacagcgccgtgcccgacagcctgagatggctgtgccaccccctgggccagaagttcttcatggagagaagctggagcgtgaagagcgccgccaaggagagcctgtactgcgcccagagaaaccccgccgaccccatcgcccaggtgcaccaggccttctgcaagaacctgctggagagagccatcgagagcctggtgaagccccaggccaagaagaaggccggcgaccaggaggaggagagctgcgagttcagcagcgccctggagtacctgaagctgctgcacagcttcgtggacagcgtgggcgtgatgagcccccccctgagcagaagcagcgtgctgaagagcgccctgggccccgacatcatctgcagatggtggaccagcgccatcaccgtggccatcagctggctgcagggcgacgacgccgccgtgagaagccacttcaccaaggtggagagaatccccaaggccctggaggtgaccgagagccccctggtgaaggccatcttccacgcctgcagagccatgcacgccagcctgcccggcaaggccgacggccagcagagcagcttctgccactgcgagagagccagcggccacctgtggagcagcctgaacgtgagcggcgccaccagcgaccccgccctgaaccacgtggtgcagctgctgacctgcgacctgctgctgagcctgagaaccgccctgtggcagaagcaggccagcgccagccaggccgtgggcgagacctaccacgccagcggcgccgagctggccggcttccagagagacctgggcagcctgagaagactggcccacagcttcagacccgcctacagaaaggtgttcctgcacgaggccaccgtgagactgatggccggcgccagccccaccagaacccaccagctgctggagcacagcctgagaagaagaaccacccagagcaccaagcacggcgaggtggacgcctggcccggccagagagagagagccaccgccatcctgctggcctgcagacacctgcccctgagcttcctgccctgcctgcagcccagctag

SEQ ID NO: 147982 - DNA, 3426 bp, Artificial Sequence
  derived and/or modified sequence
atggatgacagcggagaactgggcggactggaaacaatggaaacactcaccgagctgggtgacgagttgactctaggcgatattgacgagatgctccagttcgtctctaatcaggtgggtgaattccctgatcttttctccgagcaattgtgcagcagctttccaggaagcggcggtagcggcagttccagcggcagctctggatcatcaagctcctcttccaacggtagaggttctagcagtggggctgtagacccctcggtgcagcgttccttcacacaggttaccttgccttcctttagcccatcggcagccagtcctcaggcacctaccctacaggtcaaagtgtcccctacttctgtgccgaccaccccccgagccacacccatccttcagcctcgtcctcaaccacagccccagccacaaactcagctccagcaacagaccgtcatgatcactccgacatttagcacgaccccacaaacaagaatcatacaacagcccctcatttaccagaatgccgctacgtcgttccaggtgttgcagccccaggtgcagagcttagttacctcgtcgcaggtgcagcccgtgaccattcaacagcaggtccagaccgtccaggcacagagagttctgactcaaacagctaacggtactctccagacactcgcacctgcaactgtacagacagtggctgcacctcaggtgcagcaggtacctgtgctcgtgcaaccccagatcatcaagaccgactccctggtgttgaccacactcaagacagatggctctcctgtaatggccgcagtgcaaaatccagccctgaccgcacttaccacccccattcaaactgcagccctacaggtgcctacacttgtggggtcatcgggcacaatcctgacaaccatgcccgtgatgatgggccaggagaaggtgcccatcaaacaagttcccggaggggtgaagcagctagagccgcctaaggagggcgagcgccgcacgacacacaatataatcgaaaaacggtaccggtcctccattaatgataaaattattgagctgaaagaccttgtgatgggtacagacgctaagatgcacaaatccggggtgctgcgaaaggcgatcgattacatcaagtacctccagcaggtgaaccacaagctgcgacaagagaacatggtactgaaacttgcaaatcagaagaataagctactgaagggcatcgacctgggatcattggtggataacgaggtagatctcaaaattgaggattttaatcagaacgttctgttaatgtcgcctcctgctagtgatagtggctcgcaggccgggttttcaccgtacagtattgacagcgagcctggctcgcccctgctggacgacgccaaggtgaaggacgaacccgatagcccccctgtcgcactgggcatggtcgacaggagccggatcctgctttgtgtgctgacgtttttgtgcctgtccttcaatccgcttacctcgctcctacaatggggtggtgctcacgacagtgatcagcacccccatagcggctcaggaaggtccgtcctgtccttcgaatccggttccggaggttggttcgactggatgatgccaaccctcttgctgtggctggtcaatggagtgatcgttttgtctgtattcgttaagctcctggtgcatggagagcctgttattcgcccccacagcaggagcagcgtgaccttttggagacaccgtaaacaagccgacctggacctagctcgaggagactttgccgctgccgctggaaacctccaaacctgcttagccgtactcggacgtgctttacctacgtccaggttagacttggcttgcagtctctcttggaacgtgatcaggtacagtcttcaaaagctgcggctagtccggtggctcttgaagaaggtcttccagtgccgtcgtgccaccccagccacagaggctggattcgaagatgaggcgaagacgagtgccagggacgctgccctggcttatcatagactgcaccagctacacatcacaggtaaactgccagccgggtctgcctgtagcgacgttcacatggctctgtgcgccgttaacctggccgagtgtgcagaggagaagatcccaccatccaccctcgtcgaaattcatctgacagcagcgatggggctaaaaacacgatgcgggggaaaactcgggttcctggcctcctacttcctgtcgcgagcccaatcactttgtggcccagagcacagcgctgtgcccgactccctccgctggttgtgtcatccacttggccaaaaattcttcatggagaggtcttggtccgtgaagtcggcggcaaaagagagcctgtattgtgcccagcgtaatcccgcggaccctatcgctcaggtccaccaggccttctgtaaaaatttgcttgagcgagcgatcgagtctctcgttaaaccacaggccaaaaagaaagcgggggatcaagaagaggagtcttgtgaattttccagcgctctggaatacctgaagctgcttcacagcttcgtcgatagcgtgggcgtcatgtcgcccccactgtcacgtagtagcgtcctaaagagtgctctggggcctgatatcatctgcagatggtggacaagtgctattactgtggccatttcttggttgcagggggacgatgctgccgtgagatctcactttaccaaggtcgaacggataccaaaagccctggaagtcactgaaagccccctcgtgaaggccatcttccatgcttgccgggctatgcacgcctccctcccagggaaagcggacggacagcaatccagcttttgtcactgcgaacgcgcatcaggtcacctctggtcctcactcaacgtgtcaggggccacgagtgacccagccctcaaccatgtggtgcaactgctgacttgcgacctgctgctgagtctgaggaccgcactatggcagaagcaagcatccgcgagccaggccgttggcgagacgtaccacgcaagcggagctgagttggccggatttcagcgggatctgggttcactgaggcgactggcacactcattcaggcctgcttaccgtaaagtgtttttgcacgaggctacggttagacttatggccggtgcatccccgacgagaacacaccagttgttagagcatagtctccgcagaagaacaacccagtccactaagcatggggaggttgacgcctggcctggccagcgggagcgcgcgacagccattctgttggcctgcaggcacctgcccttgtcattcctttcctcgcctggccaaagggccgtcttgctggctgaggctgccagaactctggaaaaggtgggcgatagacgcagctgtaacgactgccagcaaatgattgttaagttgggcggcggcactgcaattgccgcttcgtag

SEQ ID NO: 147983 - DNA, 2055 bp, Artificial Sequence
  derived and/or modified sequence
atggacgacagcggagaactgggcggcttggagaccatggaaactctgactgagctcggggatgagctaacactaggtgacatcgacgagatgctgcagtttgtttccaatcaggtgggcgagtttccagacctgttcagtgagcagctgtgctcatctttcccgggttctgggggtagcggatctagcagcgggagttccggcagttcttcctccagtagcaatggccgcggttcctctagtggtgcagtggaccctagcgttcaacgaagtttcacacaggtgaccttaccctccttctcacccagtgccgcctccccgcaagctcctacacttcaggtgaaggtttctcccacgagcgtgccaactacccctcgcgcaacgccgattctccaaccccggcctcaacctcagcctcagcctcagacacagttgcaacaacaaacagtaatgatcaccccgaccttctctaccactccgcagaccaggataatccaacaaccccttatctaccaaaatgctgccaccagtttccaggtgttacagcctcaggtgcagtcattagtgacctcatcacaagttcaacccgtaaccattcagcagcaagttcagactgtccaggcccagcgagttctgacccaaactgctaacggcaccctccagacactggctcctgctacagtgcagacagtcgctgcacctcaagttcaacaggtgcccgtgttagtgcagccacaaatcattaaaacagattcacttgtacttactacgctgaaaaccgatgggtctcctgtgatggctgccgtgcagaatccggccctgaccgcactgactaccccaatccagaccgcagctcttcaggtgccgacccttgtagggtcttctggtaccatcttaaccactatgcctgttatgatgggtcaagagaaggtgccaattaaacaggtacctggtggagtcaaacagctggaaccccccaaggagggggagaggcgcacaacccataatattatcgagaaaaggtatcggagcagcattaacgataaaatcatagagctgaaagatttagtcatgggcaccgatgcgaagatgcataagagcggcgtgctccggaaagcgatcgattacatcaagtatctgcagcaggtcaatcataaacttcggcaagaaaacatggtgctgaagttagccaatcaaaaaaacaaactactcaaagggatcgatctgggatcgctggtcgacaacgaggtcgacttgaagattgaggatttcaaccagaatgtgctgttgatgagcccccccgcttcagacagtggatctcaagctgggtttagtccttactctattgattctgagcccggatcaccattgctcgatgacgctaaggtgaaggatgagccagactcaccgcctgtggcccttggtatggtcgaccggtccaggatcctgctgtgtgtgttaaccttcctgtgcctgagttttaaccccttgaccagcctgctccaatgggggggcgcccacgactccgatcagcatccccactccggtagcggacgctccgtgctatccttcgaaagtggctcaggcggctggttcgattggatgatgcccactctgctgctgtggttggtcaatggtgtgattgtactatctgtgtttgtcaaactgttagtccacggggaacccgtgataaggcctcactcacgcagcagtgtgactttctggcgtcaccggaagcaggccgacctggacctggcaagaggcgtctatgggaagaagtccggggcaacccatagtatagaggaggaactcaacatccacatctcgagaggaactcggacccgaaccctccttagctctagaaggttttgctcttgctgtagacaacctaccaacctgcccgggagtttcggccctggaacagctcacctgccgcccgggcccggtctacaacccctgctggagagggacccactgcagcctgctgaggcgacccccggcgccctagcggcgcaagagtcactgccggtccccgctggacatgcatcgcactag

SEQ ID NO: 147984 - DNA, 3309 bp, Artificial Sequence
  derived and/or modified sequence
atggacgatagcggagagctcggggggttggagacaatggaaactttgacagaactgggagacgagctgactctgggggatattgacgagatgctgcagttcgtgagcaatcaggtcggagagtttcctgaccttttttccgagcaattgtgttctagctttcccgggagcggcggaagtggatcgagctccggctccagtggaagcagttcgagctcaagcaacggtcgaggctcttcgagcggcgccgtcgacccatccgtacagcgaagtttcacacaagtaacactgccttctttctctcccagcgctgcgtccccccaggcccccacactgcaggtcaaagtgtcgccaactagtgtgccaaccacgcctagagcaacaccaatcctccagccaagaccacagcctcagccgcaacctcaaacccaactgcagcagcaaacggtcatgatcacacccacttttagcaccacaccccaaactagaatcattcagcagcctcttatttatcaaaacgcagccacctcgtttcaagtgctgcagccacaggttcagtcgttggtgacatcaagtcaagtgcagccggtcacaatccaacaacaagtccagactgtccaggcacaaagggttctcactcagaccgcaaatggcacgctgcaaaccctagccccagctactgtgcagaccgttgcagctccgcaagtgcagcaagtgcctgtgctggtccagccccaaattataaagacagactctttggtccttacgaccctaaagacagacgggtcaccagtgatggccgcagtccaaaaccctgcactgacagcacttaccacccccattcagacagccgctttgcaggtgcctacgctggttggctcctctggaacaatcttgacgaccatgcccgtgatgatggggcaagagaaggtgcccattaagcaggttcccggtggcgtgaaacaactggaacctcctaaagagggggaacgcaggactactcacaacattattgaaaaacgttatagatcaagtataaatgacaagatcattgaactcaaggacctagttatggggactgacgcgaagatgcacaaatccggggtgctgaggaaggcaattgactacatcaagtacctgcagcaagtcaaccacaaattgcggcaggaaaacatggtgctgaagctggccaaccagaaaaacaaactacttaagggcattgatctcggaagccttgtggataatgaagtcgacctcaagatagaagactttaaccaaaacgttcttttaatgtccccccctgcaagcgactcgggatcccaggccgggttctctccatactccatagattccgagcctggttcccctctgctggacgacgccaaagttaaagatgagcccgatagtcctcccgtcgctttgggcatggtggaccggtctaggattcttctgtgtgtcttaacattcctgtgtctctcctttaatcctctcacatcgctcctgcagtgggggggagcacatgacagcgaccaacaccctcactctgggtctggccgaagtgtgctctccttcgagtctggatccggaggctggttcgattggatgatgcccacactcctgctatggcttgttaacggcgtgatcgtcctgagtgtatttgtgaagctgctcgttcatggtgaaccagttatccggccgcattctagatcatcagttactttttggcgccatagaaagcaagccgatcttgacctggcaaggggcgacttcgccgccgctgcgggtaatttacagacatgtctggcagtgttaggacgggctctgccgacaagtcggttggatttagcttgttcgctgtcctggaatgttattagatattctcttcagaagcttcgcctcgtacgatggctcttgaagaaggtgtttcagtgccgccgagcaactccagctactgaggccggctttgaagacgaggccaagacaagtgcccgggacgccgctctggcataccacagactacaccagctgcacattaccggtaaactgcctgcaggttccgcatgctccgatgtccacatggccctgtgcgcagtgaacctcgccgaatgcgccgaggaaaaaatcccaccttcaaccctcgttgagatccacctaaccgccgctatggggctcaaaaccagatgtggggggaagttaggtttcctcgccagctattttctcagtcgtgctcaaagtctctgcggacctgagcattccgctgtgcccgacagcctccgatggttgtgtcacccactgggccaaaaatttttcatggagcgatcgtggtcagtcaagtcagcagcaaaggaatcactatattgtgcgcagcgtaatcctgctgatcccatcgcacaggttcatcaagcgttttgcaagaatctactggagcgagccatagaaagtttagtgaagcctcaggccaagaagaaggctggagatcaggaagaagagtcctgcgagttttcttctgccctagagtatctgaagctgctgcactcctttgtcgattctgtgggcgtcatgtctccccccctgtcacgaagctccgtgctcaagagtgcattagggccagacatcatatgtagatggtggacatctgccatcaccgtggcaataagttggctgcaaggcgatgatgccgcggtccgaagtcacttcaccaaagtcgagagaatcccgaaagccttagaagtcacagaaagtcccttagtgaaggccattttccacgcttgtagggccatgcacgccagtcttccaggcaaagcagatggacagcagagctcattctgtcactgtgagagagccagtggacacctttggtcctccttaaatgttagcggtgccacaagcgaccccgcgctgaatcatgtggtgcagctccttacctgtgatctgctgctgtccctccggacagcgttgtggcagaagcaagcaagtgcctctcaggccgtgggagaaacatatcacgccagcggagcagagctcgccggatttcaacgtgacctgggctctcttaggaggctggctcacagcttcaggcctgcttatcgtaaagtattcctacatgaagctacagtgagactgatggccggggcttctcccacccgaacgcaccaactgctggagcacagcctgcgccggagaacaacacagtcaacaaaacatggagaggttgatgcttggcccgggcaacgggaacgcgccaccgccattctgcttgcgtgccgacacctgcctctgtccttcctcccatgcctccagccctcctag

SEQ ID NO: 147985 - DNA, 3426 bp, Artificial Sequence
  derived and/or modified sequence
atggatgacagcggggagctgggcggcctggagaccatggagaccctgacagagctgggagatgagctgaccctgggggacattgatgagatgctgcagtttgtgagcaaccaggtgggggagttcccagacctcttcagcgagcagctgtgcagcagcttccctggcagcggcggcagcggcagcagcagcggcagcagcggcagcagcagcagcagcagcaatggccggggcagcagcagtggagctgtggaccccagcgtgcagaggagcttcacccaggtgaccctgcccagcttcagccccagcgctgccagcccccaggcccccaccctgcaggtgaaggtgagccccacctctgtgcccaccaccccccgggccacccccatcctgcagccccggccccagccccagccccagccccagacccagctgcagcagcagacagtgatgatcacccccaccttcagcaccaccccccagacccgcatcatccagcagcccctcatctaccagaatgctgccaccagcttccaggtgctgcagccccaggtgcagagcctggtgaccagcagccaggtgcagcctgtgaccatccagcagcaggtgcagacagtgcaggcccagagggtgctgacccagacagccaacggcaccctgcagaccctggccccagccaccgtgcagacagtggccgccccccaggtgcagcaggtgcctgtgctggtgcagccccagatcatcaagacagacagcctggtgctgaccaccctgaagacagatggcagccctgtgatggctgctgtgcagaacccagccctgacagccctgaccacccccatccagacagctgccctgcaggtgcccaccctggtgggcagcagcggcaccatcctgaccaccatgcctgtgatgatgggccaggagaaggtgcccatcaagcaggtgcctggaggagtgaagcagctggagccccccaaggagggggagaggaggaccacccacaacatcatcgagaagcgctaccgcagcagcatcaatgacaagatcatcgagctgaaggacctggtgatgggcacagatgccaagatgcacaagtctggagtgctgaggaaggccatcgactacatcaagtacctgcagcaggtgaaccacaagctgcggcaggagaacatggtgctgaagctggccaaccagaagaacaagctgctgaagggcatcgacctgggcagcctggtggacaatgaggtggacctgaagattgaggacttcaaccagaatgtgctgctgatgagccccccagccagtgacagcggcagccaggccggcttcagcccctacagcattgattctgagcccggcagccccctgctggatgatgccaaggtgaaggatgagccagacagcccccctgtggccctgggcatggtggacaggagccgcatcctgctgtgtgtgctgaccttcctgtgcctgtccttcaaccccctgaccagcctgctgcagtggggcggggcccatgacagcgaccagcacccccacagcggcagcggccgctctgtgctgagctttgagagcggcagcggcggctggtttgactggatgatgcccaccctgctgctgtggctggtgaatggagtcatcgtgctgtctgtgtttgtgaagctgctggtgcatggagagcccgtcatccggccccacagccgcagctctgtgaccttctggaggcacaggaagcaggccgacctggacctggcccggggggactttgctgctgctgctggcaacctgcagacctgcctggccgtgctgggccgggccctgcccaccagccggctggacctggcctgcagcctgtcctggaatgtcatccgctacagcctgcagaagctgcggctggtgcgctggctgctgaagaaggtgttccagtgcagaagagccaccccagccacagaagctggctttgaagatgaggccaagaccagcgccagagatgctgccctggcctaccaccggctgcaccagctgcacatcaccgggaagctgcctgctggcagcgcctgcagtgatgtgcacatggccctgtgtgctgtgaacctggccgagtgtgccgaggagaagatcccccccagcaccctggtggagatccacctgacagctgccatgggcctgaagacccgctgtggcggcaagctgggcttcctggccagctacttcctgagccgggcccagagcctgtgtggccctgagcacagcgctgtgcctgacagcctgcgctggctgtgccaccccctgggccagaagttcttcatggagaggtcctggagcgtgaagtctgctgccaaggagagcctgtactgtgcccagaggaacccagctgaccccatcgcccaggtgcaccaggccttctgcaagaacctgctggagcgggccatcgagagcctggtgaagccccaggccaagaagaaggccggggaccaggaggaggagagctgtgagttcagcagcgccctggagtacctgaagctgctgcacagctttgtggacagcgtgggcgtgatgagcccccccctgagccgcagctctgtgctgaagagcgccctgggccctgacatcatctgccgctggtggaccagcgccatcaccgtggccatctcctggctgcagggagatgatgctgctgtgcgcagccacttcaccaaggtggagcgcatccccaaggccctggaggtgacagagagccccctggtgaaggccatcttccacgcctgccgggccatgcacgccagcctgcccgggaaggcagatggccagcagagcagcttctgccactgtgagcgggccagcggccacctgtggagcagcctgaatgtgtctggggccaccagtgaccctgccctgaaccacgtggtgcagctgctgacctgtgacctgctgctgagcctgaggacagccctgtggcagaagcaggccagcgccagccaggccgtgggggagacctaccacgccagcggggctgagctggccggcttccagagggacctgggcagcctgcggcggctggcccacagcttccggcctgcctacaggaaggtgttcctgcacgaggccaccgtgcggctgatggccggggccagccccaccaggacccaccagctgctggagcacagcctgcggcggaggaccacccagagcaccaagcacggggaggtggatgcctggccaggccagcgggagcgggccacagccatcctgctggcctgccgccacctgcccctgtccttcctgagcagccctggccagagagctgtgctgctggccgaggccgcccggaccctggagaaggtgggggacagaagaagctgcaatgactgccagcagatgattgtgaagctgggcggcggcacagccatcgccgccagctag

SEQ ID NO: 147986 - DNA, 2055 bp, Artificial Sequence
  derived and/or modified sequence
atggatgacagcggggagctgggcggcctggagaccatggagaccctgacagagctgggagatgagctgaccctgggggacattgatgagatgctgcagtttgtgagcaaccaggtgggggagttcccagacctcttcagcgagcagctgtgcagcagcttccctggcagcggcggcagcggcagcagcagcggcagcagcggcagcagcagcagcagcagcaatggccggggcagcagcagtggagctgtggaccccagcgtgcagaggagcttcacccaggtgaccctgcccagcttcagccccagcgctgccagcccccaggcccccaccctgcaggtgaaggtgagccccacctctgtgcccaccaccccccgggccacccccatcctgcagccccggccccagccccagccccagccccagacccagctgcagcagcagacagtgatgatcacccccaccttcagcaccaccccccagacccgcatcatccagcagcccctcatctaccagaatgctgccaccagcttccaggtgctgcagccccaggtgcagagcctggtgaccagcagccaggtgcagcctgtgaccatccagcagcaggtgcagacagtgcaggcccagagggtgctgacccagacagccaacggcaccctgcagaccctggccccagccaccgtgcagacagtggccgccccccaggtgcagcaggtgcctgtgctggtgcagccccagatcatcaagacagacagcctggtgctgaccaccctgaagacagatggcagccctgtgatggctgctgtgcagaacccagccctgacagccctgaccacccccatccagacagctgccctgcaggtgcccaccctggtgggcagcagcggcaccatcctgaccaccatgcctgtgatgatgggccaggagaaggtgcccatcaagcaggtgcctggaggagtgaagcagctggagccccccaaggagggggagaggaggaccacccacaacatcatcgagaagcgctaccgcagcagcatcaatgacaagatcatcgagctgaaggacctggtgatgggcacagatgccaagatgcacaagtctggagtgctgaggaaggccatcgactacatcaagtacctgcagcaggtgaaccacaagctgcggcaggagaacatggtgctgaagctggccaaccagaagaacaagctgctgaagggcatcgacctgggcagcctggtggacaatgaggtggacctgaagattgaggacttcaaccagaatgtgctgctgatgagccccccagccagtgacagcggcagccaggccggcttcagcccctacagcattgattctgagcccggcagccccctgctggatgatgccaaggtgaaggatgagccagacagcccccctgtggccctgggcatggtggacaggagccgcatcctgctgtgtgtgctgaccttcctgtgcctgtccttcaaccccctgaccagcctgctgcagtggggcggggcccatgacagcgaccagcacccccacagcggcagcggccgctctgtgctgagctttgagagcggcagcggcggctggtttgactggatgatgcccaccctgctgctgtggctggtgaatggagtcatcgtgctgtctgtgtttgtgaagctgctggtgcatggagagcccgtcatccggccccacagccgcagctctgtgaccttctggaggcacaggaagcaggccgacctggacctggcccggggcgtgtatggcaagaagagcggggccacccacagcattgaggaggagctgaacatccacatcagccggggcaccaggaccaggaccctgctgagcagccgccgcttctgcagctgctgccggcagcccaccaacctgcccggcagctttggacctggaacagcccacctgcccccaggccctggcctgcagcccctgctggagcgggaccccctgcagcctgctgaggccacccctggggccctggccgcccaggagagcctgcctgtgcctgctggccacgccagccactag

SEQ ID NO: 147987 - DNA, 3309 bp, Artificial Sequence
  derived and/or modified sequence
atggatgacagcggggagctgggcggcctggagaccatggagaccctgacagagctgggagatgagctgaccctgggggacattgatgagatgctgcagtttgtgagcaaccaggtgggggagttcccagacctcttcagcgagcagctgtgcagcagcttccctggcagcggcggcagcggcagcagcagcggcagcagcggcagcagcagcagcagcagcaatggccggggcagcagcagtggagctgtggaccccagcgtgcagaggagcttcacccaggtgaccctgcccagcttcagccccagcgctgccagcccccaggcccccaccctgcaggtgaaggtgagccccacctctgtgcccaccaccccccgggccacccccatcctgcagccccggccccagccccagccccagccccagacccagctgcagcagcagacagtgatgatcacccccaccttcagcaccaccccccagacccgcatcatccagcagcccctcatctaccagaatgctgccaccagcttccaggtgctgcagccccaggtgcagagcctggtgaccagcagccaggtgcagcctgtgaccatccagcagcaggtgcagacagtgcaggcccagagggtgctgacccagacagccaacggcaccctgcagaccctggccccagccaccgtgcagacagtggccgccccccaggtgcagcaggtgcctgtgctggtgcagccccagatcatcaagacagacagcctggtgctgaccaccctgaagacagatggcagccctgtgatggctgctgtgcagaacccagccctgacagccctgaccacccccatccagacagctgccctgcaggtgcccaccctggtgggcagcagcggcaccatcctgaccaccatgcctgtgatgatgggccaggagaaggtgcccatcaagcaggtgcctggaggagtgaagcagctggagccccccaaggagggggagaggaggaccacccacaacatcatcgagaagcgctaccgcagcagcatcaatgacaagatcatcgagctgaaggacctggtgatgggcacagatgccaagatgcacaagtctggagtgctgaggaaggccatcgactacatcaagtacctgcagcaggtgaaccacaagctgcggcaggagaacatggtgctgaagctggccaaccagaagaacaagctgctgaagggcatcgacctgggcagcctggtggacaatgaggtggacctgaagattgaggacttcaaccagaatgtgctgctgatgagccccccagccagtgacagcggcagccaggccggcttcagcccctacagcattgattctgagcccggcagccccctgctggatgatgccaaggtgaaggatgagccagacagcccccctgtggccctgggcatggtggacaggagccgcatcctgctgtgtgtgctgaccttcctgtgcctgtccttcaaccccctgaccagcctgctgcagtggggcggggcccatgacagcgaccagcacccccacagcggcagcggccgctctgtgctgagctttgagagcggcagcggcggctggtttgactggatgatgcccaccctgctgctgtggctggtgaatggagtcatcgtgctgtctgtgtttgtgaagctgctggtgcatggagagcccgtcatccggccccacagccgcagctctgtgaccttctggaggcacaggaagcaggccgacctggacctggcccggggggactttgctgctgctgctggcaacctgcagacctgcctggccgtgctgggccgggccctgcccaccagccggctggacctggcctgcagcctgtcctggaatgtcatccgctacagcctgcagaagctgcggctggtgcgctggctgctgaagaaggtgttccagtgcagaagagccaccccagccacagaagctggctttgaagatgaggccaagaccagcgccagagatgctgccctggcctaccaccggctgcaccagctgcacatcaccgggaagctgcctgctggcagcgcctgcagtgatgtgcacatggccctgtgtgctgtgaacctggccgagtgtgccgaggagaagatcccccccagcaccctggtggagatccacctgacagctgccatgggcctgaagacccgctgtggcggcaagctgggcttcctggccagctacttcctgagccgggcccagagcctgtgtggccctgagcacagcgctgtgcctgacagcctgcgctggctgtgccaccccctgggccagaagttcttcatggagaggtcctggagcgtgaagtctgctgccaaggagagcctgtactgtgcccagaggaacccagctgaccccatcgcccaggtgcaccaggccttctgcaagaacctgctggagcgggccatcgagagcctggtgaagccccaggccaagaagaaggccggggaccaggaggaggagagctgtgagttcagcagcgccctggagtacctgaagctgctgcacagctttgtggacagcgtgggcgtgatgagcccccccctgagccgcagctctgtgctgaagagcgccctgggccctgacatcatctgccgctggtggaccagcgccatcaccgtggccatctcctggctgcagggagatgatgctgctgtgcgcagccacttcaccaaggtggagcgcatccccaaggccctggaggtgacagagagccccctggtgaaggccatcttccacgcctgccgggccatgcacgccagcctgcccgggaaggcagatggccagcagagcagcttctgccactgtgagcgggccagcggccacctgtggagcagcctgaatgtgtctggggccaccagtgaccctgccctgaaccacgtggtgcagctgctgacctgtgacctgctgctgagcctgaggacagccctgtggcagaagcaggccagcgccagccaggccgtgggggagacctaccacgccagcggggctgagctggccggcttccagagggacctgggcagcctgcggcggctggcccacagcttccggcctgcctacaggaaggtgttcctgcacgaggccaccgtgcggctgatggccggggccagccccaccaggacccaccagctgctggagcacagcctgcggcggaggaccacccagagcaccaagcacggggaggtggatgcctggccaggccagcgggagcgggccacagccatcctgctggcctgccgccacctgcccctgtccttcctgccctgcctgcagcccagctag

SEQ ID NO: 147988 - DNA, 3426 bp, Artificial Sequence
  derived and/or modified sequence
atggacgacagcggcgagctgggcggcctggagaccatggagacccttacagaactaggagacgagctgactctcggagacatcgatgagatgcttcagtttgtctccaaccaggtaggagagtttccggatttgtttagtgagcagttatgctcaagctttccaggcagtggaggaagcggttcctctagcggcagttccggaagctcatcttcatcctctaacggaaggggctcatcaagtggcgccgtagatccctctgttcagaggagctttacccaggtgaccctcccatcctttagtccaagcgccgcgagccctcaggcccctaccctgcaggtgaaggtgtcccctactagtgtgcccactaccccgagagctactccaatattgcaaccaagacctcaaccacaacctcagccgcagacccagctgcagcagcagactgtcatgattacacccacattcagcactactccacagactagaatcatacaacagcctctcatctaccagaacgctgccaccagcttccaagtgcttcagccgcaggtacaatccctcgtaacctcttcacaggtgcagcccgtgaccatacagcaacaggtccagactgtccaggcgcagagagtgctcactcagaccgcaaacgggaccctgcaaactctcgccccagctacagtgcaaaccgtcgctgccccccaggtacagcaagtgccagtgctggtccagcctcagattattaaaactgactctttggtgctcacaactctcaaaaccgatgggtcacccgttatggcggccgtccagaatcccgccctgacggctctgaccacaccgatccaaacggccgcgttacaagtgcccacactggttggaagctctggaaccatcctaactaccatgcccgtgatgatgggccaagagaaggtgccaattaaacaggtccccggcggagtaaaacaactagaacctcctaaggaaggggagcgtagaaccacgcacaatattatcgagaagagatacagatcatccatcaacgacaaaattattgagctgaaggatctggtgatgggcactgacgcaaagatgcataaaagtggcgtcttacgtaaagcaatcgactatattaagtacctgcagcaggttaaccataaacttcgacaggagaatatggtgttgaaattagctaatcaaaaaaataagctgctgaaaggtattgatctggggtccctggttgataatgaagtagatttgaaaatcgaggactttaaccagaatgtgttactgatgagtcctcccgcgagtgattcaggctcccaggcaggcttcagtccttacagcatagacagcgaaccaggtagtccactcctggatgacgccaaggtaaaggacgagccagattctccaccagtcgctctcggcatggtggataggtccaggatcctgctttgcgttctgacctttttgtgcttgagtttcaacccactgacatcccttctacagtggggcggggcccatgattctgaccagcacccacacagcggcagcgggagatccgttctgtctttcgagagcgggtctggcggttggttcgactggatgatgcctaccctgctgctatggctagtgaatggcgtcattgtcctgtctgttttcgtaaaactgttagttcatggcgaacccgtcatacggccccattccagatcgagtgtaacgttttggcgacaccgaaaacaggctgatctggatctggcacggggcgatttcgccgctgctgccggtaacctccaaacatgcctcgctgtcctgggaagggccctacccacgtcccgtctggatttggcatgttctctatcttggaatgtcatccggtatagcctgcagaagctgagactagtcagatggctcctgaaaaaggtgttccagtgtaggagggctactccagctaccgaggcaggattcgaagatgaggccaagacgagcgctcgggatgccgccctggcataccatagattacatcagctgcacatcaccggcaaattgcccgccggaagcgcatgttccgacgtgcacatggctttgtgcgcagttaatcttgctgaatgtgctgaggagaagatcccccctagcacattggtagaaatccacttgaccgcagcaatggggcttaaaactcgatgtggcgggaaactcgggtttctagcgtcttatttcctgtcccgcgcccagtcactctgcgggcccgaacacagcgccgtgcctgacagcctgaggtggctgtgccacccactgggacaaaagttcttcatggagcgctcctggagtgtgaaatcggcggctaaggaaagcctgtactgcgcccagcgcaaccccgccgatcccattgcccaggtgcatcaggccttctgtaaaaatctcttagaacgggcgatcgagtccttggtgaagccacaggccaagaagaaggctggtgatcaggaagaggagagctgtgaattctcttccgcgctggagtacctgaagctgctacactcctttgttgattcagtgggcgtcatgtctcccccgctatctagatcctccgtgctgaagtcggccctggggccagacatcatttgcaggtggtggacttcagcaatcacagtggcaatctcctggctgcagggtgatgatgcagccgtgcggagtcatttcactaaggtagaaagaatccctaaagccttggaggttactgaaagccccctagtgaaggccatcttccacgcctgcagggccatgcacgcatccctgcctggcaaggccgatggacaacaaagttctttttgtcattgcgagcgggcctccggacacttgtggagctcccttaacgtgtccggggcaacaagcgaccccgcgcttaaccacgtggttcagttgttaacatgcgacctgttgttatctctgaggacagcattatggcagaagcaggctagcgcgagccaggccgtgggagaaacctatcacgcgagtggcgccgagttggctggatttcaaagggacctggggagcctgcgtcgcctcgcacactcgtttcggcctgcatacaggaaagtttttcttcacgaagctactgtgcggcttatggctggagcctctccaacacgtacccatcagctgctcgaacactccctgaggaggaggactacccagtctactaagcacggcgaggttgatgcttggccgggacagagagagagagcaaccgcaatactcttggcctgccgccatctgccgctcagttttctgtcatcacctggtcagcgtgccgtgctcctagccgaagccgcaaggacactggagaaagttggcgaccggagatcatgcaatgattgtcagcagatgatagtgaagttaggtggcggaactgcgatcgccgcgagctag

SEQ ID NO: 147989 - DNA, 2055 bp, Artificial Sequence
  derived and/or modified sequence
atggacgacagcggcgagctgggcggcctggagaccatggagaccttaaccgaactaggcgatgagcttacactgggagacattgacgagatgcttcagtttgtgtcaaaccaggttggtgagtttccagacttgttttccgagcagctgtgtagttcctttcccggcagcggcggtagcggatcctcatccggcagttccggaagcagcagcagctcgagcaacggtagaggaagcagttcaggtgctgtcgatccctcagttcagcgaagctttacccaggtgacactgccaagcttctcacccagcgcagcttctccccaggcccctactctgcaggtgaaagtgtctccgactagtgtacctactacccctcgggccacccccatactacaaccacggccacagcctcagccccagccgcagacccaactccaacagcaaacggtcatgatcactccaacgttttccaccacaccccagacccgaatcattcagcagcccttaatctatcaaaacgctgccacctccttccaagtcctccagcctcaggtgcagtcgctggttaccagttcacaggtccaaccggtgaccattcaacaacaagtccagaccgttcaggcccagcgcgtactgacccagacagctaatggcaccttgcagaccctggctccagccaccgtacaaaccgttgctgcgccccaagtgcagcaggtgccagtgctcgtgcagccccaaatcatcaagacagactcattggtgcttactacactgaaaactgatggttctcctgtcatggctgccgttcaaaacccagccctgacagctttgactacccccattcagaccgccgccttacaggtcccaacgcttgtgggaagtagtggtactatccttacaacaatgcccgtcatgatgggccaggaaaaggtgcccatcaaacaggtgcctggcggggtgaaacagctggagcccccgaaagagggagagcggcgaacaactcacaatatcattgagaagagatacagaagttccatcaatgataaaattatagagctcaaagacctcgtcatggggactgatgccaaaatgcataagtctggtgtgttaagaaaggccatcgattacattaagtatcttcagcaggtgaaccacaagctccggcaggagaacatggtcttaaagctcgctaatcagaagaataaactgctcaaggggatagatttaggtagtctggtcgataacgaagtggaccttaagatagaggattttaaccagaacgtccttctcatgagcccaccagcctccgattcgggatcccaggccgggttcagtccttattcgattgacagtgagcctggatcccccttgctagatgacgcaaaggtgaaagatgagcctgattctccccctgtggcactgggcatggtggaccgtagtcggattctgctttgtgtgttgacattcctctgcctgtctttcaatccacttacctcactgctgcaatggggaggtgcccatgacagcgaccagcacccccactctggcagcggacggtccgtattgagcttcgaatccggaagtgggggatggtttgattggatgatgcccacgctgctcctttggctggtcaacggggtcatcgtcctctccgtgttcgtaaaactgcttgttcacggagagccagtgatcaggccccactcaaggtcaagtgttactttctggaggcaccggaaacaggcagacctggacctggctcgcggcgtgtacggtaagaagtctggcgcaactcactccattgaagaagagttgaacattcacatctcaagaggcactcgcacccggacactgctgtctagtcggagattctgttcctgttgtaggcaaccaaccaatctccctggcagctttggacccggtaccgcgcacctccctccaggcccaggcctacagccccttttggaacgggatccactgcaacccgcagaagctacacccggcgccttggcagctcaagagtctctgcctgtaccagcgggccacgcttcacactag

SEQ ID NO: 147990 - DNA, 3309 bp, Artificial Sequence
  derived and/or modified sequence
atggacgacagcggcgagctgggcggcctggagaccatggagaccttgacggagctgggagatgaactgactctcggagacattgatgagatgctccaattcgtcagtaatcaagttggagaattcccagacctgttttctgagcagctttgctcaagctttccaggatcgggcggctcaggttcctcctctggcagctcagggagcagctcctctagctccaatggtaggggctcttcgtcgggggcggtagacccctctgtgcagcgctcctttacacaggtgaccctgcccagcttctctccgtcagccgcttccccacaagctccgaccctacaagtcaaggtgagccctacatcggtgcccactactcctcgggccaccccaattctgcagcctcgccctcagccccaaccacagccacagacccaattacagcagcagactgtgatgattacccctaccttctccacaactcctcaaacacggattattcagcagcccctgatctatcaaaacgctgcgacgagttttcaggtgttacagccccaagtgcagtctcttgtcactagtagccaagtccagcccgtgaccatccagcagcaagtccaaactgtccaggcccagcgggtgctgacccagaccgctaatggcaccttgcagactctggctcctgcaactgtgcaaaccgtcgcggctccgcaggttcagcaggtgcctgtgctcgtacagcctcagataattaaaacagactcgctcgtgttgactacactgaagacagacgggagtccagttatggcagctgtccaaaacccagctctgaccgcccttacaacaccaatccaaacagctgctctgcaagtcccaacactagtcggcagttccggcacaattttgactacaatgccggtgatgatgggccaagagaaggtacccatcaagcaggtgcctgggggcgtcaaacagctcgagccaccgaaagagggtgagaggcgtaccactcataacatcatcgaaaagaggtacaggagctcaatcaacgacaaaattatcgagctgaaagatctggtgatggggaccgacgctaaaatgcacaagtccggggtgctccggaaagcgatcgactacatcaagtacctacaacaggtgaatcacaagctccggcaggaaaatatggtcctcaagttagcgaatcagaagaataagttgctcaagggaatcgatctgggctcactcgttgataatgaggtcgacctgaagatagaggacttcaatcagaacgtcttgctcatgtctccccctgctagcgattcaggatctcaggcaggattttctccttactccattgactctgagcccggttccccactcctcgatgatgcaaaagtgaaggacgagcctgactcaccaccagtggctcttgggatggtggatcggtcccgcattctgctttgcgtgttgacctttctttgcctgtcatttaacccactcaccagtttgctgcaatggggaggggcccacgacagtgaccaacacccccatagcggaagcgggcggagcgtgctcagctttgagagtgggagcggaggctggttcgactggatgatgcctacccttctgctgtggctagtcaacggggttattgtgctgtcggtattcgttaagctgctcgtacacggagagccggtgattagaccccattccaggtcctccgtgaccttctggcggcatagaaagcaggccgacctggaccttgctagaggcgacttcgccgcagctgcaggtaatctgcagacatgcttggccgtgctcgggagggctcttccaacaagtcgcctggacttggcttgttctctcagctggaacgtgataaggtactctctgcaaaagctcagactcgtgcgctggctactgaagaaagtgttccaatgtcgacgggccaccccagctaccgaggctggctttgaggatgaagctaagacgagcgcacgagacgccgcattggcttaccacaggcttcaccagctgcacataacagggaaactcccagcgggctcggcctgcagcgatgttcacatggccttgtgcgcagtgaatctcgccgaatgcgccgaggagaaaattcccccaagcaccttggtggagatccacctaacggctgctatggggttgaagacacgctgcggcgggaaactgggcttcctggcctcctattttctgtctagagcacagagcctctgtggccctgagcactctgccgtgcccgattccctccggtggctgtgccacccactgggtcagaaatttttcatggagaggagctggagcgtgaagtcagcagctaaagaaagtctgtactgtgcccaaagaaatcctgccgatcctatcgcccaggtacatcaggctttttgtaagaatctgttggaaagggcaatcgaatcgttagtcaagccgcaggcgaagaaaaaagctggagaccaggaagaggagtcctgcgaattttcatcagctctcgagtatctgaaattgctccactcctttgtggactctgtgggcgtcatgtcacccccattgtcccggtctagtgtgctgaagtccgccctagggcctgatataatttgtagatggtggacctctgctataactgttgctataagctggctgcaaggggatgatgccgcggtgcgcagccattttacaaaggtggaacgcattcccaaggccctagaagtaacagagagcccgctcgtgaaagctatcttccatgcatgtcgggcaatgcacgcatcccttcctggaaaagcagatggtcagcaatcatccttttgtcactgtgaaagggcgtccggacatctgtggtcatccctgaacgtatctggggctacttctgatccggccctgaatcacgttgtgcagttgctgacctgcgacctcctgctttctttgaggactgcattatggcagaagcaagcgtcggctagtcaagcggtgggagagacgtatcatgctagcggagccgaacttgctggctttcagcgagacctaggtagcttgaggcgactcgctcactccttcagacctgcctaccgcaaagtgtttctccatgaggctaccgtgaggctgatggcaggcgcctcgcctacccggacgcatcagttgctcgagcatagtttgcggagacggaccacacaaagcaccaaacacggggaggtcgatgcgtggcctggacagcgtgaaagagctactgccatactgctggcctgccgccacctccctttgtcatttttgccctgcctgcagccgtcctag

SEQ ID NO: 147991 - DNA, 3426 bp, Artificial Sequence
  derived and/or modified sequence
atggacgattctggggagctcggagggctcgaaactatggaaactctcacagagttaggagatgagctcaccctgggagacatcgatgaaatgttgcagttcgtatccaatcaagttggagagttccccgacctttttagtgaacagctgtgtagctcctttcccggaagcgggggaagcggctcttctagcggatcatcgggaagttcatcatcctccagcaacgggagaggatcctcctcaggagctgtagaccctagcgttcagagatctttcacacaggtgactctgccatccttttccccgagcgcagcctccccccaggctcccacgttacaggtcaaggtgagtcccacctctgttcccaccaccccccgagccactccaatactccagcccagaccccagccccagccccaaccgcagactcagctgcaacagcagactgtgatgattaccccgaccttttccactactccgcagacccgcattattcaacaaccccttatataccagaatgctgccacttccttccaagtgctacaaccccaggtacagagtcttgttacctcctcccaagttcagcctgtgaccatccagcagcaggtacagacggtgcaggcccagcgggtgttaacacagactgctaatggcaccctgcagacacttgctcccgctaccgtgcaaacagtagcggcaccacaggttcagcaggttcccgtgctcgtccagcctcaaatcatcaaaactgattcattggtccttaccacccttaagactgatgggagtcctgttatggctgcagtgcaaaaccccgctcttacggctctcactacaccgatccaaactgccgctctgcaggtgccaacactcgttggtagtagtggcacaatcctgacaacaatgcccgtcatgatgggccaggaaaaggtcccaattaaacaggtccctggtggagtgaaacagttagaacctccgaaagaaggagaacgtcggacaactcacaacattattgaaaaaaggtatagatcatcaattaatgacaaaattattgagttgaaagatttggtcatgggtacagatgctaaaatgcacaagtctggtgtgctacggaaagcaatcgactatattaagtaccttcagcaggttaatcataagctgcggcaggagaacatggtcttgaaattagccaatcagaagaataaactcttgaaggggattgatctcggatcccttgtggacaacgaggtggacctgaaaatcgaagactttaatcagaatgtcctgctgatgagccccccagcttcagactccggatctcaggcagggttctctccttatagtattgacagcgagccaggctcaccactcctcgacgatgccaaagtgaaggatgaaccggactctccacctgtggccttgggaatggtcgacagatctcggattctgctgtgtgtgttaacgtttctatgtctctcatttaatcccctaacatctctgcttcaatggggaggtgcacacgacagcgatcagcacccccattctgggagtgggaggtccgtcctctccttcgaatcaggaagcgggggatggttcgactggatgatgccaactctgctcctatggctcgtaaatggggtcattgtcttgtctgtgttcgtgaaactcttggtgcatggggaaccggttattagaccacactcacgatccagcgtgacattctggagacatcggaaacaggccgatctcgatttagcccgaggcgactttgctgctgcagccggtaacttacagacatgtcttgcagttctgggacgcgctctgccaacttcgcgtctagatctggcttgctccctgtcctggaacgtgatccggtattcactccaaaagttgcgactggtccgctggctcctcaagaaggttttccagtgcagacgtgccacacctgctaccgaggcaggattcgaagatgaggccaaaacgagcgccagggacgccgctctggcataccaccgattacatcaattgcacatcacaggcaagttgcccgctgggagtgcttgttctgacgttcacatggcactatgtgcagtgaatcttgctgaatgtgccgaagagaagataccgccatctaccctcgtggaaatccaccttaccgctgccatgggactgaaaactcgctgcggtggaaaactgggctttctcgcctcatatttcctgtcacgggcacaatcactgtgcgggccagaacacagcgcggtgccagacagcctgcgatggctgtgtcaccccttggggcagaagttcttcatggagcgaagttggtcagtgaagagtgcagcgaaagagagcctttactgtgcacagagaaacccggctgatcctatcgcccaagttcatcaagcattttgcaaaaacttgctggaaagagccatcgaaagtctggtaaaaccgcaggcaaagaagaaggctggtgatcaggaagaggagagctgcgaattcagctctgctctggaatatttgaaactcctgcatagtttcgtggattctgttggcgtcatgagccccccattgtcacgcagctccgtactgaaatcagcccttggtcccgacatcatttgccgctggtggacatctgccatcacggtggctatcagttggctccagggggacgatgctgctgtgaggtcccatttcaccaaggtggaacgaattcctaaagcccttgaggttacagagagcccactggtcaaggcaatctttcatgcttgcagggcgatgcatgccagtcttccaggaaaagctgacgggcagcagtcctctttctgccactgtgagcgtgccagcggacatttatggagttcattgaacgtgtccggagccacctccgacccagcgctcaaccatgtagtgcagctcctcacctgcgatctgctcctcagcctccggacggccttatggcagaaacaggcatctgctagccaggccgtgggagagacctatcacgccagcggcgctgagttggcgggatttcagagggacctcggaagcctgcgcagattagctcactcgttccgccctgcgtaccgcaaagttttcttgcatgaggccacagtcagattgatggccggagcttcacctactaggacacaccaactgctggaacatagtctccgacgacgcactactcagtccacgaaacatggcgaagtggatgcttggccgggtcagcgggagagggctacagcgatactgctggcgtgtcggcacctgcctctttcttttctttcctctcctgggcagagagcagttttactggccgaggccgctcgaacacttgaaaaagttggcgatcgcagatcttgcaacgactgccagcagatgatcgttaaactgggcggaggcactgcaatcgccgcttcatag

SEQ ID NO: 147992 - DNA, 2055 bp, Artificial Sequence
  derived and/or modified sequence
atggacgactccggcgagctcgggggattggaaaccatggagactctgaccgaactaggagatgaactcaccctgggggatatcgatgagatgcttcagtttgtgtcaaatcaagtgggagagtttcctgacctgttcagcgaacagctctgttcctcgttccccggtagtggcggatcaggatccagctcaggctcctcaggttcatcttcttcttccagcaatggccgaggaagctctagcggcgctgtggacccctccgttcagcggtcattcactcaggtaacactaccttccttttcgccctcggctgcctcaccgcaagcccctacactgcaagtgaaagtgtccccaacatcggtccccactacgcccagggcaactcccatccttcagcctcggcctcagccacagccacagccacagacacagctgcaacagcaaacagtcatgataacccctaccttttcaaccactccccagacccggatcatacagcagccacttatatatcaaaacgcagccacttcatttcaggtgctccaaccccaggtacagagtctggttacctcttcccaagtccaacccgtcacgatacagcagcaggtgcagacagttcaagcccagcgggtgctcactcagaccgccaacggcacgctgcaaaccttagctcccgcaaccgtacaaaccgttgctgcccctcaggtgcagcaagtgcctgtgctggtccaaccgcagatcattaaaacagacagcctggtcctaaccactttgaagactgatgggtcaccagtaatggcagcagtccagaatcctgccctgacggccctgactacacccatccaaacagctgcacttcaagtacctaccctggttggtagctctggtacaatactgactactatgccagttatgatgggccaggagaaggtgccaatcaagcaggtcccagggggagttaagcaactggagccacctaaggagggcgaaaggcgaactacacacaacatcatcgagaaaagatatcggtcttccattaatgacaagattatcgagctcaaggacctcgtgatggggaccgacgcaaaaatgcacaagtccggagttcttagaaaagccatagattatataaagtacttgcagcaggttaatcacaaactgcggcaggagaatatggtgctaaaattagccaatcagaagaacaagctgttaaaggggatcgatctgggttcgctagtggacaatgaagtggacctcaagattgaggatttcaatcaaaacgtgctgctgatgagccctcctgctagcgatagcgggtctcaggcgggtttttccccctactcaatcgacagtgaaccagggtccccattgttggatgacgcaaaagtaaaggacgagcctgatagcccgcctgtggccttaggcatggtggacaggtctcgtatcctgctatgtgtgctgacgttcctatgcctgtctttcaatccgctgacttctctgttacagtggggcggtgcacacgactccgatcaacacccccactcaggcagtgggcgaagtgtgttgagctttgagtccgggagcggaggttggtttgattggatgatgcccactctcctgttatggctggtgaacggagtgattgtgctgagcgtatttgtgaaactgctcgtacatggagagcctgttattaggccccatagccgaagtagtgtcaccttttggaggcaccggaagcaggcggatttggacttggccagaggcgtctacggtaaaaaatctggcgctacgcactctatcgaagaggaactgaatattcatatttcccggggtactaggacccggaccctcttatccagcagacgtttttgcagttgctgtcgacaaccgaccaatctgccaggcagcttcgggccaggtaccgctcatctccctccaggcccaggtctgcaaccgttgctagagagggacccgcttcagccagccgaggccacacccggtgctctcgctgcgcaggaatctctccctgtgcccgcaggacatgcatcacactag

SEQ ID NO: 147993 - DNA, 3309 bp, Artificial Sequence
  derived and/or modified sequence
atggatgattctggggagctgggaggtttagagaccatggaaaccctgaccgagctcggggacgaactgactctgggggacatcgacgagatgcttcagtttgtgtccaaccaggtaggggaattccctgatttgttttctgagcagctttgctcctcttttccgggaagcggcggatcaggcagctctagcggcagcagcggtagtagtagttcttcaagtaatggaaggggtagcagctctggggcagtggatccctcagtgcaaaggagcttcacccaggtgactttgcctagcttctccccttccgcagcatcaccacaggcccctacccttcaagtaaaggtctcaccaacatccgtgccaacaacgccacgcgcaactcctatcctgcagccacgtccccagcctcagcctcagccccagacacagttacagcagcaaacggttatgatcacccccactttcagcactacaccacagacccggattatccagcagccactgatttatcaaaacgctgccacaagctttcaggtcctgcagccccaggtacagtcccttgtcactagctcacaggtgcagcccgtgactatccagcagcaggtacagaccgtccaggcccagagggtcctgactcagactgcaaacggcaccctgcagacattggctcccgcaacagttcagacagtcgcggctccccaagtgcagcaggtgccggtgctggttcagccacagatcatcaaaactgacagtcttgttttgacaacacttaagacggacgggtctcccgtgatggctgctgtacaaaacccggcattgaccgcactgactacacctatccagaccgccgctttgcaggtccctactctggtcgggtcatcagggactatcctaacgaccatgcccgtcatgatggggcaggagaaggtgcctatcaagcaggtgcctgggggagtaaaacagctggaaccgccaaaggagggagaacgaagaacgactcataacattatcgaaaaacgataccgctcaagcattaacgacaagattatcgaactgaaggatctggtgatggggaccgacgctaagatgcataaatccggcgtcctcaggaaagctatcgactatattaagtacctccaacaggtcaatcataagctgcgccaggagaacatggtgttgaagctcgccaatcagaagaataaactgttaaaaggaatcgacctgggctctttggtcgataatgaagtggacctgaaaatcgaagatttcaatcagaacgtgctgctgatgagtcccccagcctcagattccggaagccaggcaggcttcagcccgtacagcatcgacagcgagcccggtagcccgctgttggatgacgccaaggtgaaggatgaacccgattcaccgccagtggcactgggaatggtggatcggtctcgaatcctactctgtgtcctgacgttcctctgtctctcctttaacccccttacatcactcttgcaatggggtggggctcatgatagcgaccaacacccacattccggatccggaagatctgttttgtcctttgagagcggatctgggggatggtttgactggatgatgccaaccctcctgctgtggctggtaaatggcgtcatcgtcctatcagttttcgtcaagctgctggttcacggtgagccagtgatccgaccacacagccgatcttctgtaacgttttggcgccatcgtaagcaggccgatctagatctcgccagaggagattttgctgccgcagccggtaatctccagacatgcttagccgtcctgggccgagctttacccacatcgagacttgatctcgcgtgttccctgtcctggaatgttattcgatactccctgcagaaattgagactggtgaggtggcttctcaagaaagtctttcaatgccgccgagccacccccgctactgaggcgggattcgaggatgaggccaaaacatccgcaagggacgcagcactggcataccaccgcctccaccagctgcatattacggggaagctgccggcaggcagtgcctgttcagacgtgcatatggctctttgtgctgtaaacctggctgaatgcgcggaagaaaagatcccaccgtccacactggtggaaatccatctgactgcagccatggggctgaaaacgagatgtggcggtaaacttggcttcttagcaagctacttcctgtcgcgtgcccagtcactgtgcggccctgagcatagcgcagtccccgactccctcaggtggctgtgccacccccttggccagaagttttttatggaaaggagttggtcagtaaagtctgccgcaaaggaaagcctgtattgtgcccagaggaatcccgctgatcccatcgcccaggtacatcaggccttctgcaaaaacttgctggaacgagccatcgaatccttggtgaaaccgcaggcaaagaagaaggctggcgaccaagaggaagaatcttgcgagttctcttcagcactcgaatacctcaaactcctgcattcattcgtggattctgtcggcgtaatgtctccccctctgagcaggtcttccgttctgaagtccgccttagggccagacatcatctgccgctggtggactagcgccataacggttgccatttcctggttgcagggggatgacgcagctgtccgctcacatttcaccaaagttgaaaggatccccaaggcattggaagtcactgaatcacccctggtaaaggctatctttcacgcgtgcagagctatgcacgcttcactcccgggaaaggcagatggccagcagtcctcattttgtcactgtgagagggcatcggggcacctttggagcagcctgaacgtaagcggtgccacgtcggaccccgcattgaaccacgtggtgcaattgctgacttgcgatctgttgctctcactgaggacggctctgtggcagaaacaggctagtgcctctcaagccgttggagagacgtaccatgcatcgggcgctgagctggcaggcttccaaagagatcttggttctctgaggagattggcccattccttcaggcccgcatacaggaaggtgttcctgcacgaggccacagtgaggctcatggccggtgcctctcctacaaggactcatcagctcctggagcactccctcaggaggagaactacgcagtcgacaaaacatggagaggttgatgcatggccaggtcaacgagaaagagcaaccgccatccttctcgcctgcaggcatttaccgttgagttttctgccttgtctgcagccatcgtag

SEQ ID NO: 147994 - DNA, 5240 bp, Artificial Sequence
  derived and/or modified sequence
ctttctgtgcggcgcccgggcgcaacgcaaacatggcggcgggtggcacccgtcggtgaggcggtgccgggcgggggttgtcgggtgtcatgggcggtggcgacggcaccgcccccgcgtctccctgagcgggacggcagggggggcttctgcgctgagccgggcgatggacgacagcggcgagctgggtggtctggagaccatggagaccctcacggagctgggcgacgagctgaccctgggagacatcgacgagatgctgcaatttgtcagtaatcaagtgggagagttccctgacttgttttcagaacagctgtgtagctcctttcctggcagtggtggtagtggtagcagcagcggcagcagtggcagcagcagcagcagcagcaatggcaggggcagcagcagcggagctgtggacccttcagtgcaacggtcattcacccaggtcacattaccttccttctctccctcggcggcctccccacaggctccaactctgcaagtcaaggtttctcccacctcagttcccaccacacccagggcaactcctattcttcagccccgcccccagccccagcctcaacctcaaactcagctgcaacaacagacggtaatgatcacgccaacattcagcaccactccgcagacgaggatcatccagcagcctttgatataccagaatgcagctactagctttcaagtccttcagcctcaagtccaaagcctggtgacatcctcccaggtacagccggtcaccattcagcagcaggtgcagacagtacaggcccagcgggtgctgacacaaacggccaatggcacgctgcagacccttgccccggctacggtgcagacagttgctgcgccacaggtgcagcaggtcccggtcctggtccagcctcagatcatcaagacagattcccttgttttgaccacactgaagacagatggcagccctgttatggctgcggtccagaacccggccctcaccgccctcaccacccctatccagacggctgcccttcaagtaccaaccctggtgggcagcagtgggaccattctgaccacaatgcctgtaatgatggggcaagagaaagtgcccattaagcaggtacctgggggagtcaagcagcttgagccccccaaagaaggagaaaggcggacaacccataatatcattgagaaacgatatcgctcctccatcaatgacaaaatcatcgaattgaaagacctggtcatggggacagacgccaagatgcacaagtctggcgttctgaggaaggccattgattacatcaaatacttgcagcaggtcaatcataaactgcgccaggagaacatggtgctgaagctggcaaatcaaaagaacaagcttctaaagggcatcgacctaggcagtctggtggacaatgaggtggacctgaagatcgaggactttaatcagaatgtccttctgatgtcccccccagcctctgactcagggtcccaggctggcttctctccctactccattgactctgagccaggaagccctctattggatgatgcaaaggtcaaagatgagccagactctcctcctgtggcgctgggcatggtagaccgctcacggattcttctgtgtgtcctcaccttcctgtgcctctcctttaaccccctgacttccctgctgcagtggggaggggcccacgactctgaccagcacccacactcaggctctggccgcagtgtcctgtcattcgagtcaggttctgggggctggtttgactggatgatgcctactcttctcttatggctggtaaatggtgtgattgtcctgagcgtctttgtgaagctgctggttcatggggagccagtgatccggccacactcgcgctcctcggtcaccttctggaggcaccggaaacaggcagatctggatctcgccagaggagattttgcagctgctgccggcaacctacaaacctgcctggcagttttgggccgggcactgcccacctcccgcctggacctggcctgcagcctctcctggaacgtgatccgctacagcctgcagaagctacgcctggtgcgctggctgctcaagaaagtcttccagtgccggcgggccacgccagccactgaggcaggctttgaagacgaagctaagaccagcgcccgggatgcggctctggcctatcaccggctgcaccagctgcacatcacagggaagcttcctgcaggatccgcctgttccgatgtacacatggcgttgtgtgccgtgaacctggctgaatgtgcagaggagaagatcccaccgagcacactggttgagatccatctgactgctgccatggggctcaagacccggtgtggaggcaagctgggcttcctggccagctacttcctcagccgagcccagagcctgtgtggccccgagcacagtgctgttcctgactccctgcgctggctctgccaccccctgggccagaagtttttcatggagcggagctggtctgtgaagtcagctgccaaggagagtctatactgtgcccagaggaacccagctgaccccattgcgcaggtccaccaggccttctgcaagaacctgctggagcgagctatagagtccttggtgaaacctcaggccaagaagaaggctggagaccaggaagaagagagctgtgaattctccagtgctctggagtacttgaaattacttcattcttttgtggactctgtgggggttatgagccccccactctccaggagctccgtgctcaagtccgccctgggtccagacatcatctgtcggtggtggacgtctgcaatcactgtggccatcagctggctccagggagacgatgcagctgtgcgctctcattttaccaaagtggaacgcatccccaaggccctggaagtgacagagagccccctggtgaaggccatcttccatgcctgcagagccatgcatgcctcactccctgggaaagcagatgggcagcagagttccttctgccattgcgagagggccagtggccacctatggagcagcctcaacgtcagtggggccacctctgaccctgccctcaaccacgtggtccagctgctcacctgtgacctgctactgtcgctacggacagcgctctggcaaaaacaggccagtgccagccaggctgtgggggagacctaccacgcgtcaggcgctgaactggcgggcttccaacgggacctgggcagcctgcgcaggctggcacacagcttccgcccagcataccgcaaggtgttcctgcatgaagccaccgtgcgcctgatggcaggagccagccccacccgcacccaccagctgctggaacacagcctgcggcggcgcaccacgcagagcaccaagcacggagaggtggatgcctggcccggccagcgagagcgggccaccgccatcctgctggcctgccgccacctgcccctctccttcctctcctccccgggccagcgggcagtgctgctggccgaagctgcccgcaccctggagaaggtgggcgaccggcgctcctgcaacgactgccagcagatgattgttaagctgggtggtggcactgccattgccgcctcctgaccaccaggctcagcccacccctccacctctctctcgatttctctctctccccctcagcatcttcccgctgagagtggtggggaagagccttgtcttcttagctgtcacctgccgaggcttctgggccactcaggccagtgcacccctgggcagagccccttaaagctgctgtcactagatgcccatggtccagggcctggtgggcgtgagaggataggtggcagggcagaaactgggcagccctgacttgatagcagcagggggagctcccaagctgccaagcccctgcctccagccttcctgagtttctctctcctgaaccctactctctcctttttgcttcctcagtttttatcaggctttctctgggggacagcagtctctgagcaccagggagcagttgccctcaggcctgtgcccagcatgccctcccctttttatacgaatgttttctaccagtgtgcttgggtttgccatgatgcgaggctgagttgctgtagcgtcttgattctctccctgggtctgcgttccctcccctgggcctgactgagcctgctcattgtttttccctttattacacaggacagccaggggaggaggggggcccagccctgggaggctggtgggaggcagggggcaggcctgcggatgcatgaaataatgttggcattattttttaattttttaaaaaataaatggtatcttatttaattgtcctgttccttcccactccccgcctcctaggatgttagcccaagctcagggtaggcccagggggctgggagaaatgaagccacccatggggactggggaccaggggccttcagcatggcttctaggttccctcctccccctaccccatctcctacctccacagtacagactgtccccaacttaacagtggttcaacttaaaccatgtttcaactttacaattggtctgttggggtattaaatgaatttgtgacttaggatattttcatttatgatgggtttatcaggaagtaaccccatggtaagttgaggcatatctgtatatatttaaacctaattaattcttgagctgaaaataaataaaccaggatggcagggaccaacccctaatccctccccagcggcaagcccctcttttcagagtgggcagagggttgcctatggtgggcactaggaatgaggtcccctgcctcgatgcgggtcctaggagaaaaagtcctacttttctgggtccccaggtgcagcacctcccggagactgtttctcccatggcctcctgagtgatgggccctgcctccctgtgcctcatcctcaggctggttggagcagagggtgggcaggagccccagcacagactggggggtgctcacagcagggccaccttgatgcaggctggaatgttatccctggggtgtgcttggaccccacctgctttctttctctcctgcccctcccctactctcactgtaatttatggaccctgcccgcctgcgtgttgtgtgtatgtcctgtgccttttctcactattgtttgggtgtgggagggggtggtttttcactgaaaaggggggtacacctatagctttcttgatgttcaatcaatcagtcactgtgtcccagacatattcaataaacacagattggtaccacccagca

SEQ ID NO: 147995 - DNA, 5697 bp, Artificial Sequence
  derived and/or modified sequence
ggcggtgccgggcgggggttgtcgggtgtcatgggcggtggcgacggcaccgcccccgcgtctccctgagcgggacggcagggggggcttctgcgctgagccgggcgatggacgacagcggcgagctgggtggtctggagaccatggagaccctcacggagctgggcgacgagctgaccctgggagacatcgacgagatgctgcaatttgtcagtaatcaagtgggagagttccctgacttgttttcagaacagctgtgtagctcctttcctggcagtggtggtagtggtagcagcagcggcagcagtggcagcagcagcagcagcagcaatggcaggggcagcagcagcggagctgtggacccttcagtgcaacggtcattcacccaggtcacattaccttccttctctccctcggcggcctccccacaggctccaactctgcaagtcaaggtttctcccacctcagttcccaccacacccagggcaactcctattcttcagccccgcccccagccccagcctcaacctcaaactcagctgcaacaacagacggtaatgatcacgccaacattcagcaccactccgcagacgaggatcatccagcagcctttgatataccagaatgcagctactagctttcaagtccttcagcctcaagtccaaagcctggtgacatcctcccaggtacagccggtcaccattcagcagcaggtgcagacagtacaggcccagcgggtgctgacacaaacggccaatggcacgctgcagacccttgccccggctacggtgcagacagttgctgcgccacaggtgcagcaggtcccggtcctggtccagcctcagatcatcaagacagattcccttgttttgaccacactgaagacagatggcagccctgttatggctgcggtccagaacccggccctcaccgccctcaccacccctatccagacggctgcccttcaagtaccaaccctggtgggcagcagtgggaccattctgaccacaatgcctgtaatgatggggcaagagaaagtgcccattaagcaggtacctgggggagtcaagcagcttgagccccccaaagaaggagaaaggcggacaacccataatatcattgagaaacgatatcgctcctccatcaatgacaaaatcatcgaattgaaagacctggtcatggggacagacgccaagatgcacaagtctggcgttctgaggaaggccattgattacatcaaatacttgcagcaggtcaatcataaactgcgccaggagaacatggtgctgaagctggcaaatcaaaagaacaagcttctaaagggcatcgacctaggcagtctggtggacaatgaggtggacctgaagatcgaggactttaatcagaatgtccttctgatgtcccccccagcctctgactcagggtcccaggctggcttctctccctactccattgactctgagccaggaagccctctattggatgatgcaaaggtcaaagatgagccagactctcctcctgtggcgctgggcatggtagaccgctcacggattcttctgtgtgtcctcaccttcctgtgcctctcctttaaccccctgacttccctgctgcagtggggaggggcccacgactctgaccagcacccacactcaggctctggccgcagtgtcctgtcattcgagtcaggttctgggggctggtttgactggatgatgcctactcttctcttatggctggtaaatggtgtgattgtcctgagcgtctttgtgaagctgctggttcatggggagccagtgatccggccacactcgcgctcctcggtcaccttctggaggcaccggaaacaggcagatctggatctcgccagaggagtttacggaaaaaaatctggggcaactcacagcattgaggaagagttaaacatccacatttcaagaggaacaagaaccagaacactcctcagcagcaggagattttgcagctgctgccggcaacctacaaacctgcctggcagttttgggccgggcactgcccacctcccgcctggacctggcctgcagcctctcctggaacgtgatccgctacagcctgcagaagctacgcctggtgcgctggctgctcaagaaagtcttccagtgccggcgggccacgccagccactgaggcaggctttgaagacgaagctaagaccagcgcccgggatgcggctctggcctatcaccggctgcaccagctgcacatcacagggaagcttcctgcaggatccgcctgttccgatgtacacatggcgttgtgtgccgtgaacctggctgaatgtgcagaggagaagatcccaccgagcacactggttgagatccatctgactgctgccatggggctcaagacccggtgtggaggcaagctgggcttcctggccagctacttcctcagccgagcccagagcctgtgtggccccgagcacagtgctgttcctgactccctgcgctggctctgccaccccctgggccagaagtttttcatggagcggagctggtctgtgaagtcagctgccaaggagagtctatactgtgcccagaggaacccagctgaccccattgcgcaggtccaccaggccttctgcaagaacctgctggagcgagctatagagtccttggtgaaacctcaggccaagaagaaggctggagaccaggaagaagagagctgtgaattctccagtgctctggagtacttgaaattacttcattcttttgtggactctgtgggggttatgagccccccactctccaggagctccgtgctcaagtccgccctgggtccagacatcatctgtcggtggtggacgtctgcaatcactgtggccatcagctggctccagggagacgatgcagctgtgcgctctcattttaccaaagtggaacgcatccccaaggccctggaagtgacagaccacctccacccccaccatcaaccctggcaactttgtcctgtaactaaaatagcctttagcacatggcataaccggagagcttttgacattcctctttggagattcatgtctgcgtcttgggggcattcggcactagtgatgggcagccctgcctgctgactccccggctgtttctaattggatctgagtattctaagagaaactgtaaaatgctccaagacagaaaggccccacgaggtcctatccttagagccaaggctgtagcatttcctatcaagcagacccttaaccggcgcacaggaaggagctgagaagagtgagtatactgtggggcgtggcagtcactggcttgggcccctctgcctgtcacgcaggtgacacatagtgacctgcctctcgactccctgtcactgctgcaggagccccctggtgaaggccatcttccatgcctgcagagccatgcatgcctcactccctgggaaagcagatgggcagcagagttccttctgccattgcgagagggccagtggccacctatggagcagcctcaacgtcagtggggccacctctgaccctgccctcaaccacgtggtccagctgctcacctgtgacctgctactgtcgctacggacagcgctctggcaaaaacaggccagtgccagccaggctgtgggggagacctaccacgcgtcaggcgctgaactggcgggcttccaacgggacctgggcagcctgcgcaggctggcacacagcttccgcccagcataccgcaaggtgttcctgcatgaagccaccgtgcgcctgatggcaggagccagccccacccgcacccaccagctgctggaacacagcctgcggcggcgcaccacgcagagcaccaagcacggagaggtggatgcctggcccggccagcgagagcgggccaccgccatcctgctggcctgccgccacctgcccctctccttcctctcctccccgggccagcgggcagtgctgctggccgaagctgcccgcaccctggagaaggtgggcgaccggcgctcctgcaacgactgccagcagatgattgttaagctgggtggtggcactgccattgccgcctcctgaccaccaggctcagcccacccctccacctctctctcgatttctctctctccccctcagcatcttcccgctgagagtggtggggaagagccttgtcttcttagctgtcacctgccgaggcttctgggccactcaggccagtgcacccctgggcagagccccttaaagctgctgtcactagatgcccatggtccagggcctggtgggcgtgagaggataggtggcagggcagaaactgggcagccctgacttgatagcagcagggggagctcccaagctgccaagcccctgcctccagccttcctgagtttctctctcctgaaccctactctctcctttttgcttcctcagtttttatcaggctttctctgggggacagcagtctctgagcaccagggagcagttgccctcaggcctgtgcccagcatgccctcccctttttatacgaatgttttctaccagtgtgcttgggtttgccatgatgcgaggctgagttgctgtagcgtcttgattctctccctgggtctgcgttccctcccctgggcctgactgagcctgctcattgtttttccctttattacacaggacagccaggggaggaggggggcccagccctgggaggctggtgggaggcagggggcaggcctgcggatgcatgaaataatgttggcattattttttaattttttaaaaaataaatggtatcttatttaattgtcctgttccttcccactccccgcctcctaggatgttagcccaagctcagggtaggcccagggggctgggagaaatgaagccacccatggggactggggaccaggggccttcagcatggcttctaggttccctcctccccctaccccatctcctacctccacagtacagactgtccccaacttaacagtggttcaacttaaaccatgtttcaactttacaattggtctgttggggtattaaatgaatttgtgacttaggatattttcatttatgatgggtttatcaggaagtaaccccatggtaagttgaggcatatctgtatatatttaaacctaattaattcttgagctgaaaataaataaaccaggatggcagggaccaacccctaatccctccccagcggcaagcccctcttttcagagtgggcagagggttgcctatggtgggcactaggaatgaggtcccctgcctcgatgcgggtcctaggagaaaaagtcctacttttctgggtccccaggtgcagcacctcccggagactgtttctcccatggcctcctgagtgatgggccctgcctccctgtgcctcatcctcaggctggttggagcagagggtgggcaggagccccagcacagactggggggtgctcacagcagggccaccttgatgcaggctggaatgttatccctggggtgtgcttggaccccacctgctttctttctctcctgcccctcccctactctcactgtaatttatggaccctgcccgcctgcgtgttgtgtgtatgtcctgtgccttttctcactattgtttgggtgtgggagggggtggtttttcactgaaaaggggggtacacctatagctttcttgatgttcaatcaatcagtcactgtgtcccagacatattcaataaacacagattggtaccaccc

SEQ ID NO: 147996 - DNA, 3565 bp, Artificial Sequence
  derived and/or modified sequence
gcttctgcgctgagccgggcgatggacgacagcggcgagctgggtggtctggagaccatggagaccctcacggagctgggcgacgagctgaccctgggagacatcgacgagatgctgcaatttgtcagtaatcaagtgggagagttccctgacttgttttcagaacagctgtgtagctcctttcctggcagtggtggtagtggtagcagcagcggcagcagtggcagcagcagcagcagcagcaatggcaggggcagcagcagcggagctgtggacccttcagtgcaacggtcattcacccaggtcacattaccttccttctctccctcggcggcctccccacaggctccaactctgcaagtcaaggtttctcccacctcagttcccaccacacccagggcaactcctattcttcagccccgcccccagccccagcctcaacctcaaactcagctgcaacaacagacggtaatgatcacgccaacattcagcaccactccgcagacgaggatcatccagcagcctttgatataccagaatgcagctactagctttcaagtccttcagcctcaagtccaaagcctggtgacatcctcccaggtacagccggtcaccattcagcagcaggtgcagacagtacaggcccagcgggtgctgacacaaacggccaatggcacgctgcagacccttgccccggctacggtgcagacagttgctgcgccacaggtgcagcaggtcccggtcctggtccagcctcagatcatcaagacagattcccttgttttgaccacactgaagacagatggcagccctgttatggctgcggtccagaacccggccctcaccgccctcaccacccctatccagacggctgcccttcaagtaccaaccctggtgggcagcagtgggaccattctgaccacaatgcctgtaatgatggggcaagagaaagtgcccattaagcaggtacctgggggagtcaagcagcttgagccccccaaagaaggagaaaggcggacaacccataatatcattgagaaacgatatcgctcctccatcaatgacaaaatcatcgaattgaaagacctggtcatggggacagacgccaagatgcacaagtctggcgttctgaggaaggccattgattacatcaaatacttgcagcaggtcaatcataaactgcgccaggagaacatggtgctgaagctggcaaatcaaaagaacaagcttctaaagggcatcgacctaggcagtctggtggacaatgaggtggacctgaagatcgaggactttaatcagaatgtccttctgatgtcccccccagcctctgactcagggtcccaggctggcttctctccctactccattgactctgagccaggaagccctctattggatgatgcaaaggtcaaagatgagccagactctcctcctgtggcgctgggcatggtagaccgctcacggattcttctgtgtgtcctcaccttcctgtgcctctcctttaaccccctgacttccctgctgcagtggggaggggcccacgactctgaccagcacccacactcaggctctggccgcagtgtcctgtcattcgagtcaggttctgggggctggtttgactggatgatgcctactcttctcttatggctggtaaatggtgtgattgtcctgagcgtctttgtgaagctgctggttcatggggagccagtgatccggccacactcgcgctcctcggtcaccttctggaggcaccggaaacaggcagatctggatctcgccagaggagattttgcagctgctgccggcaacctacaaacctgcctggcagttttgggccgggcactgcccacctcccgcctggacctggcctgcagcctctcctggaacgtgatccgctacagcctgcagaagctacgcctggtgcgctggctgctcaagaaagtcttccagtgccggcgggccacgccagccactgaggcaggctttgaagacgaagctaagaccagcgcccgggatgcggctctggcctatcaccggctgcaccagctgcacatcacagggaagcttcctgcaggatccgcctgttccgatgtacacatggcgttgtgtgccgtgaacctggctgaatgtgcagaggagaagatcccaccgagcacactggttgagatccatctgactgctgccatggggctcaagacccggtgtggaggcaagctgggcttcctggccagctacttcctcagccgagcccagagcctgtgtggccccgagcacagtgctgttcctgactccctgcgctggctctgccaccccctgggccagaagtttttcatggagcggagctggtctgtgaagtcagctgccaaggagagtctatactgtgcccagaggaacccagctgaccccattgcgcaggtccaccaggccttctgcaagaacctgctggagcgagctatagagtccttggtgaaacctcaggccaagaagaaggctggagaccaggaagaagagagctgtgaattctccagtgctctggagtacttgaaattacttcattcttttgtggactctgtgggggttatgagccccccactctccaggagctccgtgctcaagtccgccctgggtccagacatcatctgtcggtggtggacgtctgcaatcactgtggccatcagctggctccagggagacgatgcagctgtgcgctctcattttaccaaagtggaacgcatccccaaggccctggaagtgacagagagccccctggtgaaggccatcttccatgcctgcagagccatgcatgcctcactccctgggaaagcagatgggcagcagagttccttctgccattgcgagagggccagtggccacctatggagcagcctcaacgtcagtggggccacctctgaccctgccctcaaccacgtggtccagctgctcacctgtgacctgctactgtcgctacggacagcgctctggcaaaaacaggccagtgccagccaggctgtgggggagacctaccacgcgtcaggcgctgaactggcgggcttccaacgggacctgggcagcctgcgcaggctggcacacagcttccgcccagcataccgcaaggtgttcctgcatgaagccaccgtgcgcctgatggcaggagccagccccacccgcacccaccagctgctggaacacagcctgcggcggcgcaccacgcagagcaccaagcacggagaggtggatgcctggcccggccagcgagagcgggccaccgccatcctgctggcctgccgccacctgcccctctccttcctcccctgcctccagccttcctgagtttctctctcctgaaccctactctctcctttttgcttcctcagtttttatcaggctttctctgggggacagcagtctctgagcaccagggagcagttgccctcaggcctgtgcccagcatgccctcccctttttatacgaatgttttctaccagtgtgcttgggtttgccatgatgcgaggctgagttgctgtagcgtcttgattctctccctgggtctgcgttccctcccctg

SEQ ID NO: 147997 - protein, 288 aa, Artificial Sequence
  derived and/or modified sequence
MKDRTQELRTAKDSDDDDDVAVTVDRDRFMDEFFEQVEEIRGFIDKIAENVEEVKRKHSAILASPNPDEKTKEELEELMSDIKKTANKVRSKLKSIEQSIEQEEGLNRSSADLRIRKTQHSTLSRKFVEVMSEYNATQSDYRERCKGRIQRQLEITGRTTTSEELEDMLESGNPAIFASGIIMDSSISKQALSEIETRHSEIIKLENSIRELHDMFMDMAMLVESQGEMIDRIEYNVEHAVDYVERAVSDTKKAVKYQSKARRKKIMIIICCVILGIVIASTVGGIFA

SEQ ID NO: 147998 - protein, 260 aa, Artificial Sequence
  derived and/or modified sequence
MKDRTQELRTAKDSDDDDDVAVTVDRDRFMDEFFEQVEEIRGFIDKIAENVEEVKRKHSAILASPNPDEKTKEELEELMSDIKKTANKVRSKLKSIEQSIEQEEGLNRSSADLRIRKTQHSTLSRKFVEVMSEYNATQSDYRERCKGRIQRQLEITGRTTTSEELEDMLESGNPAIFASGIIMDSSISKQALSEIETRHSEIIKLENSIRELHDMFMDMAMLVESQPQGAFLKSCPEPQPNPEEGALWSSGAPGPAGRDD

SEQ ID NO: 147999 - protein, 171 aa, Artificial Sequence
  derived and/or modified sequence
MKDRTQELRTAKDSDDDDDVAVTVDRDRFMDEFFEQVEVMSEYNATQSDYRERCKGRIQRQLEITGRTTTSEELEDMLESGNPAIFASGIIMDSSISKQALSEIETRHSEIIKLEIEYNVEHAVDYVERAVSDTKKAVKYQSKARRKKIMIIICCVILGIVIASTVGGIFA

SEQ ID NO: 148000 - DNA, 867 bp, Artificial Sequence
  derived and/or modified sequence
atgaaggacagaacccaggagctgagaaccgccaaggacagcgacgacgacgacgacgtggccgtgaccgtggacagagacagattcatggacgagttcttcgagcaggtggaggagatcagaggcttcatcgacaagatcgccgagaacgtggaggaggtgaagagaaagcacagcgccatcctggccagccccaaccccgacgagaagaccaaggaggagctggaggagctgatgagcgacatcaagaagaccgccaacaaggtgagaagcaagctgaagagcatcgagcagagcatcgagcaggaggagggcctgaacagaagcagcgccgacctgagaatcagaaagacccagcacagcaccctgagcagaaagttcgtggaggtgatgagcgagtacaacgccacccagagcgactacagagagagatgcaagggcagaatccagagacagctggagatcaccggcagaaccaccaccagcgaggagctggaggacatgctggagagcggcaaccccgccatcttcgccagcggcatcatcatggacagcagcatcagcaagcaggccctgagcgagatcgagaccagacacagcgagatcatcaagctggagaacagcatcagagagctgcacgacatgttcatggacatggccatgctggtggagagccagggcgagatgatcgacagaatcgagtacaacgtggagcacgccgtggactacgtggagagagccgtgagcgacaccaagaaggccgtgaagtaccagagcaaggccagaagaaagaagatcatgatcatcatctgctgcgtgatcctgggcatcgtgatcgccagcaccgtgggcggcatcttcgcctag

SEQ ID NO: 148001 - DNA, 867 bp, Artificial Sequence
  derived and/or modified sequence
atgaaggatagaacccaagagctacggaccgcaaaagacagtgatgatgatgacgacgttgcagtgacggtggacagggaccgttttatggacgaattcttcgaacaggtagaggaaatacggggttttatcgacaagatcgctgagaatgtggaggaagtaaaacggaagcactctgccattttagcctctcccaatccagacgagaagactaaggaggagcttgaagaattgatgtcagacattaaaaagacggcgaacaaagtgcgaagcaaattgaagtccatcgaacaatctatcgaacaggaagagggtctgaaccgctcaagcgctgacctgcggattagaaaaacgcagcattccacgcttagccgcaaattcgttgaagttatgtctgaatacaatgcgacccaatctgactatagggaaaggtgtaaggggagaatccagcgacagctagagatcactggccggacaacgaccagcgaggaactggaggacatgctggagagcggcaacccagcaatctttgctagtggtattattatggactccagcatttccaagcaagccctcagtgaaattgaaacccgacactcagagattatcaagctggagaattctattagagaactgcacgacatgtttatggacatggctatgctggttgagtcccagggcgaaatgattgacagaatcgagtacaacgtcgagcacgcggtcgactatgtcgaacgagctgtctccgatacgaaaaaagctgttaagtatcagagcaaagcccgccggaaaaagataatgattatcatatgctgcgtaatcctgggcattgtgattgcatccaccgtgggcggtatctttgcttag

SEQ ID NO: 148002 - DNA, 867 bp, Artificial Sequence
  derived and/or modified sequence
atgaaggacaggacccaggagctgaggacagccaaggacagtgatgatgatgatgatgtggccgtgacagtggaccgggaccgcttcatggatgagttctttgagcaggtggaggagatccggggcttcatcgacaagattgctgaaaatgtggaggaggtgaagaggaagcacagcgccatcctggccagccccaacccagatgagaagaccaaggaggagctggaggagctgatgtctgacatcaagaagacagccaacaaggtgcgcagcaagctgaagagcattgagcagagcattgagcaggaggagggcctgaacagaagcagcgctgacctgcgcatcaggaagacccagcacagcaccctgagcaggaagtttgtggaggtgatgtctgagtacaatgccacccagagcgactaccgggagcgctgcaagggccgcatccagaggcagctggagatcaccggccgcaccaccaccagcgaggagctggaggacatgctggagagcggcaacccagccatctttgccagcggcatcatcatggacagcagcatcagcaagcaggccctgtctgaaattgagaccaggcacagcgagatcatcaagctggagaacagcatccgggagctgcatgacatgttcatggacatggccatgctggtggagagccagggcgagatgattgacagaattgagtacaacgtggagcacgctgtggactatgtggagagagctgtgtctgacaccaagaaggctgtgaagtaccagagcaaggcccggaggaagaagatcatgatcatcatctgctgcgtcatcctgggcatcgtgattgccagcacagtgggcggcatctttgcctag

SEQ ID NO: 148003 - DNA, 867 bp, Artificial Sequence
  derived and/or modified sequence
atgaaggaccggacccaggagctgcggaccgccaaggacagcgacgacgacgacgatgtcgccgtgacggttgatcgggatagatttatggatgaatttttcgaacaggtggaagagattcgtgggtttatcgacaagattgctgagaatgtggaggaagtcaagaggaagcacagcgccatcctggccagcccgaacccagatgaaaagacaaaggaggaacttgaggagttaatgtccgacataaagaaaacggccaacaaggtacggtcgaaattgaagagcatcgaacaatccatcgaacaggaagagggtttgaataggtcaagcgcagacttgagaatcagaaaaactcagcactcaacgctctcacggaaattcgttgaagtgatgtcagagtataacgccactcagtccgactacagagagaggtgtaagggccgaatccaaaggcaactcgagataacagggcgcactaccactagcgaagaattagaggacatgctggagtccgggaaccccgccatcttcgcttccggaatcatcatggacagctcgatttccaagcaagccctgtctgagatagagactaggcacagtgagatcattaagctggaaaacagtatccgagaactgcatgacatgtttatggatatggctatgctcgtcgagagccagggtgagatgattgatcggatcgagtacaacgtcgaacacgcagtcgattacgtggaacgtgctgtctcagacacgaaaaaagcagtgaaatatcagtccaaagcaagaagaaaaaaaatcatgatcattatttgctgtgttatactggggatcgtcatcgcatcaactgttggcggcatcttcgcctag

SEQ ID NO: 148004 - DNA, 867 bp, Artificial Sequence
  derived and/or modified sequence
atgaaggacaggacacaggagttgagaaccgctaaagactcagatgatgacgatgatgtagctgtaaccgtagatcgcgatcgattcatggatgagttcttcgaacaggtggaggaaattaggggcttcattgataagattgccgagaatgtggaagaggtaaagagaaaacatagcgcaatcctcgcatccccaaaccccgatgaaaagaccaaggaagagcttgaagaacttatgtcagatataaagaaaacagcgaacaaagtgcgaagcaagctgaagagtatcgagcaatctatcgagcaggaggaaggcctaaatcgcagctctgccgacctacggattcgaaagacccagcactctactctctctcgaaaatttgtggaagtgatgtcagagtataacgcaacacagtcagattatcgcgaaaggtgcaaaggtaggattcagcggcagctcgagatcacagggagaactacgacctccgaggaactcgaagatatgctcgagtcagggaatcccgcaatatttgcaagcggcatcataatggatagctctatcagcaaacaggccctctcagagatagaaaccagacacagcgagatcatcaagctagagaactccatccgcgagctgcacgatatgttcatggatatggctatgctggtagagagccagggagagatgatcgatcgaatcgagtataatgtcgagcacgccgtagactacgtggaaagagccgtttcggacacgaagaaggcggtcaagtaccagtcgaaggcgcgtagaaagaagatcatgattatcatttgctgcgtgatccttggcatcgtgatcgcgtccacggtcggcggaatctttgcctag

SEQ ID NO: 148005 - DNA, 2095 bp, Artificial Sequence
  derived and/or modified sequence
gccggcgccgctgccactcccgggagcatgaaggaccgaacccaggagctccgcacggccaaggacagcgatgatgatgatgatgtcgctgtcaccgtggaccgagaccgcttcatggatgagttctttgagcaggtggaggagattcgaggcttcattgacaagatcgcagagaacgtggaggaggtgaagcggaagcacagtgccatcctggcatcccccaaccccgatgagaagacgaaggaggagctggaagaactcatgtccgacataaagaagacagcaaacaaagttcgttccaagttaaagagcatcgagcagtccatcgagcaagaggaaggcctgaaccgctcctccgctgacctgaggatccggaagacacagcactccacgctgtccagaaagtttgtggaggtcatgtcggagtacaacgccacgcagtccgactaccgcgagcgctgcaaaggccgcatccagaggcagctggagatcaccggcaggaccacgaccagtgaggagctggaggacatgctggagagtgggaaccccgccatctttgcctctgggatcatcatggactccagcatctcgaagcaggctctgagcgagattgagacgcggcacagtgagatcatcaagctggagaacagcatccgtgagctacacgacatgttcatggacatggccatgctcgtggagagccagggagagatgattgacaggatcgagtacaatgtggaacacgcggtagactatgtggagagggccgtgtctgacaccaagaaggccgtcaagtaccagagcaaggcgcgccggaagaaaatcatgatcatcatctgctgtgtgatcctgggcatcgtcatcgcctccactgttgggggcatcttcgcctagaagccacccaaactgccactccactccaggtgggccactccaaggaggccctggctgctgccacctggctgggctgccctcccaacccccgcctctggctcagagcaccctccctcccggcccccatgctcccttctctgccatgggccctccgtccccgccccgtgtcgtgtgcatgatctctgtgagtgtgcgtctgtacgggaagaggcagagggaggcagccagcggggcgtgatgcagtgtgcacagcgaggagcagacccaggcagggccgccagggtgacacaggccacccttccttgccttcagtaactcggtgggcccaggttctgctcttccctggggaccctaacctcgcctccagctgacctgccctgtcctctccagctgtccccacaagcagagccctgaggggtggggaccagctggccacatggtgctgcttttcaggttaggggagaggtggccctgagggacagcccagctctgagtctcagtcgctgatcactgccagggaggctcaggctgccatggctccaggctccctcccctgcctaggggcaaagtccatcgggtcctgggcctcagcttcccttcccacattcctccggccccaggagcaaccccttgggctaggtctgaccccaggtgtccctctggaaggggctggctggtgccctatttccagccaccccagcagctagggaggcaaagcaggctgcagtcagtccctcaagccagcgttgcatgtttgggatggtggctcctgttgtcttgcgctctgggaagtcagatgtcatttcaggcctgcagtctcatcctgcccttgccatcctcccatcgatgtgccacgtgggtgtcacgtgtcccagatgcagtattcggcagccagccggggagggctacctcctcctcctcaccaccttggggcttctcatgggaaatgtgcccccgccccaggaccctctcccttgtggacaggcagggagatgcatgcgagtgcatgcagcaggggatggggccgtgtccgtgtgccccaccctccctcggctttactcctgcccagtgactgtgaccactgtccgtgttgccttcttgaacagcgattccccccaaccccttcaccaaaggtcttggtacaaccagctgcccattttgtgaaatttttatgtagaataaacatttgtatctgtaccag

SEQ ID NO: 148006 - protein, 297 aa, Artificial Sequence
  derived and/or modified sequence
MRDRTHELRQGDDSSDEEDKERVALVVHPGTARLGSPDEEFFHKVRTIRQTIVKLGNKVQELEKQQVTILATPLPEESMKQELQNLRDEIKQLGREIRLQLKAIEPQKEEADENYNSVNTRMRKTQHGVLSQQFVELINKCNSMQSEYREKNVERIRRQLKITNAGMVSDEELEQMLDSGQSEVFVSNILKDTQVTRQALNEISARHSEIQQLERSIRELHDIFTFLATEVEMQGEMINRIEKNILSSADYVERGQEHVKTALENQKKARKKKVLIAICVSITVVLLAVIIGVTVVG

SEQ ID NO: 148007 - DNA, 894 bp, Artificial Sequence
  derived and/or modified sequence
atgagagacagaacccacgagctgagacagggcgacgacagcagcgacgaggaggacaaggagagagtggccctggtggtgcaccccggcaccgccagactgggcagccccgacgaggagttcttccacaaggtgagaaccatcagacagaccatcgtgaagctgggcaacaaggtgcaggagctggagaagcagcaggtgaccatcctggccacccccctgcccgaggagagcatgaagcaggagctgcagaacctgagagacgagatcaagcagctgggcagagagatcagactgcagctgaaggccatcgagccccagaaggaggaggccgacgagaactacaacagcgtgaacaccagaatgagaaagacccagcacggcgtgctgagccagcagttcgtggagctgatcaacaagtgcaacagcatgcagagcgagtacagagagaagaacgtggagagaatcagaagacagctgaagatcaccaacgccggcatggtgagcgacgaggagctggagcagatgctggacagcggccagagcgaggtgttcgtgagcaacatcctgaaggacacccaggtgaccagacaggccctgaacgagatcagcgccagacacagcgagatccagcagctggagagaagcatcagagagctgcacgacatcttcaccttcctggccaccgaggtggagatgcagggcgagatgatcaacagaatcgagaagaacatcctgagcagcgccgactacgtggagagaggccaggagcacgtgaagaccgccctggagaaccagaagaaggccagaaagaagaaggtgctgatcgccatctgcgtgagcatcaccgtggtgctgctggccgtgatcatcggcgtgaccgtggtgggctag

SEQ ID NO: 148008 - DNA, 894 bp, Artificial Sequence
  derived and/or modified sequence
atgcgtgatagaacccacgaattgcgacagggggacgatagctcagacgaagaagacaaagagcgtgtcgccctcgtggtccacccagggacggccagacttggttcccctgacgaggagttttttcacaaagttcgcactatccggcaaaccatagtgaagttaggcaacaaagtccaggagctggagaagcagcaggtgaccatcctggccacacctttgccggaggagtcaatgaaacaagagcttcagaaccttcgagacgagatcaagcaactgggtcgggaaattcgtctccagctgaaggccatagagcctcaaaaggaagaggcagatgagaattacaatagcgtcaacactcggatgcgcaaaactcaacatggtgtgctgtcacagcaattcgtggagctgatcaacaagtgtaactccatgcaatctgagtaccgcgagaaaaacgtggaaagaataagaagacagctcaagattaccaacgctggtatggtgagcgatgaagagttggaacaaatgctcgattcagggcaatccgaagtctttgtgagtaatatactgaaagatacccaggtcactcgccaggctctcaacgaaatcagtgcccgtcatagcgaaatacagcagctcgagaggtcaattagggagcttcacgacatctttacttttttggccaccgaagtcgaaatgcagggagagatgatcaacagaatcgaaaaaaacattctttcctctgccgactacgttgagagagggcaggagcatgtgaagacagccctagaaaatcagaagaaggctcgcaaaaagaaggtcttaatcgcgatttgtgtgagcattaccgtagtgttgctcgccgtgataataggtgtgacagtggtgggttag

SEQ ID NO: 148009 - DNA, 894 bp, Artificial Sequence
  derived and/or modified sequence
atgagggacaggacccatgagctgcggcagggagatgacagcagtgatgaggaggacaaggagcgggtggccctggtggtgcaccctggaacagcccggctgggcagcccagatgaggagttcttccacaaggtgaggaccatccggcagaccatcgtgaagctgggcaacaaggtgcaggagctggagaagcagcaggtgaccatcctggccacccccctgcctgaggagagcatgaagcaggagctgcagaacctgagagatgagatcaagcagctgggccgggagatccggctgcagctgaaggccatcgagccccagaaggaggaggctgatgagaactacaacagcgtgaacaccaggatgaggaagacccagcacggcgtgctgagccagcagtttgtggagctgatcaacaagtgcaacagcatgcagagcgagtaccgggagaagaatgtggagcgcatccggcggcagctgaagatcaccaatgccggcatggtgtctgatgaggagctggagcagatgctggacagcggccagagcgaggtgtttgtgagcaacatcctgaaggacacccaggtgacccggcaggccctgaatgagatcagcgcccggcacagcgagatccagcagctggagaggagcatccgggagctgcatgacatcttcaccttcctggccacagaggtggagatgcagggcgagatgatcaacagaattgagaagaacatcctgagcagcgctgactatgtggagcggggccaggagcacgtgaagacagccctggagaaccagaagaaggccaggaagaagaaggtgctgattgccatctgtgtgtccatcaccgtggtgctgctggccgtcatcattggagtgacagtggtgggctag

SEQ ID NO: 148010 - DNA, 894 bp, Artificial Sequence
  derived and/or modified sequence
atgcgggaccggacccacgagctgcggcagggcgacgacagcagcgacgaagaggacaaggagcgggtggcattggtggtgcacccaggaactgccagactaggtagtccagatgaggagttcttccataaagtccgaactatccgtcaaaccattgtcaaattaggtaataaagttcaggagcttgagaagcaacaggttaccatactggcaacgcctttgcccgaggagtccatgaagcaagagctacagaatttaagagacgagatcaaacaattaggtcgcgaaatccgactgcaacttaaagctattgagccgcaaaaggaagaggcggacgagaattataattccgtgaatacgcgaatgagaaagacacagcacggggtgctgtcccaacagtttgtggaacttatcaacaaatgtaattcaatgcaatcagagtacagagagaagaacgttgaacgaattagacgacagctaaaaattaccaacgctggaatggttagtgacgaagagcttgagcagatgcttgactcagggcagtccgaggttttcgtatccaacatcctgaaggacacccaggtaactaggcaagctctcaacgagatttcagctaggcattctgagatccaacagctcgagaggtccatccgcgagctgcatgatatcttcacatttctagcaacagaagtggagatgcagggcgaaatgattaataggattgagaagaacatcctctccagtgctgattacgtcgaacgcgggcaggaacacgtcaagaccgctctggagaaccagaaaaaagcacgcaagaagaaggtcttgatagctatctgtgtgagcatcaccgtggtcctgctggcggtcatcatcggcgttacagtcgtgggttag

SEQ ID NO: 148011 - DNA, 894 bp, Artificial Sequence
  derived and/or modified sequence
atgcgtgacaggacacatgagctccggcagggcgatgacagctctgatgaagaagacaaagagcgcgtcgctctggtggtccaccccggaacggccaggctggggagtccagacgaggaatttttccataaggtgcggacgatccgacagaccatcgttaaactcggaaataaggtccaagaactggaaaaacagcaggttaccatccttgccacacccttgccagaggagagcatgaagcaggagctgcaaaacctgagagacgaaatcaagcaactgggacgcgagatccgactgcaactaaaagccatcgagcctcagaaggaggaagccgatgaaaactataatagcgtgaacactcgaatgcggaagacacagcacggagtcctatcccagcaattcgtcgaactgattaacaagtgcaatagcatgcagtcagaatatagagagaagaacgtggaaagaattcgtagacagcttaaaatcactaacgctggaatggtgtccgatgaggaactggaacaaatgctggatagcggccagagtgaagtgttcgtcagtaatattctaaaggatactcaagtgaccaggcaggccctcaatgaaatatccgcccgacactcggagatccagcagctggagcggagcataagggaactgcacgacatttttactttcttagcaaccgaagttgaaatgcagggcgagatgattaaccgcatcgagaagaatatactgagttcagcagactatgttgaacggggacaggagcacgtgaaaacagcactggaaaaccagaagaaagctaggaagaagaaagtgcttatcgcgatctgcgtctcgatcacagtggttctgttagccgtgattattggagtcactgtcgttgggtag

SEQ ID NO: 148012 - DNA, 1481 bp, Artificial Sequence
  derived and/or modified sequence
cccagcctcgggcaaggaagagacgcgaccatgtgcgcatgccccgaatttatcacggaggggcggggctgaggctgcgggagctggagcggggaagaaaagggaattccaacctgtggaaccttggggggtccccggggtcggcgccttcccattgactgtgggcggtgcaagggacggagcctctggcggctcgtgggggtgttggggtccgcagggggagggaggggagtgtcagagtgtgagcggggtacgggaattccaaatttgagggcctcccggctctggcgccggggagggagagctcaggccgccatgcgggacaggacccacgagctgagacagggggatgacagctcggacgaagaggacaaggagcgggtcgcgctggtggtgcacccgggcacggcacggctggggagcccggacgaggagttcttccacaaggtccggacaattcggcagactattgtcaaactggggaataaagtccaggagttggagaaacagcaggtcaccatcctggccacgccccttcccgaggagagcatgaagcaggagctgcagaacctgcgcgatgagatcaaacagctggggagggagatccgcctgcagctgaaggccatagagccccagaaggaggaagctgatgagaactataactccgtcaacacaagaatgagaaaaacccagcatggggtcctgtcccagcaattcgtggagctcatcaacaagtgcaattcaatgcagtccgaataccgggagaagaacgtggagcggattcggaggcagctgaagatcaccaatgctgggatggtgtctgatgaggagttggagcagatgctggacagtgggcaaagcgaggtgtttgtgtccaatatcctgaaggacacgcaggtgactcgacaggccttaaatgagatctcggcccggcacagtgagatccagcagcttgaacgcagtattcgtgagctgcacgacatattcacttttctggctaccgaagtggagatgcagggggagatgatcaatcggattgagaagaacatcctgagctcagcggactacgtggaacgtgggcaggagcacgtcaagacggccctggagaaccagaagaaggcgaggaagaagaaagtcttgattgccatctgtgtgtccatcaccgtcgtcctcctagcagtcatcattggcgtcacagtggttggataatgtcgcacattgttggcactaggagcaccaggaacccagggcctggccttctctcccagcagcctggggggcagggcagagcctccagtcggaccccttcctcacactggcccctatgcagaagggcagacagttcttctggggttggcagctgctcattcatgatggcctcctccttcaggcctcaatgcctgggggaggcctgcactgtcctgattggccgggacacacggttttgtaaaaaattaaaaaacaaaaaaagagcatagaaa

SEQ ID NO: 148013 - protein, 350 aa, Artificial Sequence
  derived and/or modified sequence
MASPPPFHSQKLPGEYFRYKGVPFPVGLYSLESISLAENTQDVRDDDIFIITYPKSGTTWMIEIICLILKEGDPSWIRSVPIWERAPWCETIVGAFSLPDQYSPRLMSSHLPIQIFTKAFFSSKAKVIYMGRNPRDVVVSLYHYSKIAGQLKDPGTPDQFLRDFLKGEVQFGSWFDHIKGWLRMKGKDNFLFITYEELQQDLQGSVERICGFLGRPLGKEALGSVVAHSTFSAMKANTMSNYTLLPPSLLDHRRGAFLRKGVCGDWKNHFTVAQSEAFDRAYRKQMRGMPTFPWDEDPEEDGSPDPEPSPEPEPKPSLEPNTSLEREPRPNSSPSPSPGQASETPHPRPS

SEQ ID NO: 148014 - DNA, 1053 bp, Artificial Sequence
  derived and/or modified sequence
atggccagccccccccccttccacagccagaagctgcccggcgagtacttcagatacaagggcgtgcccttccccgtgggcctgtacagcctggagagcatcagcctggccgagaacacccaggacgtgagagacgacgacatcttcatcatcacctaccccaagagcggcaccacctggatgatcgagatcatctgcctgatcctgaaggagggcgaccccagctggatcagaagcgtgcccatctgggagagagccccctggtgcgagaccatcgtgggcgccttcagcctgcccgaccagtacagccccagactgatgagcagccacctgcccatccagatcttcaccaaggccttcttcagcagcaaggccaaggtgatctacatgggcagaaaccccagagacgtggtggtgagcctgtaccactacagcaagatcgccggccagctgaaggaccccggcacccccgaccagttcctgagagacttcctgaagggcgaggtgcagttcggcagctggttcgaccacatcaagggctggctgagaatgaagggcaaggacaacttcctgttcatcacctacgaggagctgcagcaggacctgcagggcagcgtggagagaatctgcggcttcctgggcagacccctgggcaaggaggccctgggcagcgtggtggcccacagcaccttcagcgccatgaaggccaacaccatgagcaactacaccctgctgccccccagcctgctggaccacagaagaggcgccttcctgagaaagggcgtgtgcggcgactggaagaaccacttcaccgtggcccagagcgaggccttcgacagagcctacagaaagcagatgagaggcatgcccaccttcccctgggacgaggaccccgaggaggacggcagccccgaccccgagcccagccccgagcccgagcccaagcccagcctggagcccaacaccagcctggagagagagcccagacccaacagcagccccagccccagccccggccaggccagcgagaccccccaccccagacccagctag

SEQ ID NO: 148015 - DNA, 1053 bp, Artificial Sequence
  derived and/or modified sequence
atggccagtccccctccttttcactctcaaaagctgcctggagagtactttcggtacaagggcgtgcctttcccagttggcctgtatagtctggagtccatcagcctagctgagaacacacaggatgttcgagatgacgatattttcatcataacatatcctaagagtggaacgacctggatgattgagattatctgtcttatcctcaaagaaggtgacccatcttggatcaggtccgtacccatctgggagagggcgccttggtgcgaaaccatcgtgggtgccttcagcctgcctgaccagtactccccaagattgatgtcttcccatctccccatccagatattcacaaaggcctttttttcctctaaggccaaagtgatctacatgggtcgtaacccaagggatgttgtggtgagcctgtatcactactcaaagattgctgggcagcttaaggacccagggacaccagaccagttcttacgtgatttcctcaagggagaggtgcagttcggatcgtggtttgaccatatcaaagggtggctgcgcatgaagggaaaagataacttcctcttcattacttatgaagaattgcagcaagacctccaagggagcgtggaacgcatttgtggctttttaggcaggcccctcggcaaagaggcccttggttccgtggtggcgcattcaacgttctccgcaatgaaggctaacactatgagcaattacacacttctgcctccctcccttctcgaccatcgtcgaggcgcatttttaaggaaaggggtctgcggagattggaaaaaccattttaccgttgcccagagcgaggcgttcgaccgcgcctacagaaaacagatgcgcggcatgccaacctttccctgggacgaggaccctgaagaagacggttctcccgatcccgaaccctccccagaacctgagccgaaacctagtttggaaccaaataccagcctcgagagggaacccagacccaacagttcaccctcgcctagccctggccaggcaagcgagacaccgcacccccgcccatcatag

SEQ ID NO: 148016 - DNA, 1053 bp, Artificial Sequence
  derived and/or modified sequence
atggccagccccccacccttccacagccagaagctgcctggagagtacttccgctacaagggcgtgcccttccctgtgggcctgtacagcctggagagcatcagcctggccgagaacacccaggatgtgagagatgatgacatcttcatcatcacctaccccaagagcggcaccacctggatgattgagatcatctgcctgatcctgaaggagggggaccccagctggatccgctctgtgcccatctgggagcgggccccctggtgtgagaccatcgtgggcgccttcagcctgcctgaccagtacagcccccggctgatgagcagccacctgcccatccagatcttcaccaaggccttcttcagcagcaaggccaaggtgatctacatgggcaggaaccccagagatgtggtggtgtccctgtaccactacagcaagattgctggccagctgaaggaccccggcaccccagaccagttcctgcgggacttcctgaagggggaggtgcagtttggctcctggtttgaccacatcaagggctggctgaggatgaagggcaaggacaacttcctgttcatcacctatgaggagctgcagcaggacctgcagggctctgtggagcgcatctgtggcttcctgggccggcccctgggcaaggaggccctgggctctgtggtggcccacagcaccttcagcgccatgaaggccaacaccatgagcaactacaccctgctgccccccagcctgctggaccacagaagaggagccttcctgaggaagggcgtgtgtggggactggaagaaccacttcaccgtggcccagagcgaggcctttgaccgggcctacaggaagcagatgaggggcatgcccaccttcccctgggatgaggaccctgaggaggatggcagcccagaccctgagcccagccctgagcctgagcccaagcccagcctggagcccaacaccagcctggagcgggagccccggcccaacagcagccccagccccagccctggccaggccagcgagaccccccacccccggcccagctag

SEQ ID NO: 148017 - DNA, 1053 bp, Artificial Sequence
  derived and/or modified sequence
atggccagccccccccccttccacagccagaagctgcccggcgagtacttcagatataaaggagtcccattccctgtcgggctgtatagcctggagtccatatctcttgcagaaaatacacaagatgtacgggatgacgatatcttcatcattacatatccaaagtcaggcaccacctggatgatcgaaatcatttgcctgattcttaaggagggcgatcctagctggattaggagcgtgccaatttgggaacgagctccctggtgcgagaccatagtaggggccttttcactgccagatcaatatagtccccggctcatgagctcccacttgccaattcagatctttacaaaggccttcttctcttccaaggcgaaggtaatctacatgggacgcaatccgcgagacgtcgtggtcagcctctaccactactcgaaaatcgccgggcaactcaaggatcccggaacccctgaccagtttcttcgggattttctgaagggagaggtgcagttcggctcttggtttgaccacataaaaggttggctgcgcatgaaggggaaggacaactttctgttcatcacttatgaagaattgcaacaagatctgcagggctctgtggaacggatctgcggttttttgggacggcccttaggcaaggaggccttgggatccgtcgtggcacactccaccttttccgccatgaaggccaatacaatgtccaactatacactgttgcccccttcactgttagatcatcggcgcggagcattcctgagaaaaggtgtttgcggggactggaagaaccatttcactgtggcccaaagcgaggcctttgatagggcttacagaaaacagatgcgtggcatgcccactttcccctgggacgaggatccggaggaagacggctctcccgaccctgaacctagcccggaaccagaacccaaacccagtctggaaccaaatacatcactagagcgagaacctcgcccaaactcaagcccctcgccatctcctggccaggcgtctgagactccccatccaagaccatcctag

SEQ ID NO: 148018 - DNA, 1053 bp, Artificial Sequence
  derived and/or modified sequence
atggcttctccgcctcccttccacagccagaagctgcctggggagtatttccgctacaagggggtgccctttccggtcggactttattcactagaatcaatcagtctggcagagaacacccaggacgtacgggatgacgatatatttattatcacttaccctaagagcggcactacctggatgattgaaatcatttgtctgatccttaaggagggagaccccagctggatccgaagtgttcccatatgggaacgagccccttggtgcgaaactatcgtgggagccttctccctccccgatcagtacagccctcgacttatgtcttctcacctcccaatacagatcttcacgaaggcattcttcagcagcaaggccaaagtcatttatatgggcagaaatcccagagatgtggtcgtttcactctatcattatagcaaaatcgctggacagctcaaggatcctggaactcctgaccagttcctacgcgactttctgaagggagaggttcagtttggcagttggttcgatcacatcaagggatggctgcggatgaagggcaaagacaacttcctgtttatcacttatgaggaattgcagcaggaccttcagggatctgtggagcggatatgcgggtttctggggaggcctctcgggaaagaggctttgggcagcgtggttgcgcattccacgttcagcgccatgaaggcaaacaccatgtcgaactacaccctcctgccaccttcgcttctcgatcataggcgtggagcgtttctgcgcaagggcgtatgtggcgattggaaaaatcacttcactgtggctcagagtgaggccttcgaccgggcttacaggaaacagatgagaggcatgccgacatttccatgggatgaggatcctgaagaagatggctcccccgacccggagccctcccctgaaccagaaccaaagccctcgctggagccgaatacgtcactggaaagggagcctcgcccaaacagctcaccttcaccctcgcccggacaggccagcgaaacgcctcacccgagaccatcgtag

SEQ ID NO: 148019 - DNA, 1252 bp, Artificial Sequence
  derived and/or modified sequence
ctcccaaagtgctgggattacaggagtgtgccactgcgcctgaccagctttataaagtttatagggacagtgtcaccactttacagaagagggactgaggctctgaggaggaagttccttgccagggtccgagtgtcgccaccctgagaactccagcacccacctccctactctccctcatggcgtctcccccacctttccacagccagaagttgccaggtgaatacttccggtacaagggcgtccccttccccgtcggcctgtactcgctcgagagcatcagcttggcggagaacacccaagatgtgcgggacgacgacatctttatcatcacctaccccaagtcaggcacgacctggatgatcgagatcatctgcttaatcctgaaggaaggggatccatcctggatccgctccgtgcccatctgggagcgggcaccctggtgtgagaccattgtgggtgccttcagcctcccggaccagtacagcccccgcctcatgagctcccatcttcccatccagatcttcaccaaggccttcttcagctccaaggccaaggtgatctacatgggccgcaacccccgggacgttgtggtctccctctatcattactccaagatcgccgggcagttaaaggacccgggcacacccgaccagttcctgagggacttcctcaaaggcgaagtgcagtttggctcctggttcgaccacattaagggctggcttcggatgaagggcaaagacaacttcctatttatcacctacgaggagctgcagcaggacttacagggctccgtggagcgcatctgtgggttcctgggccgtccgctgggcaaggaggcactgggctccgtcgtggcacactcaaccttcagcgccatgaaggccaacaccatgtccaactacacgctgctgcctcccagcctgctggaccaccgtcgcggggccttcctccggaaaggggtctgcggcgactggaagaaccacttcacggtggcccagagcgaagccttcgatcgtgcctaccgcaagcagatgcgggggatgccgaccttcccctgggatgaagacccggaggaggacggcagcccagatcctgagcccagccctgagcctgagcccaagcccagccttgagcccaacaccagcctggagcgtgagcccagacccaactccagccccagccccagccccggccaggcctctgagaccccgcacccacgaccctcataataaacacgtcgattctgtcc

SEQ ID NO: 148020 - protein, 1893 aa, Artificial Sequence
  derived and/or modified sequence
MGPGCDLLLRTAATITAAAIMSDTDSDEDSAGGGPFSLAGFLFGNINGAGQLEGESVLDDECKKHLAGLGALGLGSLITELTANEELTGTDGALVNDEGWVRSTEDAVDYSDINEVAEDESRRYQQTMGSLQPLCHSDYDEDDYDADCEDIDCKLMPPPPPPPGPMKKDKDQDSITGVSENGEGIILPSIIAPSSLASEKVDFSSSSDSESEMGPQEATQAESEDGKLTLPLAGIMQHDATKLLPSVTELFPEFRPGKVLRFLRLFGPGKNVPSVWRSARRKRKKKHRELIQEEQIQEVECSVESEVSQKSLWNYDYAPPPPPEQCLSDDEITMMAPVESKFSQSTGDIDKVTDTKPRVAEWRYGPARLWYDMLGVPEDGSGFDYGFKLRKTEHEPVIKSRMIEEFRKLEENNGTDLLADENFLMVTQLHWEDDIIWDGEDVKHKGTKPQRASLAGWLPSSMTRNAMAYNVQQGFAATLDDDKPWYSIFPIDNEDLVYGRWEDNIIWDAQAMPRLLEPPVLTLDPNDENLILEIPDEKEEATSNSPSKESKKESSLKKSRILLGKTGVIKEEPQQNMSQPEVKDPWNLSNDEYYYPKQQGLRGTFGGNIIQHSIPAVELRQPFFPTHMGPIKLRQFHRPPLKKYSFGALSQPGPHSVQPLLKHIKKKAKMREQERQASGGGEMFFMRTPQDLTGKDGDLILAEYSEENGPLMMQVGMATKIKNYYKRKPGKDPGAPDCKYGETVYCHTSPFLGSLHPGQLLQAFENNLFRAPIYLHKMPETDFLIIRTRQGYYIRELVDIFVVGQQCPLFEVPGPNSKRANTHIRDFLQVFIYRLFWKSKDRPRRIRMEDIKKAFPSHSESSIRKRLKLCADFKRTGMDSNWWVLKSDFRLPTEEEIRAMVSPEQCCAYYSMIAAEQRLKDAGYGEKSFFAPEEENEEDFQMKIDDEVRTAPWNTTRAFIAAMKGKCLLEVTGVADPTGCGEGFSYVKIPNKPTQQKDDKEPQPVKKTVTGTDADLRRLSLKNAKQLLRKFGVPEEEIKKLSRWEVIDVVRTMSTEQARSGEGPMSKFARGSRFSVAEHQERYKEECQRIFDLQNKVLSSTEVLSTDTDSSSAEDSDFEEMGKNIENMLQNKKTSSQLSREREEQERKELQRMLLAAGSAASGNNHRDDDTASVTSLNSSATGRCLKIYRTFRDEEGKEYVRCETVRKPAVIDAYVRIRTTKDEEFIRKFALFDEQHREEMRKERRRIQEQLRRLKRNQEKEKLKGPPEKKPKKMKERPDLKLKCGACGAIGHMRTNKFCPLYYQTNAPPSNPVAMTEEQEEELEKTVIHNDNEELIKVEGTKIVLGKQLIESADEVRRKSLVLKFPKQQLPPKKKRRVGTTVHCDYLNRPHKSIHRRRTDPMVTLSSILESIINDMRDLPNTYPFHTPVNAKVVKDYYKIITRPMDLQTLRENVRKRLYPSREEFREHLELIVKNSATYNGPKHSLTQISQSMLDLCDEKLKEKEDKLARLEKAINPLLDDDDQVAFSFILDNIVTQKMMAVPDSWPFHHPVNKKFVPDYYKVIVNPMDLETIRKNISKHKYQSRESFLDDVNLILANSVKYNGPESQYTKTAQEIVNVCYQTLTEYDEHLTQLEKDICTAKEAALEEAELESLDPMTPGPYTPQPPDLYDTNTSLSMSRDASVFQDESNMSVLDIPSATPEKQVTQEGEDGDGDLADEEEGTVQQPQASVLYEDLLMSEGEDDEEDAGSDEEGDNPFSAIQLSESGSDSDVGSGGIRPKQPRMLQENTRMDMENEESMMSYEGDGGEASHGLEDSNISYGSYEEPDPKSNTQDTSFSSIGGYEVSEEEEDEEEEEQRSGPSVLSQVHLSEDEEDSEDFHSIAGDSDLDSDE

SEQ ID NO: 148021 - DNA, 7709 bp, Artificial Sequence
  derived and/or modified sequence
aagggagctcagtaagtcacttctgggcgactgttgttttatttccggtctatgggacccggctgcgatttgctgctgcggacagcagctaccatcactgctgccgccatcatgtcagacacggacagcgacgaagattccgctggaggcggcccattttctttagcgggtttccttttcggcaacatcaatggagccgggcagctggagggggaaagcgtcttggatgatgaatgtaagaagcacttggcaggcttgggggctttggggctgggcagcctgatcactgaactcacggcaaatgaagaattgaccgggactgacggtgccttggtaaatgatgaagggtgggttaggagtacagaagatgctgtggactattcagacatcaatgaggtggcagaagatgaaagccgaagataccagcagacgatggggagcttgcagcccctttgccactcagattatgatgaagatgactatgatgctgattgtgaagacattgattgcaagttgatgcctcctccacctccacccccgggaccaatgaagaaggataaggaccaggattctattactggtgtgtctgaaaatggagaaggcatcatcttgccctccatcattgccccttcctctttggcctcagagaaagtggacttcagtagttcctctgactcagaatctgagatgggacctcaggaagcaacacaggcagaatctgaagatggaaagctgacccttccattggctgggattatgcagcatgatgccaccaagctgttgccaagtgtcacagaactttttccagaatttcgacctggaaaggtgttacgttttctacgtctttttggaccagggaagaatgtcccatctgtttggcggagtgctcggagaaagaggaagaagaagcaccgtgagctgatacaggaagagcagatccaggaggtggagtgctcagtagaatcagaagtcagccagaagtctttgtggaactacgactacgctccaccaccacctccagagcagtgtctctctgatgatgaaatcacgatgatggctcctgtggagtccaaattttcccaatcaactggagatatagataaagtgacagataccaaaccaagagtggctgagtggcgttatgggcctgcccgactgtggtatgatatgctgggtgtccctgaagatggcagtgggtttgactatggcttcaaactgagaaagacagaacatgaacctgtgataaaatctagaatgatagaggaatttaggaaacttgaggaaaacaatggcactgatcttctggctgatgaaaacttcctgatggtgacacagctgcattgggaggatgatatcatctgggatggggaggatgtcaaacacaaagggacaaaacctcagcgtgcaagcctggcaggctggcttccttctagcatgactaggaatgcgatggcttacaatgttcagcaaggttttgcagccactcttgatgatgacaaaccttggtactccatttttcccattgacaatgaggatctggtatatggacgctgggaggacaatatcatttgggatgctcaggccatgccccggctgttggaacctcctgttttgacacttgatcccaatgatgagaacctcattttggaaattcctgatgagaaggaagaggccacctctaactccccctccaaggagagtaagaaggaatcatctctgaagaagagtcgaattctcttagggaaaacaggagtcatcaaggaggaaccacagcagaacatgtctcagccagaagtgaaagatccatggaatctctccaatgatgagtattattatcccaagcaacagggtcttcgaggcacctttggagggaatattatccagcattcaattcctgctgtggaattacggcagcccttctttcccacccacatggggcccatcaaactccggcagttccatcgcccacctctgaaaaagtactcatttggtgcactttctcagccaggtccccactcagtccaacctttgctaaagcacatcaaaaaaaaggccaagatgagagaacaagagaggcaagcttcaggtggtggagagatgttttttatgcgcacacctcaggacctcacaggcaaagatggtgatcttattcttgcagaatatagtgaggaaaatggacccttaatgatgcaggttggcatggcaaccaagataaagaactattataaacggaaacctggaaaagatcctggagcaccagattgtaaatatggggaaactgtttactgccatacatctcctttcctgggttctctccatcctggccaattgctgcaagcatttgagaacaacctttttcgtgctccaatttatcttcataagatgccagaaactgatttcttgatcattcggacaagacagggttactatattcgggaattagtggatatttttgtggttggccagcagtgtcccttgtttgaagttcctgggcctaactccaaaagggccaatacgcatattcgagactttctacaggtttttatttaccgccttttctggaaaagtaaagatcggccacggaggatacgaatggaagatataaaaaaagcctttccttcccattcagaaagcagcatccggaagaggctaaagctctgcgctgacttcaaacgcacagggatggactcaaactggtgggtgcttaagtctgattttcgtttaccaacggaagaagagatcagagctatggtgtcaccagagcagtgctgtgcttattatagcatgatagctgcagagcaacgactgaaggatgctggctatggtgagaaatccttttttgctccagaagaagaaaatgaggaagatttccagatgaagattgatgatgaagttcgcactgccccttggaacaccacaagggccttcattgctgccatgaagggcaagtgtctgctagaggtgactggggtggcagatcccacggggtgtggtgaaggattctcctatgtgaagattccaaacaaaccaacacagcagaaggatgataaagaaccgcagccagtgaagaagacagtgacaggaacagatgcagaccttcgtcgcctttccctgaaaaatgccaagcaacttctacgtaaatttggtgtgcctgaggaagagattaaaaagttgtcccgctgggaagtgattgatgtggtgcgcacaatgtcaacagaacaggctcgttctggagaggggcccatgagtaaatttgcccgtggatcaaggttttctgtggctgagcatcaagagcgttacaaagaggaatgtcagcgcatctttgacctacagaacaaggttctgtcatcaactgaagtcttatcaactgacacagacagcagctcagctgaagatagtgactttgaagaaatgggaaagaacattgagaacatgttgcagaacaagaaaaccagctctcagctttcacgtgaacgggaggaacaggagcggaaggaactacagcgaatgctactggcagcaggctcagcagcatccggaaacaatcacagagatgatgacacagcttccgtgactagccttaactcttctgccactggacgctgtctcaagatttatcgcacgtttcgagatgaagaggggaaagagtatgttcgctgtgagacagtccgaaaaccagctgtcattgatgcctatgtgcgcatacggactacaaaagatgaggaattcattcgaaaatttgccctttttgatgaacaacatcgggaagagatgcgaaaagaacggcggaggattcaagagcaactgaggcggcttaagaggaaccaggaaaaggagaagcttaagggtcctcctgagaagaagcccaagaaaatgaaggagcgtcctgacctaaaactgaaatgtggggcatgtggtgccattggacacatgaggactaacaaattctgccccctctattatcaaacaaatgcgccaccttccaaccctgttgccatgacagaagaacaggaggaggagttggaaaagacagtcattcataatgataatgaagaacttatcaaggttgaagggaccaaaattgtcttggggaaacagctaattgagagtgcggatgaggttcgcagaaaatctctggttctcaagtttcctaaacagcagcttcctccaaagaagaaacggcgagttggaaccactgttcactgtgactatttgaatagacctcataagtccatccaccggcgccgcacagaccctatggtgacgctgtcgtccatcttggagtctatcatcaatgacatgagagatcttccaaatacataccctttccacactccagtcaatgcaaaggttgtaaaggactactacaaaatcatcactcggccaatggacctacaaacactccgcgaaaacgtgcgtaaacgcctctacccatctcgggaagagttcagagagcatctggagctaattgtgaaaaatagtgcaacctacaatgggccaaaacactcattgactcagatctctcaatccatgctggatctctgtgatgaaaaactcaaagagaaagaagacaaattagctcgcttagagaaagctatcaaccccttgctggatgatgatgaccaagtggcgttttctttcattctggacaacattgtcacccagaaaatgatggcagttccagattcttggccatttcatcacccagttaataagaaatttgttccagattattacaaagtgattgtcaatccaatggatttagagaccatacgtaagaacatctccaagcacaagtatcagagtcgggagagctttctggatgatgtaaaccttattctggccaacagtgttaagtataatggacctgagagtcagtatactaagactgcccaggagattgtgaacgtctgttaccagacattgactgagtatgatgaacatttgactcaacttgagaaggatatttgtactgctaaagaagcagctttggaggaagcagaattagaaagcctggacccaatgaccccagggccctacacgcctcagcctcctgatttgtatgataccaacacatccctcagtatgtctcgagatgcctctgtatttcaagatgagagcaatatgtctgtcttggatattcccagtgccactccagaaaagcaggtaacacaggaaggtgaagatggagatggtgatcttgcagatgaagaggaaggaactgtacaacagcctcaagccagtgtcctgtatgaggatttgcttatgtctgaaggagaagatgatgaggaagatgctgggagtgatgaagaaggagacaatcctttctctgctatccagctgagtgaaagtggaagtgactctgatgtgggatctggtggaataagacccaaacaaccccgcatgcttcaggagaacacaaggatggacatggaaaatgaagaaagcatgatgtcctatgagggagacggtggggaggcttcccatggtttggaggatagcaacatcagttatgggagctatgaggagcctgatcccaagtcgaacacccaagacacaagcttcagcagcatcggtgggtatgaggtatcagaggaggaagaagatgaggaggaggaagagcagcgctctgggccgagcgtactaagccaggtccacctgtcagaggacgaggaggacagtgaggatttccactccattgctggggacagtgacttggactctgatgaatgaggcttcctttgggcctccttggtcagccttccctgttctccagcctaggtggttcacctttccccaatttgttcatatttgtacagtatctgatcctgaaatcatgaaattaactaacaccttagcctttttaaaagtagtaagtaaatgataataaatcacctctcctaatcttcctggggcaatgtcaccctttgatttaaaacaaagcaaccccctttcccctaccactacggaaaagagcaagctcatttttccgtgtcctcctttatttaactccatttattgcttttggtataatttttccctggggaaggaggggaaattatgaaagaactagtaactttatgtcctcttgatgtattaggaaatttccggccaggcgtggtggctcacacctgtaatctcagcactctgggaggccgaggcgggcagatcacctgaggtcagaagttcgagaccagcttggccaacatggcgaaaccgcatctctactaaaaatacaaaaattagccaggtgtggtggcgtatgcctgttaatcctagctactcgggaggctgaggcaggagaattacttgaacccgggaggcagaggttgcagtgagtggaggtcacgccactgcactccagcctgggcgaaagagtgagattcagtctcaaaaaaaaaaaaatttccaagcatggtatcatctcacttttctaatttacaggctggagcagatgagagccctcctgctgggacagagaattgggttctagtggactctgtgctacacttaaacctgtgagacaaaccgcccattattttattatttaattatgcaatgcctagttcctaaatggattggaggcaaattaccgtaaattttgaaacagcctatatgtcagaaatgataatgttgccacctaaatgttttctgtcccccccaccctccccaggggaaatggtaggaaaatggtaagtttcttagggcaaagactgtgtcttctgtttcttttcatgcttaggatatggttctgtgcatagtaggtactcagtaaatgttcctagaatcataaaatcctcaacagatatgttactgagcatctgcttttcatgataagcactctatcagatccttgggatgcaaaggtaaataagacaaatcccttttacccaaagagctcaccatcaagttgggggagggaaagtggaattcaaaacatgttaataaatcatcatagtactgtgagataagtgcaattaagaagctagttataaagtataggggaaatagaggagtaatcatgtctgaaaagtcaggaaagtcttcctagaggtaatttttaagctgattgttttagaattagtagaagcttgccagatggaaaagtccaggcaaagtgtaacatgaatgggaaaggccacagtctagaaatggcagagtgtgttcctagtttgtttgtttgtttgtttgtacctgccttgttccaggaaggatttaatgtggtttatattccagtcctttaatgctggaagggctgagatgagactgaaagatgggcaggaagtatatcatcacaagctttgtgtttgatgttaatgtgtatgatttttatattatgggaaataagctcttagaggagtgatataatcaggtttgtgttttagaaatctgtgtaatgaatgaatgaagaaagaaattgaagaatcatgtaacatatgtgatcgcatttttgtaaaagaaccatgtgtgtttatatgtgtttatatatatacttgtgtatgcaaaggtaaaagtctgaaaggatatatgctaactgttcacaatgataaccccccaggaatgggattggaggggagggggcttctgtgtttgttatgtatgctgggtgggatattgtgcttttatttctatattgtttgaatttttttacagtatgtattatttttgtaataaaaattttaaaaaattccaaaaaaaaaaaaaaaaaa

SEQ ID NO: 148022 - DNA, 5682 bp, Artificial Sequence
  derived and/or modified sequence
atgggccccggctgcgacctgctgctgagaaccgccgccaccatcaccgccgccgccatcatgagcgacaccgacagcgacgaggacagcgccggcggcggccccttcagcctggccggcttcctgttcggcaacatcaacggcgccggccagctggagggcgagagcgtgctggacgacgagtgcaagaagcacctggccggcctgggcgccctgggcctgggcagcctgatcaccgagctgaccgccaacgaggagctgaccggcaccgacggcgccctggtgaacgacgagggctgggtgagaagcaccgaggacgccgtggactacagcgacatcaacgaggtggccgaggacgagagcagaagataccagcagaccatgggcagcctgcagcccctgtgccacagcgactacgacgaggacgactacgacgccgactgcgaggacatcgactgcaagctgatgcccccccccccccccccccccggccccatgaagaaggacaaggaccaggacagcatcaccggcgtgagcgagaacggcgagggcatcatcctgcccagcatcatcgcccccagcagcctggccagcgagaaggtggacttcagcagcagcagcgacagcgagagcgagatgggcccccaggaggccacccaggccgagagcgaggacggcaagctgaccctgcccctggccggcatcatgcagcacgacgccaccaagctgctgcccagcgtgaccgagctgttccccgagttcagacccggcaaggtgctgagattcctgagactgttcggccccggcaagaacgtgcccagcgtgtggagaagcgccagaagaaagagaaagaagaagcacagagagctgatccaggaggagcagatccaggaggtggagtgcagcgtggagagcgaggtgagccagaagagcctgtggaactacgactacgcccccccccccccccccgagcagtgcctgagcgacgacgagatcaccatgatggcccccgtggagagcaagttcagccagagcaccggcgacatcgacaaggtgaccgacaccaagcccagagtggccgagtggagatacggccccgccagactgtggtacgacatgctgggcgtgcccgaggacggcagcggcttcgactacggcttcaagctgagaaagaccgagcacgagcccgtgatcaagagcagaatgatcgaggagttcagaaagctggaggagaacaacggcaccgacctgctggccgacgagaacttcctgatggtgacccagctgcactgggaggacgacatcatctgggacggcgaggacgtgaagcacaagggcaccaagccccagagagccagcctggccggctggctgcccagcagcatgaccagaaacgccatggcctacaacgtgcagcagggcttcgccgccaccctggacgacgacaagccctggtacagcatcttccccatcgacaacgaggacctggtgtacggcagatgggaggacaacatcatctgggacgcccaggccatgcccagactgctggagccccccgtgctgaccctggaccccaacgacgagaacctgatcctggagatccccgacgagaaggaggaggccaccagcaacagccccagcaaggagagcaagaaggagagcagcctgaagaagagcagaatcctgctgggcaagaccggcgtgatcaaggaggagccccagcagaacatgagccagcccgaggtgaaggacccctggaacctgagcaacgacgagtactactaccccaagcagcagggcctgagaggcaccttcggcggcaacatcatccagcacagcatccccgccgtggagctgagacagcccttcttccccacccacatgggccccatcaagctgagacagttccacagaccccccctgaagaagtacagcttcggcgccctgagccagcccggcccccacagcgtgcagcccctgctgaagcacatcaagaagaaggccaagatgagagagcaggagagacaggccagcggcggcggcgagatgttcttcatgagaaccccccaggacctgaccggcaaggacggcgacctgatcctggccgagtacagcgaggagaacggccccctgatgatgcaggtgggcatggccaccaagatcaagaactactacaagagaaagcccggcaaggaccccggcgcccccgactgcaagtacggcgagaccgtgtactgccacaccagccccttcctgggcagcctgcaccccggccagctgctgcaggccttcgagaacaacctgttcagagcccccatctacctgcacaagatgcccgagaccgacttcctgatcatcagaaccagacagggctactacatcagagagctggtggacatcttcgtggtgggccagcagtgccccctgttcgaggtgcccggccccaacagcaagagagccaacacccacatcagagacttcctgcaggtgttcatctacagactgttctggaagagcaaggacagacccagaagaatcagaatggaggacatcaagaaggccttccccagccacagcgagagcagcatcagaaagagactgaagctgtgcgccgacttcaagagaaccggcatggacagcaactggtgggtgctgaagagcgacttcagactgcccaccgaggaggagatcagagccatggtgagccccgagcagtgctgcgcctactacagcatgatcgccgccgagcagagactgaaggacgccggctacggcgagaagagcttcttcgcccccgaggaggagaacgaggaggacttccagatgaagatcgacgacgaggtgagaaccgccccctggaacaccaccagagccttcatcgccgccatgaagggcaagtgcctgctggaggtgaccggcgtggccgaccccaccggctgcggcgagggcttcagctacgtgaagatccccaacaagcccacccagcagaaggacgacaaggagccccagcccgtgaagaagaccgtgaccggcaccgacgccgacctgagaagactgagcctgaagaacgccaagcagctgctgagaaagttcggcgtgcccgaggaggagatcaagaagctgagcagatgggaggtgatcgacgtggtgagaaccatgagcaccgagcaggccagaagcggcgagggccccatgagcaagttcgccagaggcagcagattcagcgtggccgagcaccaggagagatacaaggaggagtgccagagaatcttcgacctgcagaacaaggtgctgagcagcaccgaggtgctgagcaccgacaccgacagcagcagcgccgaggacagcgacttcgaggagatgggcaagaacatcgagaacatgctgcagaacaagaagaccagcagccagctgagcagagagagagaggagcaggagagaaaggagctgcagagaatgctgctggccgccggcagcgccgccagcggcaacaaccacagagacgacgacaccgccagcgtgaccagcctgaacagcagcgccaccggcagatgcctgaagatctacagaaccttcagagacgaggagggcaaggagtacgtgagatgcgagaccgtgagaaagcccgccgtgatcgacgcctacgtgagaatcagaaccaccaaggacgaggagttcatcagaaagttcgccctgttcgacgagcagcacagagaggagatgagaaaggagagaagaagaatccaggagcagctgagaagactgaagagaaaccaggagaaggagaagctgaagggcccccccgagaagaagcccaagaagatgaaggagagacccgacctgaagctgaagtgcggcgcctgcggcgccatcggccacatgagaaccaacaagttctgccccctgtactaccagaccaacgccccccccagcaaccccgtggccatgaccgaggagcaggaggaggagctggagaagaccgtgatccacaacgacaacgaggagctgatcaaggtggagggcaccaagatcgtgctgggcaagcagctgatcgagagcgccgacgaggtgagaagaaagagcctggtgctgaagttccccaagcagcagctgccccccaagaagaagagaagagtgggcaccaccgtgcactgcgactacctgaacagaccccacaagagcatccacagaagaagaaccgaccccatggtgaccctgagcagcatcctggagagcatcatcaacgacatgagagacctgcccaacacctaccccttccacacccccgtgaacgccaaggtggtgaaggactactacaagatcatcaccagacccatggacctgcagaccctgagagagaacgtgagaaagagactgtaccccagcagagaggagttcagagagcacctggagctgatcgtgaagaacagcgccacctacaacggccccaagcacagcctgacccagatcagccagagcatgctggacctgtgcgacgagaagctgaaggagaaggaggacaagctggccagactggagaaggccatcaaccccctgctggacgacgacgaccaggtggccttcagcttcatcctggacaacatcgtgacccagaagatgatggccgtgcccgacagctggcccttccaccaccccgtgaacaagaagttcgtgcccgactactacaaggtgatcgtgaaccccatggacctggagaccatcagaaagaacatcagcaagcacaagtaccagagcagagagagcttcctggacgacgtgaacctgatcctggccaacagcgtgaagtacaacggccccgagagccagtacaccaagaccgcccaggagatcgtgaacgtgtgctaccagaccctgaccgagtacgacgagcacctgacccagctggagaaggacatctgcaccgccaaggaggccgccctggaggaggccgagctggagagcctggaccccatgacccccggcccctacaccccccagccccccgacctgtacgacaccaacaccagcctgagcatgagcagagacgccagcgtgttccaggacgagagcaacatgagcgtgctggacatccccagcgccacccccgagaagcaggtgacccaggagggcgaggacggcgacggcgacctggccgacgaggaggagggcaccgtgcagcagccccaggccagcgtgctgtacgaggacctgctgatgagcgagggcgaggacgacgaggaggacgccggcagcgacgaggagggcgacaaccccttcagcgccatccagctgagcgagagcggcagcgacagcgacgtgggcagcggcggcatcagacccaagcagcccagaatgctgcaggagaacaccagaatggacatggagaacgaggagagcatgatgagctacgagggcgacggcggcgaggccagccacggcctggaggacagcaacatcagctacggcagctacgaggagcccgaccccaagagcaacacccaggacaccagcttcagcagcatcggcggctacgaggtgagcgaggaggaggaggacgaggaggaggaggagcagagaagcggccccagcgtgctgagccaggtgcacctgagcgaggacgaggaggacagcgaggacttccacagcatcgccggcgacagcgacctggacagcgacgagtag

SEQ ID NO: 148023 - DNA, 5682 bp, Artificial Sequence
  derived and/or modified sequence
atgggacctggatgcgatctcctcttgcgaacagccgcaacgattaccgccgccgctatcatgagtgatacggactcagatgaagactcagcaggcggcgggccttttagcctggctgggtttctgttcggaaacattaatggcgccggtcaattggagggcgaatcagtcctggacgatgaatgtaagaagcatctggctggactgggggctctagggttgggcagtttgatcacagagctcactgcaaatgaagagctgaccggcacagacggggccttggttaatgacgaaggatgggtgcggtctaccgaggacgccgtggattacagcgacatcaacgaggtggctgaggatgagtcacgccgataccagcagaccatgggctcattacagccactttgtcacagtgattacgatgaagatgactacgacgcagactgcgaggacattgactgcaagctgatgccccctccacctcctcctcctggacctatgaagaaggataaagatcaggactccatcacaggggtaagtgaaaatggtgaagggataatcctgccgagtatcatcgcccccagctccctggccagtgagaaggtggacttctcttcatcaagtgattcagagagcgaaatgggaccacaggaagcgacccaggcggagagcgaggatggaaaactgactctccccctggcaggcataatgcagcacgatgcgacaaaactgctgccctctgtgactgaactctttcctgagttccgccctggcaaggtcctgcggttcttacggctctttgggcccggtaagaacgtcccaagtgtgtggcgctcagctcgtcgaaagagaaaaaaaaaacaccgggagcttatacaggaggaacagattcaggaggtggaatgcagcgtcgagtctgaggtgtctcagaagtcattgtggaactatgactatgcccctcccccacccccagagcagtgtttgtcagatgacgagatcacgatgatggcacctgtggagtcgaagtttagtcagagtacaggcgatatagacaaggtcaccgatacaaaaccacgagtcgccgaatggagatacggcccggcgagactctggtatgacatgctgggcgttcccgaggatggctctggctttgattacggctttaagttacggaaaacagagcatgagcctgtgattaagagccggatgattgaagagtttagaaagctcgaggagaataacggcactgacctccttgccgatgagaacttcttgatggtgacacagttgcactgggaagacgacataatctgggatggggaagacgtgaagcataagggaacaaaaccccagagagctagccttgctggttggttgccaagcagcatgactaggaatgccatggcctataatgtccagcaggggttcgcagcaactttggatgatgataagccctggtactccattttccccatagacaatgaagatcttgtctatgggagatgggaagataatatcatctgggatgctcaggcaatgccacggctgttggagcctcctgtactcaccctggaccccaatgatgagaacctgatcttggaaatcccagatgaaaaggaggaagccaccagcaattccccatccaaagaatctaagaaagaatcatccctcaaaaagtcccgaattctgctggggaaaacaggggtgataaaggaagaaccccagcagaatatgagtcagcccgaagtgaaggacccatggaatttatctaacgacgagtattattaccccaagcagcaagggctcaggggcactttcgggggtaacatcattcagcactctatcccagccgttgagctccgccagcccttcttccccactcatatgggtcccattaaactgcgtcagtttcacagaccacctttgaagaaatacagcttcggggcactgtcccagcctggcccccatagtgtgcagcccctgctgaaacacattaaaaaaaaggctaagatgagagaacaggagagacaggcgtccggcggcggcgagatgtttttcatgaggaccccacaagacttgacgggaaaagacggcgacttgattttggctgagtattccgaagagaatggccctctcatgatgcaggtgggcatggcaacgaagattaagaattattacaaaagaaagcccggtaaggatcctggcgcccctgactgcaagtatggagagactgtgtattgccacacttcacctttcctgggctctttgcacccaggccagctgctccaggctttcgagaacaatctcttccgggcacctatatacctccacaagatgcccgagactgattttctgattatccggacgcgccaggggtactacatcagggaactcgtggatatctttgttgtaggccagcagtgccccctattcgaagtgcccgggcctaattcaaaaagggccaacacccacatccgggacttccttcaagtgtttatttaccgtcttttctggaaatcaaaggatagacccaggagaatcaggatggaagacataaaaaaggccttcccatcccactcagagagctccattaggaaacggctgaagctgtgcgctgatttcaagagaaccgggatggattcaaactggtgggtgctgaagagcgacttcaggctcccaaccgaggaggaaattcgagcaatggtgtcccctgagcagtgttgcgcatactacagtatgatagccgccgaacagaggctgaaggacgcgggatacggtgagaagtcgttcttcgcccccgaagaggagaatgaggaagacttccagatgaaaattgacgatgaggtgagaacagcaccatggaacaccacccgggctttcattgccgcaatgaaagggaagtgcctgttggaagttacaggggtagctgatccaacaggctgtggggaagggttttcttacgtcaaaataccaaataagcccacacagcagaaagatgataaagagccccaacccgttaagaaaaccgttacaggaacagacgctgacctgaggaggctgtccctaaagaatgccaaacaacttcttagaaaatttggcgttcctgaggaagaaatcaagaaactgtcacggtgggaagtgatcgacgtcgtgagaaccatgagcaccgagcaggcccggagcggagaggggcctatgtccaaattcgctaggggatcgagattcagcgttgcagaacaccaggagagatacaaggaggaatgccagaggatctttgaccttcagaataaggtgctgtcgagcaccgaggtcttaagtacagatactgactcatcatcagccgaggactccgactttgaagaaatggggaaaaacatcgaaaatatgctccagaacaagaagacatcttctcagctatctagagaaagggaagagcaggagcggaaggaactgcaaaggatgctactggcggcagggagtgcagctagtggcaataaccaccgagacgacgatacagcttccgtgacctcacttaactccagcgcgactggacgctgtctcaagatttatcgtacttttagggacgaggaggggaaggagtacgtgaggtgtgagacagtaagaaaacccgcagtgattgatgcctacgtgagaatccgcacgaccaaggatgaggagttcataagaaagttcgctctgtttgatgagcagcatcgagaggaaatgcgcaaggaacgtcgtaggatccaggagcagctgcggaggctgaaaagaaaccaggagaaggaaaagctgaagggacctccagagaagaagcccaaaaaaatgaaagaaaggcccgatttgaagctcaaatgcggagcatgcggcgccattggacacatgcggaccaacaagttctgtccactttactatcagactaatgctcccccctcaaatcccgtcgcaatgactgaagagcaggaggaggagctggaaaagacggtcattcataacgataacgaggaactcatcaaggtcgagggcacaaaaatcgttctgggcaagcagcttattgagagtgccgacgaagtgcggagaaagagcctcgtgctgaaatttccaaagcagcagttgccaccgaagaagaagcgcagggttggaacaacagtgcactgcgattatctgaacaggccccataagtcaatccaccgacgtcggacggacccaatggtgaccctgtctagtatcttagagtcaatcattaatgacatgagagacctgcccaatacatacccattccacacgccagtgaacgcaaaggtcgtgaaagattattataaaattattacccgccccatggacctgcagacgttgcgggagaacgttagaaagcgactgtacccctctcgggaagaattcagagaacacttggagctcatagttaagaactccgctacttataacgggccgaagcacagcctgacacagattagtcagtcaatgctcgatctctgtgatgagaagctgaaggagaaagaagataaactcgccaggctggagaaggccatcaaccctctgctcgatgacgacgaccaggtggcattctcattcatactagataatattgttacgcagaaaatgatggcagtgccagattcttggcctttccaccatcctgtgaataagaaatttgtacctgactattataaggtcatcgtcaatcctatggatcttgagaccattcgcaaaaatatctccaagcacaaatatcagtctcgagaaagttttttggacgatgtgaatcttattctggctaactccgtaaagtataacggtcctgagtctcagtacacaaagaccgctcaggaaatcgttaatgtgtgctaccagactctcacggagtatgacgagcacctaacccagctggaaaaggacatctgtaccgcaaaggaggcagcattggaggaagctgagctggagagcttggacccaatgacccccggcccctatacccctcaacctccagatctgtatgacaccaacacgtcgctcagtatgtcccgggatgcgagcgtcttccaggacgaatcaaacatgtccgtgctggatatcccgtccgcaactcctgagaaacaagtcacgcaggaaggcgaggacggggacggagacctggcggatgaggaagagggaaccgttcagcaacctcaggctagcgttctctacgaggatttgcttatgtcagaaggtgaagatgatgaagaagatgctggatcggatgaggaaggagacaacccattctccgccatccaactctccgagtcaggcagcgatagcgacgttggatcaggcggaatccggcctaagcagcccagaatgctgcaagagaacactaggatggacatggagaatgaagaatctatgatgtcgtatgagggcgacggcggtgaggcatcacacggattggaggactctaacatttcttatggctcttatgaagaaccagacccaaaaagcaacactcaggacacgagttttagctccatcggcggttacgaggtctccgaggaggaggaagacgaggaagaggaggaacagaggtctggaccatctgtgctttctcaggttcacctgtctgaggacgaggaggacagcgaggacttccactccatagctggtgactcagatctggacagtgatgagtag

SEQ ID NO: 148024 - DNA, 5682 bp, Artificial Sequence
  derived and/or modified sequence
atgggccctggctgtgacctgctgctgaggacagctgccaccatcacagctgctgccatcatgtctgacacagacagtgatgaggacagcgctgggggcggccccttcagcctggccggcttcctgtttggaaacatcaatggagctggccagctggagggggagagcgtgctggatgatgagtgcaagaagcacctggccggcctgggcgccctgggcctgggcagcctcatcacagagctgacagccaatgaggagctgaccggcacagatggagccctggtgaatgatgagggctgggtgcgcagcacagaagatgctgtggactacagcgacatcaatgaggtggccgaggatgagagccgccgctaccagcagaccatgggcagcctgcagcccctgtgccacagcgactatgatgaagatgattatgatgctgactgtgaagatattgactgcaagctgatgcctcctcctcctcctcctcctggccccatgaagaaggacaaggaccaggacagcatcaccggggtgtctgaaaatggagagggcatcatcctgcccagcatcatcgcccccagcagcctggccagcgagaaggtggacttcagcagcagcagtgacagcgagagcgagatgggcccccaggaggccacccaggccgagagtgaagatggcaagctgaccctgcccctggccggcatcatgcagcatgatgccaccaagctgctgcccagcgtgacagagctgtttcctgagttccggcctgggaaggtgctgcgcttcctgcggctgtttggacctgggaagaatgtgcccagcgtgtggaggtctgcccggaggaagaggaagaagaagcaccgggagctgatccaggaggagcagatccaggaggtggagtgcagcgtggagagcgaggtgtcccagaagagcctgtggaactatgactatgcccctcctcctcctcctgagcagtgcctgagtgatgatgagatcaccatgatggcccctgtggagagcaagttcagccagagcactggagacatcgacaaggtgacagacaccaagccccgggtggccgagtggaggtatggccctgcccggctgtggtatgacatgctgggcgtgcctgaagatggcagcggctttgattatggcttcaagctgaggaagacagagcacgagcccgtcatcaagagcaggatgattgaggagttcaggaagctggaggagaacaatggaacagacctgctggctgatgagaacttcctgatggtgacccagctgcactgggaggatgacatcatctgggatggagaagatgtgaagcacaagggcaccaagccccagagggccagcctggccggctggctgcccagctccatgaccagaaatgccatggcctacaacgtgcagcagggctttgctgccaccctggatgatgacaagccctggtacagcatcttccccatcgacaatgaagacctggtgtatggccgctgggaggacaacatcatctgggatgcccaggccatgccccggctgctggagccccctgtgctgaccctggaccccaatgatgagaacctgatcctggagatcccagatgagaaggaggaggccaccagcaacagccccagcaaggagagcaagaaggagagcagcctgaagaagagccgcatcctgctgggcaagacaggagtcatcaaggaggagccccagcagaacatgagccagcctgaggtgaaggacccctggaacctgagcaatgatgagtactactaccccaagcagcagggcctgcggggcacctttggaggcaacatcatccagcacagcatcccagctgtggagctgcggcagcccttcttccccacccacatgggccccatcaagctgcggcagttccacaggcctcccctgaagaagtacagctttggagccctgagccagcccggcccccacagcgtgcagcccctgctgaagcacatcaagaagaaggccaagatgagggagcaggagcggcaggccagcggcggcggggagatgttcttcatgaggaccccccaggacctgaccgggaaggatggagacctgatcctggccgagtacagtgaagaaaatggccccctgatgatgcaggtgggcatggccaccaagatcaagaactactacaagaggaagccaggcaaggaccccggggccccagactgcaagtacggggagaccgtgtactgccacaccagccccttcctgggcagcctgcaccctggccagctgctgcaggcctttgagaacaacctcttccgggcccccatctacctgcacaagatgcctgagacagacttcctgatcatccgcacccggcagggctactacatccgggagctggtggacatctttgtggtgggccagcagtgccccctgtttgaggtgcccggccccaacagcaagagggccaacacccacatccgggacttcctgcaggtgttcatctaccgcctcttctggaagagcaaggaccggccccggcgcatccgcatggaggacatcaagaaggccttccccagccacagcgagagcagcatcaggaagaggctgaagctgtgtgccgacttcaagaggacaggcatggacagcaactggtgggtgctgaagagtgacttccggctgcccacagaggaggagatccgggccatggtgtccccagagcagtgctgtgcctactacagcatgattgctgctgagcagaggctgaaggatgctggctacggggagaagagcttctttgcccctgaggaggagaatgaggaggacttccagatgaagattgatgatgaggtgaggacagccccctggaacaccacccgggccttcatcgccgccatgaagggcaagtgcctgctggaggtgactggagtggccgaccccaccggctgtggggagggcttctcctatgtgaagatccccaacaagcccacccagcagaaggatgacaaggagccccagcctgtgaagaagacagtgactggaacagatgctgacctgcggcggctgagcctgaagaatgccaagcagctgctgaggaagtttggagtgcctgaggaggagatcaagaagctgagccgctgggaggtgattgatgtggtgaggaccatgagcacagagcaggcccggagcggggagggccccatgagcaagtttgcccggggcagccgcttctctgtggccgagcaccaggagcgctacaaggaggagtgccagaggatctttgacctgcagaacaaggtgctgagcagcacagaggtgctgagcacagacacagacagcagcagcgctgaggacagcgactttgaggagatgggcaagaacatcgagaacatgctgcagaacaagaagaccagcagccagctgagccgggagcgggaggagcaggagaggaaggagctgcagaggatgctgctggccgccggcagcgctgccagcggcaacaaccacagagatgatgacacagcctctgtgaccagcctgaacagcagcgccaccggccgctgcctgaagatctaccgcaccttcagagatgaggagggcaaggagtatgtgcgctgtgaaacagtgaggaagccagctgtgattgatgcctacgtgcgcatccgcaccaccaaggatgaggagttcatcaggaagtttgccctgtttgatgagcagcaccgggaggagatgaggaaggagcggcggcgcatccaggagcagctgcggcggctgaagaggaaccaggagaaggagaagctgaagggccccccagagaagaagcccaagaagatgaaggagaggccagacctgaagctgaagtgtggggcctgtggggccatcggccacatgaggaccaacaagttctgccccctgtactaccagaccaatgccccacccagcaaccctgtggccatgacagaggagcaggaggaggagctggagaagacagtcatccacaatgacaatgaggagctgatcaaggtggagggcaccaagatcgtgctgggcaagcagctgattgaatctgcagatgaggtgcggaggaagagcctggtgctgaagttccccaagcagcagctgccccccaagaagaagagaagagtgggcaccaccgtgcactgtgactacctgaaccggccccacaagagcatccacagaagaagaacagaccccatggtgaccctgagcagcatcctggagagcatcatcaatgacatgagggacctgcccaacacctaccccttccacacccctgtgaatgccaaggtggtgaaggactactacaagatcatcacccggcccatggacctgcagaccctgagagaaaatgtgaggaagaggctgtaccccagccgggaggagttccgggagcacctggagctgattgtgaagaacagcgccacctacaacggccccaagcacagcctgacccagatcagccagagcatgctggacctgtgtgatgagaagctgaaggagaaggaggacaagctggcccggctggagaaggccatcaaccccctgctggatgatgatgaccaggtggccttctccttcatcctggacaacatcgtgacccagaagatgatggctgtgcctgacagctggcccttccaccaccctgtgaacaagaagtttgtgcctgactactacaaggtgattgtgaaccccatggacctggagaccatcaggaagaacatcagcaagcacaagtaccagagccgggagagcttcctggatgatgtgaacctgatcctggccaacagcgtgaagtacaacggccctgagagccagtacaccaagacagcccaggagatcgtgaatgtgtgctaccagaccctgacagaatatgatgagcacctgacccagctggagaaggacatctgcacagccaaggaggccgccctggaggaggccgagctggagagcctggaccccatgaccccaggcccctacaccccccagcccccagacctgtatgacaccaacaccagcctgtccatgagcagagatgccagcgtcttccaggatgagagcaacatgtctgtgctggacatccccagcgccaccccagagaagcaggtgacccaggagggagaagatggagatggagacctggctgatgaggaggagggcaccgtgcagcagccccaggcctctgtgctgtatgaggacctgctgatgtctgaaggagaagatgatgaagaagatgctggcagtgatgaggagggggacaaccccttcagcgccatccagctgtctgagagcggcagtgacagtgatgtgggcagcggcggcatccggcccaagcagcccaggatgctgcaggagaacaccaggatggacatggagaatgaggagagcatgatgtcctatgaaggagatggaggagaggccagccacggcctggaggacagcaacatctcctatggcagctatgaggagccagaccccaagagcaacacccaggacaccagcttcagcagcattggaggctatgaggtgtctgaggaggaggaggatgaggaggaggaggagcagaggagcggccccagcgtgctgagccaggtgcacctgtctgaagatgaagaagattctgaggacttccacagcattgctggggacagcgacctggacagtgatgaatag

SEQ ID NO: 148025 - DNA, 5682 bp, Artificial Sequence
  derived and/or modified sequence
atgggccccggctgcgacctgctgctgcggaccgccgccaccatcactgcggctgctatcatgagtgacactgacagcgatgaagactccgcagggggaggccctttctccctggccggttttctgttcggcaatatcaatggagccggacagttggagggagaaagtgtacttgacgatgaatgtaagaaacacttggctgggctcggtgcactcgggttggggtccctgatcaccgagctaacggctaacgaagagttgaccggaacagacggcgctctggtcaatgatgagggctgggtccggagcacagaggatgccgtggactactccgacataaatgaggtggccgaggacgagtctaggagatatcagcagaccatgggctcacttcagccgctctgtcatagcgattacgacgaggacgattacgacgcagattgtgaggatatcgactgtaagctgatgcccccgcctccccctccgcctggcccaatgaaaaaagacaaggaccaagatagcatcacgggtgtatccgaaaacggcgaagggatcattttgccctcgattattgcccctagctcacttgcatccgaaaaggtggatttcagcagcagcagcgacagcgagagtgagatgggaccccaggaagccacccaggcggaaagtgaagatggaaagttgacacttcccctggcggggatcatgcaacacgatgcgacaaagttgctaccttccgtgactgaactctttccggagtttcgccctggaaaggttttgaggtttttaaggctgtttgggccgggaaagaacgtgccaagcgtctggagatcagctagacggaaacgaaagaagaaacacagagaactcatccaggaggaacagatccaggaagtcgagtgctccgttgagagtgaggtgagtcaaaagtctctctggaactacgactacgccccacctccgcctcccgaacagtgcctgtctgacgatgaaattaccatgatggcacctgttgagtctaaattttctcaatcgaccggggacatagacaaggtcaccgatacaaagcctcgggtggccgagtggcgttacggacccgcccgcttatggtatgatatgctcggtgttccagaggacggatcaggttttgactacggcttcaagctgcggaagactgagcatgagcctgtgattaagtcccgcatgatagaagagttcagaaagctggaagaaaataacggcacagacctgctcgccgacgaaaattttttaatggtcactcagctacactgggaagatgacatcatttgggacggtgaagacgtgaaacacaaaggaacgaagcctcagcgagcttcactggccggctggctgccctctagtatgacccgcaatgccatggcatataacgtccagcagggatttgcagctactcttgatgacgataagccatggtactccatttttccaatagataacgaggatctggtctacggccgctgggaagacaacatcatctgggatgcacaggcgatgccccgattattagagcctcctgtgctgactctcgaccctaatgacgagaatttgattctggagattcctgatgaaaaggaggaagcaacgagtaactctccttcaaaagaatccaaaaaagagagtagtctgaagaagagccgtatactgttggggaagacgggcgtgattaaggaggagccacagcagaacatgtcccagccagaagtaaaagacccttggaacctgtccaacgacgaatactattatcctaagcagcaaggcctaaggggcaccttcggaggcaacattatccagcatagcatccccgctgtggaactgagacaaccattctttcctactcacatggggccgataaagctgaggcagtttcataggccgcctctcaagaagtattcttttggcgccctgtcccagccaggtcctcactctgttcagccccttcttaagcatatcaagaaaaaggctaaaatgagagaacaggagcgccaggcatccggagggggggagatgttttttatgaggacaccccaagacctaaccgggaaagatggtgacttgatcctcgccgagtactccgaagagaacggaccgctgatgatgcaagttgggatggcgaccaagattaagaactattacaaaagaaagccaggcaaggacccaggcgcaccagactgcaagtatggagaaactgtctactgtcacacgagtccctttttagggagccttcatcctggccagctgctgcaagctttcgaaaataacctgtttcgcgcccctatctatctccataaaatgcccgaaactgactttctcattattagaaccaggcaaggttactatatcagagagcttgtcgacattttcgtggttggccaacagtgcccgctcttcgaggtccctgggccgaactctaagcgggccaatacccacattagagactttctccaggttttcatttatagattgttctggaaatctaaggacagaccaagaaggatcaggatggaggacatcaagaaggcattcccttcccacagtgagtctagcatcagaaagaggctgaagctctgtgccgatttcaaacgaacgggaatggattccaattggtgggtgttgaaatcagacttccgtctgccaacagaggaagagatccgagccatggtgtccccagaacagtgttgtgcctattattccatgatcgccgccgagcagaggttgaaagatgcggggtacggcgagaaatctttcttcgctcctgaggaggagaatgaagaagacttccaaatgaagattgacgacgaggtgcgcactgccccttggaatacaacgcgggccttcattgccgccatgaaaggaaaatgtcttctggaagtcactggagtggccgaccccactgggtgtggagaagggttctcttatgtgaagattccaaataaacctacgcagcagaaagacgacaaagaaccgcagcccgtgaaaaagacagtgaccggcactgacgctgacctgcgaagactcagtctgaagaacgcaaagcagctgctacggaaatttggagtgccagaagaagagatcaagaagctgagtaggtgggaagttattgacgtggtgaggaccatgagcacagaacaggctagaagcggggagggacctatgtctaaattcgcgaggggtagcagatttagtgtcgccgagcatcaggagcgttataaggaagaatgccagaggattttcgatttgcaaaacaaggtgctatcctcaaccgaggtgctctcaaccgatactgattcaagctcggccgaagactcagacttcgaagagatgggtaagaacatcgaaaacatgctgcagaacaagaaaacatcatctcagctgtcacgcgagcgtgaagaacaggaaaggaaggagttacagcgaatgctgttggccgcggggtctgccgcttcagggaataaccacagagatgatgacacagcctctgttacaagtcttaattcaagcgccacaggtaggtgccttaagatttatcggacttttagggacgaagagggaaaggaatatgtccgatgcgagacagtgagaaaacctgctgttatcgatgcctatgttagaatacggacgacgaaagacgaggaattcatcaggaagttcgctctgttcgatgagcagcacagagaggagatgcgaaaagaaagacgacggattcaggaacagctgcgccggctgaagaggaaccaggagaaagagaagctgaagggccccccagaaaagaagcctaagaagatgaaagaacgtccagacctgaaactcaagtgcggcgcgtgcggcgctattggacatatgcggaccaataagttttgccccctttactaccagacgaatgctcccccaagtaacccagtggcgatgactgaagagcaggaggaggaactcgagaaaacagtgattcacaatgataacgaggagctgataaaggtggaaggaaccaaaattgtgctgggaaaacagctgatcgaatcggccgacgaggtccgcaggaaaagccttgtactgaagtttcccaaacagcaactgccgccgaagaagaaacggagggtggggactacggttcactgcgactacctgaaccgccctcataagtccattcacagacgccgaacagacccaatggttactttgtcatccatcctggagtccatcatcaatgacatgcgcgacctgcccaacacttaccccttccacacccccgtcaatgctaaagtggtgaaggactactataagatcataactcgtccaatggatctgcagaccctaagagaaaacgtcagaaagcgcctgtacccctctcgggaggagtttcgtgagcacctcgagctgatcgtgaagaactcggccacttacaacggacctaagcacagcctcacgcaaataagccagtccatgctcgacctgtgcgacgagaaattaaaagagaaggaagacaagctagctcgcctggagaaagccattaatccactgctagacgacgacgaccaggttgcatttagctttattctagataacatcgtgactcagaagatgatggccgtcccggatagctggcctttccatcatcctgtcaacaagaaattcgtgccagactactacaaggtgatcgtcaaccccatggatctggaaacaattcgaaagaatatatctaagcacaaatatcagtcccgggagagcttcctcgatgacgtgaaccttatactggcgaacagcgtgaagtacaatggacctgaatctcagtacacgaagacagcccaggagatagtcaatgtgtgttatcagactctcacagagtacgacgagcatctcacccaactcgaaaaagacatttgtacagcgaaagaggctgccctagaggaggcagaactggagagcctcgacccaatgacccctggcccttacaccccccaacccccggacttatatgacaccaatacgagcctttctatgtctcgtgatgccagcgttttccaggacgagtcaaacatgagtgtcttagacatcccctctgccacgccagagaaacaggttactcaggagggcgaggatggcgatggcgacctcgcagacgaagaggaaggtacagtgcaacagccacaggcctccgtattgtacgaggatctgctgatgtccgagggagaagacgacgaagaggacgccggcagcgatgaagagggggataaccctttttccgccatccaacttagcgagtctgggtcagattccgacgtggggagcggcggcatcaggcccaaacaaccacgcatgctgcaagaaaacaccagaatggatatggaaaatgaggagtccatgatgagttacgagggagacggtggcgaggcgagccacggactggaggatagtaatatctcgtacgggtcttatgaagagccggaccccaagtctaacactcaagacacgtccttctcatcaatcggcggctacgaggtgtctgaagaggaggaggatgaggaggaggaggagcagaggagtggaccatctgtcctgagtcaggtacacctgtccgaagacgaagaggactctgaggatttccacagcattgctggcgatagcgacctggattccgacgagtag

SEQ ID NO: 148026 - DNA, 5682 bp, Artificial Sequence
  derived and/or modified sequence
atgggaccgggttgtgaccttcttttacgcaccgccgctactattaccgccgcagccatcatgtctgatacagatagcgatgaagacagcgccggaggcggacccttctccctcgccggatttctgttcggaaatatcaatggggctggccagttagagggcgaatctgttctcgatgatgagtgcaaaaaacacctggcaggactgggtgccctcggactcggatctcttatcaccgagctaaccgctaacgaagaacttacaggaacagatggagcactcgtgaatgacgaaggatgggtgagaagtacggaagatgccgtggactactcagatataaacgaggtcgccgaggatgaaagtagaagatatcagcagacaatgggatccttacaaccattgtgccacagcgattacgatgaggacgattatgacgcagattgcgaagatattgattgcaagctgatgcctcctccacctcccccaccaggtccgatgaagaaggacaaggaccaagattcaatcacgggcgtgagtgaaaacggtgaaggaatcattcttccaagcataatcgcaccaagctctctggcttccgagaaagttgacttcagcagctcctcagacagcgagtcagaaatgggcccacaggaagctacccaagccgaatccgaggacggaaagttgaccctgcccctggctggtattatgcagcatgatgccactaagcttctaccgtccgtgacggagttattccccgagtttagacctggtaaagtgctgcgtttcctgagactgtttggccctggcaagaatgtgccgtctgtctggaggagcgcgaggaggaaaaggaagaaaaagcatagagaacttattcaggaggaacagatccaggaggttgagtgctcagtggaaagcgaagtgtcccagaaatctctttggaactatgattacgcacccccacccccaccagagcaatgcctgtctgacgatgagatcacgatgatggccccagtggaatctaagttctcgcagtcaacaggtgacatagataaggtaaccgacactaagccgagagttgccgagtggagatacggtccagcgcgtctgtggtatgacatgctcggcgtccccgaggatggcagcggtttcgattacggattcaaattgaggaagactgagcacgaacccgtgattaagagccgtatgatcgaagagtttcggaaattagaagagaacaatggaacagacttgctggcagatgagaacttcttgatggtcactcagcttcactgggaagatgacattatctgggacggtgaagatgtgaagcacaaaggcaccaagccccaaagagctagcctggccggatggctgccgtcttctatgacgaggaatgccatggcctataatgtgcagcaaggctttgctgcgacgctcgacgacgacaagccatggtattccattttccctattgacaatgaggatttagtgtacggcaggtgggaggacaacattatatgggacgcccaggctatgccccgattgctagaaccacccgtgctcacactggaccctaacgatgaaaatctcatactggagatccccgacgagaaggaagaagcaacttccaattctcctagcaaagagtcaaagaaagaaagcagccttaagaaatcacgcatactactgggcaaaaccggggtgattaaggaggaacctcaacaaaacatgtcccagcccgaagtgaaagatccttggaacctcagcaacgacgagtactactaccccaaacagcagggcctgcggggaaccttcggaggaaacatcatacagcactcaattcctgctgtcgagcttcggcagccatttttcccaacccacatgggcccaattaagctgaggcagtttcaccgccctccactaaaaaaatactctttcggcgctctctcacagccgggtccacactctgtgcaacccctgctgaaacacataaagaaaaaagccaagatgcgtgagcaggagcgacaagccagcggcggaggcgagatgtttttcatgagaacccctcaagacttaaccggcaaggacggggatctgatactggctgagtactctgaggagaacggcccactgatgatgcaggtcgggatggccaccaaaattaaaaattactataaaagaaagcctggcaaggaccccggagccccagattgcaaatatggcgaaacggtgtactgtcacacttctcctttcttgggatccctgcaccccggtcagttgctgcaagcctttgagaacaacctgttcagggcccctatttacttgcacaagatgcctgagaccgatttcctgattataaggactcgacaagggtactacattcgagagctggtggacatcttcgtagtggggcagcagtgccccctttttgaggtgcccggacctaactcaaagagagctaatacccatatcagggacttcctgcaggttttcatatacaggctgttttggaaatcgaaggatcgccctagacggatacgcatggaagacatcaagaaggcgttccccagtcactctgaatcttccattagaaaacgccttaaactgtgcgctgacttcaaacgcactgggatggatagcaactggtgggtattgaagagtgactttcgattgccgactgaagaggaaattcgggcaatggttagccctgaacagtgctgcgcctattacagcatgattgccgcagagcagcggctcaaagacgctgggtacggggagaagtcattctttgctccggaggaggagaacgaagaagacttccaaatgaaaattgatgacgaggtgagaacagccccatggaacactaccagggcgtttattgcagctatgaaaggcaagtgcctcctggaagtgacaggcgttgcagatcctactggatgcggcgagggatttagttacgttaaaatccccaacaagccgactcaacagaaggatgacaaagagccccagcctgtcaagaagaccgttactggcacagatgccgacctgcgcaggctgagtctgaagaatgccaaacagctgctgcgtaagttcggcgtgcccgaggaagaaatcaagaagctgtctaggtgggaggtgatcgatgtggtgagaaccatgtcaaccgagcaggctcgttccggggagggccctatgagcaagttcgcacgaggctcacgcttctccgtcgccgaacatcaggagagatacaaagaggagtgtcagcggatcttcgatctccaaaataaggtgctgtcctccaccgaagtgctctcaactgacacagactcgagctctgcagaagatagtgacttcgaagagatgggcaaaaatatagagaacatgttgcagaacaagaaaaccagctcccagctgtctcgggaacgtgaagaacaggagcgtaaggagcttcagaggatgctgcttgctgctggatctgcagcctcaggaaataaccatcgggacgacgacacagcttccgttaccagcctgaactcctccgccacaggaagatgcctgaagatctaccgcacttttagggacgaggaaggcaaagaatacgtcagatgcgagaccgttagaaagccagctgtgatcgacgcatacgtgcggatccggactactaaggatgaggagtttatccgaaagtttgcgctgttcgatgaacagcatagagaagagatgcgtaaggagagacgcagaattcaggaacagttgcggagacttaagaggaatcaagaaaaagaaaagctgaaaggcccaccagaaaaaaaacccaaaaaaatgaaggaacgccctgacttgaagttaaaatgtggcgcatgcggagcaatcggacacatgcgaacgaacaagttttgtcctctctattaccagacaaatgctccaccgtcaaatcccgtcgccatgacagaagaacaggaggaagagctggagaagacagttatccacaacgacaacgaagagcttattaaggtggaaggaaccaaaattgtactcgggaaacagcttatcgagagtgctgacgaggtgaggcgtaagtccctagtcctcaaattcccgaagcagcagttgccccctaagaaaaaacggagagtggggaccactgtgcactgtgactacctcaatagacctcacaagagcattcatcggaggcgaaccgaccctatggtcactctgtcctcaatattggaaagtattataaatgacatgcgggatctgcccaacacataccccttccatacgcccgtcaacgccaaggttgtgaaggactattacaagattatcaccaggccaatggacctccaaaccttgcgcgagaacgtccgcaagaggctgtacccgtcacgggaagaatttcgcgagcatctcgagctcattgttaagaattcagccacctataatggacccaaacatagcttaacccagattagtcagtccatgctggacctgtgtgacgagaagctaaaggagaaagaggacaaacttgctagactggagaaggcaattaacccactcttagatgacgatgaccaggttgcttttagttttatacttgacaatatagtcacccagaaaatgatggctgtgccggatagctggcctttccaccaccccgtcaacaagaaatttgtgcctgattactataaagtcatagtgaatcctatggatctcgagactatcagaaaaaatatttcaaaacacaaatatcagtctcgtgagagcttcctggacgacgtgaacctgatcttggccaatagcgtgaagtataacgggcctgagagtcagtatacgaagacagctcaggagatcgttaatgtatgctaccagacgctgacggagtacgatgagcatctaacccagctcgagaaagatatttgtaccgccaaggaagctgccctggaagaggctgaactcgaaagtctggaccccatgaccccgggaccatacaccccccagccaccagacttatacgacacaaacacttcgctgagcatgtctcgggatgccagtgtttttcaggacgaatccaatatgagtgtgttggacatcccgagcgccactcccgaaaaacaggtcacccaagagggtgaagacggagatggcgacctcgccgacgaggaggaaggaaccgtgcagcagccccaggcatctgtgctgtatgaagacctactcatgtcagaaggagaggacgatgaagaggatgccggatccgacgaggagggcgataaccccttcagcgcaattcagctcagtgagagcggatccgattctgacgtcggttctgggggtatccggccaaaacaacctaggatgttgcaggagaacaccaggatggatatggagaacgaggagtctatgatgtcatacgaaggagacggcggtgaggcaagtcacggattggaggattctaatatcagctacggctcatacgaagagcccgatccaaaaagcaatacacaggataccagcttctcctcaatcggaggatatgaggtctccgaagaggaggaggacgaggaagaagaagagcagcggtccggacctagcgttttaagccaggtgcatctctccgaagacgaggaagactcagaggacttccactcaatcgccggagattcggatctggactcagatgagtac

SEQ ID NO: 148027 - DNA, 5692 bp, Artificial Sequence
  derived and/or modified sequence
tttccggtctatgggacccggctgcgatttgctgctgcggacagcagctaccatcactgctgccgccatcatgtcagacacggacagcgacgaagattccgctggaggcggcccattttctttagcgggtttccttttcggcaacatcaatggagccgggcagctggagggggaaagcgtcttggatgatgaatgtaagaagcacttggcaggcttgggggctttggggctgggcagcctgatcactgaactcacggcaaatgaagaattgaccgggactgacggtgccttggtaaatgatgaagggtgggttaggagtacagaagatgctgtggactattcagacatcaatgaggtggcagaagatgaaagccgaagataccagcagacgatggggagcttgcagcccctttgccactcagattatgatgaagatgactatgatgctgattgtgaagacattgattgcaagttgatgcctcctccacctccacccccgggaccaatgaagaaggataaggaccaggattctattactggtgtgtctgaaaatggagaaggcatcatcttgccctccatcattgccccttcctctttggcctcagagaaagtggacttcagtagttcctctgactcagaatctgagatgggacctcaggaagcaacacaggcagaatctgaagatggaaagctgacccttccattggctgggattatgcagcatgatgccaccaagctgttgccaagtgtcacagaactttttccagaatttcgacctggaaaggtgttacgttttctacgtctttttggaccagggaagaatgtcccatctgtttggcggagtgctcggagaaagaggaagaagaagcaccgtgagctgatacaggaagagcagatccaggaggtggagtgctcagtagaatcagaagtcagccagaagtctttgtggaactacgactacgctccaccaccacctccagagcagtgtctctctgatgatgaaatcacgatgatggctcctgtggagtccaaattttcccaatcaactggagatatagataaagtgacagataccaaaccaagagtggctgagtggcgttatgggcctgcccgactgtggtatgatatgctgggtgtccctgaagatggcagtgggtttgactatggcttcaaactgagaaagacagaacatgaacctgtgataaaatctagaatgatagaggaatttaggaaacttgaggaaaacaatggcactgatcttctggctgatgaaaacttcctgatggtgacacagctgcattgggaggatgatatcatctgggatggggaggatgtcaaacacaaagggacaaaacctcagcgtgcaagcctggcaggctggcttccttctagcatgactaggaatgcgatggcttacaatgttcagcaaggttttgcagccactcttgatgatgacaaaccttggtactccatttttcccattgacaatgaggatctggtatatggacgctgggaggacaatatcatttgggatgctcaggccatgccccggctgttggaacctcctgttttgacacttgatcccaatgatgagaacctcattttggaaattcctgatgagaaggaagaggccacctctaactccccctccaaggagagtaagaaggaatcatctctgaagaagagtcgaattctcttagggaaaacaggagtcatcaaggaggaaccacagcagaacatgtctcagccagaagtgaaagatccatggaatctctccaatgatgagtattattatcccaagcaacagggtcttcgaggcacctttggagggaatattatccagcattcaattcctgctgtggaattacggcagcccttctttcccacccacatggggcccatcaaactccggcagttccatcgcccacctctgaaaaagtactcatttggtgcactttctcagccaggtccccactcagtccaacctttgctaaagcacatcaaaaaaaaggccaagatgagagaacaagagaggcaagcttcaggtggtggagagatgttttttatgcgcacacctcaggacctcacaggcaaagatggtgatcttattcttgcagaatatagtgaggaaaatggacccttaatgatgcaggttggcatggcaaccaagataaagaactattataaacggaaacctggaaaagatcctggagcaccagattgtaaatatggggaaactgtttactgccatacatctcctttcctgggttctctccatcctggccaattgctgcaagcatttgagaacaacctttttcgtgctccaatttatcttcataagatgccagaaactgatttcttgatcattcggacaagacagggttactatattcgggaattagtggatatttttgtggttggccagcagtgtcccttgtttgaagttcctgggcctaactccaaaagggccaatacgcatattcgagactttctacaggtttttatttaccgccttttctggaaaagtaaagatcggccacggaggatacgaatggaagatataaaaaaagcctttccttcccattcagaaagcagcatccggaagaggctaaagctctgcgctgacttcaaacgcacagggatggactcaaactggtgggtgcttaagtctgattttcgtttaccaacggaagaagagatcagagctatggtgtcaccagagcagtgctgtgcttattatagcatgatagctgcagagcaacgactgaaggatgctggctatggtgagaaatccttttttgctccagaagaagaaaatgaggaagatttccagatgaagattgatgatgaagttcgcactgccccttggaacaccacaagggccttcattgctgccatgaagggcaagtgtctgctagaggtgactggggtggcagatcccacggggtgtggtgaaggattctcctatgtgaagattccaaacaaaccaacacagcagaaggatgataaagaaccgcagccagtgaagaagacagtgacaggaacagatgcagaccttcgtcgcctttccctgaaaaatgccaagcaacttctacgtaaatttggtgtgcctgaggaagagattaaaaagttgtcccgctgggaagtgattgatgtggtgcgcacaatgtcaacagaacaggctcgttctggagaggggcccatgagtaaatttgcccgtggatcaaggttttctgtggctgagcatcaagagcgttacaaagaggaatgtcagcgcatctttgacctacagaacaaggttctgtcatcaactgaagtcttatcaactgacacagacagcagctcagctgaagatagtgactttgaagaaatgggaaagaacattgagaacatgttgcagaacaagaaaaccagctctcagctttcacgtgaacgggaggaacaggagcggaaggaactacagcgaatgctactggcagcaggctcagcagcatccggaaacaatcacagagatgatgacacagcttccgtgactagccttaactcttctgccactggacgctgtctcaagatttatcgcacgtttcgagatgaagaggggaaagagtatgttcgctgtgagacagtccgaaaaccagctgtcattgatgcctatgtgcgcatacggactacaaaagatgaggaattcattcgaaaatttgccctttttgatgaacaacatcgggaagagatgcgaaaagaacggcggaggattcaagagcaactgaggcggcttaagaggaaccaggaaaaggagaagcttaagggtcctcctgagaagaagcccaagaaaatgaaggagcgtcctgacctaaaactgaaatgtggggcatgtggtgccattggacacatgaggactaacaaattctgccccctctattatcaaacaaatgcgccaccttccaaccctgttgccatgacagaagaacaggaggaggagttggaaaagacagtcattcataatgataatgaagaacttatcaaggttgaagggaccaaaattgtcttggggaaacagctaattgagagtgcggatgaggttcgcagaaaatctctggttctcaagtttcctaaacagcagcttcctccaaagaagaaacggcgagttggaaccactgttcactgtgactatttgaatagacctcataagtccatccaccggcgccgcacagaccctatggtgacgctgtcgtccatcttggagtctatcatcaatgacatgagagatcttccaaatacataccctttccacactccagtcaatgcaaaggttgtaaaggactactacaaaatcatcactcggccaatggacctacaaacactccgcgaaaacgtgcgtaaacgcctctacccatctcgggaagagttcagagagcatctggagctaattgtgaaaaatagtgcaacctacaatgggccaaaacactcattgactcagatctctcaatccatgctggatctctgtgatgaaaaactcaaagagaaagaagacaaattagctcgcttagagaaagctatcaaccccttgctggatgatgatgaccaagtggcgttttctttcattctggacaacattgtcacccagaaaatgatggcagttccagattcttggccatttcatcacccagttaataagaaatttgttccagattattacaaagtgattgtcaatccaatggatttagagaccatacgtaagaacatctccaagcacaagtatcagagtcgggagagctttctggatgatgtaaaccttattctggccaacagtgttaagtataatggacctgagagtcagtatactaagactgcccaggagattgtgaacgtctgttaccagacattgactgagtatgatgaacatttgactcaacttgagaaggatatttgtactgctaaagaagcagctttggaggaagcagaattagaaagcctggacccaatgaccccagggccctacacgcctcagcctcctgatttgtatgataccaacacatccctcagtatgtctcgagatgcctctgtatttcaagatgagagcaatatgtctgtcttggatattcccagtgccactccagaaaagcaggtaacacaggaaggtgaagatggagatggtgatcttgcagatgaagaggaaggaactgtacaacagcctcaagccagtgtcctgtatgaggatttgcttatgtctgaaggagaagatgatgaggaagatgctgggagtgatgaagaaggagacaatcctttctctgctatccagctgagtgaaagtggaagtgactctgatgtgggatctggtggaataagacccaaacaaccccgcatgcttcaggagaacacaaggatggacatggaaaatgaagaaagcatgatgtcctatgagggagacggtggggaggcttcccatggtttggaggatagcaacatcagttatgggagctatgaggagcctgatcccaagtcgaacacccaagacacaagcttcagcagcatcggtgggtatgaggtatcagaggaggaagaagatgaggaggaggaagagcagcgctctgggccgagcgtactaagccaggtccacctgtcagaggacgaggaggacagtgaggatttccactccattgctggggacagtgacttggactctgatgaatga

SEQ ID NO: 148028 - protein, 108 aa, Artificial Sequence
  derived and/or modified sequence
MADPRVRQIKIKTGVVKRLVKEKVMYEKEAKQQEEKIEKMRAEDGENYDIKKQAEILQESRMMIPDCQRRLEAAYLDLQRILENEKDLEEAEEYKEARLVLDSVKLEA

SEQ ID NO: 148029 - DNA, 327 bp, Artificial Sequence
  derived and/or modified sequence
atggccgaccccagagtgagacagatcaagatcaagaccggcgtggtgaagagactggtgaaggagaaggtgatgtacgagaaggaggccaagcagcaggaggagaagatcgagaagatgagagccgaggacggcgagaactacgacatcaagaagcaggccgagatcctgcaggagagcagaatgatgatccccgactgccagagaagactggaggccgcctacctggacctgcagagaatcctggagaacgagaaggacctggaggaggccgaggagtacaaggaggccagactggtgctggacagcgtgaagctggaggcctag

SEQ ID NO: 148030 - DNA, 327 bp, Artificial Sequence
  derived and/or modified sequence
atggccgatcccagggtacgccagataaagattaagacaggcgtcgtgaagagactggtgaaagagaaggtgatgtacgagaaggaggccaaacagcaggaagagaaaattgaaaagatgcgcgccgaggatggcgaaaactacgacattaagaagcaggccgaaattttgcaggaaagcaggatgatgatccctgattgtcagcgtaggcttgaggccgcttatctggatctccagaggatcctggagaatgagaaggacctcgaagaagcagaggaatataaggaagctagactggtccttgactcagttaagctcgaggcctag

SEQ ID NO: 148031 - DNA, 327 bp, Artificial Sequence
  derived and/or modified sequence
atggctgacccccgggtgcggcagatcaagatcaagacaggagtggtgaagaggctggtgaaggagaaggtgatgtatgagaaggaggccaagcagcaggaggagaagattgagaagatgagagcagaagatggagagaactatgacatcaagaagcaggccgagatcctgcaggagagcaggatgatgatcccagactgccagaggcggctggaggccgcctacctggacctgcagaggatcctggagaatgagaaggacctggaggaggccgaggagtacaaggaggcccggctggtgctggacagcgtgaagctggaggcctag

SEQ ID NO: 148032 - DNA, 683 bp, Artificial Sequence
  derived and/or modified sequence
gcatgcgcgccggcgaccacgcctaaatagccgcagcctctgcgcgtcgccctccacggttaccccggctctccgcccctccttctcgcggcgctcgagggaccatggccgatcctcgcgtgagacagatcaagatcaagaccggcgtggtgaagcggttggtcaaagaaaaagtgatgtatgaaaaagaggcaaaacaacaagaagaaaagattgaaaaaatgagagctgaagacggtgaaaattatgacattaaaaagcaggcagagatcctacaagaatccaggatgatgatcccagattgccagcgcaggttggaagccgcatatttggatcttcaacggatactagaaaatgaaaaagacttggaagaagctgaggaatataaagaagcacgtttagtactggattcagtgaagttagaagcctgaaacttttctcgtatggggtggtttttgcattaaatcctggggtccattttacaatccattatttttgaccactgctatgtgttcaagtagtatgagaatgtgattgtttttatctggttacatatatatttctttgtctaatttaatatgtcaaataaatgagttcatctaataaaattgtttattttatactttacaaaatttttaaattaaccttttatcattaaaccacatagactttatgacagagaa

SEQ ID NO: 148033 - DNA, 327 bp, Artificial Sequence
  derived and/or modified sequence
atggccgacccccgggtgcggcagatcaagatcaagaccggcgtggtgaagagactggtgaaagaaaaagtcatgtacgagaaggaagcaaagcagcaagaggagaagatagagaaaatgagggcagaagacggcgagaattacgatattaagaaacaagccgaaatactccaggaatccagaatgatgatccccgattgccagagacgcctggaggccgcttacctggatctccaacgcatcctggagaatgagaaggacctcgaggaggccgaggaatacaaagaggcccgtttagttcttgattcggtcaaactggaggcttag

SEQ ID NO: 148034 - DNA, 327 bp, Artificial Sequence
  derived and/or modified sequence
atggccgatcctagggtgagacagatcaagatcaaaaccggggtagtgaagcgcctagtaaaggaaaaggtgatgtacgagaaagaggctaaacaacaggaggaaaaaattgaaaagatgagggccgaagatggggaaaattacgacattaagaaacaggctgaaattctccaggagtcgcgaatgatgatccctgattgccagcgcagattggaggctgcctacctcgatcttcagcgtatcctggagaacgagaaggacctcgaggaagcggaggagtacaaagaggctcgtctcgtactcgattccgtgaagctcgaagcgtag

SEQ ID NO: 148035 - protein, 436 aa, Artificial Sequence
  derived and/or modified sequence
MYHPRELYPSLGAGYRLGPAQPGADSSFPPALAEGYRYPELDTPKLDCFLSGMEAAPRTLAAHPPLPLLPPAMGTEPAPSAPEALHSLPGVSLSLENRELWKEFSSVGTEMIITKAGRRMFPACRVSVTGLDPEARYLFLLDVIPVDGARYRWQGRRWEPSGKAEPRLPDRVYIHPDSPATGAHWMRQPVSFHRVKLTNSTLDPHGHLILHSMHKYQPRIHLVRAAQLCSQHWGGMASFRFPETTFISVTAYQNPQITQLKIAANPFAKGFRENGRNCKRERDARVKRKLRGPEPAATEAYGSGDTPGGPCDSTLGGDIRESDPEQAPAPGEATAAPAPLCGGPSAEAYLLHPAAFHGAPSHLPTRSPSFPEAPDSGRSAPYSAAFLELPHGSGGSGYPAAPPAVPFAPHFLQGGPFPLPYTAPGGYLDVGSKPMY

SEQ ID NO: 148036 - protein, 295 aa, Artificial Sequence
  derived and/or modified sequence
MYHPRELYPSLGAGYRLGPAQPGADSSFPPALAEGYRYPELDTPKLDCFLSGMEAAPRTLAAHPPLPLLPPAMGTEPAPSAPEALHSLPGVSLSLENRELWKEFSSVGTEMIITKAGRRMFPACRVSVTGLDPEARYLFLLDVIPVDGARYRWQGRRWEPSGKAEPRLPDRVYIHPDSPATGAHWMRQPVSFHRVKLTNSTLDPHGHLILHSMHKYQPRIHLVRAAQLCSQHWGGMASFRFPETTFISVTAYQNPQITQLKIAANPFAKGFRENGRNCKRWELFIHLFMHSTNVY

SEQ ID NO: 148037 - DNA, 1830 bp, Artificial Sequence
  derived and/or modified sequence
agctgtcggactcaccgggggccctaagcagcgagacctgaggccagacggaactacaacatgtaccatccacgagaattgtacccgtccctgggggccggctaccgcctggggcccgcccaacctggggccgactccagcttcccacccgccctagcggagggctaccgctaccccgaactggacacccctaaactggattgcttcctctccgggatggaggctgctccccgcaccctggccgcgcacccacctctgccccttctgccccctgccatgggcactgagccggccccatcagctccagaggccctccattccctcccgggggtcagcctgagcctggagaaccgggagctatggaaggagttcagctctgtgggaacagaaatgatcatcaccaaagctgggaggcgcatgttccctgcctgccgagtgtcagtcactggcctggaccccgaggcccgctacttgtttcttctggatgtgattccggtggatggggctcgctaccgctggcagggccggcgctgggagcccagcggcaaggcagagccccgcctgcctgaccgtgtctacattcaccccgactctcctgccactggtgcacattggatgcggcagcctgtgtctttccatcgtgtcaagctcaccaacagcacgctggacccccacggccacctgatcctgcactccatgcacaagtaccaaccccgcatacacctagttcgggcagcccagctctgcagccagcactgggggggcatggcctccttccgcttccccgagaccacattcatctccgtgacagcctaccagaacccacagatcacacaactgaagattgcagccaatccctttgccaaaggcttccgggagaacggcagaaactgtaagagggagcgagacgcccgtgtgaagaggaaactgcggggcccagagccagcagccacagaggcctatgggagcggagacacaccaggtggtccctgcgactccaccctgggtggagacattcgtgaatcagatccagaacaggccccagcccccggggaagccaccgctgccccggcacctctgtgtggtggccccagtgctgaggcctacctcctgcaccctgcggctttccatggggcccccagtcaccttcccaccaggagccccagcttcccggaggctccagactccgggcgctcagccccctactcggctgcatttctggagctgccgcacgggtcagggggctccgggtacccagcggctccaccggcggtaccctttgccccgcactttctccaagggggccccttccctctaccatacaccgcgcctgggggctatctggatgtgggctccaaacccatgtactgaaccactgctgggcccctctgcctccatcacaaacctcccgctcccttcccccagccctggagccccctcacctccaccggccccatcccccacaccaaatggccgccttgggcctgcccacccaccccctcaacttcacaccttgatttcactcccacccccctctggcttcaaagcctaaccaaggctgctgggagtccagctggggccggcttccccttcccggctctcacctccgtgtgaatggaaggggctctgcctggccaaatggggccacagaccagcatccccacttaccaggcctccccatgggctctggaggggctcaatccccacccccccacacacactggtgcaggccacaccagtctgttgttctgggaccagagtatttttgttaataaaactcaaaagccatccatgctcaggaaaaaaaaaaaaaaaaaaaaaaaaaaaaaa

SEQ ID NO: 148038 - DNA, 1311 bp, Artificial Sequence
  derived and/or modified sequence
atgtaccaccccagagagctgtaccccagcctgggcgccggctacagactgggccccgcccagcccggcgccgacagcagcttcccccccgccctggccgagggctacagataccccgagctggacacccccaagctggactgcttcctgagcggcatggaggccgcccccagaaccctggccgcccacccccccctgcccctgctgccccccgccatgggcaccgagcccgcccccagcgcccccgaggccctgcacagcctgcccggcgtgagcctgagcctggagaacagagagctgtggaaggagttcagcagcgtgggcaccgagatgatcatcaccaaggccggcagaagaatgttccccgcctgcagagtgagcgtgaccggcctggaccccgaggccagatacctgttcctgctggacgtgatccccgtggacggcgccagatacagatggcagggcagaagatgggagcccagcggcaaggccgagcccagactgcccgacagagtgtacatccaccccgacagccccgccaccggcgcccactggatgagacagcccgtgagcttccacagagtgaagctgaccaacagcaccctggacccccacggccacctgatcctgcacagcatgcacaagtaccagcccagaatccacctggtgagagccgcccagctgtgcagccagcactggggcggcatggccagcttcagattccccgagaccaccttcatcagcgtgaccgcctaccagaacccccagatcacccagctgaagatcgccgccaaccccttcgccaagggcttcagagagaacggcagaaactgcaagagagagagagacgccagagtgaagagaaagctgagaggccccgagcccgccgccaccgaggcctacggcagcggcgacacccccggcggcccctgcgacagcaccctgggcggcgacatcagagagagcgaccccgagcaggcccccgcccccggcgaggccaccgccgcccccgcccccctgtgcggcggccccagcgccgaggcctacctgctgcaccccgccgccttccacggcgcccccagccacctgcccaccagaagccccagcttccccgaggcccccgacagcggcagaagcgccccctacagcgccgccttcctggagctgccccacggcagcggcggcagcggctaccccgccgccccccccgccgtgcccttcgccccccacttcctgcagggcggccccttccccctgccctacaccgcccccggcggctacctggacgtgggcagcaagcccatgtactag

SEQ ID NO: 148039 - DNA, 888 bp, Artificial Sequence
  derived and/or modified sequence
atgtaccaccccagagagctgtaccccagcctgggcgccggctacagactgggccccgcccagcccggcgccgacagcagcttcccccccgccctggccgagggctacagataccccgagctggacacccccaagctggactgcttcctgagcggcatggaggccgcccccagaaccctggccgcccacccccccctgcccctgctgccccccgccatgggcaccgagcccgcccccagcgcccccgaggccctgcacagcctgcccggcgtgagcctgagcctggagaacagagagctgtggaaggagttcagcagcgtgggcaccgagatgatcatcaccaaggccggcagaagaatgttccccgcctgcagagtgagcgtgaccggcctggaccccgaggccagatacctgttcctgctggacgtgatccccgtggacggcgccagatacagatggcagggcagaagatgggagcccagcggcaaggccgagcccagactgcccgacagagtgtacatccaccccgacagccccgccaccggcgcccactggatgagacagcccgtgagcttccacagagtgaagctgaccaacagcaccctggacccccacggccacctgatcctgcacagcatgcacaagtaccagcccagaatccacctggtgagagccgcccagctgtgcagccagcactggggcggcatggccagcttcagattccccgagaccaccttcatcagcgtgaccgcctaccagaacccccagatcacccagctgaagatcgccgccaaccccttcgccaagggcttcagagagaacggcagaaactgcaagagatgggagctgttcatccacctgttcatgcacagcaccaacgtgtactag

SEQ ID NO: 148040 - DNA, 1311 bp, Artificial Sequence
  derived and/or modified sequence
atgtaccacccacgtgagctataccccagtctgggggcaggctatagactcggtcctgcccagccaggagcagacagctcctttcctcccgcactggctgaggggtatcggtaccccgaactggatacccccaagcttgattgctttctatccggaatggaagctgcaccacggaccctggccgcccaccctccactgcccctgctccctcctgcaatgggtaccgaacctgctcctagcgcccccgaggctctccacagcctccctggggtgtctctctctctggaaaaccgggagctctggaaggaattttcatccgtgggcaccgaaatgatcatcactaaggccggccgccgtatgttcccggcttgccgggtgtccgtcacaggtcttgaccctgaggctaggtacttatttttgttagatgtaatccctgtggatggcgcaaggtatcgttggcagggacgacggtgggaaccatcaggtaaggcggagcctagattaccagatagagtgtatatacaccctgattcaccggctaccggtgcgcactggatgagacaacctgtaagctttcatagggtcaaactgaccaattccacactggacccgcatgggcatctgattttgcacagcatgcacaaataccagccgcggattcacctggtgcgtgccgcccagctgtgctcacagcattggggaggaatggcatccttccgttttccagagacaacctttataagcgtgacagcctatcaaaatccacagatcacgcaacttaagattgctgccaaccccttcgcgaagggattccgagagaacggccgaaactgcaagcgcgagagggacgcgcgggtgaaacggaaactaagaggccccgaacccgctgccactgaggcgtatggatctggggacacccccggaggaccctgcgatagcactctgggcggtgacatacgcgagtcagaccctgagcaggcacctgcccccggtgaagccacagccgcaccagcaccattgtgtggagggccaagtgcagaggcttacctcctgcatcccgcagctttccatggagccccaagtcatctccctacgcgcagcccgtcctttcctgaggctcctgacagtggtcggagtgccccttactcggccgcgttcttggagcttccacacggtagcggcggctcaggatatccagccgcgccgccagcggttccattcgcaccacatttcctacaaggtggtccatttccacttccttatacggcaccgggtggctatctcgatgtagggagcaagccaatgtattag

SEQ ID NO: 148041 - DNA, 1311 bp, Artificial Sequence
  derived and/or modified sequence
atgtatcacccaagagagttgtacccatctctgggcgctgggtacaggctgggaccagcccagcccggtgccgactcctcattccctcccgcactggctgaagggtaccgctaccctgagctcgacacccccaagctcgactgctttctcagtggcatggaggcagccccgaggactctagctgctcacccacccctacctctcctgcctccggccatgggaacggaacctgccccttcagctcccgaggccctacactcacttcccggcgtgtcactgtcccttgagaacagggagttgtggaaggagttttcttctgtgggcacagaaatgattattaccaaagctggtcgaagaatgtttccagcgtgccgggtttctgtgacaggtttggaccccgaggcacgctatttgttcctgttagacgttatccccgtagatggggccaggtataggtggcaaggaagacgatgggaaccgagtggaaaggccgaaccacgactgcctgaccgagtgtacatccacccagatagccctgcaacgggagcccactggatgcgccaacctgtgagtttccatcgcgtcaagttgacgaacagcaccctggacccacatggtcatctgattctacatagcatgcacaaataccaaccgcgcatccacctggtccgagctgcccagctgtgctcacagcactggggcggcatggcctcttttcggttccctgagacgactttcattagtgttaccgcctaccagaacccacagatcacccagctgaagattgctgcgaaccccttcgccaagggatttcgcgaaaatggccgaaattgcaaaagagagagagacgctcgagtcaagagaaaattgagggggccggagccagctgcgacagaggcttacggttccggtgataccccgggcggaccttgcgatagcaccctcgggggcgacattagagagtccgatccagagcaggcccccgcaccgggggaggcgactgctgcacctgctcccctttgcggagggccatccgccgaggcctatttgctccacccagccgcctttcatggagccccaagccacctgcccacccgcagcccctctttcccagaggcacctgattccggaagatccgccccgtactcagctgcttttctggagctgccccatggctctggcggctccggctatcctgctgcacctcccgcggttccatttgcacctcattttctgcaggggggtccttttccattgccctacactgccccaggaggttatctggatgtcggttcaaagccaatgtattag

SEQ ID NO: 148042 - DNA, 888 bp, Artificial Sequence
  derived and/or modified sequence
atgtatcatccccgcgagctctatccgagtctgggggcgggctataggttgggccccgcacagccgggagccgactcgagtttcccgccagcactggccgaaggataccgctaccccgagctggacacaccaaagctcgactgctttctgagcggcatggaagccgccccccgcactctggccgcccaccccccactcccactgctcccacccgcaatggggaccgagccggcaccttccgcaccagaggccctgcactcgctgcccggtgtgtctctctctctcgaaaaccgagagttgtggaaggaattcagctccgtgggcacagagatgataatcacaaaagctggccgacgcatgtttcctgcctgtcgagtgtccgttactggcctggaccccgaggcaagatacctgtttctgctcgacgtcatccctgttgacggggcccgatatcgctggcagggtcgccgctgggaaccatcgggcaaggcagaaccgcggctccctgatcgagtgtacatccaccctgactcgcccgcaaccggcgcacactggatgcgccagcccgtctccttccaccgcgtcaaactcaccaattcaacactggacccccatggccatctcatactgcacagcatgcataaataccagcctcgcattcacttggtgcgtgctgcccagttgtgcagtcagcactggggcgggatggcatcattccggttccctgaaacaacattcatcagcgtcacagcctatcagaatccgcaaattacacagctcaaaattgcagccaatccatttgctaagggatttcgtgaaaatggccgtaattgcaagcggtgggaattgttcatccatcttttcatgcactccactaatgtttattag

SEQ ID NO: 148043 - DNA, 1311 bp, Artificial Sequence
  derived and/or modified sequence
atgtaccacccccgggagctgtaccccagcctgggcgccggctaccgcctgggccctgcccagcccggggctgacagcagcttccccccagccctggccgagggctaccgctacccagagctggacacccccaagctggactgcttcctgagcggcatggaggccgcccccaggaccctggccgcccacccccccctgcccctgctgcccccagccatgggcacagagcccgcccccagcgcccctgaggccctgcacagcctgcccggggtgtccctgagcctggagaaccgggagctgtggaaggagttcagctctgtgggcacagagatgatcatcaccaaggccggccgcaggatgtttcctgcctgccgggtgtctgtgacaggcctggaccctgaggcccgctacctgttcctgctggatgtgattcctgtggatggagcccgctaccgctggcagggccgccgctgggagcccagcggcaaggccgagccccggctgcctgacagagtgtacatccacccagacagccctgccactggagcccactggatgaggcagcctgtgtccttccaccgggtgaagctgaccaacagcaccctggacccccacggccacctgatcctgcacagcatgcacaagtaccagccccgcatccacctggtgcgggccgcccagctgtgcagccagcactggggcggcatggccagcttccgcttccctgagaccaccttcatctctgtgacagcctaccagaacccccagatcacccagctgaagattgctgccaacccctttgccaagggcttcagagaaaatggaagaaactgcaagcgggagagagatgcccgggtgaagaggaagctgcggggccctgagcctgctgccacagaggcctacggcagcggggacaccccaggcggcccctgtgacagcaccctgggcggggacatccgggagagtgaccctgagcaggccccagcccctggagaggccacagctgccccagcccccctgtgtggcggccccagcgctgaggcctacctgctgcaccctgctgccttccatggagcccccagccacctgcccaccaggagccccagcttccctgaggccccagacagcggccgcagcgccccctacagcgctgccttcctggagctgccccacggcagcggcggcagcggctacccagctgcccccccagctgtgccctttgccccccacttcctgcagggcggccccttccccctgccctacacagcccctgggggctacctggatgtgggcagcaagcccatgtactag

SEQ ID NO: 148044 - DNA, 888 bp, Artificial Sequence
  derived and/or modified sequence
atgtaccacccccgggagctgtaccccagcctgggcgccggctaccgcctgggccctgcccagcccggggctgacagcagcttccccccagccctggccgagggctaccgctacccagagctggacacccccaagctggactgcttcctgagcggcatggaggccgcccccaggaccctggccgcccacccccccctgcccctgctgcccccagccatgggcacagagcccgcccccagcgcccctgaggccctgcacagcctgcccggggtgtccctgagcctggagaaccgggagctgtggaaggagttcagctctgtgggcacagagatgatcatcaccaaggccggccgcaggatgtttcctgcctgccgggtgtctgtgacaggcctggaccctgaggcccgctacctgttcctgctggatgtgattcctgtggatggagcccgctaccgctggcagggccgccgctgggagcccagcggcaaggccgagccccggctgcctgacagagtgtacatccacccagacagccctgccactggagcccactggatgaggcagcctgtgtccttccaccgggtgaagctgaccaacagcaccctggacccccacggccacctgatcctgcacagcatgcacaagtaccagccccgcatccacctggtgcgggccgcccagctgtgcagccagcactggggcggcatggccagcttccgcttccctgagaccaccttcatctctgtgacagcctaccagaacccccagatcacccagctgaagattgctgccaacccctttgccaagggcttcagagaaaatggaagaaactgcaagcgctgggagctgttcatccacctgttcatgcacagcaccaacgtgtactag

SEQ ID NO: 148045 - DNA, 1311 bp, Artificial Sequence
  derived and/or modified sequence
atgtaccacccccgggagctgtaccccagcctgggcgccggctacagactggggcccgcccagcccggggccgacagttccttcccacccgccctggccgagggataccgataccccgagttagacactcccaaacttgactgttttttatccggaatggaggcagcccccagaacgctggctgcgcacccaccgttgccactcctgcctcctgccatgggcacggagccagctccatctgcccctgaagctctgcattctctgccaggtgtgagcctgtccctggaaaaccgggaattgtggaaggagttctcttccgtcgggaccgagatgataatcacaaaagccgggagacggatgtttccggcatgcagagtctccgtcaccggactggatccagaagccagatacctgttcctactggatgtgataccggttgacggcgcaagatatcgttggcagggccgcagatgggaaccgtctggaaaagcagagccgcgtctgccagacagggtgtatattcaccccgactccccagccactggggcacactggatgagacaaccggtctctttccaccgcgttaaactaacaaactccacgctggacccccatggacacctgatcctgcattccatgcataagtaccagccccgtatccatctcgtgagggcggcccaactgtgttcacagcactggggaggcatggcgagctttcggtttccagagacaacgtttatttccgtgactgcctatcaaaatccccaaatcacccagctgaagatcgcggcaaacccatttgccaagggttttcgcgagaatggtcgaaactgcaagcgcgaacgcgacgcgcgggttaaaaggaagttgcgaggccctgaaccagctgccaccgaagcctacggctcgggcgataccccaggcggtccttgcgattctactctcggtggggatataagggagtcagacccagagcaagccccggcccctggggaagctacagccgctccagcccctctgtgcggcggacccagtgctgaagcttatcttctccatccagccgctttccacggagctccttctcatttgcctacaaggagcccatcattcccagaggcccctgactctgggagatcggcaccctattccgccgcctttctggagctgccacacggctctggaggaagtggataccctgccgccccgcccgccgtgccttttgctccacactttctccaagggggtccctttccactcccatacactgctcccggtggatacctggatgttggaagcaaaccaatgtactag

SEQ ID NO: 148046 - DNA, 1311 bp, Artificial Sequence
  derived and/or modified sequence
atgtaccacccccgggagctgtaccccagcctgggcgccggctaccgtcttggtcctgcccagccaggcgctgatagcagctttcctccggctttggccgaggggtaccggtaccctgagctcgacacccccaaactggactgttttctttccggaatggaggctgcccctagaacacttgcagcccacccccctctaccactcctgcctcctgccatgggcacagagccggcacctagtgcccccgaggcccttcatagtctaccaggcgtgtcgctcagtctagagaatcgcgaactgtggaaggagttcagcagcgtgggcaccgagatgatcatcaccaaggccggcaggagaatgttcccagcctgcagagtcagcgtgaccggcctggacccagaagctagatatttgtttctgcttgacgtgattccagttgacggagcacggtatcgatggcagggcaggagatgggagccaagcggaaaagccgagccacgcctgccggatcgcgtatatatacatcccgactcgccagctacgggagcccactggatgcggcagcccgtgtcttttcaccgggttaagcttacaaattccactctggatccgcatgggcatttaattttgcattctatgcacaagtaccagcctagaattcacctggttagagccgcccagttatgttcacagcattggggggggatggccagcttcagattcccagaaacgacgtttatctccgtcaccgcctaccagaatccgcagatcacccagttaaagattgccgccaacccctttgcaaaggggttccgtgaaaacggccggaactgtaagagagagagagatgcgagagtaaagcgtaaactgcgaggacccgaaccggctgctactgaagcctacgggtctggggacacaccaggcggaccatgcgactccactctcggtggagacattagggagagtgaccccgaacaagcaccggcccctggagaggccacggccgcaccagcaccgctgtgtggaggcccatctgctgaagcgtacctactgcacccagctgcatttcacggtgccccctcccacctgccaacaagatctccaagcttccccgaggcaccggactcagggcgaagcgctccttactcagccgcctttcttgagcttcctcacgggtccgggggatcagggtaccccgccgcccctcctgcagtgcccttcgcgccacacttcctgcaaggcggaccattccccctgccctataccgctcccgggggttacctggacgtgggatcgaaacctatgtattag

SEQ ID NO: 148047 - DNA, 888 bp, Artificial Sequence
  derived and/or modified sequence
atgtaccacccccgggagctgtaccccagcctgggcgccggctaccggttgggtccggcacagcccggcgccgatagctcttttccccctgcgctagcggaagggtaccgctaccccgagttagacactcctaagctggattgctttttgagcgggatggaggccgccccaaggactttagccgcgcaccccccactgccactgctgcctcccgctatgggcacggagcctgctccttccgcccccgaggcactacacagccttccgggcgtgagtctgtcacttgaaaaccgggaattgtggaaagagttcagctcagtggggaccgaaatgatcataaccaaagctggccggcgtatgtttccagcttgccgcgtgagcgttaccggactcgatcccgaggcacgatatctgtttctgttggacgtgattccagtagatggggcaaggtaccgttggcagggccgaagatgggaaccctctgggaaggcagagccaagactgcctgatagagtgtacatccacccagattcccctgccaccggggcgcactggatgaggcaaccagtttccttccatagggtcaaactgacgaatagtaccctagacccgcatggtcacctaatcctgcatagtatgcacaaataccagcctcggatccacctggtgagggcagctcagctctgcagccagcattggggggggatggcctcttttcgctttccagagacaacttttatctcagttacggcgtatcagaacccacagatcacccagttaaagatcgctgctaacccatttgcaaaaggattccgggagaacggcaggaattgtaagcggtgggagctgttcatccacttattcatgcatagcacgaatgtttattag

SEQ ID NO: 148048 - DNA, 1311 bp, Artificial Sequence
  derived and/or modified sequence
atgtaccatccccgtgagctttatccatcactaggggctggttaccggctgggacctgctcaacctggggctgactcctccttccccccagcattggctgagggctatagataccccgaactggacacccccaagctggactgcttcctatccgggatggaggccgctcctcgaacactagcagctcacccacccttgcccctcctcccccctgcaatggggacagagccggctccatctgctccagaagctctgcacagcctccctggcgtcagcctgtccctcgagaaccgggagttatggaaagagttttcctccgtggggacagaaatgattatcacaaaggcaggccgtaggatgtttccggcttgtcgcgtgtccgtcaccgggctggaccccgaagcacgataccttttcttgttggatgttattcctgttgacggagctcggtaccgctggcagggacggcgatgggaaccttctggaaaggccgaaccaagactgcctgaccgcgtgtacattcatcccgactctcctgcgacgggagcacactggatgagacagcctgtatcttttcatcgtgttaaactaacaaactctaccctggaccctcatggccaccttattctgcattcgatgcacaagtatcagccgcgtatccacttggtgcgcgcagcgcagttatgttcccagcattggggagggatggctagtttccgatttcccgaaactacattcatatctgttaccgcctaccaaaacccacagataactcagctcaagatcgctgccaacccttttgccaaggggttcagagagaatggaaggaactgcaaaagggaaagggatgcgcgagtgaaacgaaaactgcgtggcccagagccagccgctaccgaggcctacggatccggcgatacccctggcggtccatgcgattccaccctcggcggagatattcgtgagtctgaccccgaacaagcgccagctcccggagaagcaaccgcggcaccagctccgctctgtggcggaccctctgctgaggcctatctcctgcatccagccgctttccatggggctccctcccacctacccacccgctctccgagcttcccagaagcgcctgattcaggcaggtccgccccttactctgccgcatttttagaattacctcacggcagcgggggatccgggtaccctgctgcccctccggcagttcctttcgcacctcactttctgcagggtggcccatttcccttgccctacaccgcccctggcggttaccttgacgtcgggagtaagcccatgtactag

SEQ ID NO: 148049 - DNA, 1311 bp, Artificial Sequence
  derived and/or modified sequence
atgtaccatcctcgggagctctatccatcattaggcgcaggttataggcttgggccagcacaacctggagctgacagctcgttcccaccggcacttgctgaaggttacaggtaccccgagttagacacaccaaagctcgattgcttccttagcggcatggaggcggcaccacgaacactggccgctcacccgccattacccttgcttccacctgccatgggtacggagcccgcaccgtcagctcccgaggccctgcattcattgccaggagtgagcctctctctggagaaccgcgagctctggaaggaattctcctcagtggggactgaaatgattattacaaaggcgggacgtcgtatgtttcctgcctgtagggttagtgtgaccgggcttgatccagaggcgagatatctcttcctcttggacgtgattcccgtggacggggctaggtatcgatggcaaggcaggagatgggagccttccggcaaagctgaacccagattacctgatcgggtatacatacacccggacagccccgcaacaggggcacactggatgagacagcctgtcagtttccaccgagtgaagctgactaactcaactctggacccccatgggcatctcatccttcactccatgcacaagtatcagccaaggattcacctggtccgcgctgctcagctgtgttcccaacattggggtggtatggccagttttcgcttcccggagaccacttttatcagcgttacagcataccagaaccctcagattacccaactcaagatcgccgctaacccatttgctaaaggattccgagagaacgggcgtaactgcaaacgagagcgggatgcgcgagtgaaaagaaaattgagaggacctgagcccgctgcaaccgaggcgtacggttcgggggacactcctgggggtccatgtgatagcacgctgggaggggacatccgcgaatccgatcccgaacaggcaccagctcccggagaggccaccgccgctcccgcaccactgtgtggcggaccgtccgctgaggcctatctgctgcaccccgctgcattccatggtgccccaagccaccttccgactagaagcccgtcttttcctgaagcacccgattctggacgaagtgcaccctactccgcagcgttcctggagcttcctcacggttccggcggaagtggctaccccgcagcccctcccgcagtccccttcgctccacacttcttgcaagggggacccttcccacttccttacacagcgccaggtggctaccttgacgttggtagcaagccgatgtactag

SEQ ID NO: 148050 - DNA, 888 bp, Artificial Sequence
  derived and/or modified sequence
atgtatcaccccagagagctttacccatctctaggagccggttaccgcttgggacctgcccaaccgggagcagactctagttttccgcctgccctggcagagggctaccggtaccccgagctggacacccctaagttagattgctttctgagtggaatggaggctgccccaagaacacttgccgcacatccccctctgccattactcccaccagccatgggcaccgagccggcaccttccgcacctgaggcgctgcattctcttcccggtgtgagtcttagtttggagaacagggaactatggaaggaattttctagcgtcgggaccgagatgataattacaaaggcagggagacggatgttccctgcttgtcgcgtcagcgtgaccggactcgaccccgaagctagatacctgtttctgctggacgttatacccgtggatggggcaagatataggtggcaggggagacggtgggaaccctccggcaaggccgagcccagacttcctgaccgagtgtacattcaccctgattcgcccgcaactggggcacattggatgagacagccagtgtcattccaccgcgttaaacttaccaattcaaccctggatccccacgggcatctgatcctgcactcgatgcataaataccagcccaggatacatttggttcgggctgcgcagctgtgctcccagcattggggaggcatggcaagttttcgctttccagaaacgactttcatatctgtgacggcatatcagaacccacagatcacacagcttaaaatcgcagcaaacccctttgccaagggcttccgagaaaacgggaggaactgcaaacgctgggagctttttattcacctctttatgcattccactaacgtgtattag

SEQ ID NO: 148051 - DNA, 1796 bp, Artificial Sequence
  derived and/or modified sequence
tctcgcagcaccgggggccctaagcagcgagacctgaggccagacggaactacaacatgtaccatccacgagaattgtacccgtccctgggggccggctaccgcctggggcccgcccaacctggggccgactccagcttcccacccgccctagcggagggctaccgctaccccgaactggacacccctaaactggattgcttcctctccgggatggaggctgctccccgcaccctggccgcgcacccacctctgccccttctgccccctgccatgggcactgagccggccccatcagctccagaggccctccattccctcccgggggtcagcctgagcctggagaaccgggagctatggaaggagttcagctctgtgggaacagaaatgatcatcaccaaagctgggaggcgcatgttccctgcctgccgagtgtcagtcactggcctggaccccgaggcccgctacttgtttcttctggatgtgattccggtggatggggctcgctaccgctggcagggccggcgctgggagcccagcggcaaggcagagccccgcctgcctgaccgtgtctacattcaccccgactctcctgccactggtgcacattggatgcggcagcctgtgtctttccatcgtgtcaagctcaccaacagcacgctggacccccacggccacctgatcctgcactccatgcacaagtaccaaccccgcatacacctagttcgggcagcccagctctgcagccagcactgggggggcatggcctccttccgcttccccgagaccacattcatctccgtgacagcctaccagaacccacagatcacacaactgaagattgcagccaatccctttgccaaaggcttccgggagaacggcagaaactgtaagagggagcgagacgcccgtgtgaagaggaaactgcggggcccagagccagcagccacagaggcctatgggagcggagacacaccaggtggtccctgcgactccaccctgggtggagacattcgtgaatcagatccagaacaggccccagcccccggggaagccaccgctgccccggcacctctgtgtggtggccccagtgctgaggcctacctcctgcaccctgcggctttccatggggcccccagtcaccttcccaccaggagccccagcttcccggaggctccagactccgggcgctcagccccctactcggctgcatttctggagctgccgcacgggtcagggggctccgggtacccagcggctccaccggcggtaccctttgccccgcactttctccaagggggccccttccctctaccatacaccgcgcctgggggctatctggatgtgggctccaaacccatgtactgaaccactgctgggcccctctgcctccatcacaaacctcccgctcccttcccccagccctggagccccctcacctccaccggccccatcccccacaccaaatggccgccttgggcctgcccacccaccccctcaacttcacaccttgatttcactcccacccccctctggcttcaaagcctaaccaaggctgctgggagtccagctggggccggcttccccttcccggctctcacctccgtgtgaatggaaggggctctgcctggccaaatggggccacagaccagcatccccacttaccaggcctccccatgggctctggaggggctcaatccccacccccccacacacactggtgcaggccacaccagtctgttgttctgggaccagagtatttttgttaataaaactcaaaagccatccatgctcagg

SEQ ID NO: 148052 - DNA, 1835 bp, Artificial Sequence
  derived and/or modified sequence
agctgtcggactcaccgggggccctaagcagcgagacctgaggccagacggaactacaacatgtaccatccacgagaattgtacccgtccctgggggccggctaccgcctggggcccgcccaacctggggccgactccagcttcccacccgccctagcggagggctaccgctaccccgaactggacacccctaaactggattgcttcctctccgggatggaggctgctccccgcaccctggccgcgcacccacctctgccccttctgccccctgccatgggcactgagccggccccatcagctccagaggccctccattccctcccgggggtcagcctgagcctggagaaccgggagctatggaaggagttcagctctgtgggaacagaaatgatcatcaccaaagctgggaggcgcatgttccctgcctgccgagtgtcagtcactggcctggaccccgaggcccgctacttgtttcttctggatgtgattccggtggatggggctcgctaccgctggcagggccggcgctgggagcccagcggcaaggcagagccccgcctgcctgaccgtgtctacattcaccccgactctcctgccactggtgcacattggatgcggcagcctgtgtctttccatcgtgtcaagctcaccaacagcacgctggacccccacggccacctgatcctgcactccatgcacaagtaccaaccccgcatacacctagttcgggcagcccagctctgcagccagcactgggggggcatggcctccttccgcttccccgagaccacattcatctccgtgacagcctaccagaacccacagatcacacaactgaagattgcagccaatccctttgccaaaggcttccgggagaacggcagaaactgtaagagggagcgagacgcccgtgtgaagaggaaactgcggggcccagagccagcagccacagaggcctatgggagcggagacacaccaggtggtccctgcgactccaccctgggtggagacattcgtgaatcagatccagaacaggccccagcccccggggaagccaccgctgccccggcacctctgtgtggtggccccagtgctgaggcctacctcctgcaccctgcggctttccatggggcccccagtcaccttcccaccaggagccccagcttcccggaggctccagactccgggcgctcagccccctactcggctgcatttctggagctgccgcacgggtcagggggctccgggtacccagcggctccaccggcggtaccctttgccccgcactttctccaagggggccccttccctctaccatacaccgcgcctgggggctatctggatgtgggctccaaacccatgtactgaaccactgctgggcccctctgcctccatcacaaacctcccgctcccttcccccagccctggagccccctcacctccaccggccccatcccccacaccaaatggccgccttgggcctgcccacccaccccctcaacttcacaccttgatttcactcccacccccctctggcttcaaagcctaaccaaggctgctgggagtccagctggggccggcttccccttcccggctctcacctccgtgtgaatggaaggggctctgcctggccaaatggggccacagaccagcatccccacttaccaggcctccccatgggctctggaggggctcaatccccacccccccacacacactggtgcaggccacaccagtctgttgttctgggaccagagtatttttgttaataaaactcaaaagccatccatgctcaggaaacattgggctcctgtgtttggccctgggcgggg

SEQ ID NO: 148053 - DNA, 2162 bp, Artificial Sequence
  derived and/or modified sequence
agaagctgtcggactgtgagcgccttcgaactttggaggcttggctcgggatggaggtttttttagcatggggaccagggaggactacggtgctcgggactgggctgcggcctcctcgcggccccgagtgccctgtgaaatcagctcaggccgcgtccctctagcctgcactttccctctgttcacgctgcttccctccagggcccggcctccaagtgaaggggggcggagggcggtcacctgccagaaggtctggggcgccaaggtgtgtcccgggactcttggctccgtccaggttccaggccccgccccccagcttatccctagccggggctccccaccgtgggaacggggaccagctggccggaagcgccaaactgcgtccctgtccgagccctggggatcaatcaagccgaggagttaattatgtaatgagggggcagggggtcgaggctaatgaagcctcccggggtggggagggaggggaggaggggaccgtacccaggtatccgaccccctctcggaccccttcgaggccccaggggtctccaccccagcccaactccagggccccaaagaggggaggggctgtgatcctggatctggaaggggctgagctgtgagctataaagggggcatctcgcagcaccgggggccctaagcagcgagacctgaggccagacggaactacaacatgtaccatccacgagaattgtacccgtccctgggggccggctaccgcctggggcccgcccaacctggggccgactccagcttcccacccgccctagcggagggctaccgctaccccgaactggacacccctaaactggattgcttcctctccgggatggaggctgctccccgcaccctggccgcgcacccacctctgccccttctgccccctgccatgggcactgagccggccccatcagctccagaggccctccattccctcccgggggtcagcctgagcctggagaaccgggagctatggaaggagttcagctctgtgggaacagaaatgatcatcaccaaagctgggaggcgcatgttccctgcctgccgagtgtcagtcactggcctggaccccgaggcccgctacttgtttcttctggatgtgattccggtggatggggctcgctaccgctggcagggccggcgctgggagcccagcggcaaggcagagccccgcctgcctgaccgtgtctacattcaccccgactctcctgccactggtgcacattggatgcggcagcctgtgtctttccatcgtgtcaagctcaccaacagcacgctggacccccacggccacctgatcctgcactccatgcacaagtaccaaccccgcatacacctagttcgggcagcccagctctgcagccagcactgggggggcatggcctccttccgcttccccgagaccacattcatctccgtgacagcctaccagaacccacagatcacacaactgaagattgcagccaatccctttgccaaaggcttccgggagaacggcagaaactgtaagaggtgggagttgttcattcatttgttcatgcattcaacaaatgtttattaatcactcactgtgtgccaggcaccgtgctggacatcagaaatgcagtggtaagtgaaaacattcattcactgactcagcaaatacttatatagtacctgctatgtgccagggacagttccaggcactggagataaaacaaacaaagcaaaccaaagccccggccctcatgcagctgatttctagtggggagagtagacaagcagacaagagaaataaataaaatgtcatctgttaggaagccattctaaagagaagagagaccaggtgtggtggctcacgcatgtaatcccagcactctgggaggctgaggcgggcagatcacctgaggccaggagttcgagaccagcctgccaacatggtgaaaccctgtctctgctaaaaatacaaaaattagccaggcatggtggcaaacgcctgtaatcccaactacttgggaggctgaggcaggagaatctcttgaacccaggaggtggaggttgcagtgagtcgagatcatgccattgcattccagcctaggcaacacgagcaaaacttcctctcaaaaaaaaaaaaaaaaagaaagaaaagaaaactctgtctc

SEQ ID NO: 148054 - protein, 199 aa, Artificial Sequence
  derived and/or modified sequence
MAFALLRPVGAHVLYPDVRLLSEDEENRSESDASDQSFGCCEGPEAARRGPGPGGGRRAGGGGGAGPVVVVRQRQAANARERDRTQSVNTAFTALRTLIPTEPVDRKLSKIETVRLASSYIAHLANVLLLGDSADDGQPCFRAAGSAKGAVPAAADGGRQPRSICTFCLSNQRKGGGRRDLGGSCLKVRGVAPLRGPRR

SEQ ID NO: 148055 - DNA, 1227 bp, Artificial Sequence
  derived and/or modified sequence
cggcgcacggagggacgcggccggcgcccatggcgttcgcgctgctgcggcccgtcggcgcgcacgtgctgtacccggacgtgcggctgctgagcgaggacgaggagaaccgcagcgagagcgacgcgtcggaccagtcgttcggctgctgcgagggcccggaggcggcgcggcgcggcccgggccccgggggcgggcggcgggcgggcggcggcggcggcgcgggccccgtggtggtggtgcgacagcggcaggcggccaacgcgcgggagcgggaccgcactcagagcgtgaacacggccttcacggcgctgcgcacgctcatccccaccgagccggtggaccgcaagctgtccaagatcgagacgctgcgcctggcgtccagctacatcgcgcacctggccaacgtgctgctgctgggcgactcggccgacgacgggcagccgtgcttccgtgccgcgggcagtgccaagggcgccgtccccgccgccgccgacggcggccgccagccgcgctccatctgcaccttctgcctcagcaaccagcgcaaggggggtggccgtcgtgacctggggggcagctgcttgaaggtgaggggggtggccccccttcgagggccacggagatgagcctggaccctggagaaggaggccaggagccagccactggctggacagggaagaagaccccaggagccaagcccaccccttctttgtgtagggaccgggggaccatggcctgttccgggacactctgggcagggccctcgggacatctccacccgatcctggagagctgtgaggatccattcagcctgcccagctctggctggtcagagacaaggcagaacttttggaaaaacaaagactgttggtgacagggtgtgtgtgtatctgtgcgtgagtgtgagtgtgtgtgagagagaattggtgagtttaaaataaaagctatttttaaataaaagacgtcgttctgagctgaggagagtcccgtggacatcggaggtcagaggtgggccctcccctggacctagagagaggcacagatgttctgggggctgccctgagccctggaagggtgggggtggggcgggggaaggcaggcagagccccctctccgggcgccataaccaaactttcctcagtctgctgtttatcagatgttcttaacaactgttaggtgtctgatatggttggtaaagaaatcttaattttacttatttttgaa

SEQ ID NO: 148056 - DNA, 600 bp, Artificial Sequence
  derived and/or modified sequence
atggccttcgccctgctgagacccgtgggcgcccacgtgctgtaccccgacgtgagactgctgagcgaggacgaggagaacagaagcgagagcgacgccagcgaccagagcttcggctgctgcgagggccccgaggccgccagaagaggccccggccccggcggcggcagaagagccggcggcggcggcggcgccggccccgtggtggtggtgagacagagacaggccgccaacgccagagagagagacagaacccagagcgtgaacaccgccttcaccgccctgagaaccctgatccccaccgagcccgtggacagaaagctgagcaagatcgagaccgtgagactggccagcagctacatcgcccacctggccaacgtgctgctgctgggcgacagcgccgacgacggccagccctgcttcagagccgccggcagcgccaagggcgccgtgcccgccgccgccgacggcggcagacagcccagaagcatctgcaccttctgcctgagcaaccagagaaagggcggcggcagaagagacctgggcggcagctgcctgaaggtgagaggcgtggcccccctgagaggccccagaagatag

SEQ ID NO: 148057 - DNA, 600 bp, Artificial Sequence
  derived and/or modified sequence
atggcttttgctctgctccgaccggttggggcccatgtgctctatcccgacgtgaggctgttgtcggaggatgaagagaatcgctctgagtccgacgcaagcgaccaatcctttggctgttgcgaaggccccgaggccgctcgcagaggcccagggccagggggcggccgtagggccggtggtgggggaggtgctggccccgtagttgttgtgagacagagacaggcggccaacgcacgggagcgggataggacccagtcagttaacacggcgttcacagccctccggaccctcatcccgactgagccagttgaccggaagctctcaaagattgagacagtgagattggcttcctcgtatattgcccacctggccaacgtcctgttactgggcgattccgccgatgatgggcaaccatgcttcagggccgcaggcagtgccaaaggggcagtgcccgcggctgccgacggcggccgccagccgcgttctatctgcaccttctgcctgagcaatcaaagaaaagggggcggacgccgggatcttggaggcagttgccttaaggtccggggagtcgcaccactgagggggccccgcaggtag

SEQ ID NO: 148058 - DNA, 600 bp, Artificial Sequence
  derived and/or modified sequence
atggcctttgccctgctgcggcctgtgggcgcccacgtgctgtacccagatgtgcggctgctgtctgaagatgaggagaacagaagtgaaagtgatgccagtgaccagagctttggctgctgtgagggccctgaggccgcccggcggggccctggccctgggggcggcagaagagctgggggcggcggcggggccggccctgtggtggtggtgcggcagaggcaggccgccaatgcccgggagcgggacaggacccagagcgtgaacacagccttcaccgccctgcggaccctcatccccacagagcctgtggacaggaagctgagcaagattgaaacagtgcggctggccagcagctacatcgcccacctggccaacgtgctgctgctgggggacagcgcagatgatggccagccctgcttccgggccgccggcagcgccaagggagctgtgcctgctgctgctgatggcggccggcagcccaggagcatctgcaccttctgcctgagcaaccagaggaagggcggcggccggcgggacctgggcggcagctgcctgaaggtgcggggcgtggcccccctgcggggccccaggaggtag

SEQ ID NO: 148059 - DNA, 600 bp, Artificial Sequence
  derived and/or modified sequence
atggccttcgccctgctgcggcccgtgggcgcccacgtgctgtacccggacgtccgtctgttgtctgaggatgaagaaaatagatctgagagtgatgcctccgatcagtccttcggatgctgcgaaggacccgaggccgcacgccgaggccctgggcctggcgggggaaggcgagctggaggtggcggcggcgcaggaccagtcgtggtggtgcggcagcgccaggccgcgaacgctcgcgagagggatagaacccagagtgtgaacaccgcctttactgctctgaggacacttatccccacggagcccgttgaccgaaagctgtctaaaatcgagaccgtgcgactggccagctcctacattgcccatctcgccaacgtgcttctccttggggattcagccgacgatggccaaccgtgtttccgagccgcaggaagcgctaagggcgctgttccagccgctgctgatggggggcggcagcctcggtcaatctgtaccttctgcttgtctaatcagcggaaagggggagggcggagagatctggggggaagctgccttaaagtcaggggagtcgcccccctccgtggtcctagaaggtag

SEQ ID NO: 148060 - DNA, 600 bp, Artificial Sequence
  derived and/or modified sequence
atggcctttgccttactgagacccgtgggtgcccatgtgttgtatcctgatgtccggctgctctcagaagacgaagaaaacaggagtgaaagcgacgcatctgaccagtctttcggctgttgtgagggccctgaagctgccaggcgcggtcctggccctgggggtggccgtcgagccggagggggtggtggtgccggtcctgtcgtggtcgtgcggcaacggcaggcggctaacgcaagagagcgggatcgcactcaatcagtgaatacagcgttcacagccctgcggacgctaatcccgacggagcccgtggatcgcaagctgagtaaaattgagacagttcggttagcaagctcttatatcgctcacctcgctaatgttctcttgctcggggattccgcagacgacgggcagccctgtttcagagccgcaggttcggccaagggcgctgtgcccgcagccgcagatggagggcgtcagccgagatcaatttgcaccttctgtctgtctaatcagcgcaagggtggcggacgccgtgatctgggcggatcctgcctgaaagtaaggggcgtggccccactcaggggccctcgcagatag

SEQ ID NO: 148061 - DNA, 1555 bp, Artificial Sequence
  derived and/or modified sequence
ggccgggcggagccctccgcccccggccggggcggccttgccattggcccctccctcgcctataaggcgggggccggcggggccgtgggagcgcgcgggagcgcacggcggggcgcggccgacgctgggacgcggcgcacggagggacgcggccggcgcccatggcgttcgcgctgctgcggcccgtcggcgcgcacgtgctgtacccggacgtgcggctgctgagcgaggacgaggagaaccgcagcgagagcgacgcgtcggaccagtcgttcggctgctgcgagggcccggaggcggcgcggcgcggcccgggccccgggggcgggcggcgggcgggcggcggcggcggcgcgggccccgtggtggtggtgcgacagcggcaggcggccaacgcgcgggagcgggaccgcactcagagcgtgaacacggccttcacggcgctgcgcacgctcatccccaccgagccggtggaccgcaagctgtccaagatcgagaccgtgcgcctggcgtccagctacatcgcgcacctggccaacgtgctgctgctgggcgactcggccgacgacgggcagccgtgcttccgtgccgcgggcagtgccaagggcgccgtccccgccgccgccgacggcggccgccagccgcgctccatctgcaccttctgcctcagcaaccagcgcaaggggggtggccgtcgtgacctggggggcagctgcttgaaggtgaggggggtggccccccttcgagggccacggagatgagcctggaccctggagaaggaggccaggagccagccactggctggacagggaagaagaccccaggagccaagcccaccccttctttgtgtagggaccgggggaccatggcctgttccgggacactctgggcagggccctcgggacatctccacccgatcctggagagctgtgaggatccattcagcctgcccagctctggctggtcagagacaaggcagaacttttggaaaaacaaagactgttggtgacagggtgtgtgtgtatctgtgcgtgagtgtgagtgtgtgtgagagagaattggtgagtttaaaataaaagctatttttaaataaaagacgtcgttctgagctgaggagagtcccgtggacatcggaggtcagaggtgggccctcccctggacctagagagaggcacagatgttctgggggctgccctgagccctggaagggtgggggtggggcgggggaaggcaggcagagccccctctccgggcgccataaccaaactttcctcagtctgctgtttatcagatgttcttaacaactgttaggtgtctgatatggttggtaaagaaatcttaattttacttatttttgaataaggcctgtgttcatttcattcacatggttcaaaactcagaaggtaccagagggtatgtgttgaaaagtctccgtgcccctgtcctccagccaccagctctcctctctgcaagcagcctagggcaccagtttcctgtgatgtcccattcactatgaatgatcaggcaaatacacaaatgacagcacatcgtacac

SEQ ID NO: 148062 - protein, 326 aa, Artificial Sequence
  derived and/or modified sequence
MEKTPAAAEVPREDSNAGEMPSLQQQITSLHQELGRQQSLWADIHRKLQSHMDALRKQNRELREELRGLQRQQWEAGKKPAASPHAGRESHTLALEPAFGKISHLSADEDTTPKYAGRKSQSATLLGQRWSSNHLAPPKPMSLKTERINSGKTPPQEDREKSPPGRRQDRSPAPTGRPTPGAERRGVSEDGKIMHPSSRSPQNSGGRKSPVQASQATTLQEQTAAARGADRSSSVLGSSEGGFLSRVQADEFASSAPDSAERQNLPVNPPSSLEIAQAMDTKMKKEEVQEEKRHPKGKADDCRRSGFPSEFPGALHAAPSRQDMGP

SEQ ID NO: 148063 - DNA, 981 bp, Artificial Sequence
  derived and/or modified sequence
atggagaagacccccgccgccgccgaggtgcccagagaggacagcaacgccggcgagatgcccagcctgcagcagcagatcaccagcctgcaccaggagctgggcagacagcagagcctgtgggccgacatccacagaaagctgcagagccacatggacgccctgagaaagcagaacagagagctgagagaggagctgagaggcctgcagagacagcagtgggaggccggcaagaagcccgccgccagcccccacgccggcagagagagccacaccctggccctggagcccgccttcggcaagatcagccacctgagcgccgacgaggacaccacccccaagtacgccggcagaaagagccagagcgccaccctgctgggccagagatggagcagcaaccacctggccccccccaagcccatgagcctgaagaccgagagaatcaacagcggcaagacccccccccaggaggacagagagaagagcccccccggcagaagacaggacagaagccccgcccccaccggcagacccacccccggcgccgagagaagaggcgtgagcgaggacggcaagatcatgcaccccagcagcagaagcccccagaacagcggcggcagaaagagccccgtgcaggccagccaggccaccaccctgcaggagcagaccgccgccgccagaggcgccgacagaagcagcagcgtgctgggcagcagcgagggcggcttcctgagcagagtgcaggccgacgagttcgccagcagcgcccccgacagcgccgagagacagaacctgcccgtgaacccccccagcagcctggagatcgcccaggccatggacaccaagatgaagaaggaggaggtgcaggaggagaagagacaccccaagggcaaggccgacgactgcagaagaagcggcttccccagcgagttccccggcgccctgcacgccgcccccagcagacaggacatgggcccctag

SEQ ID NO: 148064 - DNA, 981 bp, Artificial Sequence
  derived and/or modified sequence
atggagaagacacctgctgctgctgaggtcccacgagaggattctaatgccggagagatgccatctctgcagcagcagatcacctccctacatcaggagctggggcgccagcagtcactttgggccgatatccaccggaaattgcagtcccatatggatgctttaagaaaacagaaccgggagctcagagaggagctgcgggggctccaaaggcagcagtgggaagccgggaagaaacccgcagcaagtcctcacgcgggccgagaaagccataccctcgcgttagaacccgctttcgggaagataagccatctgagtgcagacgaagacaccacccctaagtacgcaggaaggaaatctcagtccgccactttactcggacagcgttggtcctccaaccacctagctccccccaaacccatgtccctgaaaaccgaaaggatcaactcgggaaaaaccccaccacaagaagatcgggagaagagccctcctgggcgcagacaagaccggtcccctgccccgaccggcagacccacaccaggtgctgaacgacgcggggtgtctgaggatggtaagatcatgcacccttcttctagatcaccccaaaactccgggggtcgaaagtcgccagtacaagcctcgcaggcaacaactctgcaggaacagactgccgcagcccgaggggcagaccgctcctcgtccgtccttggtagctcggaaggcgggtttttgagccgcgttcaggccgatgaattcgcatcaagcgcgccggactcagctgagcggcagaacctgccagttaaccctcctagcagcttagaaattgcccaggcaatggatacaaaaatgaaaaaggaggaagtgcaggaagagaagcgacatccaaaggggaaggctgacgattgccgccgctcaggatttcccagcgagttccctggtgcacttcacgcagccccttcaaggcaggacatgggtccttag

SEQ ID NO: 148065 - DNA, 981 bp, Artificial Sequence
  derived and/or modified sequence
atggagaagaccccagctgctgctgaggtgccccgggaggacagcaatgctggggagatgcccagcctgcagcagcagatcaccagcctgcaccaggagctgggccggcagcagagcctgtgggccgacatccacaggaagctgcagagccacatggatgccctgaggaagcagaaccgggagctgcgggaggagctgcggggcctgcagaggcagcagtgggaggccggcaagaagccagctgccagcccccacgccggccgggagagccacaccctggccctggagcccgccttcggcaagatcagccacctgtctgcagatgaggacaccacccccaagtatgccggcaggaagagccagagcgccaccctgctgggccagcgctggagcagcaaccacctggccccacccaagcccatgagcctgaagacagagcgcatcaacagcggcaagaccccaccccaggaggaccgggagaagagccccccaggccggcggcaggacaggagccctgcccccaccggccggcccaccccaggagctgagcggcggggcgtgtctgaagatggcaagatcatgcaccccagcagccgcagcccccagaacagcggcggcaggaagagccctgtgcaggccagccaggccaccaccctgcaggagcagacagctgctgcccggggagctgacaggagcagctctgtgctgggcagcagcgagggcggcttcctgagccgggtgcaggctgatgaatttgccagcagcgccccagattctgctgagcggcagaacctgcctgtgaacccccccagcagcctggagatcgcccaggccatggacaccaagatgaagaaggaggaggtgcaggaggagaagaggcaccccaagggcaaggcagatgactgcagaagaagtggcttccccagcgagttccctggggccctgcatgctgcccccagccggcaggacatgggcccctag

SEQ ID NO: 148066 - DNA, 981 bp, Artificial Sequence
  derived and/or modified sequence
atggagaagacccccgccgccgccgaggtgccccgggaggacagcaatgctggcgagatgccaagtctgcaacaacagattaccagtctccaccaggagttgggtcgccaacagtccctttgggccgacattcaccggaaactgcagtcacatatggatgcactgagaaaacaaaaccgcgaacttcgagaagagctccgagggctgcaacggcagcaatgggaggccggcaagaagcctgccgcaagtccccacgcaggtcgagagagccacactctcgctctagaaccggcctttggaaagatttctcatctgtctgccgatgaagacactacacccaagtacgccggacgaaaatctcaatccgccacactactcggccagagatggtcctccaaccatcttgctcctccaaagccgatgtccctgaaaaccgaacgcatcaacagtggaaaaacccccccccaggaggaccgcgagaagtcgccgcctgggaggagacaggatcgcagccctgcaccaacgggtaggcctaccccgggggcagagaggaggggcgtttccgaggacggaaagattatgcacccgtcctcccgcagcccccagaactccggagggaggaagtcgcccgtgcaagctagccaagctacaacattgcaggaacagacggcagcagcccgaggcgccgaccggtcatcatctgttctcggttcctcggagggcggcttcctctcccgagtccaagcggatgagttcgcgtccagcgcacctgactccgctgagcggcagaatctgccagttaacccaccatcctctctggagattgcacaggctatggatacaaagatgaaaaaagaagaggtgcaggaggagaaacgccatcctaaggggaaggccgacgactgtcgccggagtggtttcccatcagaattccccggagctctacatgctgctccttcaaggcaggacatgggtccttag

SEQ ID NO: 148067 - DNA, 981 bp, Artificial Sequence
  derived and/or modified sequence
atggagaagacgccggctgccgcagaagtaccccgtgaagactctaatgctggcgagatgcccagcttgcaacagcagatcaccagtctgcatcaggagttggggagacaacaatctctttgggctgacattcatagaaaacttcagtcacatatggacgctctgagaaagcagaacagagaactcagggaagagctccggggtctccagcgtcaacagtgggaagctggaaagaagcccgcagcctcaccacatgccggacgggaatcacacactctggccctagagcccgcattcgggaagatttctcacctcagcgctgacgaagacacgactcctaagtacgccggacgcaagagtcagtccgcgactctgttgggccagcggtggtcatctaatcaccttgcaccacccaagcccatgtccttaaagaccgaacgcattaactccggcaagactcccccacaggaggacagagagaagtcgccaccaggacggagacaagaccgctccccggcaccgaccgggaggccaaccccaggcgcagagcgaagaggcgtgagtgaagacgggaaaatcatgcacccttcctcccgcagcccacagaatagtggcggaagaaagagccctgtgcaagccagtcaagcaaccacactgcaggaacaaactgctgctgctcgcggtgcagaccggagcagctctgttctgggttcatccgaagggggattcttaagcagggtgcaggctgatgaattcgctagcagcgcacccgactccgctgaaaggcaaaatttgccagtgaacccacctagttcattggagatcgctcaggccatggacaccaagatgaaaaaggaagaggtccaggaggagaagagacatccaaagggaaaggccgatgactgccggagatcaggtttcccctctgaattccccggtgctctgcatgccgcaccatctcgacaagatatgggtccatag

SEQ ID NO: 148068 - protein, 503 aa, Artificial Sequence
  derived and/or modified sequence
MEAAVAAPRPRLLLLVLAAAAAAAAALLPGATALQCFCHLCTKDNFTCVTDGLCFVSVTETTDKVIHNSMCIAEIDLIPRDRPFVCAPSSKTGSVTTTYCCNQDHCNKIELPTTVKSSPGLGPVELAAVIAGPVCFVCISLMLMVYICHNRTVIHHRVPNEEDPSLDRPFISEGTTLKDLIYDMTTSGSGSGLPLLVQRTIARTIVLQESIGKGRFGEVWRGKWRGEEVAVKIFSSREERSWFREAEIYQTVMLRHENILGFIAADNKDNGTWTQLWLVSDYHEHGSLFDYLNRYTVTVEGMIKLALSTASGLAHLHMEIVGTQGKPAIAHRDLKSKNILVKKNGTCCIADLGLAVRHDSATDTIDIAPNHRVGTKRYMAPEVLDDSINMKHFESFKRADIYAMGLVFWEIARRCSIGGIHEDYQLPYYDLVPSDPSVEEMRKVVCEQKLRPNIPNRWQSCEALRVMAKIMRECWYANGAARLTALRIKKTLSQLSQQEGIKM

SEQ ID NO: 148069 - protein, 465 aa, Artificial Sequence
  derived and/or modified sequence
MEAAVAAPRPRLLLLVLAAAAAAAAALLPGATALQCFCHLCTKDNFTCVTDGLCFVSVTETTDKVIHNSMCIAEIDLIPRDRPFVCAPSSKTGSVTTTYCCNQDHCNKIELPTTVKSSPGLGPVELAAVIAGPVCFVCISLMLMVYICHNRTVIHHRVPNEEDPSLDRPFISEGTTLKDLIYDMTTSGSGSGLPLLVQRTIARTIVLQESIGKGRFGEVWRGKWRGEEVAVKIFSSREERSWFREAEIYQTVMLRHENILGFIAADNKDNGTWTQLWLVSDYHEHGSLFDYLNRYTVTVEGMIKLALSTASGLAHLHMEIVGTQGKPAIAPNHRVGTKRYMAPEVLDDSINMKHFESFKRADIYAMGLVFWEIARRCSIGGIHEDYQLPYYDLVPSDPSVEEMRKVVCEQKLRPNIPNRWQSCEALRVMAKIMRECWYANGAARLTALRIKKTLSQLSQQEGIKM

SEQ ID NO: 148070 - protein, 434 aa, Artificial Sequence
  derived and/or modified sequence
MCIAEIDLIPRDRPFVCAPSSKTGSVTTTYCCNQDHCNKIELPTTVKSSPGLGPVELAAVIAGPVCFVCISLMLMVYICHNRTVIHHRVPNEEDPSLDRPFISEGTTLKDLIYDMTTSGSGSGLPLLVQRTIARTIVLQESIGKGRFGEVWRGKWRGEEVAVKIFSSREERSWFREAEIYQTVMLRHENILGFIAADNKDNGTWTQLWLVSDYHEHGSLFDYLNRYTVTVEGMIKLALSTASGLAHLHMEIVGTQGKPAIAHRDLKSKNILVKKNGTCCIADLGLAVRHDSATDTIDIAPNHRVGTKRYMAPEVLDDSINMKHFESFKRADIYAMGLVFWEIARRCSIGGIHEDYQLPYYDLVPSDPSVEEMRKVVCEQKLRPNIPNRWQSCEALRVMAKIMRECWYANGAARLTALRIKKTLSQLSQQEGIKM

SEQ ID NO: 148071 - DNA, 1512 bp, Artificial Sequence
  derived and/or modified sequence
atggaggccgccgtggccgcccccagacccagactgctgctgctggtgctggccgccgccgccgccgccgccgccgccctgctgcccggcgccaccgccctgcagtgcttctgccacctgtgcaccaaggacaacttcacctgcgtgaccgacggcctgtgcttcgtgagcgtgaccgagaccaccgacaaggtgatccacaacagcatgtgcatcgccgagatcgacctgatccccagagacagacccttcgtgtgcgcccccagcagcaagaccggcagcgtgaccaccacctactgctgcaaccaggaccactgcaacaagatcgagctgcccaccaccgtgaagagcagccccggcctgggccccgtggagctggccgccgtgatcgccggccccgtgtgcttcgtgtgcatcagcctgatgctgatggtgtacatctgccacaacagaaccgtgatccaccacagagtgcccaacgaggaggaccccagcctggacagacccttcatcagcgagggcaccaccctgaaggacctgatctacgacatgaccaccagcggcagcggcagcggcctgcccctgctggtgcagagaaccatcgccagaaccatcgtgctgcaggagagcatcggcaagggcagattcggcgaggtgtggagaggcaagtggagaggcgaggaggtggccgtgaagatcttcagcagcagagaggagagaagctggttcagagaggccgagatctaccagaccgtgatgctgagacacgagaacatcctgggcttcatcgccgccgacaacaaggacaacggcacctggacccagctgtggctggtgagcgactaccacgagcacggcagcctgttcgactacctgaacagatacaccgtgaccgtggagggcatgatcaagctggccctgagcaccgccagcggcctggcccacctgcacatggagatcgtgggcacccagggcaagcccgccatcgcccacagagacctgaagagcaagaacatcctggtgaagaagaacggcacctgctgcatcgccgacctgggcctggccgtgagacacgacagcgccaccgacaccatcgacatcgcccccaaccacagagtgggcaccaagagatacatggcccccgaggtgctggacgacagcatcaacatgaagcacttcgagagcttcaagagagccgacatctacgccatgggcctggtgttctgggagatcgccagaagatgcagcatcggcggcatccacgaggactaccagctgccctactacgacctggtgcccagcgaccccagcgtggaggagatgagaaaggtggtgtgcgagcagaagctgagacccaacatccccaacagatggcagagctgcgaggccctgagagtgatggccaagatcatgagagagtgctggtacgccaacggcgccgccagactgaccgccctgagaatcaagaagaccctgagccagctgagccagcaggagggcatcaagatgtag

SEQ ID NO: 148072 - DNA, 1398 bp, Artificial Sequence
  derived and/or modified sequence
atggaggccgccgtggccgcccccagacccagactgctgctgctggtgctggccgccgccgccgccgccgccgccgccctgctgcccggcgccaccgccctgcagtgcttctgccacctgtgcaccaaggacaacttcacctgcgtgaccgacggcctgtgcttcgtgagcgtgaccgagaccaccgacaaggtgatccacaacagcatgtgcatcgccgagatcgacctgatccccagagacagacccttcgtgtgcgcccccagcagcaagaccggcagcgtgaccaccacctactgctgcaaccaggaccactgcaacaagatcgagctgcccaccaccgtgaagagcagccccggcctgggccccgtggagctggccgccgtgatcgccggccccgtgtgcttcgtgtgcatcagcctgatgctgatggtgtacatctgccacaacagaaccgtgatccaccacagagtgcccaacgaggaggaccccagcctggacagacccttcatcagcgagggcaccaccctgaaggacctgatctacgacatgaccaccagcggcagcggcagcggcctgcccctgctggtgcagagaaccatcgccagaaccatcgtgctgcaggagagcatcggcaagggcagattcggcgaggtgtggagaggcaagtggagaggcgaggaggtggccgtgaagatcttcagcagcagagaggagagaagctggttcagagaggccgagatctaccagaccgtgatgctgagacacgagaacatcctgggcttcatcgccgccgacaacaaggacaacggcacctggacccagctgtggctggtgagcgactaccacgagcacggcagcctgttcgactacctgaacagatacaccgtgaccgtggagggcatgatcaagctggccctgagcaccgccagcggcctggcccacctgcacatggagatcgtgggcacccagggcaagcccgccatcgcccccaaccacagagtgggcaccaagagatacatggcccccgaggtgctggacgacagcatcaacatgaagcacttcgagagcttcaagagagccgacatctacgccatgggcctggtgttctgggagatcgccagaagatgcagcatcggcggcatccacgaggactaccagctgccctactacgacctggtgcccagcgaccccagcgtggaggagatgagaaaggtggtgtgcgagcagaagctgagacccaacatccccaacagatggcagagctgcgaggccctgagagtgatggccaagatcatgagagagtgctggtacgccaacggcgccgccagactgaccgccctgagaatcaagaagaccctgagccagctgagccagcaggagggcatcaagatgtag

SEQ ID NO: 148073 - DNA, 1305 bp, Artificial Sequence
  derived and/or modified sequence
atgtgcatcgccgagatcgacctgatccccagagacagacccttcgtgtgcgcccccagcagcaagaccggcagcgtgaccaccacctactgctgcaaccaggaccactgcaacaagatcgagctgcccaccaccgtgaagagcagccccggcctgggccccgtggagctggccgccgtgatcgccggccccgtgtgcttcgtgtgcatcagcctgatgctgatggtgtacatctgccacaacagaaccgtgatccaccacagagtgcccaacgaggaggaccccagcctggacagacccttcatcagcgagggcaccaccctgaaggacctgatctacgacatgaccaccagcggcagcggcagcggcctgcccctgctggtgcagagaaccatcgccagaaccatcgtgctgcaggagagcatcggcaagggcagattcggcgaggtgtggagaggcaagtggagaggcgaggaggtggccgtgaagatcttcagcagcagagaggagagaagctggttcagagaggccgagatctaccagaccgtgatgctgagacacgagaacatcctgggcttcatcgccgccgacaacaaggacaacggcacctggacccagctgtggctggtgagcgactaccacgagcacggcagcctgttcgactacctgaacagatacaccgtgaccgtggagggcatgatcaagctggccctgagcaccgccagcggcctggcccacctgcacatggagatcgtgggcacccagggcaagcccgccatcgcccacagagacctgaagagcaagaacatcctggtgaagaagaacggcacctgctgcatcgccgacctgggcctggccgtgagacacgacagcgccaccgacaccatcgacatcgcccccaaccacagagtgggcaccaagagatacatggcccccgaggtgctggacgacagcatcaacatgaagcacttcgagagcttcaagagagccgacatctacgccatgggcctggtgttctgggagatcgccagaagatgcagcatcggcggcatccacgaggactaccagctgccctactacgacctggtgcccagcgaccccagcgtggaggagatgagaaaggtggtgtgcgagcagaagctgagacccaacatccccaacagatggcagagctgcgaggccctgagagtgatggccaagatcatgagagagtgctggtacgccaacggcgccgccagactgaccgccctgagaatcaagaagaccctgagccagctgagccagcaggagggcatcaagatgtag

SEQ ID NO: 148074 - DNA, 1512 bp, Artificial Sequence
  derived and/or modified sequence
atggaggccgcagtcgccgcgccaaggcctaggttgctcctgctcgtgctggccgcggctgcagccgccgctgctgctttgcttcccggtgccaccgcactgcagtgtttctgccacctgtgcacaaaggacaattttacctgcgtgactgacggcctttgctttgtgagcgtgacagaaactacagataaagtgatccataacagcatgtgcatagccgagatcgacctgatcccgcgcgatcgcccattcgtctgtgccccgtcctcaaaaaccggatcggtgaccaccacatattgctgcaaccaagaccattgtaataagattgagttaccaactaccgtcaagtcttctcccggcctcggcccagtcgagcttgctgccgttatcgcggggcccgtgtgctttgtgtgtatcagccttatgctgatggtctacatttgtcacaatcgtactgtgatccaccacagggtgcccaatgaggaagaccccagcctggacagaccattcatctccgagggcaccacccttaaggacctcatatacgacatgaccacttccggttccggatccgggctgcccttgctggtccagagaactatagcccgaacgatcgtcctgcaggagtccataggaaagggacgctttggtgaggtgtggcgtggaaaatggcgaggcgaagaggtggccgtcaagattttctcttcccgcgaggagcgcagttggttcagagaggcagagatttatcagacagtgatgcttaggcacgagaacatcttgggcttcatagctgcagacaacaaagataatgggacctggactcagctgtggctcgtgagcgattatcacgaacacggaagtctctttgactatttaaataggtacactgtgactgtagagggaatgattaagcttgcactctccactgccagcggcctcgcgcacctacacatggagatagtgggcacgcaaggaaaacccgcaatagctcacagagatctgaaatcaaaaaacattctcgtcaaaaagaacgggacatgctgcatcgcagatctgggcttggcagtgcgtcacgactctgctacagataccatcgacatcgcccccaatcacagggtgggcacaaagcgctacatggcaccagaggtgcttgatgacagtattaacatgaaacacttcgagtcattcaaacgcgcagatatctatgccatgggcttggtgttttgggagatcgccagaaggtgctcaattggaggcattcatgaggactaccagctgccatattacgatcttgtgccctccgatcccagcgttgaggaaatgcggaaagttgtgtgtgaacaaaagctccggcctaatataccaaacagatggcagtcatgtgaagccctccgagtgatggccaaaatcatgcgcgaatgttggtatgccaatggtgcggcacggttgacagccttgaggatcaaaaagacattgtctcagctcagccaacaggaggggatcaagatgtag

SEQ ID NO: 148075 - DNA, 1398 bp, Artificial Sequence
  derived and/or modified sequence
atggaggccgccgtcgcagcccccaggccacgtctgctgctcctggtgctggccgcagctgccgccgcagctgcagcgctgctaccaggggcaaccgctctgcagtgcttttgccatctctgcacaaaggacaacttcacctgcgtaactgacggtttgtgttttgtatctgtgaccgaaactacggacaaggtgattcataactcaatgtgcatcgctgagatcgacctcatccccagggataggcccttcgtctgcgccccctctagcaagactggatctgtgactaccacgtactgctgtaatcaggatcattgtaataagatagaactcccgactacggtgaaaagctccccgggtctgggcccagtggagttagccgccgtcattgcaggccccgtgtgttttgtgtgcatatctctgatgctgatggtttacatctgtcataaccggacggtcattcaccacagagtacctaacgaagaggacccttctcttgatcgaccctttatatcagagggcacaaccctgaaagacctgatttatgacatgactacaagcggatcaggctccggactgccattattggtccaaagaacgatcgccagaacaatcgtcctccaagagtccatcggaaagggaaggtttggagaagtgtggagaggcaaatggcgcggagaggaagtggccgtgaaaatattctcatctagggaggagcggagctggttcagggaggccgaaatttatcagaccgtcatgctgcgccatgagaacatcctagggttcatcgccgctgacaacaaggacaatgggacatggacccagctgtggttggtgagtgattatcatgagcacggaagcctattcgattatttaaatcggtatacagtcacggttgagggcatgattaagctagcactgtcaacagcctcggggctggcacacttacatatggaaatcgttggcactcagggcaagcctgctattgcaccaaaccaccgagtgggaaccaagcggtatatggcgcccgaggtcttggacgatagcattaatatgaagcacttcgaatcctttaaacgtgccgatatctatgcaatggggctggtgttttgggagatcgcaaggaggtgcagtatcgggggtatccatgaggactaccagcttccttattacgacttggtcccttctgatccaagtgtagaggagatgaggaaggtggtgtgcgagcagaagctgcgtcctaacatccctaatagatggcaaagctgcgaagcactgagagtcatggcaaagattatgcgcgaatgctggtacgccaatggtgccgcgcggctgacggcgctgaggatcaagaagacgctgagccaactgtcacagcaagagggtatcaaaatgtag

SEQ ID NO: 148076 - DNA, 1305 bp, Artificial Sequence
  derived and/or modified sequence
atgtgcatagctgagatcgatcttataccaagagatagacccttcgtctgcgctccaagttcaaaaaccggttctgtaacaacgacttattgttgtaatcaggaccattgcaataaaatcgagctgccgacaactgttaagagtagtcctgggttaggtcctgttgagcttgccgccgtcattgccggcccagtgtgcttcgtttgcatttccctgatgctcatggtatatatatgccacaacagaactgtgatccaccaccgtgtgccgaacgaggaggatcccagtcttgatagaccttttattagcgaaggcacgacactaaaggatctgatctacgatatgacaacctcgggctcaggtagtgggctcccattgcttgttcagcggaccatcgcaagaactatcgtcctccaggaaagcatcggtaaaggccgcttcggcgaagtttggagggggaaatggagaggcgaggaggttgctgtgaaaatcttttcctcaagggaagagcgcagttggtttagggaagcagagatttaccagactgtcatgttgaggcacgaaaatatcctggggtttattgccgccgataacaaagataatggcacatggacacaactctggttagtgtccgactaccacgagcacggcagcttgttcgattatctcaaccgctacactgttacagtcgaaggaatgataaagctcgccttatctaccgcgtcagggttagcccatctccatatggagatcgtcgggacacagggaaagccagctattgctcacagagacttgaagagtaagaatattttggtgaagaaaaatggtacttgttgtatcgctgacttgggtctggctgttcggcatgattccgcaaccgacactatagacatagctccgaaccaccgagtgggcaccaaaaggtatatggcccctgaggtgttggatgactctattaacatgaagcactttgagtcattcaaaagagccgacatctatgcgatgggccttgtgttctgggaaattgcgcgaaggtgctcaatcgggggcatccacgaggattatcagctgccctattacgacctggtcccaagcgacccctctgtggaagagatgcgcaaggtagtgtgtgagcagaaactgcgcccaaatatacccaaccgctggcagagctgtgaagcactgcgcgttatggctaaaattatgcgggaatgctggtacgcgaatggagccgcacggctaacggccctgcgaatcaaaaagacattgtcacagttatcccagcaggaaggtatcaagatgtag

SEQ ID NO: 148077 - DNA, 1512 bp, Artificial Sequence
  derived and/or modified sequence
atggaggccgctgtggccgccccccggccccggctgctgctgctggtgctggccgctgctgctgctgctgctgctgccctgctgcccggggccacagccctgcagtgcttctgccacctgtgcaccaaggacaacttcacctgtgtgacagatggcctgtgctttgtgtctgtgacagagaccacagacaaggtgatccacaacagcatgtgcatcgccgagattgacctgatcccccgggaccggccctttgtgtgtgcccccagcagcaagacaggctctgtgaccaccacctactgctgcaaccaggaccactgcaacaagattgagctgcccaccaccgtgaagagcagccctggcctgggccctgtggagctggccgctgtgattgctggccctgtgtgctttgtgtgcatcagcctgatgctgatggtgtacatctgccacaacagaactgtcatccaccaccgggtgcccaatgaggaggaccccagcctggaccggcccttcatcagcgagggcaccaccctgaaggacctgatctatgacatgaccaccagcggcagcggcagcggcctgcccctgctggtgcagaggaccatcgcccggaccatcgtgctgcaggagagcatcggcaagggccgctttggagaggtgtggaggggcaagtggagaggagaggaggtggccgtgaagatcttcagcagccgggaggagaggtcctggttccgggaggccgagatctaccagacagtgatgctgcggcatgagaacatcctgggcttcatcgctgctgacaacaaggacaatggcacctggacccagctgtggctggtgtctgactaccatgaacatggcagcctgtttgactacctgaaccgctacacagtgacagtggagggcatgatcaagctggccctgagcacagccagcggcctggcccacctgcacatggagatcgtgggcacccagggcaagccagccatcgcccaccgggacctgaagagcaagaacatcctggtgaagaagaatggcacctgctgcatcgctgacctgggcctggccgtgagacatgacagcgccacagacaccattgatattgcccccaaccaccgggtgggcaccaagcgctacatggcccctgaggtgctggatgacagcatcaacatgaagcactttgagagcttcaagagagctgacatctatgccatgggcctggtgttctgggagatcgcccggcgctgcagcattggaggcatccacgaggactaccagctgccctactatgacctggtgcccagcgaccccagcgtggaggagatgaggaaggtggtgtgtgagcagaagctgcggcccaacatccccaaccgctggcagagctgtgaggccctgcgggtgatggccaagatcatgagggagtgctggtacgccaacggggccgcccggctgacagccctgcgcatcaagaagaccctgagccagctgagccagcaggagggcatcaagatgtag

SEQ ID NO: 148078 - DNA, 1398 bp, Artificial Sequence
  derived and/or modified sequence
atggaggccgctgtggccgccccccggccccggctgctgctgctggtgctggccgctgctgctgctgctgctgctgccctgctgcccggggccacagccctgcagtgcttctgccacctgtgcaccaaggacaacttcacctgtgtgacagatggcctgtgctttgtgtctgtgacagagaccacagacaaggtgatccacaacagcatgtgcatcgccgagattgacctgatcccccgggaccggccctttgtgtgtgcccccagcagcaagacaggctctgtgaccaccacctactgctgcaaccaggaccactgcaacaagattgagctgcccaccaccgtgaagagcagccctggcctgggccctgtggagctggccgctgtgattgctggccctgtgtgctttgtgtgcatcagcctgatgctgatggtgtacatctgccacaacagaactgtcatccaccaccgggtgcccaatgaggaggaccccagcctggaccggcccttcatcagcgagggcaccaccctgaaggacctgatctatgacatgaccaccagcggcagcggcagcggcctgcccctgctggtgcagaggaccatcgcccggaccatcgtgctgcaggagagcatcggcaagggccgctttggagaggtgtggaggggcaagtggagaggagaggaggtggccgtgaagatcttcagcagccgggaggagaggtcctggttccgggaggccgagatctaccagacagtgatgctgcggcatgagaacatcctgggcttcatcgctgctgacaacaaggacaatggcacctggacccagctgtggctggtgtctgactaccatgaacatggcagcctgtttgactacctgaaccgctacacagtgacagtggagggcatgatcaagctggccctgagcacagccagcggcctggcccacctgcacatggagatcgtgggcacccagggcaagccagccatcgcccccaaccaccgggtgggcaccaagcgctacatggcccctgaggtgctggatgacagcatcaacatgaagcactttgagagcttcaagagagctgacatctatgccatgggcctggtgttctgggagatcgcccggcgctgcagcattggaggcatccacgaggactaccagctgccctactatgacctggtgcccagcgaccccagcgtggaggagatgaggaaggtggtgtgtgagcagaagctgcggcccaacatccccaaccgctggcagagctgtgaggccctgcgggtgatggccaagatcatgagggagtgctggtacgccaacggggccgcccggctgacagccctgcgcatcaagaagaccctgagccagctgagccagcaggagggcatcaagatgtag

SEQ ID NO: 148079 - DNA, 1305 bp, Artificial Sequence
  derived and/or modified sequence
atgtgcatcgccgagattgacctgatcccccgggaccggccctttgtgtgtgcccccagcagcaagacaggctctgtgaccaccacctactgctgcaaccaggaccactgcaacaagattgagctgcccaccaccgtgaagagcagccctggcctgggccctgtggagctggccgctgtgattgctggccctgtgtgctttgtgtgcatcagcctgatgctgatggtgtacatctgccacaacagaactgtcatccaccaccgggtgcccaatgaggaggaccccagcctggaccggcccttcatcagcgagggcaccaccctgaaggacctgatctatgacatgaccaccagcggcagcggcagcggcctgcccctgctggtgcagaggaccatcgcccggaccatcgtgctgcaggagagcatcggcaagggccgctttggagaggtgtggaggggcaagtggagaggagaggaggtggccgtgaagatcttcagcagccgggaggagaggtcctggttccgggaggccgagatctaccagacagtgatgctgcggcatgagaacatcctgggcttcatcgctgctgacaacaaggacaatggcacctggacccagctgtggctggtgtctgactaccacgagcacggcagcctgtttgactacctgaaccgctacacagtgacagtggagggcatgatcaagctggccctgagcacagccagcggcctggcccacctgcacatggagatcgtgggcacccagggcaagccagccatcgcccaccgggacctgaagagcaagaacatcctggtgaagaagaatggcacctgctgcatcgctgacctgggcctggccgtgagacatgattctgccacagacaccatcgacatcgcccccaaccaccgggtgggcaccaagcgctacatggcccctgaggtgctggatgacagcatcaacatgaagcactttgagagcttcaagagagctgacatctatgccatgggcctggtgttctgggagatcgcccggcgctgcagcatcggcggcatccacgaggactaccagctgccctactatgacctggtgcccagcgaccccagcgtggaggagatgaggaaggtggtgtgtgagcagaagctgcggcccaacatccccaaccgctggcagagctgtgaggccctgcgggtgatggccaagatcatgagggagtgctggtacgccaatggagctgcccggctgacagccctgcgcatcaagaagaccctgagccagctgagccagcaggagggcatcaagatgtag

SEQ ID NO: 148080 - DNA, 1512 bp, Artificial Sequence
  derived and/or modified sequence
atggaggccgccgtggccgccccccggccccggctgctgctgctggtcctggctgccgcggctgccgcagcagccgctctcctgccgggcgccacagctttgcagtgtttttgccatttgtgcactaaagacaacttcacctgcgttacggatggtctatgttttgtgtccgtgacggaaacaaccgacaaggtgatacacaatagtatgtgcatcgcagaaatagacctcattccaagggataggccttttgtgtgtgcccctagctcaaaaacaggtagtgtgaccaccacttactgctgtaatcaggaccattgcaacaaaatcgagctgcctacaacagtaaagtcatcacccggcctcggacctgtggaacttgccgcagtcattgccggccctgtgtgttttgtttgcatcagcctgatgctcatggtgtatatctgccataacaggaccgtaattcaccatcgcgtgcctaacgaggaagaccccagtctggataggcctttcatctccgaaggcacaacactcaaagacctcatctacgacatgaccacaagcggtagtggctctggtttacctttactggtacagcggaccatcgcgcggaccatcgtgttgcaggaaagtattggcaaggggcgtttcggagaggtgtggaggggaaaatggagaggggaggaggttgctgttaagattttttcttcgagggaggagcgatcatggttccgggaagctgagatttatcagaccgtcatgttgaggcacgaaaacatccttggctttattgctgctgacaataaagataacggcacatggacccaattgtggctcgtcagcgactaccacgagcacgggtcactctttgactatctgaatcggtatacagttacggtcgaagggatgattaagcttgccctcagtaccgccagcggcctagcgcatctccacatggaaattgttgggacgcagggaaagcctgcaatcgcacatcgggacctgaagtcgaagaatattcttgtaaaaaaaaacggtacttgctgcatcgccgatttagggctcgccgtgagacatgacagcgccacagatacaatcgatatcgcccccaaccacagagtcggaaccaaaagatacatggctcctgaggtgctagacgatagcatcaacatgaagcactttgagtcttttaaacgcgcagatatctacgctatggggctggtgttttgggagatcgcaagacgatgtagtattggcggcattcatgaggactaccagcttccctactatgatctcgtcccatcagacccaagcgtagaggagatgcgtaaggtggtatgtgaacaaaaattgcgccccaacatccccaaccggtggcagagttgcgaggcactcagggtgatggctaaaataatgagggaatgctggtatgcaaacggtgctgccaggctgaccgcactgcggatcaaaaagacattatctcagctgtcccagcaggaaggaataaagatgtag

SEQ ID NO: 148081 - DNA, 1398 bp, Artificial Sequence
  derived and/or modified sequence
atggaggccgccgtggccgccccccggccccggctgctgctgctggttctggctgccgcggccgccgcagctgccgccctgctccctggtgccaccgccctgcagtgcttctgccacttatgcaccaaagataactttacctgcgtcactgacggtctctgcttcgtctcagtgactgaaacaactgacaaggtgattcataacagcatgtgcattgctgagatcgacttgattccacgcgatagaccctttgtgtgtgctccgtcttctaagaccggcagtgttaccactacttattgctgcaaccaggatcattgtaataagatagaactgccaactaccgtgaagagtagcccaggccttggccccgtagaactggccgccgtaatagccgggcccgtctgtttcgtctgcattagtctaatgctaatggtttacatctgtcacaatcggacagtgatacaccatcgggtcccgaacgaggaagatccaagcctggacagaccattcatcagcgagggtacaacactcaaggatctgatctacgacatgactacctccggatctggaagtggactcccgctgctggtccagcgcacaatcgcccgtacaattgtgctgcaagaatcaatcgggaaagggaggttcggagaagtttggcgcggaaagtggcggggggaagaagtcgcagtgaaaattttctcctccagggaagaacggtcatggtttcgggaggcagagatttatcagactgttatgttgaggcatgagaatattttaggcttcattgctgctgacaacaaagacaacggcacttggacgcagctatggttagtttctgattatcatgaacatgggagtctatttgattatctgaataggtatacagtgactgtggagggaatgatcaagcttgccttaagtacagcctccgggctggcacacctgcacatggagatcgtgggcacacaaggcaaacccgccatagcccctaatcaccgcgtgggcacaaagagatacatggctccagaagtgttagacgattctatcaacatgaagcattttgagtccttcaagagggcagatatctatgccatgggcctcgtattctgggagattgctcgtcgctgttctatcggaggaatacacgaagattaccagctgccctactatgacttggtgcctagtgatccgtcagtggaggaaatgcgtaaggtagtttgtgagcaaaagctgagaccgaacatacctaatcgctggcaaagctgcgaggccctgcgggtaatggcaaagatcatgcgagaatgctggtacgcgaatggcgccgcaagattaactgccctccggataaagaagacgctcagccaactgtcacagcaggaagggatcaagatgtag

SEQ ID NO: 148082 - DNA, 1305 bp, Artificial Sequence
  derived and/or modified sequence
atgtgcatcgccgagatcgacctgatcccccgggaccggcccttcgtgtgcgctcctagtagcaagacgggctcagtaactacaacttattgctgcaaccaagatcactgtaataagattgaactccctacgacagtaaagtcttctcctgggctgggaccagtggagctggctgccgtgattgctggccctgtctgttttgtgtgcatcagtcttatgttgatggtgtatatctgccacaatcgcacagttattcatcaccgcgttccaaacgaagaagacccctccttagacagacccttcatttccgaaggaaccactctgaaggatctgatctatgacatgacaaccagcgggagcggatccggactgccactgctggtgcagcggacaatagcacgcacaattgttttacaggagagtatcggcaagggcaggtttggggaggtgtggcgcggaaaatggaggggagaggaagtggcggttaaaattttctcctcacgtgaggagaggtcttggttcagagaagcagaaatctaccagaccgtaatgctgcgacatgaaaatattcttgggtttatcgccgccgataacaaagacaacggaacatggacacagttgtggctggtgtcagactatcacgagcatgggagcctgtttgactacctaaatcggtatactgtcactgtggaaggaatgatcaaactggctctgagcacagcctccggactcgcgcatttgcatatggaaattgttgggacacaagggaaaccagcaattgcgcatagagacctgaagtcgaagaatatcctggtcaagaagaacggtacatgctgcattgcagacctgggcctcgctgtgcgacatgacagcgcaacagacacgatcgacattgcaccgaatcacagggtcggtacgaagagatatatggcacctgaagtgctcgatgactcaatcaacatgaagcactttgagagcttcaaacgcgcagatatctacgcaatggggctggtcttctgggaaatcgcccggcgttgtagcatcggagggatccacgaggattatcaattaccttactatgatctcgtcccttctgacccttccgtggaagaaatgagaaaggtggtgtgtgagcagaagctccgacctaacattcctaacaggtggcagagctgcgaagctctccgggtgatggccaagatcatgcgcgaatgttggtacgctaatggggcggctcggctgacagctctcagaattaaaaagactctcagtcagctttcacagcaggagggcatcaaaatgtag

SEQ ID NO: 148083 - DNA, 1512 bp, Artificial Sequence
  derived and/or modified sequence
atggaggccgcagtagcagcccctagacctaggctgctcctcctcgtcctggccgcagccgctgctgccgctgcagcacttctgccaggtgctactgctcttcagtgtttctgccacctgtgtaccaaggacaattttacgtgtgtcaccgatggactctgcttcgtgagcgtcactgagaccaccgacaaggttatccacaactccatgtgcattgccgaaattgatcttatcccacgcgaccgtccattcgtgtgtgctccttccagcaagaccggcagtgtgacaaccacatactgttgcaaccaggatcactgtaacaagatcgagttgccaaccactgtgaagtcttctcccggactgggtccagtagaactggcagctgtcattgccggacctgtgtgcttcgtctgtatatcacttatgctcatggtgtacatttgtcataatcgaaccgtgatccaccaccgcgtcccaaacgaggaggatccctctctcgacaggccgttcattagcgaaggcaccactcttaaggacctgatctacgatatgaccacttcaggttctgggagtggactaccccttctggtacagcggacaatcgcccgaacaatcgtgctacaggaaagtattggaaaggggaggtttggagaggtgtggaggggaaagtggcggggagaagaagtcgccgtcaagatattctcttccagggaagagaggagctggtttagggaagcagagatttaccagaccgtgatgctgaggcatgagaacattttgggttttatcgccgcagacaataaggacaacggcacatggacacaactctggctcgtgtctgattaccacgagcacggtagtctcttcgactatttgaacaggtatactgtgaccgttgaagggatgatcaagctagccctctcaaccgcatccgggctagcccatctgcacatggaaattgttggaacacaggggaagccggcaatcgctcatcgcgacctcaagtccaagaatatactcgtgaaaaagaatggcacctgctgtattgccgacctgggtcttgctgtgagacatgactctgctactgacacaatcgatattgctcctaatcaccgcgtaggtaccaaaaggtacatggctcctgaagtactcgacgactccataaacatgaagcattttgaaagctttaagagagctgacatttacgccatgggacttgtattttgggagatcgcacgacggtgttccattggcggtatacatgaggactaccagcttccatattatgacctcgtgccatccgatccaagtgtggaggaaatgcgcaaggtggtatgtgagcagaagcttagaccaaacatcccaaatcggtggcaatcctgcgaggccctgagggtgatggccaagataatgagggaatgttggtacgcaaatggtgcagctagactcactgctctgagaatcaagaagacattgagtcaactgtctcagcaagagggaatcaagatgtag

SEQ ID NO: 148084 - DNA, 1398 bp, Artificial Sequence
  derived and/or modified sequence
atggaagccgcagtggcagccccacgtcctcgcctgctcctcctggtgctcgccgcagcagccgctgccgcagccgcattacttccaggggcaacggctcttcagtgtttctgtcatttgtgtacaaaggacaactttacttgcgtaacagatgggctgtgttttgtgagtgtcactgaaaccacagacaaggtcatccacaactcgatgtgtatagcagagattgatctgatcccccgagatagacccttcgtgtgcgctcccagtagcaagaccggaagtgtcacaaccacatactgctgtaaccaagaccactgcaataagatagagctgcctacaaccgtcaaatcaagtcccggactaggtcctgtggagttagccgcagtgatcgcgggacctgtttgtttcgtatgcatctcgttgatgcttatggtgtacatctgccacaatagaaccgtgattcaccacagagttccaaacgaggaggatccaagtctcgataggccttttatttctgagggtacaacactgaaggacttaatttatgacatgacaacttccggctccgggtccggccttcccctcctggtacaacgcaccatcgcacggaccatcgttctgcaggaatccatcggcaaggggaggtttggagaggtatggagaggcaagtggcgcggagaggaggtggctgttaagatatttagctcccgtgaagaaaggtcttggttccgtgaagccgagatctaccagaccgtaatgctcagacacgagaatatcttgggcttcattgctgctgacaataaagataatggaacatggactcaattatggctcgtgtctgactaccatgaacacgggtcgctatttgactaccttaacaggtatacagtaacggttgaggggatgattaagctggcactaagcactgcatctggcctggctcatctgcatatggaaatcgtgggtactcaaggcaaaccagccatcgctcccaaccaccgcgtgggcacgaaaaggtacatggctccggaagtgctagacgactcgatcaacatgaagcacttcgagtccttcaaaagagcagatatctacgccatggggctagtcttctgggagattgccaggcgctgctcgatcggcggtattcatgaagactatcagcttccctactacgacctggtgcctagtgatccctctgtggaggaaatgcggaaggtggtgtgtgagcagaaactgcgcccaaatattcccaaccgctggcagtcgtgcgaggcgcttagagtgatggcgaaaatcatgagggagtgctggtacgccaacggcgcagcgagactgacagccctgcgaattaagaaaactcttagccagttaagccagcaggagggtattaagatgtag

SEQ ID NO: 148085 - DNA, 1305 bp, Artificial Sequence
  derived and/or modified sequence
atgtgcatcgctgagatagaccttattccgagagaccgtcccttcgtgtgtgccccttctagtaaaacaggatctgttaccactacgtactgctgcaaccaggaccattgcaacaaaattgagcttccaactactgtgaagagcagtcctggccttggaccggtcgaattagccgctgtgattgcgggtcctgtgtgctttgtgtgtatctctttgatgttaatggtctatatctgccacaacaggacggtgattcatcatagggtgccgaacgaagaagacccttctctcgataggccatttatctccgagggcacaaccttgaaggacctgatctatgatatgactacgtctggaagcggctctgggctgccattgctggtacagaggaccatcgcaaggacgattgttttgcaggagtccattggcaaaggcagattcggcgaagtatggagaggcaagtggcgcggagaagaggtagcagtcaagattttctcctctagagaggaacgttcttggtttcgggaggccgagatataccagacggtcatgctgagacacgaaaatatcctggggttcatcgccgctgataataaagacaacgggacctggactcagttgtggttggtctcagattaccacgaacacggatctctctttgattacctcaatcgctacaccgtgaccgttgaaggtatgatcaagttagcgctctccaccgcgtcagggctcgcgcatctgcatatggaaatagtcggcacacagggaaaaccggctattgctcatcgtgatctcaaatctaagaatatcctcgtgaaaaaaaatggcacctgctgtatcgccgatttaggattagccgtgcggcacgactccgcgacggacaccatcgatattgccccaaaccacagagtgggcactaagaggtatatggcccctgaggtcctggacgattccatcaacatgaagcactttgaatccttcaaaagagctgatatttatgcaatgggcctggtattttgggagattgctcgcagatgttctatcggtgggattcacgaggattatcagctgccatattacgatttagtaccctctgacccaagcgtggaggaaatgagaaaagtggtctgtgaacagaagctgaggccaaacataccaaaccgctggcaatcctgtgaagctctgagagttatggctaaaattatgcgcgaatgttggtatgccaatggagccgctcggctgaccgcattgaggatcaagaaaacgttatcccaactttcccagcaagaaggaatcaaaatgtag

SEQ ID NO: 148086 - DNA, 6516 bp, Artificial Sequence
  derived and/or modified sequence
aaagggccggagcgaggccgccgcggcggctagggaggtggggcgaggcgaggtttgctggggtgaggcagcggcgcggccgggccgggccgggccacaggcggtggcggcgggaccatggaggcggcggtcgctgctccgcgtccccggctgctcctcctcgtgctggcggcggcggcggcggcggcggcggcgctgctcccgggggcgacggcgttacagtgtttctgccacctctgtacaaaagacaattttacttgtgtgacagatgggctctgctttgtctctgtcacagagaccacagacaaagttatacacaacagcatgtgtatagctgaaattgacttaattcctcgagataggccgtttgtatgtgcaccctcttcaaaaactgggtctgtgactacaacatattgctgcaatcaggaccattgcaataaaatagaacttccaactactgtaaagtcatcacctggccttggtcctgtggaactggcagctgtcattgctggaccagtgtgcttcgtctgcatctcactcatgttgatggtctatatctgccacaaccgcactgtcattcaccatcgagtgccaaatgaagaggacccttcattagatcgcccttttatttcagagggtactacgttgaaagacttaatttatgatatgacaacgtcaggttctggctcaggtttaccattgcttgttcagagaacaattgcgagaactattgtgttacaagaaagcattggcaaaggtcgatttggagaagtttggagaggaaagtggcggggagaagaagttgctgttaagatattctcctctagagaagaacgttcgtggttccgtgaggcagagatttatcaaactgtaatgttacgtcatgaaaacatcctgggatttatagcagcagacaataaagacaatggtacttggactcagctctggttggtgtcagattatcatgagcatggatccctttttgattacttaaacagatacacagttactgtggaaggaatgataaaacttgctctgtccacggcgagcggtcttgcccatcttcacatggagattgttggtacccaaggaaagccagccattgctcatagagatttgaaatcaaagaatatcttggtaaagaagaatggaacttgctgtattgcagacttaggactggcagtaagacatgattcagccacagataccattgatattgctccaaaccacagagtgggaacaaaaaggtacatggcccctgaagttctcgatgattccataaatatgaaacattttgaatccttcaaacgtgctgacatctatgcaatgggcttagtattctgggaaattgctcgacgatgttccattggtggaattcatgaagattaccaactgccttattatgatcttgtaccttctgacccatcagttgaagaaatgagaaaagttgtttgtgaacagaagttaaggccaaatatcccaaacagatggcagagctgtgaagccttgagagtaatggctaaaattatgagagaatgttggtatgccaatggagcagctaggcttacagcattgcggattaagaaaacattatcgcaactcagtcaacaggaaggcatcaaaatgtaattctacagctttgcctgaactctccttttttcttcagatctgctcctgggttttaatttgggaggtcaattgttctacctcactgagagggaacagaaggatattgcttccttttgcagcagtgtaataaagtcaattaaaaacttcccaggatttctttggacccaggaaacagccatgtgggtcctttctgtgcactatgaacgcttctttcccaggacagaaaatgtgtagtctacctttattttttattaacaaaacttgttttttaaaaagatgattgctggtcttaactttaggtaactctgctgtgctggagatcatctttaagggcaaaggagttggattgctgaattacaatgaaacatgtcttattactaaagaaagtgatttactcctggttagtacattctcagaggattctgaaccactagagtttccttgattcagactttgaatgtactgttctatagtttttcaggatcttaaaactaacacttataaaactcttatcttgagtctaaaaatgacctcatatagtagtgaggaacataattcatgcaattgtattttgtatactattattgttctttcacttattcagaacattacatgccttcaaaatgggattgtactataccagtaagtgccacttctgtgtctttctaatggaaatgagtagaattgctgaaagtctctatgttaaaacctatagtgtttgaattcaaaaagcttatttatctgggtaacccaaactttttctgttttgtttttggaagggtttttgtggtatgtcatttggtattctattctgaaaatgcctttctcctaccaaaatgtgcttaagccactaaagaaatgaagtggcattaattagtaaattattagcatggtcatgtttgaatattctcacatcaagcttttgcattttaattgtgttgtctaagtatacttttaaaaaatcaagtggcactctagatgcttatagtactttaatatttgtagcatacagactaatttttctaaaagggaaagtctgtctagctgcttgtgaaaagttatgtggtattctgtaagccatttttttctttatctgttcaaagacttattttttaagacatgaattacatttaaaattagaatatggttaatattaaataataggcctttttctaggaaggcgaaggtagttaataatttgaatagataacagatgtgcaagaaagtcacatttgttatgtatgtaggagtaaacgttcggtggatcctctgtctttgtaactgaggttagagctagtgtggttttgaggtctcactacactttgaggaaggcagcttttaattcagtgtttccttatgtgtgcgtacattgcaactgcttacatgtaatttatgtaatgcattcagtgcacccttgttacttgggagaggtggtagctaaagaacattctgagtataggtttttctccatttacagatgtctttggtcaaatattgaaagcaaacttgtcatggtcttcttacattaagttgaaactagcttataataactggtttttacttccaatgctatgaagtctctgcagggcttttacagttttcgaagtccttttatcactgtgatcttattctgaggggagaaaaaactatcatagctctgaggcaagacttcgactttatagtgctatcagttccccgatacagggtcagagtaacccatacagtattttggtcaggaagagaaagtggccatttacactgaatgagttgcattctgataatgtcttatctcttatacgtagaataaatttgaaagactatttgatcttaaaaccaaagtaattttagaatgagtgacatattacataggaatttagtgtcaatttcatgtgtttaaaaacatcatgggaaaaatgcttagaggttactattttgactacaaagttgagtttttttctgtagttaccataatttcattgaagcaaatgaatgagtttgagaggtttgtttttatagttgtgttgtattacttgtttaataataatctctaattctgtgatcaggtactttttttgtgggggttttttttttgtttttttttttttgttgttgtttttgggccatttctaagcctaccagatctgctttatgaaatccaggggaccaatgcattttatcactaaaactatttttatataattttaagaatataccaaaagttgtctgatttaaagttgtaatacatgatttctcactttcatgtaaggttatccacttttgctgaagatattttttattgaatcaaagattgagttacaattatacttttcttacctaagtggataaaatgtacttttgatgaatcagggaatttttttaaagttggagtttagttctaaattgactttacgtattactgcagttaattccttttttggctagggatggtttgataaaccacaattggctgatattgaaaatgaaagaaacttaaaaggtgggatggatcatgattactgtcgataactgcagataaatttgattagagtaataattttgtcatttaaaaacacagttgtttatactgcccatcctaggatgctcaccttccaagattcaacgtggctaaaacatcttctggtaaattgtgcgtccatattcattttgtcagtagccaggagaaatggggatgggggaaatacgacttagtgaggcatagacatccctggtccatcctttctgtctccagctgtttcttggaacctgctctcctgcttgctggtccctgacgcagagaccgttgcctcccccacagccgtttgactgaaggctgctctggagacctagagtaaaacggctgatggaagttgtgggacccacttccatttccttcagtcattagaggtggaagggaggggtctccaagtttggagattgagcagatgaggcttgggatgcccctgctttgacttcagccatggatgaggagtgggatggcagcaaggtggctcctgtggcagtggagttgtgccagaaacagtggccagttgtatcgcctataagacagggtaaggtctgaagagctgagcctgtaattctgctgtaataatgatagtgctcaagaagtgccttgagttggtgtacagtgccatggccatcaagaatcccagatttcaggttttattacaaaatgtaagtggtcacttggcgattttgtagtacatgcatgagttaccttttttctctatgtctgagaactgtcagattaaaacaagatggcaaagagatcgttagagtgcacaacaaaatcactatcccattagacacatcatcaaaagcttatttttattcttgcactggaagaatcgtaagtcaactgtttcttgaccatggcagtgttctggctccaaatggtagtgattccaaataatggttctgttaacactttggcagaaaatgccagctcagatattttgagatactaaggattatctttggacatgtactgcagcttcttgtctctgttttggattactggaatacccatgggccctctcaagagtgctggacttctaggacattaagatgattgtcagtacattaaacttttcaatcccattatgcaatcttgtttgtaaatgtaaacttctaaaaatatggttaataacattcaacctgtttattacaacttaaaaggaacttcagtgaatttgtttttattttttaacaagatttgtgaactgaatatcatgaaccatgttttgatacccctttttcacgttgtgccaacggaatagggtgtttgatatttcttcatatgttaaggagatgcttcaaaatgtcaattgctttaaacttaaattacctctcaagagaccaaggtacatttacctcattgtgtatataatgtttaatatttgtcagagcattctccaggtttgcagttttatttctataaagtatgggtattatgttgctcagttactcaaatggtactgtattgtttatatttgtaccccaaataacatcgtctgtactttctgttttctgtattgtatttgtgcaggattctttaggctttatcagtgtaatctctgccttttaagatatgtacagaaaatgtccatataaatttccattgaagtcgaatgatactgagaagcctgtaaagaggagaaaaaaacataagctgtgtttccccataagtttttttaaattgtatattgtatttgtagtaatattccaaaagaatgtaaataggaaatagaagagtgatgcttatgttaagtcctaacactacagtagaagaatggaagcagtgcaaataaattacatttttcccaagtgccagtggcatattttaaaataaagtgtatacgttggaatgagtcatgccatatgtagttgctgtagatggcaactagaacctttgagttacaagagtctttagaagttttctaaccctgcctagtgcaagttacaatattatagcgtgttcggggagtgccctcctgtctgcaggtgtgtctctgtgcctgggggcttttctccacatgcttaggggtgtgggtcttccattggggcatgatggacctgtctacaggtgatctctgttgcctttgggtcagcacatttgttagtctcctgggggtgaaaacttggcttacaagagaactggaaaaatgatgagatgtggtccccaaacccttgattgactctggggaggggctttgtgaataggattgctctcacattaaagatagttacttcaatttgaaggctggatttagggatttttttttttccttataacaaagacatcaccaggatatgaagcttttgttgaaagttggaaaaaaagtgaaattaaagacattcccagacaaa

SEQ ID NO: 148087 - DNA, 1653 bp, Artificial Sequence
  derived and/or modified sequence
aaagggccggagcgaggccgccgcggcggctagggaggtggggcgaggcgaggtttgctggggtgaggcagcggcgcggccgggccgggccgggccacaggcggtggcggcgggaccatggaggcggcggtcgctgctccgcgtccccggctgctcctcctcgtgctggcggcggcggcggcggcggcggcggcgctgctcccgggggcgacggcgttacagtgtttctgccacctctgtacaaaagacaattttacttgtgtgacagatgggctctgctttgtctctgtcacagagaccacagacaaagttatacacaacagcatgtgtatagctgaaattgacttaattcctcgagataggccgtttgtatgtgcaccctcttcaaaaactgggtctgtgactacaacatattgctgcaatcaggaccattgcaataaaatagaacttccaactactgtaaagtcatcacctggccttggtcctgtggaactggcagctgtcattgctggaccagtgtgcttcgtctgcatctcactcatgttgatggtctatatctgccacaaccgcactgtcattcaccatcgagtgccaaatgaagaggacccttcattagatcgcccttttatttcagagggtactacgttgaaagacttaatttatgatatgacaacgtcaggttctggctcaggtttaccattgcttgttcagagaacaattgcgagaactattgtgttacaagaaagcattggcaaaggtcgatttggagaagtttggagaggaaagtggcggggagaagaagttgctgttaagatattctcctctagagaagaacgttcgtggttccgtgaggcagagatttatcaaactgtaatgttacgtcatgaaaacatcctgggatttatagcagcagacaataaagacaatggtacttggactcagctctggttggtgtcagattatcatgagcatggatccctttttgattacttaaacagatacacagttactgtggaaggaatgataaaacttgctctgtccacggcgagcggtcttgcccatcttcacatggagattgttggtacccaaggaaagccagccattgctccaaaccacagagtgggaacaaaaaggtacatggcccctgaagttctcgatgattccataaatatgaaacattttgaatccttcaaacgtgctgacatctatgcaatgggcttagtattctgggaaattgctcgacgatgttccattggtggaattcatgaagattaccaactgccttattatgatcttgtaccttctgacccatcagttgaagaaatgagaaaagttgtttgtgaacagaagttaaggccaaatatcccaaacagatggcagagctgtgaagccttgagagtaatggctaaaattatgagagaatgttggtatgccaatggagcagctaggcttacagcattgcggattaagaaaacattatcgcaactcagtcaacaggaaggcatcaaaatgtaattctacagctttgcctgaactctccttttttcttcagatctgctcctgggttttaatttgggaggtcaattgttctacctcactgagagggaacagaaggatattgcttccttttgcagcagtgtaataaagtcaatt

SEQ ID NO: 148088 - DNA, 1491 bp, Artificial Sequence
  derived and/or modified sequence
atggaggcggcggtcgctgctccgcgtccccggctgctcctcgcttccacgtcgttacagtgtttctgccacctctgtacaaaagacaattttacttgtgtgacagatgggctctgctttgtctctgtcacagagaccacagacaaagttatacacaacagcatgtgtatagctgaaattgacttaattcctcgagataggccgtttgtatgtgcaccctcttcaaaaactgggtctgtgactacaacatattgctgcaatcaggaccattgcaataaaatagaacttccaactactgtaaagtcatcacctggccttggtcctgtggaactggcagctgtcattgctggaccagtgtgcttcgtctgcatctcactcatgttgatggtctatatctgccacaaccgcactgtcattcaccatcgagtgccaaatgaagaggacccttcattagatcgcccttttatttcagagggtactacgttgaaagacttaatttatgatatgacaacgtcaggttctggctcaggtttaccattgcttgttcagagaacaattgcgagaactattgtgttacaagaaagcattggcaaaggtcgatttggagaagtttggagaggaaagtggcggggagaagaagttgctgttaagatattctcctctagagaagaacgttcgtggttccgtgaggcagagatttatcaaactgtaatgttacgtcatgaaaacatcctgggatttatagcagcagacaataaagacaatggtacttggactcagctctggttggtgtcagattatcatgagcatggatccctttttgattacttaaacagatacacagttactgtggaaggaatgataaaacttgctctgtccacggcgagcggtcttgcccatcttcacatggagattgttggtacccaaggaaagccagccattgctccaaaccacagagtgggaacaaaaaggtacatggcccctgaagttctcgatgattccataaatatgaaacattttgaatccttcaaacgtgctgacatctatgcaatgggcttagtattctgggaaattgctcgacgatgttccattggtggaattcatgaagattaccaactgccttattatgatcttgtaccttctgacccatcagttgaagaaatgagaaaagttgtttgtgaacagaagttaaggccaaatatcccaaacagatggcagagctgtgaagccttgagagtaatggctaaaattatgagagaatgttggtatgccaatggagcagctaggcttacagcattgcggattaagaaaacattatcgcaactcagtcaacaggaaggcatcaaaatgtaattctacagctttgcctgaactctccttttttcttcagatctgctcctgggttttaatttgggaggtcaattgttctacctcactgagagggaacagaaggatattgcttccttttgcagcagtgtaataaagtcaatt

SEQ ID NO: 148089 - DNA, 1538 bp, Artificial Sequence
  derived and/or modified sequence
agattgacagaaatgactaatacaggtatctggcctcaaggagtttacagtttcataggagaaagaaaaacaaaactagcaattctgcgttacagtgtttctgccacctctgtacaaaagacaattttacttgtgtgacagatgggctctgctttgtctctgtcacagagaccacagacaaagttatacacaacagcatgtgtatagctgaaattgacttaattcctcgagataggccgtttgtatgtgcaccctcttcaaaaactgggtctgtgactacaacatattgctgcaatcaggaccattgcaataaaatagaacttccaactactgtaaagtcatcacctggccttggtcctgtggaactggcagctgtcattgctggaccagtgtgcttcgtctgcatctcactcatgttgatggtctatatctgccacaaccgcactgtcattcaccatcgagtgccaaatgaagaggacccttcattagatcgcccttttatttcagagggtactacgttgaaagacttaatttatgatatgacaacgtcaggttctggctcaggtttaccattgcttgttcagagaacaattgcgagaactattgtgttacaagaaagcattggcaaaggtcgatttggagaagtttggagaggaaagtggcggggagaagaagttgctgttaagatattctcctctagagaagaacgttcgtggttccgtgaggcagagatttatcaaactgtaatgttacgtcatgaaaacatcctgggatttatagcagcagacaataaagacaatggtacttggactcagctctggttggtgtcagattatcatgagcatggatccctttttgattacttaaacagatacacagttactgtggaaggaatgataaaacttgctctgtccacggcgagcggtcttgcccatcttcacatggagattgttggtacccaaggaaagccagccattgctcatagagatttgaaatcaaagaatatcttggtaaagaagaatggaacttgctgtattgcagacttaggactggcagtaagacatgattcagccacagataccattgatattgctccaaaccacagagtgggaacaaaaaggtacatggcccctgaagttctcgatgattccataaatatgaaacattttgaatccttcaaacgtgctgacatctatgcaatgggcttagtattctgggaaattgctcgacgatgttccattggtggaattcatgaagattaccaactgccttattatgatcttgtaccttctgacccatcagttgaagaaatgagaaaagttgtttgtgaacagaagttaaggccaaatatcccaaacagatggcagagctgtgaagccttgagagtaatggctaaaattatgagagaatgttggtatgccaatggagcagctaggcttacagcattgcggattaagaaaacattatcgcaactcagtcaacaggaaggcatcaaaatgtaattctacagctttgcctgaactctccttttttcttca

SEQ ID NO: 148090 - protein, 307 aa, Artificial Sequence
  derived and/or modified sequence
MRPGLFKGQAPGSRRRPTAGLAVVRADSHKKEPRASGSARPAMLLWPLRGWAARALRCFGPGSRGSPASGPGPRRVQRRAWPPDKEQEKEKKSVICVEGNIASGKTTCLEFFSNATDVEVLTEPVSKWRNVRGHNPLGLMYHDASRWGLTLQTYVQLTMLDRHTRPQVSSVRLMERSIHSARYIFVENLYRSGKMPEVDYVVLSEWFDWILRNMDVSVDLIVYLRTNPETCYQRLKKRCREEEKVIPLEYLEAIHHLHEEWLIKGSLFPMAAPVLVIEADHHMERMLELFEQNRDRILTPENRKHCP

SEQ ID NO: 148091 - protein, 265 aa, Artificial Sequence
  derived and/or modified sequence
MLLWPLRGWAARALRCFGPGSRGSPASGPGPRRVQRRAWPPDKEQEKEKKSVICVEGNIASGKTTCLEFFSNATDVEVLTEPVSKWRNVRGHNPLGLMYHDASRWGLTLQTYVQLTMLDRHTRPQVSSVRLMERSIHSARYIFVENLYRSGKMPEVDYVVLSEWFDWILRNMDVSVDLIVYLRTNPETCYQRLKKRCREEEKVIPLEYLEAIHHLHEEWLIKGSLFPMAAPVLVIEADHHMERMLELFEQNRDRILTPENRKHCP

SEQ ID NO: 148092 - DNA, 924 bp, Artificial Sequence
  derived and/or modified sequence
atgagacccggcctgttcaagggccaggcccccggcagcagaagaagacccaccgccggcctggccgtggtgagagccgacagccacaagaaggagcccagagccagcggcagcgccagacccgccatgctgctgtggcccctgagaggctgggccgccagagccctgagatgcttcggccccggcagcagaggcagccccgccagcggccccggccccagaagagtgcagagaagagcctggccccccgacaaggagcaggagaaggagaagaagagcgtgatctgcgtggagggcaacatcgccagcggcaagaccacctgcctggagttcttcagcaacgccaccgacgtggaggtgctgaccgagcccgtgagcaagtggagaaacgtgagaggccacaaccccctgggcctgatgtaccacgacgccagcagatggggcctgaccctgcagacctacgtgcagctgaccatgctggacagacacaccagaccccaggtgagcagcgtgagactgatggagagaagcatccacagcgccagatacatcttcgtggagaacctgtacagaagcggcaagatgcccgaggtggactacgtggtgctgagcgagtggttcgactggatcctgagaaacatggacgtgagcgtggacctgatcgtgtacctgagaaccaaccccgagacctgctaccagagactgaagaagagatgcagagaggaggagaaggtgatccccctggagtacctggaggccatccaccacctgcacgaggagtggctgatcaagggcagcctgttccccatggccgcccccgtgctggtgatcgaggccgaccaccacatggagagaatgctggagctgttcgagcagaacagagacagaatcctgacccccgagaacagaaagcactgcccctag

SEQ ID NO: 148093 - DNA, 798 bp, Artificial Sequence
  derived and/or modified sequence
atgctgctgtggcccctgagaggctgggccgccagagccctgagatgcttcggccccggcagcagaggcagccccgccagcggccccggccccagaagagtgcagagaagagcctggccccccgacaaggagcaggagaaggagaagaagagcgtgatctgcgtggagggcaacatcgccagcggcaagaccacctgcctggagttcttcagcaacgccaccgacgtggaggtgctgaccgagcccgtgagcaagtggagaaacgtgagaggccacaaccccctgggcctgatgtaccacgacgccagcagatggggcctgaccctgcagacctacgtgcagctgaccatgctggacagacacaccagaccccaggtgagcagcgtgagactgatggagagaagcatccacagcgccagatacatcttcgtggagaacctgtacagaagcggcaagatgcccgaggtggactacgtggtgctgagcgagtggttcgactggatcctgagaaacatggacgtgagcgtggacctgatcgtgtacctgagaaccaaccccgagacctgctaccagagactgaagaagagatgcagagaggaggagaaggtgatccccctggagtacctggaggccatccaccacctgcacgaggagtggctgatcaagggcagcctgttccccatggccgcccccgtgctggtgatcgaggccgaccaccacatggagagaatgctggagctgttcgagcagaacagagacagaatcctgacccccgagaacagaaagcactgcccctag

SEQ ID NO: 148094 - DNA, 924 bp, Artificial Sequence
  derived and/or modified sequence
atgagacccggactttttaagggccaagctcctggctcccggcgccgcccaactgcaggccttgccgtggttcgggcagatagtcacaagaaggaaccgcgagctagcgggtcagcccggcccgccatgctgttgtggccgctgcgtgggtgggctgcccgggctctgcgatgctttggccccggatctcgcggcagcccagcatctggccccggccctcgccgggtgcagcggcgtgcctggcctcctgacaaagagcaggagaaagaaaaaaaaagcgttatctgcgtggagggaaacatagcctctggtaaaaccacttgtctggagttcttctccaacgctactgacgttgaagtgctgacagagcccgtgagcaaatggcggaatgtgagggggcacaatccattgggtctgatgtatcacgatgcaagtagatggggactgactctccagacatatgtgcagcttaccatgctggacagacatactaggccccaggtgtcttccgtgcggcttatggagaggtccatccatagcgctagatacatctttgttgaaaatttgtaccgatccgggaagatgcctgaggtggactacgtggtactcagtgagtggttcgattggatactccgaaacatggacgtttccgttgatttaatagtttacctgcgcaccaacccagagacctgttatcaaaggctgaaaaagcggtgccgcgaagaagagaaggtgatccccctggaatacctagaggctattcatcatctccatgaagaatggttaatcaagggctccctgtttcccatggccgccccggtgctcgtgattgaagcagaccatcacatggagcgtatgctggagttgttcgagcagaaccgcgatcgtatcctcacacccgaaaaccgcaagcattgtccatag

SEQ ID NO: 148095 - DNA, 798 bp, Artificial Sequence
  derived and/or modified sequence
atgttactttggcccttacgtggttgggctgcgcgggctttgagatgcttcggacccggcagtcgcggcagccctgcatcagggccgggccccaggagggtccagagaagggcatggccccctgacaaggagcaggaaaaggaaaaaaaaagcgtgatttgcgtcgagggcaatatcgccagtggcaaaaccacgtgcctggaatttttttccaatgcgacagatgtggaggtgttgacagaacctgtgtctaagtggaggaacgtccgggggcacaatccccttggcctcatgtaccacgacgcatcacggtggggcctcacactgcaaacttacgtgcagctgaccatgctggacaggcacacacgaccacaggtgtctagcgttcggttgatggagcgcagtattcacagcgcccgctatatctttgtggagaatctgtacagaagtggtaaaatgcccgaagtcgattacgttgtcctaagcgagtggttcgactggatattgaggaacatggatgtctctgtcgacttgatcgtctatttgcggaccaatccagagacatgttaccagcgcttaaagaaacgatgcagggaagaggagaaggtgattccactggaatatttagaggctattcatcaccttcacgaggaatggctaattaaaggaagcttgtttcccatggccgcccccgtcttggtcattgaggccgatcaccacatggagagaatgctggagcttttcgaacagaacagggatcgtattctgacgccagagaacagaaagcactgtccctag

SEQ ID NO: 148096 - DNA, 924 bp, Artificial Sequence
  derived and/or modified sequence
atgaggcctggcctcttcaagggccaggcccctggcagcagaagaagacccacagctggcctggccgtggtgcgggctgacagccacaagaaggagccccgggccagcggcagcgcccggcctgccatgctgctgtggcccctgcggggctgggccgcccgggccctgcgctgctttggacctggcagccggggcagccctgccagcggccctggcccccggcgggtgcagaggcgggcctggcccccagacaaggagcaggagaaggagaagaagagcgtcatctgtgtggagggcaacatcgccagcggcaagaccacctgcctggagttcttcagcaatgccacagatgtggaggtgctgacagagcctgtgtccaagtggagaaatgtgcggggccacaaccccctgggcctgatgtaccatgatgccagccgctggggcctgaccctgcagacctacgtgcagctgaccatgctggacagacacacccggccccaggtgtcctctgtgcggctgatggagaggagcatccacagcgcccgctacatctttgtggagaacctgtaccgcagcggcaagatgcctgaggtggactatgtggtgctgtctgagtggtttgactggatcctgaggaacatggatgtgtctgtggacctgattgtgtacctgcggaccaaccctgagacctgctaccagaggctgaagaagcgctgccgggaggaggagaaggtgatccccctggagtacctggaggccatccaccacctgcacgaggagtggctgatcaagggcagcctcttccccatggccgcccctgtgctggtgattgaagctgaccaccacatggagaggatgctggagctgtttgagcagaacagagaccgcatcctgaccccagaaaataggaagcactgcccctag

SEQ ID NO: 148097 - DNA, 798 bp, Artificial Sequence
  derived and/or modified sequence
atgctgctgtggcccctgcggggctgggccgcccgggccctgcgctgctttggacctggcagccggggcagccctgccagcggccctggcccccggcgggtgcagaggcgggcctggcccccagacaaggagcaggagaaggagaagaagagcgtcatctgtgtggagggcaacatcgccagcggcaagaccacctgcctggagttcttcagcaatgccacagatgtggaggtgctgacagagcctgtgtccaagtggagaaatgtgcggggccacaaccccctgggcctgatgtaccatgatgccagccgctggggcctgaccctgcagacctacgtgcagctgaccatgctggacagacacacccggccccaggtgtcctctgtgcggctgatggagaggagcatccacagcgcccgctacatctttgtggagaacctgtaccgcagcggcaagatgcctgaggtggactatgtggtgctgtctgagtggtttgactggatcctgaggaacatggatgtgtctgtggacctgattgtgtacctgcggaccaaccctgagacctgctaccagaggctgaagaagcgctgccgggaggaggagaaggtgatccccctggagtacctggaggccatccaccacctgcacgaggagtggctgatcaagggcagcctcttccccatggccgcccctgtgctggtgattgaagctgaccaccacatggagaggatgctggagctgtttgagcagaacagagaccgcatcctgaccccagaaaataggaagcactgcccctag

SEQ ID NO: 148098 - DNA, 924 bp, Artificial Sequence
  derived and/or modified sequence
atgcggcccggcctgttcaagggccaggcccccggcagccggcggaggcctactgcagggctcgccgtcgtccgggctgacagccataaaaaggagccgcgggcctccggttccgcgagacctgctatgcttctgtggcctctacgtgggtgggccgctagggcactgcgatgctttgggccaggttccagaggctctccggcctccggacccgggcctcgacgtgtccagcggcgcgcatggcctcctgacaaagaacaagaaaaagaaaaaaagagtgtgatttgcgtcgagggcaacattgcttccggcaagaccacatgtttggaatttttttccaatgcgacagacgtcgaagttcttactgaaccagtgagcaagtggaggaatgtgcgaggacacaatcccctggggctgatgtatcacgatgcatctcggtggggcctgactctgcagacatatgtgcagcttacaatgctcgaccggcacacccgtccccaggtgtcctccgtgaggcttatggaacggagtatccactctgcccgctacatattcgtggaaaacttgtatagatccggcaagatgccagaagtcgactacgtggtattgagcgaatggtttgactggatactgcggaacatggatgtttctgtggatttgatcgtctacctgcggaccaaccccgagacctgctaccaacgcttgaagaaaaggtgtagagaggaagagaaagtgataccattggagtacctagaggccattcatcacctgcatgaagaatggttgattaaaggaagtctgttcccaatggccgctccggtgttggttatcgaggctgaccatcacatggaacggatgctggaactttttgagcagaaccgtgatcgcatactaacaccagaaaacaggaagcattgtccatag

SEQ ID NO: 148099 - DNA, 798 bp, Artificial Sequence
  derived and/or modified sequence
atgctgctgtggcccctgcggggctgggccgcccgggccctgcggtgttttgggccagggtcacgtgggtccccagcctcaggcccagggccgaggagggtacaacgtcgggcgtggccccctgacaaagagcaggaaaaagagaagaaatccgtgatctgcgtggagggtaatatcgcaagcgggaagaccacatgcctggaattcttttctaacgccactgacgtggaggttttgactgaaccggtgtccaagtggcggaatgtgaggggtcataatccactgggactcatgtaccatgacgcctctcggtgggggctgaccctgcaaacttacgtgcaacttaccatgttggaccggcatacacggcctcaggtatcctcagttaggttaatggaacggagcatccattctgccagatacatatttgtcgagaatctgtatagaagcgggaagatgccagaggtcgactatgtcgtgttgagtgagtggtttgactggatattaagaaacatggatgtttctgtagatctgattgtgtatttgaggacgaaccctgaaacctgctaccagagattgaagaaacgttgccgcgaggaggagaaagtaattcctttagaatatctggaagctatccatcatctacatgaagaatggcttatcaaaggaagtctcttccctatggctgcacctgttctcgtcattgaagcggaccatcacatggagagaatgttagagttgttcgagcagaaccgcgaccggatcctgacccctgagaatcgtaaacactgtccgtag

SEQ ID NO: 148100 - DNA, 924 bp, Artificial Sequence
  derived and/or modified sequence
atgagacctggcctgtttaaaggccaagccccaggatcacggaggcgccctacagctggactcgctgtggtccgcgctgacagccataaaaaagaacccagggcatcaggctcggcccgaccggctatgctgctctggcctctgcggggatgggccgcacgggctctccgatgttttgggcctggctctagaggttcacctgcaagcggacctggccctcgaagagttcaacggcgtgcctggccaccagacaaggaacaggagaaggaaaagaagtctgtgatatgtgtggagggcaacatagcttctggcaaaaccacttgtctggagtttttctctaacgccactgacgtggaagttcttactgaacccgtaagcaaatggagaaatgtgcggggtcataatccactggggttaatgtaccacgacgcttcccgttgggggctcaccctgcaaacttatgtccagctgaccatgctcgacaggcatactaggccccaggtgagcagtgtgcggctgatggaacgaagcatccattcagcccgttatatattcgtcgagaatctgtatcggtccgggaaaatgccagaagtggactatgtcgtgctaagcgaatggttcgactggatcctgcgtaatatggatgtatccgtggacctgatcgtgtaccttcggaccaatccagagacgtgctaccagaggttaaagaagaggtgcagggaagaagagaaagtgatccctttggaatatctcgaggccatccatcatctccacgaagagtggcttatcaaggggtcactattccccatggccgcacccgtgctcgtaatagaggctgaccaccacatggaaagaatgcttgagcttttcgagcagaatagagaccggatactaacccctgagaacaggaaacactgtccatag

SEQ ID NO: 148101 - DNA, 798 bp, Artificial Sequence
  derived and/or modified sequence
atgttactgtggcccttgaggggttgggccgctcgggctctgcggtgcttcggaccaggctcccggggaagcccagcctccggacccggtccacgcagagtgcagagaagagcatggccaccagacaaggaacaggagaaggaaaagaaatcagtcatttgtgtggaaggaaacattgcatccggaaagaccacatgcctggagttcttcagcaacgctacagatgtggaggtgctcaccgagccagtgtccaagtggagaaatgttcggggacataacccactgggactaatgtaccacgacgcttcccggtggggattgactctgcagacatatgtgcagctgactatgctggaccgtcatacccgaccccaggtgtcatctgtgagattaatggagaggtcaatccattccgcccgttacatctttgtggaaaatctttaccgcagcgggaaaatgcccgaggtggactacgtggtattgtcagagtggtttgactggatcctcagaaacatggatgtttccgtagatctcattgtgtacttgcgtacaaatcccgaaacatgttaccagcgactcaagaaacgatgcagagaggaggagaaagtcattcctctcgaatacctggaggctattcaccacttacatgaagaatggctgataaagggaagtctatttcctatggcagctcctgtgctggtgatcgaggccgatcaccacatggaacggatgctcgaactgtttgaacagaatagggatcggatcctcactcctgagaaccgcaagcactgtccatag

SEQ ID NO: 148102 - DNA, 5114 bp, Artificial Sequence
  derived and/or modified sequence
ggaataagtgacatcatgagtgtgtgccaggtgtctgattacagaaggtgttcaattaatctgcaatcattaattaacccttcagtcgctggtattatttgccatccatcctccgagtgttgccaagttatgggtgcgttctgccagcgtcctagcagtggtaaggcttctggctgccagcggcgaacctctcccttcgagtatttctcctcttgctgagatgaaatgcgaccgggtctctttaagggccaggcgccgggatccaggcggcgcccaacggctggactagcagtcgtccgcgccgactcgcacaagaaggaaccccgggcctctggatccgctcgcccggctatgctgctgtggccgctgcggggctgggccgcccgggcgctgcgctgctttgggccgggaagtcgcgggagcccggcctcaggccccgggccgcggagggtgcagcgccgggcctggcctcccgataaagaacaggaaaaagagaaaaaatcagtgatctgtgtcgagggcaatattgcaagtgggaagacgacatgcctggaattcttctccaacgcgacagacgtcgaggtgttaacggagcctgtgtccaagtggagaaatgtccgtggccacaatcctctgggcctgatgtaccacgatgcctctcgctggggtcttacgctacagacttatgtgcagctcaccatgctggacaggcatactcgtcctcaggtgtcatctgtacggttgatggagaggtcgattcacagcgcaagatacatttttgtagaaaacctgtatagaagtgggaagatgccagaagtggactatgtagttctgtcggaatggtttgactggatcttgaggaacatggacgtgtctgttgatttgatagtttaccttcggaccaatcctgagacttgttaccagaggttaaagaagagatgcagggaagaggagaaggtcattccgctggaatacctggaagcaattcaccatctccatgaggagtggctcatcaaaggcagccttttccccatggcagcccctgttctggtgattgaggctgaccaccacatggagaggatgttagaactctttgaacaaaatcgggatcgaatattaactccagagaatcggaagcattgcccataggaggcaaaaggtctatggctcatgtctgaaaaatgcctgctgctgccaagttagctattgggagcaatctggaaaaacttgctcccaggagggctttgtgtctggccagcttgattttcctaatggtctcatctcctttgctagtgtctttgtcatgcgtctctggccctcgtgggtaaatgacaaacgggaccaatgggtttgccaagccctttgctgttcgcagcctcacattcccccggtgcctctcccatggctttgtgctgctgagtcgctctcatgaagcccttagggagagcacctgttgtgtgcctgacaccacgctggagctgtgtaccaatcgtctcagccttcattaggaggccgaggtaggagtcttatatcccaggtgaggaatttgaagctcagaaaggttgaggggctccccagaggtcacacagcctgtgtgcagtggagctggcaccattcagactttcagccgactcagcaactttcccttgccctgggctgcctcctcctgagagctgttccccaccgccctgcctcttccggttggaggctctcatgtctctttggggagagctggcagtgtgcggagctgataacattttcccaatattgagcagttcccaaggacagtcagcatttctagacttccacaaaattatgctgcatttggctggagcccggtgttcagtggtttccctgcccgaggtcgctgcagccccatctaccacatcttcatgtggacattgagattcacatgctggctcctgaagggtgctcagtctccttggtgattaaggtcctgcttgaactgctgccaactccatgtcagggaagtcgcttttggtgcctggctggtttgcccagagccaagctggggcaaggggcagccagccctggcttccaaggctcccgtactgtctgtgtccttgtataaggagctttgctcttggaattactgaaagtctgtggcccaagagagagacacaagtggccttaagtctttttgaagtgttatttcatccagggaaatgcctcgagccatagagcctgaaatcatctttgttggctcagaaaataccttagcttcactcagctggactgcattgaaggcgaggctgccccttggatcaagcagaaaacaagagaaagaaagaacgttccctttggggatagtctggaaagttgggatttgcaaataaaggctctggaagcattgctggtcctgaagctttggaggtgggcagagagagcttcaagaagactagatgcaaaccctggaaaggattaaggctcaactctggagaaacaggccacagcctctcagagcagctgttggctgtaaatagaggtagcaaggccgctcccaggcccctgtgagtgtgggcacctgtgcatgcaatgctccgactctgcagaggtgccaagtgcccctgctgggccagtcccagagagttaggaagtcaaggcctgcaactcctggttcttcctgtttggaccagttcttgtgccattggcaggatgagaggcagcagccaggcgggagctgtgtctagcagcacctgtagcccacgtgctgctaattagctggaaaactggcgaaggcagaacctttgctaccaggaatcttgacatgtggggtctgtctttgagaatttgtaaatgaacagtccaatatttcctctcggctcattttgcacatccatttttggggaaatgtgatttctctctctttttttttttttttttttgcctaaggcacaatctcaagaggtcctgagaccacgtacccatgatttttttcttgctctgtgatacccaataactccttcacctaagccctgttgttgattttgaagtgcttcctaggccagtgattttagcttctgccagctgcttttgccagtagattaacgtgtttttatttttcaaactccgtgtttcctaacgtggagtgtatgggtctaagagagcctgctgtcctccctgccttccaccttggagaggaggctggacgcatcagcagtggccagggcaggtcgcaaaatctcccagcctagagaccacacctgaaacggctgaagccagcttgcacaagggctgctgtccctctgcggcaggcagagctggtgggggcaggggtcacagagcagtcatagacaccatggaccagggcaggagaagggcagatggcacatgggcacaacagggccttgtccttagagcactggggggtcatggctgggaggggcatggcaggggctggcatccctgtagagccagaggggccacccagggcagtgacattccagatatgttgggctcacctcatccttgctgtgagactggagttccatggggacatgaagtcagtacaccgcagagctgctcagctgctctacctctcgctgacttttttgttgcacatatacattttctttcaattagcatttatttcagcttttatttaagctttttgacagtacatgtaaaatatatgattataaccatttaaaaataccttatgtacctggttttttttggaaactagatagaaatatatttatcttttacataaaagaagtgtgtagtggggtggtccagggctttgtggtggcttagtggccatcggggtcccaggctcttcccacctttctcttttgggtccacctcttggctcctggcttccttcctctggggcctgactgtccaggatggcagctggagctcctgctctgggcacggttggcatcagagcccactgctccccatccactctttaatccagatgctggtaatgtccctttccaaggcataactaagataagctggaaggttcttacgaggctttgctagaggccctgggaggtggggggaaaggcaagagggcagtgcccacccatagaccgggtcacatgacctggcatcagcgccgtggggtcctttgggcttcacctccctctcccctctgcccccacgtcatcccaccctcatcctcaccctcaccattcccatcccgtaccgtaatgtcccttgcaaggcctaactctgtgaggaatgaaaccacctcatccttgttccaataacatgagtgaccgaatttacaaacgagtgaatgtggacctctggaaacattacccagcttgtttttacttttcactttctctttctgcccctttcatttccgtaggagccctttacctagatgagaagtgtccccccgcctggggaatatatcagtcagaacaatcttcctgcagacatgcaccattagacccgagtgacggtggtgccatttaaacctcagagcaggtaaaaggtggtcctgaaacctgtctacccacagggtgctatggaatctgaatcacttcttttttcctagagccctggggtggggagctccctcaagtgttcacatgtgtgtggaatgaggaacacccatctccttggccctctccaccctgaagagttagttattaaaataattggcaagctcttgcaaatgtcagtcatccattgttcagaatggaatagcaataatacatccctggctgccctgggcttggccaggattactcactgaaggcctcagggttactggcacacactttcttttcctaataatcccatcccctcagctttcctaaggctagagtgaatttcgtgttcctttagtttacataagatggtgaacttggcaaaagctatcattaaacagaagctaagagaaagcctatgtcgtggaatccagaatgggtattgccattcactgctgtccacagaagctgtcttgaatttctttctgtgtcttttctttttttttctttaagactgttgtttaccagactgggctctgtggaacacaggtgtcctgggagatggttaatcattacaaaatattggtaacaatctaaagatgcatacataagagagtggtcaaataaaccattttccattca

SEQ ID NO: 148103 - DNA, 3738 bp, Artificial Sequence
  derived and/or modified sequence
ggaataagtgacatcatgagtgtgtgccaggtgtctgattacagaaggtgttcaattaatctgcaatcattaattaacccttcagtcgctggtattatttgccatccatcctccgagtgttgccaagttatgggtgcgttctgccagcgtcctagcagtggtaaggcttctggctgccagcggcgaacctctcccttcgagtatttctcctcttgctgagatgaaatgcgaccgggtctctttaagggccaggcgccgggatccaggcggcgcccaacggctggactagcagtcgtccgcgccgactcgcacaagaaggaaccccgggcctctggatccgctcgcccggctatgctgctgtggccgctgcggggctgggccgcccgggcgctgcgctgctttgggccgggaagtcgcgggagcccggcctcaggccccgggccgcggagggtgcagcgccgggcctggcctcccgataaagaacaggaaaaagagaaaaaatcagtgatctgtgtcgagggcaatattgcaagtgggaagacgacatgcctggaattcttctccaacgcgacagacgtcgaggtgttaacggagcctgtgtccaagtggagaaatgtccgtggccacaatcctctgggcctgatgtaccacgatgcctctcgctggggtcttacgctacagacttatgtgcagctcaccatgctggacaggcatactcgtcctcaggtgtcatctgtacggttgatggagaggtcgattcacagcgcaagatacatttttgtagaaaacctgtatagaagtgggaagatgccagaagtggactatgtagttctgtcggaatggtttgactggatcttgaggaacatggacgtgtctgttgatttgatagtttaccttcggaccaatcctgagacttgttaccagaggttaaagaagagatgcagggaagaggagaaggtcattccgctggaatacctggaagcaattcaccatctccatgaggagtggctcatcaaaggcagccttttccccatggcagcccctgttctggtgattgaggctgaccaccacatggagaggatgttagaactctttgaacaaaatcgggatcgaatattaactccagagaatcggaagcattgcccataggaggcaaaaggtctatggctcatgtctgaaaaatgcctgctgctgccaagttagctattgggagcaatctggaaaaacttgctcccaggagggctttgtgtctggccagcttgattttcctaatggtctcatctcctttgctagtgtctttgtcatgcgtctctggccctcgtgggtaaatgacaaacgggaccaatgggtttgccaagccctttgctgttcgcagcctcacattcccccggtgcctctcccatggctttgtgctgctgagtcgctctcatgaagcccttagggagagcacctgttgtgtgcctgacaccacgctggagctgtgtaccaatcgtctcagccttcattaggaggccgaggtaggagtcttatatcccaggtgaggaatttgaagctcagaaaggttgaggggctccccagaggtcacacagcctgtgtgcagtggagctggcaccattcagactttcagccgactcagcaactttcccttgccctgggctgcctcctcctgagagctgttccccaccgccctgcctcttccggttggaggctctcatgtctctttggggagagctggcagtgtgcggagctgataacattttcccaatattgagcagttcccaaggacagtcagcatttctagacttccacaaaattatgctgcatttggctggagcccggtgttcagtggtttccctgcccgaggtcgctgcagccccatctaccacatcttcatgtggacattgagattcacatgctggctcctgaagggtgctcagtctccttggtgattaaggtcctgcttgaactgctgccaactccatgtcagggaagtcgcttttggtgcctggctggtttgcccagagccaagctggggcaaggggcagccagccctggcttccaaggctcccgtactgtctgtgtccttgtataaggagctttgctcttggaattactgaaagtctgtggcccaagagagagacacaagtggccttaagtctttttgaagtgttatttcatccagggaaatgcctcgagccatagagcctgaaatcatctttgttggctcagaaaataccttagcttcactcagctggactgcattgaaggcgaggctgccccttggatcaagcagaaaacaagagaaagaaagaacgttccctttggggatagtctggaaagttgggatttgcaaataaaggctctggaagcattgctggtcctgaagctttggaggtgggcagagagagcttcaagaagactagatgcaaaccctggaaaggattaaggctcaactctggagaaacaggccacagcctctcagagcagctgttggctgtaaatagaggtagcaaggccgctcccaggcccctgtgagtgtgggcacctgtgcatgcaatgctccgactctgcagaggtgccaagtgcccctgctgggccagtcccagagagttaggaagtcaaggcctgcaactcctggttcttcctgtttggaccagttcttgtgccattggcaggatgagaggcagcagccaggcgggagctgtgtctagcagcacctgtagcccacgtgctgctaattagctggaaaactggcgaaggcagaacctttgctaccaggaatcttgacatgtggggtctgtctttgagaatttgtaaatgaacagtccaatatttcctctcggctcattttgcacatccatttttggggaaatgtgatttctctctctttttttttttttttttttgcctaaggcacaatctcaagaggtcctgagaccacgtacccatgatttttttcttgctctgtgatacccaataactccttcacctaagccctgttgttgattttgaagtgcttcctaggccagtgattttagcttctgccagctgcttttgccagtagattaacgtgtttttatttttcaaactccgtgtttcctaacgtggagtgtatgggtctaagagagcctgctgtcctccctgccttccaccttggagaggaggctggacgcatcagcagtggccagggcaggtcgcaaaatctcccagcctagagaccacacctgaaacggctgaagccagcttgcacaagggctgctgtccctctgcggcaggcagagctggtgggggcaggggtcacagagcagtcatagacaccatggaccagggcaggagaagggcagatggcacatgggcacaacagggccttgtccttagagcactggggggtcatggctgggaggggcatggcaggggctggcatccctgtagagccagaggggccacccagggcagtgacattccagatatgttgggctcacctcatccttgctgtgagactggagttccatggggacatgaagtcagtacaccgcagagctgctcagctgctctacctctcgctgacttttttgttgcacatatacattttctttcaattagcatttatttcagcttttatttaagctttttgacagtacatgtaaaatatatgattataaccatttaaaaataccttatgtacctggttttttttggaaactagatagaaatatatttatcttttacataaaagaa

SEQ ID NO: 148104 - protein, 279 aa, Artificial Sequence
  derived and/or modified sequence
MGRVFLTGEKANSILKRYPRANGFFEEIRQGNIERECKEEFCTFEEAREAFENNEKTITGVILLAVGVWGKLTLGTYISLIAENSTNAPYVLIGTGTTIVVFGLFGCFATCRGSPWMLKLYAMFLSLVFLAELVAGISGFVFRHEIKDTFLRTYTDAMQTYNGNDERSRAVDHVQRSLSCCGVQNYTNWSTSPYFLEHGIPPSCCMNETDCNPQDLHNLTVAATKVNQKGCYDLVTSFMETNMGIIAGVAFGIAFSQLIGMLLACCLSRFITANQYEMV

SEQ ID NO: 148105 - protein, 266 aa, Artificial Sequence
  derived and/or modified sequence
MASRRMETKPVITCLKTLLIIYSFVFWKEKAAGFCGRQDVAMALITGVILLAVGVWGKLTLGTYISLIAENSTNAPYVLIGTGTTIVVFGLFGCFATCRGSPWMLKLYAMFLSLVFLAELVAGISGFVFRHEIKDTFLRTYTDAMQTYNGNDERSRAVDHVQRSLSCCGVQNYTNWSTSPYFLEHGIPPSCCMNETDCNPQDLHNLTVAATKVNQKGCYDLVTSFMETNMGIIAGVAFGIAFSQLIGMLLACCLSRFITANQYEMV

SEQ ID NO: 148106 - protein, 249 aa, Artificial Sequence
  derived and/or modified sequence
MASRRMETKPVITCLKTLLIIYSFVFWITGVILLAVGVWGKLTLGTYISLIAENSTNAPYVLIGTGTTIVVFGLFGCFATCRGSPWMLKLYAMFLSLVFLAELVAGISGFVFRHEIKDTFLRTYTDAMQTYNGNDERSRAVDHVQRSLSCCGVQNYTNWSTSPYFLEHGIPPSCCMNETDCNPQDLHNLTVAATKVNQKGCYDLVTSFMETNMGIIAGVAFGIAFSQLIGMLLACCLSRFITANQYEMV

SEQ ID NO: 148107 - protein, 275 aa, Artificial Sequence
  derived and/or modified sequence
MANRTVCNGQGRSRDLLRIKNIPNAPGHFLIAGVGGSSSQGRSIEEEGKTHLGITGVILLAVGVWGKLTLGTYISLIAENSTNAPYVLIGTGTTIVVFGLFGCFATCRGSPWMLKLYAMFLSLVFLAELVAGISGFVFRHEIKDTFLRTYTDAMQTYNGNDERSRAVDHVQRSLSCCGVQNYTNWSTSPYFLEHGIPPSCCMNETDCNPQDLHNLTVAATKVNQKGCYDLVTSFMETNMGIIAGVAFGIAFSQLIGMLLACCLSRFITANQYEMV

SEQ ID NO: 148108 - protein, 223 aa, Artificial Sequence
  derived and/or modified sequence
MITGVILLAVGVWGKLTLGTYISLIAENSTNAPYVLIGTGTTIVVFGLFGCFATCRGSPWMLKLYAMFLSLVFLAELVAGISGFVFRHEIKDTFLRTYTDAMQTYNGNDERSRAVDHVQRSLSCCGVQNYTNWSTSPYFLEHGIPPSCCMNETDCNPQDLHNLTVAATKVNQKGCYDLVTSFMETNMGIIAGVAFGIAFSQLIGMLLACCLSRFITANQYEMV

SEQ ID NO: 148109 - DNA, 840 bp, Artificial Sequence
  derived and/or modified sequence
atggggcgagtgttcctgactggagagaaggccaattcaattctgaagaggtaccctagggcaaacggcttcttcgaagaaatccggcaagggaatatagagcgggaatgcaaagaagagttttgtactttcgaggaagcccgagaggccttcgagaacaacgaaaagacaatcactggagtgatcctgctcgccgtcggcgtgtggggaaaattaactctcgggacctatatatcattaattgcagagaactctaccaacgctccatacgtcctgatcgggacagggaccacgatcgtggtgtttggcctattcggatgctttgccacctgccgcggatccccatggatgctgaagctgtatgctatgtttctctcacttgtcttcctggcagagctcgtggctgggatatctggattcgttttccgccacgaaattaaggacacattcttgcgaacctatacggacgcaatgcagacttacaacggcaacgatgagcggtctagggctgttgatcatgttcaaagaagcctcagctgctgtggggtgcagaattacactaactggtcaacctccccatacttcttagagcacggtataccccctagctgctgtatgaatgagacagattgcaacccccaggacttgcataatctgaccgtggcagcaacgaaagtgaaccagaagggatgctacgacctggtgaccagtttcatggagactaatatgggaattattgccggtgtcgcattcgggatcgctttcagccaactgattggcatgctgctggcctgttgtttatcccggtttatcaccgctaaccagtacgagatggtgtag

SEQ ID NO: 148110 - DNA, 840 bp, Artificial Sequence
  derived and/or modified sequence
atgggcagggtcttcttaactggagagaaggccaatagtatcctgaaacggtatccacgagccaacgggtttttcgaggagatcaggcagggcaacattgaaagggaatgcaaggaggaattttgcactttcgaggaggcgcgagaagccttcgagaataacgaaaagacgattacaggagtgattctactggcagtcggtgtgtgggggaaactgacgctgggcacctacataagccttatcgctgaaaattctactaatgccccatacgtgttaattggaaccggaaccacaatagttgtcttcggactcttcggctgttttgcaacatgtcggggcagtccttggatgttgaagctgtacgccatgtttctatcgctcgttttcttagccgaacttgttgcaggtattagcggatttgtattccggcacgaaattaaggatacttttctgagaacatacacagatgccatgcagacatataatggaaacgatgaaagatcccgcgccgttgaccatgtgcaaaggtccctgtcatgttgtggcgtgcaaaattatacaaattggagtacaagcccttatttcctcgaacacggtattccaccatcttgctgtatgaatgagacagattgtaatccgcaggacttacacaaccttacagtggctgctacaaaagtgaatcagaagggttgttacgatcttgtcacaagctttatggagacaaacatgggaataatcgccggagtcgccttcggcattgcgttcagccagttaataggcatgttgctcgcctgttgtctgtcacggtttatcaccgccaaccagtatgagatggtgtag

SEQ ID NO: 148111 - DNA, 954 bp, Artificial Sequence
  derived and/or modified sequence
agaaataggagcgcgcaggcgcgacgtgcggctcgcagaacggcgagtagcggagcgggacccgctggaatcatcatccagggacgtgccagaaaccacaagaaaacatggggagggttttcctcacgggagaaaaagccaattccatattaaaacgctacccaagagctaatgggttttttgaagaaataagacagggcaacattgagcgtgagtgcaaagaagaattctgtacatttgaagaagcaagagaagcttttgaaaataatgaaaaaactatcactggggtgatcctgctggctgttggagtctggggcaaacttactctgggcacctatatctcccttattgccgagaactccacaaatgctccctatgtgctcatcggaactggcaccactattgttgtctttggcctgtttggatgctttgctacatgtcgtggtagcccatggatgctgaaactgtatgccatgtttctgtccctggtgttcctggctgagctcgtagctggcatttcagggtttgtgtttcgtcatgagatcaaggacaccttcctgaggacttacacggacgctatgcagacttacaatggcaatgatgagaggagccgggcagtggaccatgtgcagcgcagcctgagctgctgtggtgtgcagaactacaccaactggagcaccagcccctacttcctggagcatggcatcccccccagctgctgcatgaacgaaactgattgtaatccccaggatctacacaatctgactgtggccgccaccaaagttaaccagaagggttgttatgatctggtaactagtttcatggagactaacatgggaatcatcgctggagtggcgtttggaatcgcattctcccagttaattggcatgctgctggcctgctgtctgtcccggttcatcacggccaatcagtatgagatggtgtaaggagaag

SEQ ID NO: 148112 - DNA, 840 bp, Artificial Sequence
  derived and/or modified sequence
atgggaagggtcttcctaacaggagaaaaagctaactcaatactgaaacggtatccccgggccaacggctttttcgaggagattaggcaaggcaatatagagagggagtgcaaggaagaattctgtactttcgaagaagctcgcgaagctttcgaaaacaacgagaagacaattaccggcgttatactccttgctgtgggagtttggggaaagctgactttgggaacatacatttcactgatcgccgaaaactcgaccaacgccccttacgtcctcattggtaccggaaccaccatcgttgtcttcggactcttcggctgttttgcaacatgtcggggcagtccttggatgttgaagctgtacgccatgtttctatcgctcgttttcttagccgaacttgttgcaggtattagcggatttgtattccggcacgaaattaaggatacttttctgagaacatacacagatgccatgcagacatataatggaaacgatgaaagatcccgcgccgttgaccatgtgcaaaggtccctgtcatgttgtggcgtgcaaaattatacaaattggagtacaagcccttatttcctcgaacacggtattcctccaagttgctgcatgaacgaaacggactgcaatccccaggacttacataatctgaccgttgccgccactaaagttaatcagaagggatgttatgatctcgtcaccagttttatggagacaaacatggggattattgccggggttgcctttggcatcgcattctcacagttgatcgggatgctacttgcatgttgtttatctagatttattaccgccaatcagtacgagatggtgtag

SEQ ID NO: 148113 - DNA, 840 bp, Artificial Sequence
  derived and/or modified sequence
atgggcagagtgttcctgaccggcgagaaggccaacagcatcctgaagagataccccagagccaacggcttcttcgaggagatcagacagggcaacatcgagagagagtgcaaggaggagttctgcaccttcgaggaggccagagaggccttcgagaacaacgagaagaccatcaccggcgtgatcctgctggccgtgggcgtgtggggcaagctgaccctgggcacctacatcagcctgatcgccgagaacagcaccaacgccccctacgtgctgatcggcaccggcaccaccatcgtggtgttcggcctgttcggctgcttcgccacctgcagaggcagcccctggatgctgaagctgtacgccatgttcctgagcctggtgttcctggccgagctggtggccggcatcagcggcttcgtgttcagacacgagatcaaggacaccttcctgagaacctacaccgacgccatgcagacctacaacggcaacgacgagagaagcagagccgtggaccacgtgcagagaagcctgagctgctgcggcgtgcagaactacaccaactggagcaccagcccctacttcctggagcacggcatcccccccagctgctgcatgaacgagaccgactgcaacccccaggacctgcacaacctgaccgtggccgccaccaaggtgaaccagaagggctgctacgacctggtgaccagcttcatggagaccaacatgggcatcatcgccggcgtggccttcggcatcgccttcagccagctgatcggcatgctgctggcctgctgcctgagcagattcatcaccgccaaccagtacgagatggtgtag

SEQ ID NO: 148114 - DNA, 840 bp, Artificial Sequence
  derived and/or modified sequence
atggggcgcgtatttctgaccggtgaaaaggccaattcaatccttaaacgttatccacgcgcgaacgggttttttgaggagatccgccagggtaatatcgagcgtgaatgcaaagaggaattctgtacttttgaggaggctcgggaggccttcgaaaataatgagaaaaccatcacaggggtgattctcctcgccgttggggtctggggaaaactcaccctgggcacttacatttctttgatagccgagaattccacgaacgccccatacgtgcttattgggacagggaccaccattgtagtgttcgggctgttcggctgcttcgctacgtgtcggggatccccgtggatgctgaagctctatgctatgtttctgagcctggtctttttggcagaactcgtggccgggatatctggcttcgtgttccggcatgaaatcaaggacacgttcttaagaacttacactgatgcgatgcagacatacaacggcaacgacgagcgaagcagggcggttgatcatgtccagcggagtctcagttgttgtggggtgcagaactataccaattggagcacatcgccctattttcttgagcacggtatacccccttcgtgttgcatgaatgagaccgactgtaacccccaggacctgcataaccttactgtcgccgcaactaaggtaaaccagaagggttgttacgatctggttaccagttttatggagactaacatgggcatcattgctggcgtggcctttggcatcgcatttagtcagctgatcgggatgctcctcgcatgttgtctcagtcgtttcataactgctaatcagtatgaaatggtttag

SEQ ID NO: 148115 - DNA, 840 bp, Artificial Sequence
  derived and/or modified sequence
atgggccgggtcttcctgactggagagaaggccaacagcatcctgaagcgctacccccgggccaacggcttctttgaggagatccggcagggcaacatcgagcgggagtgcaaggaggagttctgcacctttgaggaggcccgggaggcctttgagaacaatgagaagaccatcactggagtcatcctgctggccgtgggcgtgtggggcaagctgaccctgggcacctacatcagcctgattgctgagaacagcaccaatgccccctacgtgctgattggaacaggcaccaccatcgtggtgtttggcctgtttggctgctttgccacctgccggggcagcccctggatgctgaagctgtatgccatgttcctgagcctggtgttcctggccgagctggtggccggcatcagcggctttgtgttcagacatgagatcaaggacaccttcctgcggacctacacagatgccatgcagacctacaatggaaatgatgagaggagcagagctgtggaccacgtgcagaggagcctgagctgctgcggcgtgcagaactacaccaactggagcaccagcccctacttcctggagcacggcatcccccccagctgctgcatgaatgaaacagactgcaacccccaggacctgcacaacctgactgtggccgccaccaaggtgaaccagaagggctgctatgacctggtgaccagcttcatggagaccaacatgggcatcatcgccggcgtggcctttggaattgccttcagccagctgattggcatgctgctggcctgctgcctgagccgcttcatcacagccaaccagtatgagatggtgtag

SEQ ID NO: 148116 - DNA, 840 bp, Artificial Sequence
  derived and/or modified sequence
atgggccgggtgttcctgaccggcgagaaggccaacagcatcctgaaacgatatcccagggctaacggttttttcgaggagatccgccaggggaacatcgagcgagaatgcaaggaggaattttgtacgttcgaggaagcccgggaggccttcgagaataacgagaagactattactggggtgatcctattggctgtgggagtgtggggcaagctcacgctgggaacctatatcagcctgatagctgaaaatagcaccaatgctccctatgtgctgataggaacagggacaactatcgtggtgttcgggctgtttgggtgctttgctacttgccggggttctccatggatgttaaaactttacgctatgttcctaagcctggtcttcttagctgagctggtggctggtatttctggctttgtcttcagacatgagatcaaggacacattccttcgaacttacaccgacgctatgcagacatataacgggaatgacgaaagatcaagggcagtggatcacgtacagcggagcctctcctgctgcggtgttcagaattataccaactggagtacatcaccctacttcctcgaacacggcatccccccttcttgttgtatgaacgaaaccgattgtaatcctcaggacttgcacaacttgacagtggcagctacaaaggtcaaccagaagggatgttacgatttagttacatccttcatggagacaaacatggggatcattgccggcgttgccttcggaattgccttctcccagctgatcgggatgctgctagcgtgctgtctgtcacgtttcatcaccgcaaatcagtacgagatggtgtag

SEQ ID NO: 148117 - DNA, 801 bp, Artificial Sequence
  derived and/or modified sequence
atggccagcagaagaatggagaccaagcccgtgatcacctgcctgaagaccctgctgatcatctacagcttcgtgttctggaaggagaaggccgccggcttctgcggcagacaggacgtggccatggccctgatcaccggcgtgatcctgctggccgtgggcgtgtggggcaagctgaccctgggcacctacatcagcctgatcgccgagaacagcaccaacgccccctacgtgctgatcggcaccggcaccaccatcgtggtgttcggcctgttcggctgcttcgccacctgcagaggcagcccctggatgctgaagctgtacgccatgttcctgagcctggtgttcctggccgagctggtggccggcatcagcggcttcgtgttcagacacgagatcaaggacaccttcctgagaacctacaccgacgccatgcagacctacaacggcaacgacgagagaagcagagccgtggaccacgtgcagagaagcctgagctgctgcggcgtgcagaactacaccaactggagcaccagcccctacttcctggagcacggcatcccccccagctgctgcatgaacgagaccgactgcaacccccaggacctgcacaacctgaccgtggccgccaccaaggtgaaccagaagggctgctacgacctggtgaccagcttcatggagaccaacatgggcatcatcgccggcgtggccttcggcatcgccttcagccagctgatcggcatgctgctggcctgctgcctgagcagattcatcaccgccaaccagtacgagatggtgtag

SEQ ID NO: 148118 - DNA, 750 bp, Artificial Sequence
  derived and/or modified sequence
atggccagcagaagaatggagaccaagcccgtgatcacctgcctgaagaccctgctgatcatctacagcttcgtgttctggatcaccggcgtgatcctgctggccgtgggcgtgtggggcaagctgaccctgggcacctacatcagcctgatcgccgagaacagcaccaacgccccctacgtgctgatcggcaccggcaccaccatcgtggtgttcggcctgttcggctgcttcgccacctgcagaggcagcccctggatgctgaagctgtacgccatgttcctgagcctggtgttcctggccgagctggtggccggcatcagcggcttcgtgttcagacacgagatcaaggacaccttcctgagaacctacaccgacgccatgcagacctacaacggcaacgacgagagaagcagagccgtggaccacgtgcagagaagcctgagctgctgcggcgtgcagaactacaccaactggagcaccagcccctacttcctggagcacggcatcccccccagctgctgcatgaacgagaccgactgcaacccccaggacctgcacaacctgaccgtggccgccaccaaggtgaaccagaagggctgctacgacctggtgaccagcttcatggagaccaacatgggcatcatcgccggcgtggccttcggcatcgccttcagccagctgatcggcatgctgctggcctgctgcctgagcagattcatcaccgccaaccagtacgagatggtgtag

SEQ ID NO: 148119 - DNA, 828 bp, Artificial Sequence
  derived and/or modified sequence
atggccaacagaaccgtgtgcaacggccagggcagaagcagagacctgctgagaatcaagaacatccccaacgcccccggccacttcctgatcgccggcgtgggcggcagcagcagccagggcagaagcatcgaggaggagggcaagacccacctgggcatcaccggcgtgatcctgctggccgtgggcgtgtggggcaagctgaccctgggcacctacatcagcctgatcgccgagaacagcaccaacgccccctacgtgctgatcggcaccggcaccaccatcgtggtgttcggcctgttcggctgcttcgccacctgcagaggcagcccctggatgctgaagctgtacgccatgttcctgagcctggtgttcctggccgagctggtggccggcatcagcggcttcgtgttcagacacgagatcaaggacaccttcctgagaacctacaccgacgccatgcagacctacaacggcaacgacgagagaagcagagccgtggaccacgtgcagagaagcctgagctgctgcggcgtgcagaactacaccaactggagcaccagcccctacttcctggagcacggcatcccccccagctgctgcatgaacgagaccgactgcaacccccaggacctgcacaacctgaccgtggccgccaccaaggtgaaccagaagggctgctacgacctggtgaccagcttcatggagaccaacatgggcatcatcgccggcgtggccttcggcatcgccttcagccagctgatcggcatgctgctggcctgctgcctgagcagattcatcaccgccaaccagtacgagatggtgtag

SEQ ID NO: 148120 - DNA, 672 bp, Artificial Sequence
  derived and/or modified sequence
atgatcaccggcgtgatcctgctggccgtgggcgtgtggggcaagctgaccctgggcacctacatcagcctgatcgccgagaacagcaccaacgccccctacgtgctgatcggcaccggcaccaccatcgtggtgttcggcctgttcggctgcttcgccacctgcagaggcagcccctggatgctgaagctgtacgccatgttcctgagcctggtgttcctggccgagctggtggccggcatcagcggcttcgtgttcagacacgagatcaaggacaccttcctgagaacctacaccgacgccatgcagacctacaacggcaacgacgagagaagcagagccgtggaccacgtgcagagaagcctgagctgctgcggcgtgcagaactacaccaactggagcaccagcccctacttcctggagcacggcatcccccccagctgctgcatgaacgagaccgactgcaacccccaggacctgcacaacctgaccgtggccgccaccaaggtgaaccagaagggctgctacgacctggtgaccagcttcatggagaccaacatgggcatcatcgccggcgtggccttcggcatcgccttcagccagctgatcggcatgctgctggcctgctgcctgagcagattcatcaccgccaaccagtacgagatggtgtag

SEQ ID NO: 148121 - DNA, 801 bp, Artificial Sequence
  derived and/or modified sequence
atggcctctcgtagaatggagacaaagcccgtcattacatgcctcaaaaccctactgattatctactcatttgttttttggaaagaaaaagctgccggattttgcggtagacaggatgtggccatggccctgatcaccggagtcatcctgcttgcagtaggggtatggggcaaactgacactgggaacttacattagtctgattgctgaaaattcgacaaatgccccctacgtgttgatcggaaccggcacaaccatcgtagtgtttgggttgttcgggtgcttcgccacctgtagaggaagcccctggatgctgaaactttatgcaatgtttctctcattggtatttctggcagagttagtggccggcatcagcggattcgtttttaggcacgaaattaaagacacattcctcagaacatacaccgatgcgatgcagacctataacgggaatgatgaacgatctcgggccgtggatcacgtccaacgctccttaagctgctgcggtgtccaaaattacacaaattggagcacgtctccatattttctggagcacggcatccctcccagttgctgtatgaacgagacagattgcaacccccaagatctgcacaacttgaccgtggctgcaacaaaggtcaaccagaaagggtgttacgatctggtgaccagctttatggaaacaaatatggggatcatcgctggagtcgcattcggtatagcattctcccagttgatcgggatgcttcttgcatgttgcctgagcaggttcattacagctaaccagtacgaaatggtgtag

SEQ ID NO: 148122 - DNA, 750 bp, Artificial Sequence
  derived and/or modified sequence
atggctagtcgaaggatggagaccaagccagttatcacttgcttaaagaccctactgatcatctactcctttgtgttttggattacgggggtcattttgttggccgtcggagtgtggggaaaactgacattaggaacatacatctcacttattgccgaaaactctaccaatgccccatacgttcttataggaactgggaccaccatagtggtgtttggcctgtttgggtgcttcgcaacttgccgaggcagtccctggatgctgaagttgtacgcaatgttcttatcactagtgttcctggccgagctggttgcgggtataagtggttttgtgtttagacacgaaatcaaggacacgttcctgagaacttacacggatgccatgcagacttacaatggcaatgatgaacgtagcagagccgtcgatcatgtccagaggagcctttcttgctgtggggtccaaaattatacgaattggtccacttccccatactttcttgagcacggtatcccaccgtcctgctgtatgaacgaaaccgactgcaatccccaggatctccataaccttaccgtggcagccactaaagtcaaccagaagggctgctacgatctcgtgacttcttttatggaaacaaacatgggtattatcgccggagtggcttttggcatagcattcagtcagctgatcggaatgctgctggcgtgttgcctcagtagattcatcaccgctaatcagtacgagatggtctag

SEQ ID NO: 148123 - DNA, 828 bp, Artificial Sequence
  derived and/or modified sequence
atggccaacagaaccgtgtgcaatggccagggccggagtcgggatctgcttcggatcaaaaacatcccaaatgctcccggtcattttctcatagctggagttgggggcagttcatctcagggccgtagcattgaggaggagggcaaaactcacctgggtatcactggcgtcatcttgctggccgtgggcgtttggggcaagctgacgctggggacatacatttcactgatcgcagagaattctactaatgccccctacgtccttataggaactggcactacaattgttgtgtttggactatttggttgttttgccacatgccggggctccccatggatgcttaagttgtatgccatgtttctgtctttggtgttcctggctgagctggttgcaggtatttcggggttcgtctttcggcacgagataaaggacacttttcttaggacttatactgatgccatgcagacctataacgggaatgatgagaggtcacgtgccgttgaccatgtgcaacgctctctgtcctgctgtggagtgcagaattacaccaattggtcaacctccccatatttcctggaacatgggataccgccttcctgctgcatgaacgagacagactgcaacccccaggacttgcataatctgactgttgccgcaaccaaggtcaaccaaaagggctgctacgacttggttacaagcttcatggaaacaaacatgggcatcattgctggagtcgcgtttgggattgcatttagtcaactaatcggaatgctccttgcatgttgcttgtcccgatttataacagccaaccaatacgagatggtatag

SEQ ID NO: 148124 - DNA, 672 bp, Artificial Sequence
  derived and/or modified sequence
atgatcactggggtgattctcctggccgtcggggtgtgggggaaactgactctggggacctatatctcacttatcgccgagaacagcaccaacgcaccttacgtacttataggcacaggcacaacgattgttgtgtttggcttgttcggttgcttcgccacatgcaggggaagcccctggatgctgaagttgtacgccatgtttttgtccctggttttcctggctgagcttgtcgcaggaatctctgggttcgtattccggcatgaaatcaaagacacttttcttcggacttacactgacgctatgcagacctataatggcaacgatgagagaagtcgcgcagttgaccacgttcagagatccctaagttgctgcggcgtacagaactacacaaattggtccacctccccttacttcctagagcacggcatccccccaagctgctgtatgaacgaaacagactgtaaccctcaggatctccataaccttacagtggccgccactaaggttaatcagaaagggtgctatgacctggttacgagcttcatggagaccaatatgggcatcatcgccggagttgcctttggcattgctttcagccagctgatcggcatgcttctggcttgctgcctgagtcgattcattactgcaaatcaatatgagatggtgtag

SEQ ID NO: 148125 - DNA, 801 bp, Artificial Sequence
  derived and/or modified sequence
atggccagcaggaggatggagaccaagcctgtgatcacctgcctgaagaccctgctgatcatctacagctttgtgttctggaaggagaaggccgccggcttctgtggccggcaggatgtggccatggccctgatcaccggggtcatcctgctggccgtgggcgtgtggggcaagctgaccctgggcacctacatcagcctgattgctgagaacagcaccaatgccccctacgtgctgattggcaccggcaccaccatcgtggtgtttggcctgtttggctgctttgccacctgccggggcagcccctggatgctgaagctgtatgccatgttcctgagcctggtgttcctggccgagctggtggccggcatcagcggctttgtgttcagacatgagatcaaggacaccttcctgcggacctacacagatgccatgcagacctacaatggaaatgatgagaggagcagagctgtggaccacgtgcagaggagcctgagctgctgcggcgtgcagaactacaccaactggagcaccagcccctacttcctggagcacggcatcccccccagctgctgcatgaatgaaacagactgcaacccccaggacctgcacaacctgactgtggccgccaccaaggtgaaccagaagggctgctatgacctggtgaccagcttcatggagaccaacatgggcatcatcgccggcgtggccttcggcatcgccttcagccagctgattggcatgctgctggcctgctgcctgagccgcttcatcacagccaaccagtatgagatggtgtag

SEQ ID NO: 148126 - DNA, 750 bp, Artificial Sequence
  derived and/or modified sequence
atggccagcaggaggatggagaccaagcctgtgatcacctgcctgaagaccctgctgatcatctacagctttgtgttctggatcactggagtcatcctgctggccgtgggcgtgtggggcaagctgaccctgggcacctacatcagcctgattgctgagaacagcaccaatgccccctacgtgctgattggaacaggcaccaccatcgtggtgtttggcctgtttggctgctttgccacctgccggggcagcccctggatgctgaagctgtatgccatgttcctgagcctggtgttcctggccgagctggtggccggcatcagcggctttgtgttcagacatgagatcaaggacaccttcctgcggacctacacagatgccatgcagacctacaatggaaatgatgagaggagcagagctgtggaccacgtgcagaggagcctgagctgctgcggcgtgcagaactacaccaactggagcaccagcccctacttcctggagcacggcatcccccccagctgctgcatgaatgaaacagactgcaacccccaggacctgcacaacctgactgtggccgccaccaaggtgaaccagaagggctgctatgacctggtgaccagcttcatggagaccaacatgggcatcatcgccggcgtggcctttggaattgccttcagccagctgattggcatgctgctggcctgctgcctgagccgcttcatcacagccaaccagtatgagatggtgtag

SEQ ID NO: 148127 - DNA, 828 bp, Artificial Sequence
  derived and/or modified sequence
atggccaacagaacagtgtgcaatggccagggccgcagccgggacctgctgcgcatcaagaacatccccaatgcccctggccacttcctgattgctggggtgggcggcagcagcagccagggccgcagcattgaggaggagggcaagacccacctgggcatcactggagtcatcctgctggccgtgggcgtgtggggcaagctgaccctgggcacctacatcagcctgattgctgagaacagcaccaatgccccctacgtgctgattggaacaggcaccaccatcgtggtgtttggcctgtttggctgctttgccacctgccggggcagcccctggatgctgaagctgtatgccatgttcctgagcctggtgttcctggccgagctggtggccggcatcagcggctttgtgttcagacatgagatcaaggacaccttcctgcggacctacacagatgccatgcagacctacaatggaaatgatgagaggagcagagctgtggaccacgtgcagaggagcctgagctgctgcggcgtgcagaactacaccaactggagcaccagcccctacttcctggagcacggcatcccccccagctgctgcatgaatgaaacagactgcaacccccaggacctgcacaacctgactgtggccgccaccaaggtgaaccagaagggctgctatgacctggtgaccagcttcatggagaccaacatgggcatcatcgccggcgtggcctttggaattgccttcagccagctgattggcatgctgctggcctgctgcctgagccgcttcatcacagccaaccagtatgagatggtgtag

SEQ ID NO: 148128 - DNA, 672 bp, Artificial Sequence
  derived and/or modified sequence
atgatcactggagtcatcctgctggccgtgggcgtgtggggcaagctgaccctgggcacctacatcagcctgattgctgagaacagcaccaatgccccctacgtgctgattggaacaggcaccaccatcgtggtgtttggcctgtttggctgctttgccacctgccggggcagcccctggatgctgaagctgtatgccatgttcctgagcctggtgttcctggccgagctggtggccggcatcagcggctttgtgttcagacatgagatcaaggacaccttcctgcggacctacacagatgccatgcagacctacaatggaaatgatgagaggagcagagctgtggaccacgtgcagaggagcctgagctgctgcggcgtgcagaactacaccaactggagcaccagcccctacttcctggagcacggcatcccccccagctgctgcatgaatgaaacagactgcaacccccaggacctgcacaacctgactgtggccgccaccaaggtgaaccagaagggctgctatgacctggtgaccagcttcatggagaccaacatgggcatcatcgccggcgtggcctttggaattgccttcagccagctgattggcatgctgctggcctgctgcctgagccgcttcatcacagccaaccagtatgagatggtgtag

SEQ ID NO: 148129 - DNA, 801 bp, Artificial Sequence
  derived and/or modified sequence
atggccagccggcggatggagaccaagcccgtgatcacctgcctgaagaccctgcttattatatactccttcgtgttttggaaagagaaggcagccggattctgcggccgccaagacgtcgccatggccttgatcaccggtgtgatattgttggcagttggtgtgtggggcaaactcaccttaggcacctatatatcattgatcgccgagaattctacaaatgccccttacgttctgatcggaaccgggacaactatagtagtgttcgggcttttcggatgttttgctacgtgccgcgggtccccctggatgttgaagctctatgctatgttcctgagcctggtctttctcgccgagctggtagcgggcatttcgggattcgtgttcagacatgagatcaaggacacctttcttaggacctacacagatgccatgcaaacttataatggcaatgatgagcgcagcagggctgttgaccacgtgcagcgaagcttgtcatgctgcggcgtccagaattatacaaactggtctacgagtccgtactttctcgagcacggaatacctccttcttgctgcatgaacgagaccgactgtaatccccaagacctgcacaacctgaccgtcgctgctactaaagtaaatcagaagggatgctacgatctagttacttcattcatggaaaccaacatgggcatcatcgccggtgtggccttcggtatcgcattttcgcaactcattggcatgctacttgcgtgctgtctgtccagattcatcaccgccaatcagtatgagatggtctag

SEQ ID NO: 148130 - DNA, 750 bp, Artificial Sequence
  derived and/or modified sequence
atggccagccggcggatggagaccaagcccgtgatcacctgcctgaaaacgctactcataatatactcattcgttttctggattacaggcgtgattttattagcggttggagtgtggggcaagctcacccttgggacatacattagtttaatcgctgaaaacagtacaaatgccccgtacgtcctaatcggcaccggcacaactatcgtcgtctttggcctcttcggttgttttgccacttgccgcgggagcccatggatgcttaaactgtatgccatgttcctcagcctggtgtttctggcagagctcgtggccgggatctccggcttcgtgttccgtcatgagattaaggatacattccttcggacttatacagatgcaatgcaaacctacaacggaaacgatgaaagaagtagagccgtagaccatgtacagaggtccctctcatgctgtggggtgcaaaactacaccaactggagtacctccccctacttcctggagcacggcatccccccctcctgctgtatgaatgaaacagactgcaatccacaggatctccataatctgacggtggcagcaaccaaggtcaatcagaaagggtgctatgacctcgtcacatccttcatggagaccaacatggggattatcgcaggcgtagctttcggaatcgctttctcccagttaatcggtatgcttttagcatgctgtctctcaaggttcatcaccgccaatcagtatgaaatggtgtag

SEQ ID NO: 148131 - DNA, 828 bp, Artificial Sequence
  derived and/or modified sequence
atggccaaccggaccgtgtgcaacggccagggccggagccgggacctgctgcggatcaagaacattcctaatgcacctggccatttcctgatcgccggagttggtggcagttcgagtcagggccggtccatcgaggaggaggggaagactcacctgggcattacaggtgtaatcctgcttgcagtgggagtgtggggtaaattgaccctcggcacatatatctcactgatagccgagaattctaccaatgctccttacgtactgatcggcacaggcacaaccattgtggtgttcgggctattcggatgtttcgccacctgcaggggaagcccatggatgctcaaactttatgcaatgttcttaagtcttgtcttcttggctgaactagtggcagggatttccggcttcgtgtttagacatgaaatcaaagacacattcctgagaacatacacggacgccatgcagacctataacgggaacgacgaacgatcgcgggccgtagaccacgtgcagcggtctctcagttgttgcggcgtgcagaactacacaaactggagcacctccccttatttcctggaacatggaatccctcctagctgctgcatgaatgaaactgactgcaatccgcaagacctgcataacttaacggtggctgccacgaaggtaaaccagaagggttgttatgatctcgtcaccagcttcatggagaccaacatgggaatcattgcgggcgtggccttcggcattgcattcagccagctcatcggaatgctgctagcttgttgtttgtctcggttcattaccgctaaccagtacgagatggtttag

SEQ ID NO: 148132 - DNA, 672 bp, Artificial Sequence
  derived and/or modified sequence
atgatcaccggcgtgatcctgctggccgtgggcgtgtggggcaagcttactctcgggacatacatcagtctgatagccgagaactctacaaatgctccgtatgtgttaatcggcacaggcaccactattgtggtcttcggactattcggctgcttcgccacttgccgtgggtccccttggatgctgaagctctacgccatgtttttaagtctggtttttctggccgagcttgttgcagggatctcaggatttgtgttcagacacgaaatcaaggacacattcctccgcacgtataccgacgcaatgcagacctacaacggaaacgacgagcgctctagagctgtggaccacgttcagagaagcctgagctgttgtggcgtgcaaaactacaccaactggtctaccagcccctacttcttggagcacgggattccgccttcctgctgtatgaacgagaccgactgcaaccctcaagacctccacaatttgacagtcgccgctactaaggtcaatcaaaagggatgctacgacctggtcacaagcttcatggagactaatatggggatcatcgcgggagtggcttttgggattgcattctctcagctgattggtatgctgctggcctgctgtctctctagattcattaccgcaaaccagtacgaaatggtctag

SEQ ID NO: 148133 - DNA, 801 bp, Artificial Sequence
  derived and/or modified sequence
atggcaagccgtaggatggagactaagcccgtgataacctgcctcaaaaccttgctgattatctatagcttcgtgttttggaaagagaaggccgctggtttttgtggccgtcaggacgtggcaatggccctcattactggcgttattttactcgcagtgggtgtctggggcaaattgacattaggaacctacatctcgctcatcgctgaaaattcaacaaacgcgccatacgtgctaattggtacgggcacaacaattgtggtgttcggtttgtttggctgttttgccacttgccgaggctcgccctggatgcttaagctgtatgcaatgtttttgagcctggtgttcctcgcagaactggtggcaggtatatcaggttttgtcttcagacacgagattaaagatactttcttacgtacatacaccgacgcaatgcagacgtacaatggaaatgatgagagatcccgggcagtggaccatgtccagcggagtctgtcctgttgtggagtgcagaattatacgaactggtccacatctccatatttcctggaacacgggatccccccttcttgttgcatgaatgaaacagactgcaatccccaggacttgcataacctgactgtggccgcaaccaaggttaaccagaagggctgttacgacctagtcacgagttttatggagacaaacatgggtattatagcaggagtggcttttggtattgcttttagccagcttatcggcatgttgctcgcttgctgcctttctcgctttatcaccgccaatcagtacgaaatggtctag

SEQ ID NO: 148134 - DNA, 750 bp, Artificial Sequence
  derived and/or modified sequence
atggcctctagaagaatggaaacaaagcctgtgattacttgtttgaaaaccctgttgattatttactccttcgtgttctggattactggagtgatcctgttggcagtgggcgtgtggggtaaactcacgttgggtacgtatatctccttgattgctgagaactcgacaaacgctccctacgtgttgatcgggaccggtaccaccatcgtcgtatttgggttgttcggctgtttcgcaacatgtcggggatctccatggatgttaaaactgtatgcaatgttcctgagcctcgtgttcctggccgaattagtagcagggataagtgggtttgtgttccgccacgagataaaggacacattcctccgcacttacacggacgccatgcagacctataatggtaatgatgagagatcacgcgcagtcgaccatgtacagagatctcttagctgctgcggtgtgcaaaactatactaactggtccacaagtccttatttcttggaacacgggattcccccttcttgttgcatgaatgaaaccgactgtaatccacaggacctgcataacctgacggttgccgctacaaaagttaaccaaaagggttgttatgatttggttacgtcatttatggaaaccaatatgggcattattgcaggcgtggcgtttggcatcgccttctctcagcttatcgggatgttgctcgcctgctgtctgtcacggtttattaccgccaaccagtacgaaatggtgtag

SEQ ID NO: 148135 - DNA, 828 bp, Artificial Sequence
  derived and/or modified sequence
atggctaataggacagtctgtaacggccagggcagaagtcgcgacctcctccgcatcaagaatatcccgaacgcccctgggcatttcctcattgcgggtgtgggcggttcctcgagtcagggcagatctattgaggaggaagggaagactcacctgggaataacaggggtaattctattagccgtgggagtgtggggcaaactaacactgggaacctatattagcctgatagcagaaaattcaacaaacgcgccttatgtcttgatcgggacaggcacgacaatcgtggtgtttgggttatttggctgtttcgcaacctgccgaggttccccttggatgctgaaactgtatgcaatgttcttatctctggtgtttctagccgaattggtggctggtatttcagggttcgtcttcagacatgagatcaaggatacgtttctacggacttacactgatgctatgcaaacctacaatggtaatgacgaacgcagcagggctgtggaccacgtacaacggtccctgtcctgctgtggggtgcaaaactacaccaattggtctaccagcccatacttcctggagcatggcatacctccaagttgttgtatgaatgaaaccgactgtaatcctcaagacttacacaacctgacggtggcagctaccaaggtgaaccagaagggctgctatgatcttgtaacctctttcatggaaacaaatatgggaatcatagctggggtcgcttttgggatcgcgttctcccaactgatcggcatgctactcgcctgttgtctgagcaggtttatcacagcaaaccagtacgagatggtgtag

SEQ ID NO: 148136 - DNA, 672 bp, Artificial Sequence
  derived and/or modified sequence
atgataacaggcgtgattctactcgcggttggtgtttggggaaagcttacactgggcacatatatttctttaatcgccgaaaacagtaccaatgcgccttacgtactgattggaacgggaacaaccattgtcgtgtttggtctgtttggatgttttgccacatgtcgaggaagcccctggatgctgaaactatacgcgatgtttctatcactcgtgttcctggctgaacttgtggccggaatcagtggattcgtgttcaggcatgagatcaaagacacctttcttcggacctatacagacgccatgcagacttacaacggaaatgacgagagatcccgcgctgtagaccacgtccaacggagcctgtcttgctgtggagttcagaactataccaactggtcgactagcccgtatttcctagagcacggaattcctccaagctgttgcatgaatgaaacagattgtaatccccaagatcttcacaacctgaccgtggccgctacaaaggtcaaccagaaggggtgttatgacctggtgacaagcttcatggaaacgaatatgggcatcatcgctggggtggcttttggaatcgccttctcccagctgatcggtatgctgttggcctgttgcctgagccgcttcattactgcaaaccagtacgagatggtgtag

SEQ ID NO: 148137 - DNA, 1270 bp, Artificial Sequence
  derived and/or modified sequence
agtatggcatcgaggagaatggagaccaaacctgtgataacctgtctcaaaaccctcctcatcatctactccttcgtcttctggaaagaaaaggctgcaggattttgtggcagacaggatgtggctatggctttgatcactggggtgatcctgctggctgttggagtctggggcaaacttactctgggcacctatatctcccttattgccgagaactccacaaatgctccctatgtgctcatcggaactggcaccactattgttgtctttggcctgtttggatgctttgctacatgtcgtggtagcccatggatgctgaaactgtatgccatgtttctgtccctggtgttcctggctgagctcgtagctggcatttcagggtttgtgtttcgtcatgagatcaaggacaccttcctgaggacttacacggacgctatgcagacttacaatggcaatgatgagaggagccgggcagtggaccatgtgcagcgcagcctgagctgctgtggtgtgcagaactacaccaactggagcaccagcccctacttcctggagcatggcatcccccccagctgctgcatgaacgaaactgattgtaatccccaggatctacacaatctgactgtggccgccaccaaagttaaccagaagggttgttatgatctggtaactagtttcatggagactaacatgggaatcatcgctggagtggcgtttggaatcgcattctcccagttaattggcatgctgctggcctgctgtctgtcccggttcatcacggccaatcagtatgagatggtgtaaggagaagtctttcaagaatgacggaataagagacctgttttaaaaaggaactgcagcaatctttgaaagacttccaaagaatgttagagcacagtacataatacacttgccctgctccctctcccccttaccccacaacgtgcaactgacactcccacccagtctctgctccacctttcagcccacgtcacgtgtagtgtccattttgtgaagccctgttgtgccacagagtgtagccaggtccccctgcagctagtcctagtgaacctcaccccgaggccctgcatgggccagcccctccatctgtacttggtccaactgcaactcatcatcggtgactggttatcacaccatcgctggcccctttgggccctgcatgtagtgtgggaggctcctgttagctcctcactgtggtaaatgccacacacctttaagtagataagcagacgatagttatctgttcttt

SEQ ID NO: 148138 - DNA, 1909 bp, Artificial Sequence
  derived and/or modified sequence
gtaggagccccgcgcggtgcgcgctcacgcacgcgcacggcctcgcctgcgcgctcacgaggcctctcgcggcacgcgcccccgccccgcgccgccccgccccgccccgcctcttccccctcccgcgcgcccgcccgccgcctgccgccgccgccgccgccgccggagctctgtagtatggcatcgaggagaatggagaccaaacctgtgataacctgtctcaaaaccctcctcatcatctactccttcgtcttctggatcactggggtgatcctgctggctgttggagtctggggcaaacttactctgggcacctatatctcccttattgccgagaactccacaaatgctccctatgtgctcatcggaactggcaccactattgttgtctttggcctgtttggatgctttgctacatgtcgtggtagcccatggatgctgaaactgtatgccatgtttctgtccctggtgttcctggctgagctcgtagctggcatttcagggtttgtgtttcgtcatgagatcaaggacaccttcctgaggacttacacggacgctatgcagacttacaatggcaatgatgagaggagccgggcagtggaccatgtgcagcgcagcctgagctgctgtggtgtgcagaactacaccaactggagcaccagcccctacttcctggagcatggcatcccccccagctgctgcatgaacgaaactgattgtaatccccaggatctacacaatctgactgtggccgccaccaaagttaaccagaagggttgttatgatctggtaactagtttcatggagactaacatgggaatcatcgctggagtggcgtttggaatcgcattctcccagttaattggcatgctgctggcctgctgtctgtcccggttcatcacggccaatcagtatgagatggtgtaaggagaagtctttcaagaatgacggaataagagacctgttttaaaaaggaactgcagcaatctttgaaagacttccaaagaatgttagagcacagtacataatacacttgccctgctccctctcccccttaccccacaacgtgcaactgacactcccacccagtctctgctccacctttcagcccacgtcacgtgtagtgtccattttgtgaagccctgttgtgccacagagtgtagccaggtccccctgcagctagtcctagtgaacctcaccccgaggccctgcatgggccagcccctccatctgtacttggtccaactgcaactcatcatcggtgactggttatcacaccatcgctggcccctttgggccctgcatgtagtgtgggaggctcctgttagctcctcactgtggtaaatgccacacacctttaagtagataagcagacgatagttatctgttcttttgacttaatctcatttggtttgattttccctctactaaggctttcctaccttcttcaggctgcctaagacatgtaacgaaacacttcaataattgtccatgaggagaaaaaaagcatgtgtcatgcatgaaggaaactgaacttgaggtggcctccttgcttgttacatacctgggtatgtgtaggcagtttagtgcatctttgcctctcggttgaaacctgtataaccctgttacaaagctgtgttgttgcttcttgtgaaggccatgatattttgtttttccccaattaattgctattgtgttattttactacttctctctgtattttttcttgcattgacattatagacattgaggacctcatccaaacaatttaaaaatgagtgtgaagggggaacaagtcaaaatatttttaaaagatcttcaaaagtaatgcctctgtctagcatgccaacaagaatgcattgatattgtgaacatttgtgatatatgtattaataaatagagcaattac

SEQ ID NO: 148139 - DNA, 1210 bp, Artificial Sequence
  derived and/or modified sequence
gtagtatggcatcgaggagaatggagaccaaacctgtgataacctgtctcaaaaccctcctcatcatctactccttcgtcttctggccctatttttgctttgaaactggagcacagtgctgtatgaggtaccgagaatcagctagatggcaaaccggactgtttgcaatggtcaaggaagaagcagagatttattgaggatcaaaaatattcctaatgcacccggacatttccttatcgctggcgttggtggttcttcaagtcagggaaggtctatagaagaggagggaaaaacacacctaggaatcactggggtgatcctgctggctgttggagtctggggcaaacttactctgggcacctatatctcccttattgccgagaactccacaaatgctccctatgtgctcatcggaactggcaccactattgttgtctttggcctgtttggatgctttgctacatgtcgtggtagcccatggatgctgaaactgtatgccatgtttctgtccctggtgttcctggctgagctcgtagctggcatttcagggtttgtgtttcgtcatgagatcaaggacaccttcctgaggacttacacggacgctatgcagacttacaatggcaatgatgagaggagccgggcagtggaccatgtgcagcgcagcctgagctgctgtggtgtgcagaactacaccaactggagcaccagcccctacttcctggagcatggcatcccccccagctgctgcatgaacgaaactgattgtaatccccaggatctacacaatctgactgtggccgccaccaaagttaaccagaagggttgttatgatctggtaactagtttcatggagactaacatgggaatcatcgctggagtggcgtttggaatcgcattctcccagttaattggcatgctgctggcctgctgtctgtcccggttcatcacggccaatcagtatgagatggtgtaaggagaagtctttcaagaatgacggaataagagacctgttttaaaaaggaactgcagcaatctttgaaagacttccaaagaatgttagagcacagtacataatacacttgccctgctccctctcccccttaccccacaacgtgcaactgacactcccacccagtctctgctccacctttcagcccacgtcacgtgtagtgtccattttgtgaagccctgttgtgccacagagtgtagc

SEQ ID NO: 148140 - DNA, 1224 bp, Artificial Sequence
  derived and/or modified sequence
agtatggcatcgaggagaatggagaccaaacctgtgataacctgtctcaaaaccctcctcatcatctactccttcgtcttctggccttgcctactgaagagaataagaagctgggtttctcctcatttacataacaagtaatatggtatggaagatggaaccgaagatttgaggtcagaagacctaagttctatggcttttctacaacctagatgatcactggggtgatcctgctggctgttggagtctggggcaaacttactctgggcacctatatctcccttattgccgagaactccacaaatgctccctatgtgctcatcggaactggcaccactattgttgtctttggcctgtttggatgctttgctacatgtcgtggtagcccatggatgctgaaactgtatgccatgtttctgtccctggtgttcctggctgagctcgtagctggcatttcagggtttgtgtttcgtcatgagatcaaggacaccttcctgaggacttacacggacgctatgcagacttacaatggcaatgatgagaggagccgggcagtggaccatgtgcagcgcagcctgagctgctgtggtgtgcagaactacaccaactggagcaccagcccctacttcctggagcatggcatcccccccagctgctgcatgaacgaaactgattgtaatccccaggatctacacaatctgactgtggccgccaccaaagttaaccagaagggttgttatgatctggtaactagtttcatggagactaacatgggaatcatcgctggagtggcgtttggaatcgcattctcccagttaattggcatgctgctggcctgctgtctgtcccggttcatcacggccaatcagtatgagatggtgtaaggagaagtctttcaagaatgacggaataagagacctgttttaaaaaggaactgcagcaatctttgaaagacttccaaagaatgttagagcacagtacataatacacttgccctgctccctctcccccttaccccacaacgtgcaactgacactcccacccagtctctgctccacctttcagcccacgtcacgtgtagtgtccattttgtgaagccctgttgtgccacagagtgtagccaggtccccctgcagctagtcctagtgaacctcaccccgaggccctgcatgggccagcccctccatctgtacttggtccaactgcaactcatcatcggtgact

SEQ ID NO: 148141 - RNA, 840 nt, Artificial Sequence
  derived and/or modified sequence
augggcagggucuucuuaacuggagagaaggccaauaguauccugaaacgguauccacgagccaacggguuuuucgaggagaucaggcagggcaacauugaaagggaaugcaaggaggaauuuugcacuuucgaggaggcgcgagaagccuucgagaauaacgaaaagacgauuacaggagugauucuacuggcagucggugugugggggaaacugacgcugggcaccuacauaagccuuaucgcugaaaauucuacuaaugccccauacguguuaauuggaaccggaaccacaauaguugucuucggacucuucggcuguuuugcaacaugucggggcaguccuuggauguugaagcuguacgccauguuucuaucgcucguuuucuuagccgaacuuguugcagguauuagcggauuuguauuccggcacgaaauuaaggauacuuuucugagaacauacacagaugccaugcagacauauaauggaaacgaugaaagaucccgcgccguugaccaugugcaaaggucccugucauguuguggcgugcaaaauuauacaaauuggaguacaagcccuuauuuccucgaacacgguauuccaccaucuugcuguaugaaugagacagauuguaauccgcaggacuuacacaaccuuacaguggcugcuacaaaagugaaucagaaggguuguuacgaucuugucacaagcuuuauggagacaaacaugggaauaaucgccggagucgccuucggcauugcguucagccaguuaauaggcauguugcucgccuguugucugucacgguuuaucaccgccaaccaguaugagaugguguag

SEQ ID NO: 148142 - RNA, 840 nt, Artificial Sequence
  derived and/or modified sequence
augggaagggucuuccuaacaggagaaaaagcuaacucaauacugaaacgguauccccgggccaacggcuuuuucgaggagauuaggcaaggcaauauagagagggagugcaaggaagaauucuguacuuucgaagaagcucgcgaagcuuucgaaaacaacgagaagacaauuaccggcguuauacuccuugcugugggaguuuggggaaagcugacuuugggaacauacauuucacugaucgccgaaaacucgaccaacgccccuuacguccucauugguaccggaaccaccaucguugucuucggacucuucggcuguuuugcaacaugucggggcaguccuuggauguugaagcuguacgccauguuucuaucgcucguuuucuuagccgaacuuguugcagguauuagcggauuuguauuccggcacgaaauuaaggauacuuuucugagaacauacacagaugccaugcagacauauaauggaaacgaugaaagaucccgcgccguugaccaugugcaaaggucccugucauguuguggcgugcaaaauuauacaaauuggaguacaagcccuuauuuccucgaacacgguauuccuccaaguugcugcaugaacgaaacggacugcaauccccaggacuuacauaaucugaccguugccgccacuaaaguuaaucagaagggauguuaugaucucgucaccaguuuuauggagacaaacauggggauuauugccgggguugccuuuggcaucgcauucucacaguugaucgggaugcuacuugcauguuguuuaucuagauuuauuaccgccaaucaguacgagaugguguag

SEQ ID NO: 148143 - protein, 202 aa, Artificial Sequence
  derived and/or modified sequence
MCTGGCARCLGGTLIPLAFFGFLANILLFFPGGKVIDDNDHLSQEIWFFGGILGSGVLMIFPALVFLGLKNNDCCGCCGNEGCGKRFAMFTSTIFAVVGFLGAGYSFIISAISINKGPKCLMANSTWGYPFHDGDYLNDEALWNKCREPLNVVPWNLTLFSILLVVGGIQMVLCAIQVVNGLLGTLCGDCQCCGCCGGDGPV

SEQ ID NO: 148144 - DNA, 609 bp, Artificial Sequence
  derived and/or modified sequence
atgtgcaccggcggctgcgccagatgcctgggcggcaccctgatccccctggccttcttcggcttcctggccaacatcctgctgttcttccccggcggcaaggtgatcgacgacaacgaccacctgagccaggagatctggttcttcggcggcatcctgggcagcggcgtgctgatgatcttccccgccctggtgttcctgggcctgaagaacaacgactgctgcggctgctgcggcaacgagggctgcggcaagagattcgccatgttcaccagcaccatcttcgccgtggtgggcttcctgggcgccggctacagcttcatcatcagcgccatcagcatcaacaagggccccaagtgcctgatggccaacagcacctggggctaccccttccacgacggcgactacctgaacgacgaggccctgtggaacaagtgcagagagcccctgaacgtggtgccctggaacctgaccctgttcagcatcctgctggtggtgggcggcatccagatggtgctgtgcgccatccaggtggtgaacggcctgctgggcaccctgtgcggcgactgccagtgctgcggctgctgcggcggcgacggccccgtgtag

SEQ ID NO: 148145 - DNA, 609 bp, Artificial Sequence
  derived and/or modified sequence
atgtgtacaggcgggtgtgcacggtgcttgggagggacactcatccccctcgcttttttcggattcctggctaatattttgctgtttttccccggaggaaaagtgatcgatgataatgaccacttaagccaggagatttggttttttgggggcatactgggatcaggggtgttaatgatttttcccgcccttgtgttcctggggctgaaaaataatgattgttgtggctgttgtggtaatgaggggtgtggcaagagatttgcgatgttcacctctaccatctttgccgtcgtgggctttctgggcgccggatacagttttatcatcagcgcgatctccataaataaaggtccgaagtgcctgatggccaattcgacttgggggtatccatttcacgacggcgattacttgaatgacgaagccctttggaacaaatgcagagagcccctcaacgtcgtgccctggaatctcactctattctcaattttgctcgttgttggaggcatccagatggtcctgtgcgcaattcaagtggttaatggcctgctcgggaccctgtgtggtgattgtcagtgttgtggctgctgtgggggcgacggtcccgtgtag

SEQ ID NO: 148146 - DNA, 609 bp, Artificial Sequence
  derived and/or modified sequence
atgtgcacaggaggctgtgcccgctgcctgggcggcaccctcatccccctggccttcttcggcttcctggccaacatcctgctcttcttccctgggggcaaggtgattgatgacaatgaccacctgagccaggagatctggttctttggaggcatcctgggcagcggcgtgctgatgatcttccctgccctggtgttcctgggcctgaagaacaatgactgctgcggctgctgcggaaatgaaggctgcggcaagagatttgccatgttcaccagcaccatctttgctgtggtgggcttcctgggcgccggctacagcttcatcatcagcgccatcagcatcaacaagggccccaagtgcctgatggccaacagcacctggggctaccccttccatgatggagactacctgaatgatgaggccctgtggaacaagtgccgggagcccctgaatgtggtgccctggaacctgaccctcttcagcatcctgctggtggtgggcggcatccagatggtgctgtgtgccatccaggtggtgaatggcctgctgggcaccctgtgtggggactgccagtgctgcggctgctgcggaggagatggccctgtgtag

SEQ ID NO: 148147 - DNA, 609 bp, Artificial Sequence
  derived and/or modified sequence
atgtgcaccggcggctgcgcccggtgcctgggcggcaccctgatcccgctggctttcttcggttttctggccaatatacttctgttttttcccggcggcaaggtaatagatgacaatgatcatctgagccaggaaatctggtttttcggggggattctcggctccggcgtgctaatgattttccccgcccttgtgtttctcggtttgaagaacaatgattgttgtgggtgctgcggcaacgagggctgcggcaaacgtttcgcaatgttcacctcgactatcttcgccgtagtcgggtttcttggcgctggctattctttcatcatttcagccatttccattaacaaaggcccaaagtgtctaatggccaacagcacgtggggctaccccttccacgacggagattatctgaacgacgaggccctttggaacaaatgccgggagccacttaatgttgtgccatggaacttgacacttttcagtatcctactggtagtgggaggaatccagatggttctttgtgctatccaagttgtcaatggcctgcttggtacgttgtgtggggattgccaatgttgcgggtgctgcggcggcgatggcccagtgtag

SEQ ID NO: 148148 - DNA, 609 bp, Artificial Sequence
  derived and/or modified sequence
atgtgtaccggagggtgcgcacgctgtctgggcggaactctaatccctctcgcgttctttgggtttcttgctaatatcctgctgtttttcccagggggaaaggtcattgatgacaatgaccacctgagtcaggagatttggttcttcgggggtatactgggttcaggcgtcctcatgatatttcctgctcttgtcttcctgggtcttaaaaacaatgactgttgtgggtgctgtgggaacgaaggttgtggcaagagattcgccatgttcacaagtacgatctttgcagtggtaggcttcctcggcgctgggtactcctttattatatccgccatttccatcaacaagggtccgaagtgcctcatggctaactcgacatggggctacccttttcatgacggggattatctcaatgatgaagccctctggaacaagtgccgtgagccattaaatgtggtcccctggaacctgacgctcttctccatccttctggttgttgggggtatccaaatggttctgtgtgctattcaagttgtaaacggcctactgggaacactgtgtggggactgtcaatgttgcggctgttgtggaggcgacgggccagtatag

SEQ ID NO: 148149 - DNA, 2101 bp, Artificial Sequence
  derived and/or modified sequence
gtcaactcatcaggaccttttctctccctctctaccaatgctgaccttcctttccccttagccttagtggatgatggtttctttattcctatatggaagacatagctgagaaagttgattaggaaaactgtttttgctaattccatcacatcgtgtagggaaaagatagaacttaattacttaattgcgtaacaagtagagaaacacagcaatcagacaataaaatgaacagtagctttttgccttaaacaattcttttaagtctgagctcaatgatacacaactagaccatcaaattattttgatattgaggaaaacagaagctcttttggataaccctgaattccaggctttcagtggaaaagacaaagacacgcactgtacaccattaagtacttgggagacatgattttaaccaggatgtaactcaattatattagtgatttataaagagtctggagaaaatatttctttatttgggcatgggcactgtcagattaaaggtgcagtggttctaaatgctgtttgttccagccctgtcttcgattgcaacaatgtgagtgtcttgtctgtgctggtggattattaacagaggttattggtctccatggcaaaacgattgaatgattgctctgaacgtaatctcatttatgggggtgcaaaaaacaaagcacttcaggtcagggagaatgtataaatgtccattgccatcgaggttctgctatttttgagaagctgaagcaactccaaggacacagttcacagaaatttggttctcagccccaaaatactgattgaattggagacaattacaaggactctctggccaaaaacccttgaagaggccccgtgaaggaggcagtgaggagcttttgattgctgacctgtgtcgtaccaccccagaatgtgcactgggggctgtgccagatgcctgggggggaccctcattccccttgctttttttggcttcctggctaacatcctgttattttttcctggaggaaaagtgatagatgacaacgaccacctttcccaagagatctggtttttcggaggaatattaggaagcggtgtcttgatgatcttccctgcgctggtgttcttgggcctgaagaacaatgactgctgtgggtgctgcggcaacgagggctgtgggaagcgatttgcgatgttcacctccacgatatttgctgtggttggattcttgggagctggatactcgtttatcatctcagccatttcaatcaacaagggtcctaaatgcctcatggccaatagtacatggggctaccccttccacgacggggattatctcaatgatgaggccttatggaacaagtgccgagagcctctcaatgtggttccctggaatctgaccctcttctccatcctgctggtcgtaggaggaatccagatggttctctgcgccatccaggtggtcaatggcctcctggggaccctctgtggggactgccagtgttgtggctgctgtgggggagatggacccgtttaaacctccgagatgagctgctcagactctacagcatgacgactacaatttcttttcataaaacttcttctcttcttggaattattaattcctatctgcttcctagctgataaagcttagaaaaggcagttattccttctttccaaccagctttgctcgagttagaattttgttattttcaaataaaaaatagtttggccacttaacaaatttgatttataaatctttcaaattagttcctttttagaatttaccaacaggttcaaagcatacttttcatgatttttttattacaaatgtaaaatgtataaagtcacatgtactgccatactacttctttgtatataaagatgtttatatctttggaagttttacataaatcaaaggaagaaagcacatttaaaatgagaaactaagaccaatttctgtttttaagaggaaaaagaatgattgatgtatcctaagtattgttatttgttgtctttttttgctgccttgcttgagttgcttgtgactgatcttttgaggctgtcatcatggctagggttcttttatgtatgttaaattaaaacctgaattcagaggtaacgt

SEQ ID NO: 148150 - protein, 1001 aa, Artificial Sequence
  derived and/or modified sequence
MIFPVARYALRWLRRPEDRAFSRAAMEMALRGVRKVLCVAEKNDAAKGIADLLSNGRMRRREGLSKFNKIYEFDYHLYGQNVTMVMTSVSGHLLAHDFQMQFRKWQSCNPLVLFEAEIEKYCPENFVDIKKTLERETRQCQALVIWTDCDREGENIGFEIIHVCKAVKPNLQVLRARFSEITPHAVRTACENLTEPDQRVSDAVDVRQELDLRIGAAFTRFQTLRLQRIFPEVLAEQLISYGSCQFPTLGFVVERFKAIQAFVPEIFHRIKVTHDHKDGIVEFNWKRHRLFNHTACLVLYQLCVEDPMATVVEVRSKPKSKWRPQALDTVELEKLASRKLRINAKETMRIAEKLYTQGYISYPRTETNIFPRDLNLTVLVEQQTPDPRWGAFAQSILERGGPTPRNGNKSDQAHPPIHPTKYTNNLQGDEQRLYEFIVRHFLACCSQDAQGQETTVEIDIAQERFVAHGLMILARNYLDVYPYDHWSDKILPVYEQGSHFQPSTVEMVDGETSPPKLLTEADLIALMEKHGIGTDATHAEHIETIKARMYVGLTPDKRFLPGHLGMGLVEGYDSMGYEMSKPDLRAELEADLKLICDGKKDKFVVLRQQVQKYKQVFIEAVAKAKKLDEALAQYFGNGTELAQQEDIYPAMPEPIRKCPQCNKDMVLKTKKNGGFYLSCMGFPECRSAVWLPDSVLEASRDSSVCPVCQPHPVYRLKLKFKRGSLPPTMPLEFVCCIGGCDDTLREILDLRFSGGPPRASQPSGRLQANQSLNRMDNSQHPQPADSRQTGSSKALAQTLPPPTAAGESNSVTCNCGQEAVLLTVRKEGPNRGRQFFKCNGGSCNFFLWADSPNPGAGGPPALAYRPLGASLGCPPGPGIHLGGFGNPGDGSGSGTSCLCSQPSVTRTVQKDGPNKGRQFHTCAKPREQQCGFFQWVDENTAPGTSGAPSWTGDRGRTLESEARSKRPRASSSDMGSTAKKPRKCSLCHQPGHTRPFCPQNR

SEQ ID NO: 148151 - protein, 531 aa, Artificial Sequence
  derived and/or modified sequence
MILARNYLDVYPYDHWSDKILPVYEQGSHFQPSTVEMVDGETSPPKLLTEADLIALMEKHGIGTDATHAEHIETIKARMYVGLTPDKRFLPGHLGMGLVEGYDSMGYEMSKPDLRAELEADLKLICDGKKDKFVVLRQQVQKYKQVFIEAVAKAKKLDEALAQYFGNGTELAQQEDIYPAMPEPIRKCPQCNKDMVLKTKKNGGFYLSCMGFPECRSAVWLPDSVLEASRDSSVCPVCQPHPVYRLKLKFKRGSLPPTMPLEFVCCIGGCDDTLREILDLRFSGGPPRASQPSGRLQANQSLNRMDNSQHPQPADSRQTGSSKALAQTLPPPTAAGESNSVTCNCGQEAVLLTVRKEGPNRGRQFFKCNGGSCNFFLWADSPNPGAGGPPALAYRPLGASLGCPPGPGIHLGGFGNPGDGSGSGTSCLCSQPSVTRTVQKDGPNKGRQFHTCAKPREQQCGFFQWVDENTAPGTSGAPSWTGDRGRTLESEARSKRPRASSSDMGSTAKKPRKCSLCHQPGHTRPFCPQNR

SEQ ID NO: 148152 - DNA, 3006 bp, Artificial Sequence
  derived and/or modified sequence
atgatcttccccgtggccagatacgccctgagatggctgagaagacccgaggacagagccttcagcagagccgccatggagatggccctgagaggcgtgagaaaggtgctgtgcgtggccgagaagaacgacgccgccaagggcatcgccgacctgctgagcaacggcagaatgagaagaagagagggcctgagcaagttcaacaagatctacgagttcgactaccacctgtacggccagaacgtgaccatggtgatgaccagcgtgagcggccacctgctggcccacgacttccagatgcagttcagaaagtggcagagctgcaaccccctggtgctgttcgaggccgagatcgagaagtactgccccgagaacttcgtggacatcaagaagaccctggagagagagaccagacagtgccaggccctggtgatctggaccgactgcgacagagagggcgagaacatcggcttcgagatcatccacgtgtgcaaggccgtgaagcccaacctgcaggtgctgagagccagattcagcgagatcaccccccacgccgtgagaaccgcctgcgagaacctgaccgagcccgaccagagagtgagcgacgccgtggacgtgagacaggagctggacctgagaatcggcgccgccttcaccagattccagaccctgagactgcagagaatcttccccgaggtgctggccgagcagctgatcagctacggcagctgccagttccccaccctgggcttcgtggtggagagattcaaggccatccaggccttcgtgcccgagatcttccacagaatcaaggtgacccacgaccacaaggacggcatcgtggagttcaactggaagagacacagactgttcaaccacaccgcctgcctggtgctgtaccagctgtgcgtggaggaccccatggccaccgtggtggaggtgagaagcaagcccaagagcaagtggagaccccaggccctggacaccgtggagctggagaagctggccagcagaaagctgagaatcaacgccaaggagaccatgagaatcgccgagaagctgtacacccagggctacatcagctaccccagaaccgagaccaacatcttccccagagacctgaacctgaccgtgctggtggagcagcagacccccgaccccagatggggcgccttcgcccagagcatcctggagagaggcggccccacccccagaaacggcaacaagagcgaccaggcccacccccccatccaccccaccaagtacaccaacaacctgcagggcgacgagcagagactgtacgagttcatcgtgagacacttcctggcctgctgcagccaggacgcccagggccaggagaccaccgtggagatcgacatcgcccaggagagattcgtggcccacggcctgatgatcctggccagaaactacctggacgtgtacccctacgaccactggagcgacaagatcctgcccgtgtacgagcagggcagccacttccagcccagcaccgtggagatggtggacggcgagaccagcccccccaagctgctgaccgaggccgacctgatcgccctgatggagaagcacggcatcggcaccgacgccacccacgccgagcacatcgagaccatcaaggccagaatgtacgtgggcctgacccccgacaagagattcctgcccggccacctgggcatgggcctggtggagggctacgacagcatgggctacgagatgagcaagcccgacctgagagccgagctggaggccgacctgaagctgatctgcgacggcaagaaggacaagttcgtggtgctgagacagcaggtgcagaagtacaagcaggtgttcatcgaggccgtggccaaggccaagaagctggacgaggccctggcccagtacttcggcaacggcaccgagctggcccagcaggaggacatctaccccgccatgcccgagcccatcagaaagtgcccccagtgcaacaaggacatggtgctgaagaccaagaagaacggcggcttctacctgagctgcatgggcttccccgagtgcagaagcgccgtgtggctgcccgacagcgtgctggaggccagcagagacagcagcgtgtgccccgtgtgccagccccaccccgtgtacagactgaagctgaagttcaagagaggcagcctgccccccaccatgcccctggagttcgtgtgctgcatcggcggctgcgacgacaccctgagagagatcctggacctgagattcagcggcggcccccccagagccagccagcccagcggcagactgcaggccaaccagagcctgaacagaatggacaacagccagcacccccagcccgccgacagcagacagaccggcagcagcaaggccctggcccagaccctgcccccccccaccgccgccggcgagagcaacagcgtgacctgcaactgcggccaggaggccgtgctgctgaccgtgagaaaggagggccccaacagaggcagacagttcttcaagtgcaacggcggcagctgcaacttcttcctgtgggccgacagccccaaccccggcgccggcggcccccccgccctggcctacagacccctgggcgccagcctgggctgcccccccggccccggcatccacctgggcggcttcggcaaccccggcgacggcagcggcagcggcaccagctgcctgtgcagccagcccagcgtgaccagaaccgtgcagaaggacggccccaacaagggcagacagttccacacctgcgccaagcccagagagcagcagtgcggcttcttccagtgggtggacgagaacaccgcccccggcaccagcggcgcccccagctggaccggcgacagaggcagaaccctggagagcgaggccagaagcaagagacccagagccagcagcagcgacatgggcagcaccgccaagaagcccagaaagtgcagcctgtgccaccagcccggccacaccagacccttctgcccccagaacagatag

SEQ ID NO: 148153 - DNA, 3006 bp, Artificial Sequence
  derived and/or modified sequence
atgatcttcccagtggcccgttacgcactgaggtggcttcggagaccagaggaccgcgctttcagtcgcgccgccatggaaatggctttgcgcggcgtcaggaaagtgctttgcgtagcggagaagaacgacgcagccaagggaatcgctgacttactgtccaatggaagaatgcggagaagggagggcctgtccaaatttaacaagatttatgaatttgactaccatctatacggccagaacgtaactatggtcatgacttccgtgtcagggcatctgctggctcacgacttccagatgcaattcaggaagtggcagagctgcaatccactcgtcctgttcgaagccgagatcgaaaaatactgccctgagaactttgtggacatcaagaagacgcttgaaagagaaacacggcagtgccaagccctcgttatatggacagactgcgaccgtgagggagaaaacatcggtttcgaaattatacacgtgtgcaaggccgttaagccaaatctgcaggtcctacgagctagatttagcgaaattactccgcatgccgtgaggactgcgtgcgagaacctaacagaaccagaccagcgagtgagtgatgccgtggatgttcggcaggagctggacctgcggatcggcgccgcgttcactaggtttcaaacactgaggctccaacggatctttcccgaagtgctcgcagaacagctaattagttatgggtcctgccagtttcccaccctcgggttcgttgtggaaaggtttaaggctatccaggcattcgtgcccgagatcttccaccgaattaaggttacacacgatcataaggacggcatcgttgaattcaactggaaacgtcataggctttttaatcataccgcatgtctcgtactctaccagctgtgtgttgaggatccaatggccactgtggttgaggtccgctctaagccgaagtcaaagtggcggccccaggcgctggataccgtggagctcgagaaactcgccagccggaagctccgcatcaatgcgaaggaaactatgaggatcgcagagaagctctatactcaggggtacattagttacccaagaactgagacaaacatttttcctcgggatctgaatttaaccgtactggtcgaacagcagacccccgatccacggtggggcgcctttgctcagtccatcctcgagagggggggccctacacctcggaatggtaataagtcagaccaagctcacccaccaatacaccctaccaagtacactaataacttacaaggggacgagcagagactgtacgagttcatagtccgtcattttctcgcctgttgtagtcaggacgcacaaggacaggagaccacggtggagatagacattgctcaggaaaggtttgttgcgcatggcttaatgatccttgcacggaactaccttgatgtttatccatatgaccactggtccgataagattttgcctgtatatgagcagggctctcacttccagcccagcacagtagaaatggtggatggggaaacttctccccctaagctgctgacggaggcagacctcatcgccctgatggaaaagcatggaatcgggactgatgccacccatgctgaacacatcgaaacaattaaggcccgaatgtatgttggcctgacaccggacaagcgcttcctgccagggcaccttgggatgggtctggtcgagggttatgattctatgggatacgagatgagcaagcctgacctacgggccgagctagaggctgatttgaaactcatttgcgacggcaagaaggataaatttgtggtgctgagacaacaggtccagaagtataaacaggtcttcatcgaagccgtggcaaaggcaaaaaaactcgatgaggctttggcacagtactttgggaacgggaccgagctcgctcagcaggaagacatataccctgcgatgcctgagccgattagaaaatgcccccagtgtaacaaagatatggtgctgaaaaccaagaagaatgggggcttctacctatcatgtatggggttcccagaatgccgctccgctgtgtggctaccggactcagtgctggaagccagccgggactcaagtgtttgtccagtctgccagcctcacccagtttatagactgaaactcaagttcaaaaggggctctctgccacctactatgccactggagtttgtgtgctgtatcggcgggtgtgacgacacactccgcgagattcttgacctcaggttctctgggggccccccccgagcttcacaaccaagcgggcgtctccaagccaatcaaagcttaaaccgaatggacaattcacagcacccacagccagccgactctcggcagacgggcagctcgaaggctcttgcgcaaactctcccgcccccaactgccgccggagagtctaattcagtcacctgtaactgtggccaagaggcggtgctgctgacggtaagaaaagaaggccctaataggggcagacagtttttcaagtgcaatggggggagttgcaatttcttcctatgggccgattcacctaatcccggggcgggaggtcctccagcactcgcttacaggccattgggggcctctctcggctgtccacccggaccgggcatccacctgggcggcttcggcaatcctggcgacgggtccggatccggtacatcctgtctgtgctcgcagccgtctgtcacacgcactgtgcaaaaagacggccccaacaagggcaggcagttccacacttgtgcgaaaccacgggagcagcaatgcggattctttcagtgggtggacgaaaataccgctcctggaacatcaggcgcaccgtcttggacaggggatcgcggcagaactctggagtctgaggcgcgtagcaagaggccccgcgcctcatcttcagatatgggcagcactgccaaaaagccaaggaagtgtagtctgtgccaccaacccggtcacacacgccctttttgcccacagaatcggtag

SEQ ID NO: 148154 - DNA, 3006 bp, Artificial Sequence
  derived and/or modified sequence
atgatcttccctgtggcccgctatgccctgcgctggctgcggcggccagaagatcgggccttcagccgggccgccatggagatggccctgcggggcgtgaggaaggtgctgtgtgtggccgagaagaatgatgctgccaagggcattgctgacctgctgagcaatggaaggatgagaagaagagagggcctgagcaagttcaacaagatctatgaatttgactaccacctgtatggccagaatgtgaccatggtgatgacctctgtgtctggccacctgctggcccatgacttccagatgcagttcaggaagtggcagagctgcaaccccctggtgctgtttgaggccgagattgagaagtactgcccagagaactttgtggacatcaagaagaccctggagcgggagacccggcagtgccaggccctggtgatctggacagactgtgaccgggagggggagaacatcggctttgagatcatccacgtgtgcaaggctgtgaagcccaacctgcaggtgctgcgggcccgcttcagcgagatcacccctcatgctgtgaggacagcctgtgagaacctgacagagccagaccagagggtgtctgatgctgtggatgtgcggcaggagctggacctgcgcatcggggccgccttcacccgcttccagaccctgcggctgcagaggatcttccctgaggtgctggccgagcagctgatctcctatggcagctgccagttccccaccctgggctttgtggtggagcgcttcaaggccatccaggcctttgtgcctgagatcttccaccgcatcaaggtgacccatgaccacaaggatggcatcgtggagttcaactggaagaggcacaggctcttcaaccacacagcctgcctggtgctgtaccagctgtgtgtggaggaccccatggccaccgtggtggaggtgcgcagcaagcccaagagcaagtggaggccccaggccctggacacagtggagctggagaagctggccagcaggaagctgcgcatcaatgccaaggagaccatgagaattgctgagaagctgtacacccagggctacatctcctaccccaggacagagaccaacatcttcccccgggacctgaacctgactgtgctggtggagcagcagaccccagacccccgctggggcgcctttgcccagagcatcctggagcggggcggccccaccccaagaaatggaaacaagagtgaccaggcccacccccccatccaccccaccaagtacaccaacaacctgcagggagatgagcagaggctgtatgagttcatcgtgcgccacttcctggcctgctgcagccaggatgcccagggccaggagaccaccgtggagattgacatcgcccaggagagatttgtggcccacggcctgatgatcctggccaggaactacctggatgtgtacccctatgaccactggagcgacaagatcctgcctgtgtatgagcagggcagccacttccagcccagcacagtggagatggtggatggagagaccagcccccccaagctgctgacagaagctgacctgattgccctgatggagaagcacggcatcggcacagatgccacccatgctgagcacatcgagaccatcaaggccaggatgtatgtgggcctgaccccagacaagcgcttcctgcccggccacctgggcatgggcctggtggagggctatgacagcatgggctatgagatgagcaagccagacctgcgggcagagctggaggccgacctgaagctgatctgtgatggcaagaaggacaagtttgtggtgctgcggcagcaggtgcagaagtacaagcaggtgttcatcgaggccgtggccaaggccaagaagctggatgaggccctggcccagtactttggaaatggaacagagctggcccagcaggaggacatctacccagccatgcctgagcccatcagaaaatgtccccagtgcaacaaggacatggtgctgaagaccaagaagaatggaggcttctacctgagctgcatgggcttccctgagtgccgctctgctgtgtggctgcctgacagcgtgctggaggccagccgggacagctctgtgtgccctgtgtgccagccccaccctgtgtaccgcctgaagctgaagttcaagaggggcagcctgccccccaccatgcccctggagtttgtgtgctgcattggaggctgtgatgacaccctgcgggagatcctggacctgcgcttcagcggcggccccccccgggccagccagcccagcggccgcctgcaggccaaccagagcctgaacaggatggacaacagccagcacccccagcctgctgacagccggcagacaggcagcagcaaggccctggcccagaccctgcccccacccacagctgctggggagagcaacagcgtgacctgcaactgtggccaggaggccgtgctgctgactgtgaggaaggagggccccaacagaggccggcagttcttcaagtgcaatggaggcagctgcaacttcttcctgtgggccgacagccccaaccctggggccggcggccccccagccctggcctaccggcccctgggcgccagcctgggctgccccccaggccctggcatccacctgggcggcttcggcaaccctggagatggcagcggcagcggcaccagctgcctgtgcagccagcccagcgtgaccaggacagtgcagaaggatggccccaacaagggccggcagttccacacctgtgccaagccccgggagcagcagtgtggcttcttccagtgggtggatgagaacacagcccctggcaccagcggggcccccagctggacaggagaccggggccgcaccctggagagcgaggcccggagcaagaggccccgggccagcagcagtgacatgggcagcacagccaagaagcccaggaagtgcagcctgtgccaccagcccggccacacccggcccttctgcccccagaacagatag

SEQ ID NO: 148155 - DNA, 3006 bp, Artificial Sequence
  derived and/or modified sequence
atgatcttccccgtggcccggtacgccctgcggtggctgcggcggccagaagatcgcgcattctcgagagcagccatggagatggcactcaggggtgtgaggaaggtgctttgtgtggccgagaaaaacgatgcagctaagggtatcgccgatctactttccaacggaaggatgcggcgcagggaagggctcagtaaattcaacaaaatttacgagttcgattaccacctatatggtcaaaacgtgactatggtcatgacaagcgtctcagggcatctcctggcgcacgatttccagatgcaattcaggaagtggcaaagttgtaatcctctggtgttgttcgaagcagagatcgaaaaatactgcccggagaacttcgttgatatcaagaaaactctggaacgggaaacaagacaatgccaggccttggtgatttggaccgactgcgatagggaaggagaaaatattgggtttgagattatacatgtgtgtaaggcagttaagccaaacctccaggtactgagagccagattctcagagattacaccccacgctgtccgaacagcctgcgaaaacttgaccgagcctgaccagagagtaagtgacgctgtagatgtaaggcaggagctggatctgcgtatcggagcagccttcactcgcttccagaccctgaggctgcagaggatttttcccgaggttttggccgaacagctcatctcttatggcagttgccagttccctaccctggggtttgtggtcgaacggttcaaagcgatacaggcctttgtccctgaaatattccatcggatcaaagtgactcatgaccataaggacggcatcgtggaattcaactggaagaggcatcgcctgttcaaccacaccgcctgtctcgtgttgtaccagctctgtgtggaagaccctatggccacagtggttgaggtgagaagcaagcctaaatccaagtggagaccccaagcgctggacacagtcgagttggagaaactggcttctcgtaaactgcgtatcaatgctaaggagaccatgcggatcgcagagaagttgtatacccagggatatatatcctacccccgcacagagacaaatatctttccccgagatctgaacctgaccgtgttggtggagcagcagacaccagatccaaggtggggcgccttcgcccaatcaattttagagcgcggcggacctacacccagaaacggtaataaatcagatcaggcgcaccccccaattcatccgacgaagtataccaacaacctgcagggggacgaacaacgactgtacgagttcatcgtgagacacttcttggcttgctgtagtcaggatgcccagggccaggagactactgttgaaattgacattgctcaggagcgatttgtggcccatgggttgatgatcctggcaagaaactatctcgacgtgtacccttacgaccactggagtgacaagatcctgcccgtgtacgaacagggtagtcattttcagcccagtaccgtcgagatggtcgatggggagacatccccccctaagctgctgacggaagctgatctcattgccctgatggaaaaacacgggataggtacagacgccacacatgccgagcacattgagactataaaagcccgcatgtacgtaggcttaactcctgataaacgcttcctgcctggccacctcggcatgggtctggtggagggctatgatagcatgggatacgagatgagcaagcctgatttgagggccgagctcgaagccgatctcaagctcatttgcgatgggaaaaaggacaaatttgtagtgctgagacagcaagtgcagaaatacaaacaggtattcatcgaggcagtggcgaaggcaaaaaagctagacgaggcacttgcacagtactttggcaacggcacagagcttgctcagcaggaagacatctacccagccatgcctgagcccattcggaaatgccctcagtgcaacaaagatatggtcctgaagacaaagaagaacggcggcttctatctgagttgcatggggtttcccgagtgtaggtcagctgtctggctccccgattccgtcttggaagctagccgggattctagtgtgtgccctgtatgtcaaccccacccggtttacaggctgaagctgaagttcaaacgcggatcccttcctccaaccatgcccttggagttcgtatgttgtattgggggctgcgatgacactcttcgagagatcctggacctgcgattttccgggggcccacctcgggcatctcagccttctgggcggctgcaagccaaccagagccttaaccgcatggataacagccagcacccgcagcccgcagattcgagacagaccgggtcttctaaagccctcgcccagactctgccgcctccaactgccgctggcgaatctaactctgtcacgtgtaactgcggccaggaggcagtgctgctgacagtgaggaaggaagggcctaatcggggacgacagttttttaaatgcaacggtggaagttgtaacttttttctctgggcggactctcccaaccctggagcgggggggcctccagccctggcctacagacccttaggagcaagccttggttgccctccaggaccgggtatacatcttggcggatttggcaacccgggagacggctcaggtagcggaaccagctgcctgtgtagtcagccatccgtgaccagaactgtgcagaaggacgggcctaataagggcaggcagttccatacttgcgctaagccccgggagcagcagtgcggattcttccagtgggtagacgaaaatacagcacccggcacttcaggcgcccccagctggacgggcgacagaggtcggaccctggagagtgaagccagaagtaaaagacctcgagcctcttcctctgatatgggctccacagccaagaagcccagaaagtgttccctctgccaccagcccgggcacacccgacccttctgtcctcagaatagatag

SEQ ID NO: 148156 - DNA, 3006 bp, Artificial Sequence
  derived and/or modified sequence
atgattttcccagtggcccgatatgcacttaggtggttgcggcgaccagaggatagggccttctctcgagcagcaatggagatggcactgcggggagtgcgtaaggtgttatgtgtcgctgagaaaaatgatgccgctaaaggaattgctgatttactatccaacggacgtatgagacggcgagaaggactttcaaaattcaataagatctacgagttcgattatcacttgtacggccagaacgtgacgatggtcatgacatcagtgagtggccacctccttgcccatgatttccaaatgcagttcaggaagtggcagtcctgcaaccctctcgttctgtttgaagctgaaattgaaaagtattgtccagagaactttgtggacatcaagaaaaccctcgagagagaaactaggcagtgccaggcactagtgatttggaccgactgtgacagggaaggggagaacattgggtttgagattatccacgtgtgcaaagcagttaaaccgaatctccaggtgctccgagcaagattctcggagatcaccccgcacgccgtcagaaccgcatgtgagaatctgacggagcctgatcagagagtttcagacgccgtagacgtgcgtcaagaactggatctgaggattggagcagcattcactcgcttccagacactaagactacagaggatttttcctgaggttctggcagagcagcttatttcatatggaagctgccagttcccgactctcggattcgtagtggaaaggttcaaggctattcaggcatttgtgcccgagatatttcaccgtatcaaagtgacccacgatcacaaggatgggatagtggagtttaactggaagcgccaccggctgtttaaccacaccgcttgtttggtgctctaccaactgtgcgtggaggacccaatggccactgtggtggaagtaagaagcaagcctaagtctaagtggcgaccacaggccctcgacaccgtggaactggaaaaactggccagccgcaaactgcggataaatgcaaaggagacaatgcgcatcgcggagaaactttacacccaagggtacatcagttacccacgcacagaaacgaatatctttccaagagacctcaatctcaccgttcttgtcgagcaacaaactccggaccctcgctggggcgcattcgctcagagtattttagaaagaggtggtccaactccacggaatggaaacaaaagtgaccaagcacacccacccatccatcccaccaagtacactaacaaccttcagggggatgaacagaggctctacgagtttatagtgagacacttcctagcctgctgcagccaggatgcacagggccaagaaacaactgtcgaaatcgacattgcccaggaacgcttcgtggcccatggtctcatgatactggcaaggaattacttggacgtctacccttacgaccattggtccgacaaaatcttacctgtgtacgagcaggggtcacatttccagcctagcacagtggaaatggttgacggagaaactagcccacccaagcttttaacggaggccgacctgattgctctcatggaaaagcatggcataggtactgacgctacccatgccgaacacatcgaaaccattaaggcacgaatgtacgtcgggcttactcctgacaagaggttcctgccgggtcaccttgggatggggttggtagagggttacgattcaatggggtatgagatgagtaagccggatctgcgggctgaactggaagccgatctcaagctgatctgcgacggtaaaaaggataaattcgttgtgctccgtcaacaggtccagaaatataaacaggtgttcattgaggccgtggccaaggctaagaaactggatgaggctttagcccagtactttggcaatgggacagagctggcccaacaagaagatatttaccccgctatgccggagcccatccgcaaatgtcctcagtgcaataaagatatggtgcttaaaaccaaaaagaacggcggattttacctgtcttgcatgggcttccccgaatgcaggtcagctgtgtggctcccagattcagtccttgaggccagcagggattcatctgtctgccccgtgtgtcagccccaccccgtatatagactgaagttgaagtttaaaagaggcagcctacctcccactatgcctcttgagtttgtgtgttgcatcggcggttgcgatgatacactcagagagatcctggatctccgctttagcggagggcctcctagagcatctcagccctctggcaggctgcaggcaaaccagtccttgaaccggatggacaacagtcaacaccctcagcctgctgacagccgccagacaggctcttctaaagccctggcccagaccctcccaccgcctacagccgctggagagtccaattctgttacgtgcaactgcggccaggaagctgtcctgctcaccgtgcgcaaggaggggcctaatcggggtcgtcagttttttaagtgcaacgggggatcctgcaactttttcctttgggctgattctccaaacccaggcgctggagggccaccagccctggcctataggccactcggtgccagtttagggtgtccccctggtcccggaatacatctgggtggctttgggaatccaggagatggctctgggagcgggacttcatgcttgtgctcgcagcccagcgttacacggacggtgcagaaagacgggccaaacaaaggccgacagtttcacacgtgtgcaaagccccgagagcaacaatgtggattcttccagtgggtcgacgagaatactgcgcctggtactagcggggcacccagctggactggggataggggtcggaccctggaatcagaagctaggtcaaagcggcctagggcctcatcaagtgacatgggatcgactgcaaaaaagcccagaaagtgcagcctttgccaccagcccggacataccagacctttctgcccccagaacagatag

SEQ ID NO: 148157 - DNA, 3786 bp, Artificial Sequence
  derived and/or modified sequence
ctggattcggtgctgaggcggcggctgcggcacgggaaaggctcagtgactgaagctccaaaggccagcaggctggtggggacgtgaccgaagcgaggctctggttccctttcggtgggcgccatttgagcctcatctctggcttccccaggatgcgccggcagccggggagcggctccgggcgcgaggtctgaggatgatctttcctgtcgcccgctacgcgctccggtggctgcgacggcccgaagaccgtgccttttcccgcgccgccatggagatggccctccgaggcgtgcggaaagtcctctgtgtggccgaaaaaaacgacgcggccaaggggatcgccgacctgctgtcaaacggtcgcatgaggcggagagaaggactttcaaaattcaacaagatctatgaatttgattatcatctgtatggccagaatgttaccatggtaatgacttcagtttctggacatttactggctcatgatttccagatgcagtttcgaaaatggcagagctgcaaccctcttgtcctctttgaagcagaaattgaaaagtactgcccagagaattttgtagacatcaagaaaactttggaacgagagactcgccagtgccaggctctggtgatctggactgactgtgatagagaaggcgaaaacatcgggtttgagattatccacgtgtgtaaggctgtaaagcccaatctgcaggtgttgcgagcccgattctctgagatcacaccccatgccgtcaggacagcttgtgaaaacctgaccgagcctgatcagagggtgagcgatgctgtggatgtgaggcaggagctggacctgaggattggagctgcctttactaggttccagaccctgcggcttcagaggatttttcctgaggtgctggcagagcagctcatcagttacggcagctgccagttccccacactgggctttgtggtggagcggttcaaagccattcaggcttttgtaccagaaatcttccacagaattaaagtaactcatgaccacaaagatggtatcgtagaattcaactggaaaaggcatcgactctttaaccacacggcttgcctagttctctatcagttgtgtgtggaggatcccatggcaactgtggtagaggtcagatctaagcccaagagcaagtggcggcctcaagccttggacactgtggagcttgagaagctggcttctcgaaagttgagaataaatgctaaagaaaccatgaggattgctgagaagctctacactcaagggtacatcagctatccccgaacagaaacaaacatttttcccagagacttaaacctgacggtgttggtggaacagcagacccccgatccacgctggggggcctttgcccagagcattctagagcggggtggtcccaccccacgcaatgggaacaagtctgaccaagctcaccctcccattcaccccaccaaatacaccaacaacttacagggagatgaacagcgactgtacgagtttattgttcgccatttcctggcttgctgctcccaggatgctcaggggcaggagaccacagtggagatcgacatcgctcaggaacgctttgtggcccatggcctcatgattctggcccgaaactatctggatgtgtatccatatgatcactggagtgacaagatcctccctgtctatgagcaaggatcccactttcagcccagcaccgtggagatggtggacggggagaccagcccacccaagctgctcaccgaggccgacctcattgccctcatggagaagcatggcattggtacggatgccactcatgcggagcacatcgagaccatcaaagcccggatgtacgtgggcctcaccccagacaagcggttcctccctgggcacctgggcatgggacttgtggaaggttatgattccatgggctatgaaatgtctaagcctgacctccgggctgaactggaagctgatctgaagctgatctgtgatggcaaaaaggacaaatttgtggttctaaggcagcaagtgcagaaatacaagcaggttttcattgaagcggtggctaaagcaaagaaattggacgaggccttggcccagtactttgggaatgggacagagttggcccagcaagaagatatctacccagccatgccagagcccatcaggaagtgcccacagtgcaacaaggacatggtccttaagaccaagaagaatggcgggttctacctcagctgcatgggtttcccagagtgtcgctcagctgtgtggcttcctgactcggtgctggaggccagcagggacagcagtgtgtgtccagtttgtcagccacaccctgtgtacaggttaaagttaaagtttaagcgcggtagccttcccccgaccatgcctctggagtttgtttgctgcatcggcggatgcgacgacaccctgagggagatcctggacctgagattttcagggggcccccccagggctagccagccctctggccgcctgcaggctaaccagtccctgaacaggatggacaacagccagcacccccagcctgctgacagcagacagactgggtcctcaaaggctctggcccagaccctcccaccacccacggctgctggtgaaagcaattctgtgacctgcaactgtggccaggaggctgtgctgctcactgtccgtaaggagggccccaaccggggccggcagttctttaagtgcaacggaggtagctgcaacttcttcctgtgggcagacagccccaatccgggagcaggagggcctcctgccttggcatatagacccctgggcgcctccctgggatgcccaccaggcccagggatccacctaggtgggtttggcaaccctggtgatggcagtggtagtggcacatcctgcctttgcagccagccctccgtcacacggactgtgcagaaggatggacccaacaaggggcgccagttccacacatgtgccaagccgagagagcagcagtgtggctttttccagtgggtcgatgagaacaccgctccagggacttctggagccccgtcctggacaggagacagaggaagaaccctggagtcggaagccagaagcaaaaggccccgggccagttcctcagacatggggtccacagcaaagaaaccccggaaatgcagcctttgccaccagcctggacacacccgtcccttttgtcctcagaacagatgagctcagggtagggtagagaacgccactttctcagacctgtcccctttgtgtttagaaatgagttaaccaggaccaagtggccatttagtgtcctggaaacttagaggacagtgttggcctttggagtcgggccttcttgtgttaaggggcacaaggtccagatcactctggagcaggccagctctgctggacagtgaccctcttcccaggcctcaggagtgaccatagccactgctgaaaagtcacgcagctgctccctcggaccccccaaggatggttgctgttagcagaggattggtgcagtcccagctgaagcccactgtgtgccaaaggaagaagctcccagggctgcttccttcacctgcagaaagccccaagtgagccaccagcactcatggggcagtccctgtccaggctgcccagggcttctcatagacgtcctgagaaggacggtgtaatgcaaggaaatggctgtggtaacactgatccttcagaagaagcttcattccctcttaatctagttaagccaggacatccagaattcattgctttaataaagaacccaggccgggtgcagtggctca

SEQ ID NO: 148158 - protein, 931 aa, Artificial Sequence
  derived and/or modified sequence
MSQSPAFGPRRGSSPRGAAGAAARRNESQDYLLMDSELGEDGCPQAPLPCYGYYPCFRGSDNRLAHRRQTVLREKGRRLANRGPAYMFSDRSTSLSIEEERFLDAAEYGNIPVVRKMLEECHSLNVNCVDYMGQNALQLAVANEHLEITELLLKKENLSRVGDALLLAISKGYVRIVEAILSHPAFAEGKRLATSPSQSELQQDDFYAYDEDGTRFSHDVTPIILAAHCQEYEIVHTLLRKGARIERPHDYFCKCNDCNQKQKHDSFSHSRSRINAYKGLASPAYLSLSSEDPVMTALELSNELAVLANIEKEFKNDYKKLSMQCKDFVVGLLDLCRNTEEVEAILNGDVETLQSGDHGRPNLSRLKLAIKYEVKKFVAHPNCQQQLLSIWYENLSGLRQQTMAVKFLVVLAVAIGLPFLALIYWFAPCSKMGKIMRGPFMKFVAHAASFTIFLGLLVMNAADRFEGTKLLPNETSTDNAKQLFRMKTSCFSWMEMLIISWVIGMIWAECKEIWTQGPKEYLFELWNMLDFGMLAIFAASFIARFMAFWHASKAQSIIDANDTLKDLTKVTLGDNVKYYNLARIKWDPSDPQIISEGLYAIAVVLSFSRIAYILPANESFGPLQISLGRTVKDIFKFMVIFIMVFVAFMIGMFNLYSYYIGAKQNEAFTTVEESFKTLFWAIFGLSEVKSVVINYNHKFIENIGYVLYGVYNVTMVIVLLNMLIAMINSSFQEIEDDADVEWKFARAKLWFSYFEEGRTLPVPFNLVPSPKSLFYLLLKLKKWISELFQGHKKGFQEDAEMNKINEEKKLGILGSHEDLSKLSLDKKQVGHNKQPSIRSSEDFHLNSFNNPPRQYQKIMKRLIKRYVLQAQIDKESDEVNEGELKEIKQDISSLRYELLEEKSQNTEDLAELIRELGEKLSMEPNQEETNR

SEQ ID NO: 148159 - protein, 876 aa, Artificial Sequence
  derived and/or modified sequence
MSQSPAFGPRRGSSPRGAAGAAARRNESQDYLLMDSELGEDGCPQAPLPCYGYYPCFRGSDNRLAHRRQTVLREKGRRLANRGPAYMFSDRSTSLSIEEERFLDAAEYGNIPVVRKMLEECHSLNVNCVDYMGQNALQLAVANEHLEITELLLKKENLSRVGDALLLAISKGYVRIVEAILSHPAFAEGKRLATSPSQSELQQDDFYAYDEDGTRFSHDVTPIILAAHCQEYEIVHTLLRKGARIERPHDYFCKCNDCNQKQKHDSFSHSRSRINAYKGLASPAYLSLSSEDPVMTALELSNELAVLANIEKEFKNDYKKLSMQCKDFVVGLLDLCRNTEEVEAILNGDVETLQSGDHGRPNLSRLKLAIKYEVKKMGKIMRGPFMKFVAHAASFTIFLGLLVMNAADRFEGTKLLPNETSTDNAKQLFRMKTSCFSWMEMLIISWVIGMIWAECKEIWTQGPKEYLFELWNMLDFGMLAIFAASFIARFMAFWHASKAQSIIDANDTLKDLTKVTLGDNVKYYNLARIKWDPSDPQIISEGLYAIAVVLSFSRIAYILPANESFGPLQISLGRTVKDIFKFMVIFIMVFVAFMIGMFNLYSYYIGAKQNEAFTTVEESFKTLFWAIFGLSEVKSVVINYNHKFIENIGYVLYGVYNVTMVIVLLNMLIAMINSSFQEIEDDADVEWKFARAKLWFSYFEEGRTLPVPFNLVPSPKSLFYLLLKLKKWISELFQGHKKGFQEDAEMNKINEEKKLGILGSHEDLSKLSLDKKQVGHNKQPSIRSSEDFHLNSFNNPPRQYQKIMKRLIKRYVLQAQIDKESDEVNEGELKEIKQDISSLRYELLEEKSQNTEDLAELIRELGEKLSMEPNQEETNR

SEQ ID NO: 148160 - DNA, 2796 bp, Artificial Sequence
  derived and/or modified sequence
atgagccagagccccgccttcggccccagaagaggcagcagccccagaggcgccgccggcgccgccgccagaagaaacgagagccaggactacctgctgatggacagcgagctgggcgaggacggctgcccccaggcccccctgccctgctacggctactacccctgcttcagaggcagcgacaacagactggcccacagaagacagaccgtgctgagagagaagggcagaagactggccaacagaggccccgcctacatgttcagcgacagaagcaccagcctgagcatcgaggaggagagattcctggacgccgccgagtacggcaacatccccgtggtgagaaagatgctggaggagtgccacagcctgaacgtgaactgcgtggactacatgggccagaacgccctgcagctggccgtggccaacgagcacctggagatcaccgagctgctgctgaagaaggagaacctgagcagagtgggcgacgccctgctgctggccatcagcaagggctacgtgagaatcgtggaggccatcctgagccaccccgccttcgccgagggcaagagactggccaccagccccagccagagcgagctgcagcaggacgacttctacgcctacgacgaggacggcaccagattcagccacgacgtgacccccatcatcctggccgcccactgccaggagtacgagatcgtgcacaccctgctgagaaagggcgccagaatcgagagaccccacgactacttctgcaagtgcaacgactgcaaccagaagcagaagcacgacagcttcagccacagcagaagcagaatcaacgcctacaagggcctggccagccccgcctacctgagcctgagcagcgaggaccccgtgatgaccgccctggagctgagcaacgagctggccgtgctggccaacatcgagaaggagttcaagaacgactacaagaagctgagcatgcagtgcaaggacttcgtggtgggcctgctggacctgtgcagaaacaccgaggaggtggaggccatcctgaacggcgacgtggagaccctgcagagcggcgaccacggcagacccaacctgagcagactgaagctggccatcaagtacgaggtgaagaagttcgtggcccaccccaactgccagcagcagctgctgagcatctggtacgagaacctgagcggcctgagacagcagaccatggccgtgaagttcctggtggtgctggccgtggccatcggcctgcccttcctggccctgatctactggttcgccccctgcagcaagatgggcaagatcatgagaggccccttcatgaagttcgtggcccacgccgccagcttcaccatcttcctgggcctgctggtgatgaacgccgccgacagattcgagggcaccaagctgctgcccaacgagaccagcaccgacaacgccaagcagctgttcagaatgaagaccagctgcttcagctggatggagatgctgatcatcagctgggtgatcggcatgatctgggccgagtgcaaggagatctggacccagggccccaaggagtacctgttcgagctgtggaacatgctggacttcggcatgctggccatcttcgccgccagcttcatcgccagattcatggccttctggcacgccagcaaggcccagagcatcatcgacgccaacgacaccctgaaggacctgaccaaggtgaccctgggcgacaacgtgaagtactacaacctggccagaatcaagtgggaccccagcgacccccagatcatcagcgagggcctgtacgccatcgccgtggtgctgagcttcagcagaatcgcctacatcctgcccgccaacgagagcttcggccccctgcagatcagcctgggcagaaccgtgaaggacatcttcaagttcatggtgatcttcatcatggtgttcgtggccttcatgatcggcatgttcaacctgtacagctactacatcggcgccaagcagaacgaggccttcaccaccgtggaggagagcttcaagaccctgttctgggccatcttcggcctgagcgaggtgaagagcgtggtgatcaactacaaccacaagttcatcgagaacatcggctacgtgctgtacggcgtgtacaacgtgaccatggtgatcgtgctgctgaacatgctgatcgccatgatcaacagcagcttccaggagatcgaggacgacgccgacgtggagtggaagttcgccagagccaagctgtggttcagctacttcgaggagggcagaaccctgcccgtgcccttcaacctggtgcccagccccaagagcctgttctacctgctgctgaagctgaagaagtggatcagcgagctgttccagggccacaagaagggcttccaggaggacgccgagatgaacaagatcaacgaggagaagaagctgggcatcctgggcagccacgaggacctgagcaagctgagcctggacaagaagcaggtgggccacaacaagcagcccagcatcagaagcagcgaggacttccacctgaacagcttcaacaacccccccagacagtaccagaagatcatgaagagactgatcaagagatacgtgctgcaggcccagatcgacaaggagagcgacgaggtgaacgagggcgagctgaaggagatcaagcaggacatcagcagcctgagatacgagctgctggaggagaagagccagaacaccgaggacctggccgagctgatcagagagctgggcgagaagctgagcatggagcccaaccaggaggagaccaacagatag

SEQ ID NO: 148161 - DNA, 2631 bp, Artificial Sequence
  derived and/or modified sequence
atgagccagagccccgccttcggccccagaagaggcagcagccccagaggcgccgccggcgccgccgccagaagaaacgagagccaggactacctgctgatggacagcgagctgggcgaggacggctgcccccaggcccccctgccctgctacggctactacccctgcttcagaggcagcgacaacagactggcccacagaagacagaccgtgctgagagagaagggcagaagactggccaacagaggccccgcctacatgttcagcgacagaagcaccagcctgagcatcgaggaggagagattcctggacgccgccgagtacggcaacatccccgtggtgagaaagatgctggaggagtgccacagcctgaacgtgaactgcgtggactacatgggccagaacgccctgcagctggccgtggccaacgagcacctggagatcaccgagctgctgctgaagaaggagaacctgagcagagtgggcgacgccctgctgctggccatcagcaagggctacgtgagaatcgtggaggccatcctgagccaccccgccttcgccgagggcaagagactggccaccagccccagccagagcgagctgcagcaggacgacttctacgcctacgacgaggacggcaccagattcagccacgacgtgacccccatcatcctggccgcccactgccaggagtacgagatcgtgcacaccctgctgagaaagggcgccagaatcgagagaccccacgactacttctgcaagtgcaacgactgcaaccagaagcagaagcacgacagcttcagccacagcagaagcagaatcaacgcctacaagggcctggccagccccgcctacctgagcctgagcagcgaggaccccgtgatgaccgccctggagctgagcaacgagctggccgtgctggccaacatcgagaaggagttcaagaacgactacaagaagctgagcatgcagtgcaaggacttcgtggtgggcctgctggacctgtgcagaaacaccgaggaggtggaggccatcctgaacggcgacgtggagaccctgcagagcggcgaccacggcagacccaacctgagcagactgaagctggccatcaagtacgaggtgaagaagatgggcaagatcatgagaggccccttcatgaagttcgtggcccacgccgccagcttcaccatcttcctgggcctgctggtgatgaacgccgccgacagattcgagggcaccaagctgctgcccaacgagaccagcaccgacaacgccaagcagctgttcagaatgaagaccagctgcttcagctggatggagatgctgatcatcagctgggtgatcggcatgatctgggccgagtgcaaggagatctggacccagggccccaaggagtacctgttcgagctgtggaacatgctggacttcggcatgctggccatcttcgccgccagcttcatcgccagattcatggccttctggcacgccagcaaggcccagagcatcatcgacgccaacgacaccctgaaggacctgaccaaggtgaccctgggcgacaacgtgaagtactacaacctggccagaatcaagtgggaccccagcgacccccagatcatcagcgagggcctgtacgccatcgccgtggtgctgagcttcagcagaatcgcctacatcctgcccgccaacgagagcttcggccccctgcagatcagcctgggcagaaccgtgaaggacatcttcaagttcatggtgatcttcatcatggtgttcgtggccttcatgatcggcatgttcaacctgtacagctactacatcggcgccaagcagaacgaggccttcaccaccgtggaggagagcttcaagaccctgttctgggccatcttcggcctgagcgaggtgaagagcgtggtgatcaactacaaccacaagttcatcgagaacatcggctacgtgctgtacggcgtgtacaacgtgaccatggtgatcgtgctgctgaacatgctgatcgccatgatcaacagcagcttccaggagatcgaggacgacgccgacgtggagtggaagttcgccagagccaagctgtggttcagctacttcgaggagggcagaaccctgcccgtgcccttcaacctggtgcccagccccaagagcctgttctacctgctgctgaagctgaagaagtggatcagcgagctgttccagggccacaagaagggcttccaggaggacgccgagatgaacaagatcaacgaggagaagaagctgggcatcctgggcagccacgaggacctgagcaagctgagcctggacaagaagcaggtgggccacaacaagcagcccagcatcagaagcagcgaggacttccacctgaacagcttcaacaacccccccagacagtaccagaagatcatgaagagactgatcaagagatacgtgctgcaggcccagatcgacaaggagagcgacgaggtgaacgagggcgagctgaaggagatcaagcaggacatcagcagcctgagatacgagctgctggaggagaagagccagaacaccgaggacctggccgagctgatcagagagctgggcgagaagctgagcatggagcccaaccaggaggagaccaacagatag

SEQ ID NO: 148162 - DNA, 2796 bp, Artificial Sequence
  derived and/or modified sequence
atgtcccaaagtcctgcttttggtcctagaagaggctctagcccccgcggagctgcgggtgccgccgcgcgtagaaatgagagccaagattacttgctgatggatagcgagctcggcgaagacggatgtccacaagcgcccctgccgtgctacggatattatccatgcttccgaggctcagataacagactggctcacaggcgacagaccgttttacgggagaaaggccggcggctagccaacaggggccctgcctatatgttttctgaccggtcaacatccttgtcgatcgaagaagagcgcttcctggatgccgccgagtacggaaacattccagtggtgcggaagatgctggaggaatgtcactcactcaatgtgaattgcgtagactatatgggacagaatgctctccagctggctgtagcgaatgaacacctggaaatcacagaattattgctaaaaaaagaaaatttatcccgggtaggggatgcgctgctcctggctatctccaagggttacgtgagaatagtggaggccattctgtcacacccagcgtttgcagaaggtaaaagactagcgacttctcccagtcagtctgagctgcaacaagacgatttttatgcctatgatgaggacgggaccaggttctcccacgacgtgacacccataattctggccgctcattgtcaggaatacgagattgttcatacactgttgaggaaaggtgccagaatcgagcgccctcacgactacttctgtaagtgtaacgattgtaatcaaaagcaaaaacatgatagctttagtcatagccggtcaagaatcaacgcgtataaaggactggcgagtcctgcttacctgagcctgtcttcagaagatcctgtaatgaccgcacttgaacttagcaatgaattagctgtcctcgccaatatcgaaaaggaattcaagaatgattacaagaagctcagtatgcagtgtaaggatttcgtggtaggactgctcgatctgtgccggaacacagaagaggttgaagcgattctgaacggcgacgtcgaaactctgcagtctggggaccatggaagacctaatctgtctcggctgaaactggcaataaagtacgaagtcaaaaaatttgtcgcacaccctaattgtcaacagcagctcctgtctatttggtatgaaaatctgagtgggctacgccaacagaccatggcagtgaagtttctggtggtattagcggtggctatcgggctcccattccttgcactgatctactggttcgccccatgttccaaaatgggaaagataatgaggggcccctttatgaaatttgtcgctcacgcggctagctttaccatattcctggggctattggtcatgaacgcggctgaccgattcgagggaaccaaactcctccctaacgaaaccagtaccgataacgcaaagcagctatttagaatgaagacttcgtgtttcagctggatggaaatgttaattatttcctgggtcataggaatgatttgggcagagtgtaaagagatctggacacaggggcctaaggagtacttgttcgaactgtggaacatgctggatttcgggatgctggccatctttgcagctagctttattgccagattcatggctttttggcatgcttcgaaagcccaaagcattatcgacgccaacgacacactaaaggatctgacaaaggtcacgctgggcgacaacgtcaaatattataaccttgcccgaatcaagtgggacccctctgacccccaaattatcagcgaagggctgtacgcaatcgccgtagtcctatcgttttctcgtatagcatatatcctgcccgccaatgaatcgttcggcccactgcagatctccctgggccgcactgtcaaagacatctttaagtttatggtgatttttatcatggtgttcgtggccttcatgatcggtatgttcaatctgtactcttattatattggggcaaaacaaaacgaagctttcacgaccgtcgaagaaagctttaaaactctgttctgggccatttttggactgtcggaagtcaagtctgttgtgatcaattacaaccataaattcatcgagaatataggctacgttctgtacggagtctacaacgttacaatggtgatagttctgctaaatatgctgatcgccatgatcaatagctcctttcaggagatcgaagatgacgctgatgtggagtggaagtttgcacgagccaaactttggttttcttattttgaagagggccgtacactgcctgtgccgttcaacctcgtacctagtcctaagagccttttttacttgctcctgaagttgaaaaagtggataagtgaactgtttcaggggcacaaaaaaggatttcaggaagatgctgagatgaataaaattaacgaggagaagaagctgggaattctgggttcccacgaagatttgtccaagctgtcccttgataagaagcaagtgggccataacaagcagcccagcataaggagttccgaggatttccatctcaacagtttcaataaccccccccggcagtatcaaaaaattatgaaacgtcttattaagcggtatgtcctgcaggctcagattgataaagaatccgacgaggttaacgaaggagagctgaaagagatcaaacaggatatttcatctttgaggtacgagctgctggaggaaaagagccaaaacaccgaagatttagctgagctgatccgcgagctcggggaaaagctaagcatggaaccgaatcaggaagagaccaatcggtag

SEQ ID NO: 148163 - DNA, 2631 bp, Artificial Sequence
  derived and/or modified sequence
atgtcccagtcgcccgccttcggaccacgtcgaggatcctcccctaggggcgctgcaggggcggccgcacgccgcaacgaatcacaggactacctcctgatggattctgagttaggtgaagacggatgcccgcaggcacccctgccctgttatgggtattacccttgctttagagggagcgataaccgactcgcacacagacggcagactgttctaagagaaaagggaagaagactcgcaaacagagggcctgcctatatgttttcagacagaagtacctccctttccattgaagaggagagatttttggatgctgccgagtacggaaacatcccggtcgtgaggaagatgttggaggaatgtcatagcctgaacgttaattgtgttgactacatgggccagaatgctctgcagctggccgtcgcaaacgagcacttggagatcaccgaattactgctcaaaaaggagaatctgtcccgggtgggcgacgcgcttcttctcgccatttcaaagggctatgtgaggatcgttgaagcgatcttgagtcatccagcttttgctgagggaaaacgtctggccacgtcaccaagtcagagcgagttacagcaggacgatttctacgcgtatgacgaggatgggacccgcttctctcatgacgttacaccaataatcctggccgcacattgccaggagtacgaaatcgtccacactctgttgcgtaaaggtgcccgcatcgaacgcccgcacgattacttttgcaaatgcaacgattgtaaccaaaaacagaaacatgacagcttttcccacagtcggtccaggatcaatgcttacaagggattggctagccccgcctacctttcattgagtagtgaagatcctgtcatgaccgctctggaactttccaacgagttggcggttctcgcgaatatcgagaaggagtttaaaaacgactataagaagctgtctatgcagtgtaaagacttcgtcgtggggctgctggatctttgtagaaacaccgaggaagtggaggccatcctgaatggggacgtggagactctccagagcggtgaccacggacggcccaacctgtcacgacttaaactcgccattaagtatgaggtgaagaagatgggaaagataatgcgcgggccttttatgaaattcgtggcgcacgccgccagctttacgatttttctgggactcctggtaatgaatgctgctgacagattcgaggggaccaaactgcttcctaacgagacatccaccgataacgcgaagcagctctttcggatgaagacaagctgtttcagttggatggagatgctcatcatcagctgggtgataggcatgatttgggccgaatgtaaagaaatatggacgcaaggacccaaggagtaccttttcgagctttggaacatgttggatttcggaatgctggccatctttgctgcctcgttcatcgccaggttcatggccttttggcatgctagtaaggctcagagtattattgacgcgaacgacacattaaaggatctcacaaaagtgacacttggtgataatgtaaaatactataacctcgccaggatcaagtgggacccctccgatccccagatcatttctgagggactgtatgccattgctgtggtgttgagtttttcccggattgcatatatcctgcctgctaatgaatcttttggtccccttcagattagtctcggccggaccgtgaaagatatttttaaatttatggtgatctttataatggtattcgttgctttcatgattgggatgttcaacctttatagctactatataggagcgaagcagaacgaagcctttacgaccgtggaggaatcttttaagacactgttctgggcgatcttcgggctcagtgaagtaaagtccgtcgtcatcaactacaatcacaaattcatcgaaaacataggatacgtgctgtatggtgtgtataacgtgaccatggtcatagtattgctgaacatgttgattgctatgatcaatagtagcttccaggagattgaggacgacgcagacgtggaatggaaatttgcacgtgcaaagttgtggttttcttactttgaggaaggcaggaccctgcctgtgccattcaatctcgttccaagccccaaaagtcttttctatctcctgcttaagctgaagaagtggattagcgaactctttcaaggacacaaaaaggggtttcaggaagatgccgagatgaacaagattaacgaagagaaaaagctcggtattctgggatcacatgaggatctgagcaaactaagcctggacaagaaacaggtcggacacaacaaacagccctccatccggtcgtctgaggattttcaccttaactcctttaataatccgcccaggcagtaccagaagattatgaaacggctgatcaagaggtatgtcttacaggcccaaattgacaaagagtccgacgaagtaaacgaaggggaattaaaggagattaagcaggacatatcaagccttagatatgagctgttagaagaaaaatcgcagaatactgaagaccttgcagagctcattcgagagcttggcgaaaaattaagtatggaacctaaccaggaggagaccaatcggtag

SEQ ID NO: 148164 - DNA, 2796 bp, Artificial Sequence
  derived and/or modified sequence
atgagccagagccctgccttcggcccccggcggggcagcagccccagaggagctgctggagctgctgccaggagaaatgaaagccaggactacctgctgatggacagcgagctgggggaggatggctgcccccaggcccccctgccctgctacggctactacccctgcttccggggcagtgacaaccggctggcccaccggcggcagacagtgctgcgggagaagggccgccgcctggccaacagaggccctgcctacatgttcagtgacaggagcaccagcctgagcattgaggaggagcgcttcctggatgctgctgaatatggcaacatccctgtggtgaggaagatgctggaggagtgccacagcctgaatgtgaactgtgtggactacatgggccagaatgccctgcagctggccgtggccaatgagcacctggagatcacagagctgctgctgaagaaggagaacctgagccgggtgggagatgccctgctgctggccatcagcaagggctacgtgcgcatcgtggaggccatcctgagccacccagcctttgctgagggcaagaggctggccaccagccccagccagagcgagctgcagcaggatgacttctacgcctatgatgaagatggcacccgcttcagccatgatgtgacccccatcatcctggccgcccactgccaggagtatgagatcgtgcacaccctgctgaggaaaggagccagaattgagcggccccatgactacttctgcaagtgcaatgactgcaaccagaagcagaagcatgacagcttcagccacagccgcagccgcatcaatgcctacaagggcctggccagccctgcctacctgagcctgagcagtgaagatcctgtgatgacagccctggagctgagcaatgagctggccgtgctggccaacatcgagaaggagttcaagaatgactacaagaagctgtccatgcagtgcaaggactttgtggtgggcctgctggacctgtgcaggaacacagaggaggtggaggccatcctgaatggagatgtggagaccctgcagagcggggaccacggccggcccaacctgagccggctgaagctggccatcaagtatgaggtgaagaagtttgtggcccaccccaactgccagcagcagctgctgagcatctggtatgagaacctgagcggcctgcggcagcagaccatggctgtgaagttcctggtggtgctggccgtggccatcggcctgcccttcctggccctgatctactggtttgccccctgcagcaagatgggcaagatcatgaggggccccttcatgaagtttgtggcccatgctgccagcttcaccatcttcctgggcctgctggtgatgaatgctgctgacagatttgagggcaccaagctgctgcccaatgagaccagcacagacaatgccaagcagctgttcaggatgaagaccagctgcttctcctggatggagatgctgatcatctcctgggtgattggcatgatctgggccgagtgcaaggagatctggacccagggccccaaggagtacctgtttgagctgtggaacatgctggactttggcatgctggccatctttgctgccagcttcatcgcccgcttcatggccttctggcacgccagcaaggcccagagcatcattgatgccaatgacaccctgaaggacctgaccaaggtgaccctgggggacaacgtgaagtactacaacctggcccgcatcaagtgggaccccagcgacccccagatcatcagcgagggcctgtatgccatcgctgtggtgctgtccttcagccgcatcgcctacatcctgcctgccaatgaaagctttggccccctgcagatcagcctgggccgcacagtgaaggacatcttcaagttcatggtgatcttcatcatggtgtttgtggccttcatgattggcatgttcaacctgtacagctactacatcggggccaagcagaatgaggccttcaccaccgtggaggagagcttcaagaccctcttctgggccatcttcggcctgtctgaggtgaagtctgtggtgatcaactacaaccacaagttcattgaaaatattggctacgtgctgtatggagtgtacaacgtgaccatggtgattgtgctgctgaacatgctgattgccatgatcaacagcagcttccaggagattgaagatgatgctgatgtggagtggaagtttgcccgggccaagctgtggttctcctactttgaggagggccgcaccctgcctgtgcccttcaacctggtgcccagccccaagagcctcttctacctgctgctgaagctgaagaagtggatcagcgagctgttccagggccacaagaagggcttccaggaggatgctgagatgaacaagatcaatgaggagaagaagctgggcatcctgggcagccatgaggacctgagcaagctgagcctggacaagaagcaggtgggccacaacaagcagcccagcatccgcagcagcgaggacttccacctgaacagcttcaacaaccccccccggcagtaccagaagatcatgaagaggctcatcaagcgctacgtgctgcaggcccagattgacaaggagagtgatgaggtgaatgaaggagagctgaaggagatcaagcaggacatcagcagcctgcgctatgagctgctggaggagaagagccagaacacagaggacctggccgagctgatccgggagctgggggagaagctgtccatggagcccaaccaggaggagaccaacagatag

SEQ ID NO: 148165 - DNA, 2631 bp, Artificial Sequence
  derived and/or modified sequence
atgagccagagccctgccttcggcccccggcggggcagcagccccagaggagctgctggagctgctgccaggagaaatgaaagccaggactacctgctgatggacagcgagctgggggaggatggctgcccccaggcccccctgccctgctacggctactacccctgcttccggggcagtgacaaccggctggcccaccggcggcagacagtgctgcgggagaagggccgccgcctggccaacagaggccctgcctacatgttcagtgacaggagcaccagcctgagcattgaggaggagcgcttcctggatgctgctgaatatggcaacatccctgtggtgaggaagatgctggaggagtgccacagcctgaatgtgaactgtgtggactacatgggccagaatgccctgcagctggccgtggccaatgagcacctggagatcacagagctgctgctgaagaaggagaacctgagccgggtgggagatgccctgctgctggccatcagcaagggctacgtgcgcatcgtggaggccatcctgagccacccagcctttgctgagggcaagaggctggccaccagccccagccagagcgagctgcagcaggatgacttctacgcctatgatgaagatggcacccgcttcagccatgatgtgacccccatcatcctggccgcccactgccaggagtatgagatcgtgcacaccctgctgaggaaaggagccagaattgagcggccccatgactacttctgcaagtgcaatgactgcaaccagaagcagaagcatgacagcttcagccacagccgcagccgcatcaatgcctacaagggcctggccagccctgcctacctgagcctgagcagtgaagatcctgtgatgacagccctggagctgagcaatgagctggccgtgctggccaacatcgagaaggagttcaagaatgactacaagaagctgtccatgcagtgcaaggactttgtggtgggcctgctggacctgtgcaggaacacagaggaggtggaggccatcctgaatggagatgtggagaccctgcagagcggggaccacggccggcccaacctgagccggctgaagctggccatcaagtatgaggtgaagaagatgggcaagatcatgaggggccccttcatgaagtttgtggcccacgccgccagcttcaccatcttcctgggcctgctggtgatgaatgctgctgacagatttgagggcaccaagctgctgcccaatgagaccagcacagacaatgccaagcagctgttcaggatgaagaccagctgcttctcctggatggagatgctgatcatctcctgggtgattggcatgatctgggccgagtgcaaggagatctggacccagggccccaaggagtacctgtttgagctgtggaacatgctggactttggcatgctggccatctttgctgccagcttcatcgcccgcttcatggccttctggcacgccagcaaggcccagagcatcattgatgccaatgacaccctgaaggacctgaccaaggtgaccctgggggacaacgtgaagtactacaacctggcccgcatcaagtgggaccccagcgacccccagatcatcagcgagggcctgtatgccatcgctgtggtgctgtccttcagcagaattgcctacatcctgcctgccaatgaaagctttggccccctgcagatcagcctgggccgcacagtgaaggacatcttcaagttcatggtgatcttcatcatggtgtttgtggccttcatgattggcatgttcaacctgtacagctactacatcggggccaagcagaatgaggccttcaccaccgtggaggagagcttcaagaccctcttctgggccatcttcggcctgtctgaggtgaagtctgtggtgatcaactacaaccacaagttcatcgagaacatcggctacgtgctgtatggagtgtacaacgtgaccatggtgattgtgctgctgaacatgctgattgccatgatcaacagcagcttccaggagattgaagatgatgctgatgtggagtggaagtttgcccgggccaagctgtggttctcctactttgaggagggccgcaccctgcctgtgcccttcaacctggtgcccagccccaagagcctcttctacctgctgctgaagctgaagaagtggatcagcgagctgttccagggccacaagaagggcttccaggaggatgctgagatgaacaagatcaatgaggagaagaagctgggcatcctgggcagccatgaggacctgagcaagctgagcctggacaagaagcaggtgggccacaacaagcagcccagcatccgcagcagcgaggacttccacctgaacagcttcaacaaccccccccggcagtaccagaagatcatgaagaggctcatcaagagatatgtgctgcaggcccagattgacaaggagagtgatgaggtgaatgaaggagagctgaaggagatcaagcaggacatcagcagcctgcgctatgagctgctggaggagaagagccagaacacagaggacctggccgagctgatccgggagctgggggagaagctgtccatggagcccaaccaggaggagaccaacagatag

SEQ ID NO: 148166 - DNA, 2796 bp, Artificial Sequence
  derived and/or modified sequence
atgagccagagccccgccttcggcccccggcggggcagcagcccccgtggggccgctggcgctgccgccagaagaaacgagagccaggactatctgctcatggactccgagctgggggaggacggctgtcctcaagctcctctgccttgttacggttattacccatgctttcgcggttccgataatcgattagcccaccggcgccaaactgtgttacgcgagaaggggcgccgactggctaatcgcgggcctgcgtatatgttttcggaccggtccacctcactgtccattgaagaggaacgattcctagacgccgccgaatacggaaacattccagtagtgcggaagatgctagaggaatgccatagcctgaatgtaaattgcgtggactacatggggcaaaacgctctgcagctggcagttgccaacgagcatctggagatcaccgaactcctcctgaaaaaagagaatctctcacgcgtgggcgacgctctgctcctggcaatttccaaaggatacgtaagaattgtagaagctatcctctcacaccctgcgtttgctgaaggtaaacggcttgccacaagcccctctcagtccgagctacagcaggacgacttttacgcatatgatgaggatggcacacggtttagccacgatgtgaccccgatcattctggctgctcactgccaagaatacgagatcgttcataccctactgcgcaagggagcccggatcgagagacctcacgactatttctgtaagtgtaacgactgtaaccagaagcagaagcacgacagcttcagccacagccgctctcgtattaatgcctacaagggactggcgagcccagcttatttgagcctgtccagtgaagacccagtcatgaccgcacttgaattgtcaaatgagctggcagtgcttgccaatatcgagaaagagttcaagaatgattacaagaaactgagtatgcagtgtaaagattttgtcgtgggtctgttggatctgtgcagaaatacagaggaggtggaagccatcctaaacggcgacgtcgaaacactccaatccggagatcatgggcgtcctaatctctcgcgactgaaactggctatcaagtacgaggtgaagaagtttgtcgcccaccctaactgtcaacagcagttgctgtctatatggtacgaaaacctaagcgggcttaggcaacagaccatggccgtgaagttccttgtcgtactggctgtcgctatcggattgcccttccttgccctgatttactggtttgctccctgtagcaagatgggcaagatcatgagaggcccttttatgaagtttgtagcacacgcggcttctttcaccatcttcctcggtcttctcgtgatgaacgcagcggaccgcttcgaaggtacaaagctgcttccaaacgagacttcaacggataatgccaagcagctcttccggatgaagacgtcctgctttagctggatggagatgcttatcatcagctgggtaattggtatgatctgggccgaatgcaaggaaatctggactcaggggcctaaagagtacctattcgagctgtggaatatgctggactttggcatgctggcgattttcgccgcctcctttattgctcgttttatggccttctggcacgcatctaaggcacaaagcatcatcgacgcaaacgataccttgaaagaccttacaaaggtgacactgggggacaatgttaagtactataatctggcgcgcatcaagtgggatccaagcgacccccagatcatatctgagggactgtacgctatagccgtcgtgttgtcgttttcccgaattgcatacattctgcccgctaacgaatcgttcgggccgctccagatctctctcgggcggacagttaaagacatatttaaattcatggtgatcttcatcatggtgttcgtggcatttatgatcggcatgttcaatctctacagctattacattggggctaagcagaacgaggctttcaccacggttgaggagtcctttaagacccttttctgggcaatattcggattatctgaagtgaaaagtgttgtcataaattataaccacaaattcattgagaacatcggatacgttctgtatggcgtgtataacgtgacgatggtgatagtgctgcttaatatgctgatagccatgattaatagctccttccaggagatagaagacgacgccgacgtggagtggaaatttgcgcgtgctaaactgtggttctcttacttcgaagagggtcgtaccttgccggtgccattcaatctggtgccaagtccgaagagtttattctatctgctgctaaaactgaagaaatggatctctgaactattccagggacataagaagggtttccaggaagacgcggaaatgaataaaataaatgaagagaagaaacttggaattctcgggagtcatgaggatttatccaagctatccctggacaaaaaacaggttggacacaacaaacagccgtctatcagatcctctgaggactttcatctaaatagtttcaacaaccctcctcggcagtatcagaagatcatgaaacgtctgatcaagcgctatgtgttgcaggcacagatcgacaaagagtcagatgaggtgaatgaaggagagctaaaagagataaagcaagatattagcagtctgaggtatgaactgttggaggagaagtcccagaatacagaggacctggccgagctgattagggagctcggagagaagttgtccatggaaccaaaccaggaggagaccaatcgctag

SEQ ID NO: 148167 - DNA, 2631 bp, Artificial Sequence
  derived and/or modified sequence
atgagccagagccccgccttcggcccccggcggggcagcagccccagaggagcagctggggcagctgcccgccgtaacgaaagtcaggattacctgctgatggattctgaactgggcgaagatggctgcccgcaggctcctctgccatgctatgggtattatccctgtttccgaggatcagacaatagactggcccaccgtcgacagaccgtgttacgagagaaaggacgccgactggccaacagaggtcccgcttacatgttttcagatagaagcacatctctgagtatcgaggaagagagattcctggatgcagcagagtatggaaacatacctgtggtgcgaaaaatgctagaagagtgccatagccttaatgttaactgtgtggactacatggggcagaatgctcttcagctggcggtcgccaatgaacacctagagattacggaattgctgttgaagaaggaaaatctctctcgggtcggcgatgcactactattagctattagcaaggggtacgttcgaattgtggaagccatcttatcccaccctgcttttgccgagggcaagagactcgctacgagtccaagccagagcgagctgcagcaggacgacttctacgcatacgatgaagacggcacccgattttcgcatgacgtaacgcctattatactggccgctcactgtcaagagtacgagatcgtacacaccctgcttcgcaagggagctcggatcgagaggccgcacgattatttttgcaaatgtaacgattgcaatcagaaacagaagcatgattctttctcacactctagatccagaataaatgcatacaagggattggcatcaccggcctacctctccctgagcagtgaagatcccgttatgacagccctggagctgtctaacgagctggcagtactggcaaacattgagaaagagttcaagaacgactacaaaaagctgagtatgcagtgcaaggactttgtggtaggattgttggacctgtgtagaaacactgaggaagtcgaagcaatcctgaatggcgatgtggagacactgcagtcaggtgatcatggtaggcctaatttaagtcgacttaaactggccattaagtatgaggtgaaaaagatgggcaaaatcatgaggggaccctttatgaagtttgtggcacacgccgcttcgtttacaattttcttagggctgttggttatgaacgccgctgaccgttttgaggggaccaagctcttgccaaatgagacatccaccgataacgcaaagcagttatttagaatgaaaaccagctgcttcagctggatggaaatgcttatcatttcctgggtcatcggcatgatttgggccgaatgtaaggagatctggacacagggacccaaagagtatctatttgagctgtggaatatgctggattttggcatgctggccatcttcgctgcctccttcatagctaggttcatggcattctggcacgccagcaaagctcagtcaatcatcgatgcgaatgatacactgaaggacctcacaaaagtgactttgggtgataacgtgaaatattacaacttggccaggatcaagtgggatccttctgacccacagattattagcgagggactgtacgccatcgctgtcgtcctctcattttctcggattgcttatattcttcctgcaaatgagtcttttggcccgctccaaatatccctcggtaggaccgtgaaagacattttcaaattcatggtgattttcataatggtatttgtcgcattcatgatcgggatgttcaatttgtactcctactacataggggcgaagcagaacgaggctttcactaccgtcgaagaaagcttcaaaactctgttttgggctattttcggtttgtctgaagtaaagagtgtggtaatcaactacaaccacaagtttattgaaaacattgggtatgtcctgtatggagtttataacgtgacaatggtaatcgtgttgctaaatatgctgatcgcgatgattaacagttcttttcaggaaattgaggacgatgcagacgtggaatggaaattcgcccgagcaaagctgtggtttagctacttcgaagagggtcggaccttgcccgttccatttaacttggttccaagtcctaagtctctattttatttactactgaagttaaagaagtggatatctgaacttttccagggccacaagaaaggtttccaggaggacgcagaaatgaataagataaatgaagaaaaaaaactggggattctaggctcccatgaggatctatctaagttgtctctggacaagaagcaggtgggacacaacaagcagccctcgatccgtagcagtgaggactttcacctcaattcctttaataatccaccacgccaatatcagaaaattatgaaacggcttatcaaaaggtatgtgttgcaagcgcaaatcgataaggaaagcgacgaagtgaacgagggagagcttaaagagatcaagcaggatattagcagcctacgctacgagctgctggaagagaagagccaaaatacagaggacctagctgagctcatacgcgaactaggagagaagctaagtatggagccaaaccaagaggagactaaccgctag

SEQ ID NO: 148168 - DNA, 2796 bp, Artificial Sequence
  derived and/or modified sequence
atgtctcaatcacccgcttttggccctcgaagagggagttctcccaggggggcagcaggcgctgcagccaggaggaatgagagtcaggattatctgctgatggattcagaactcggagaggatggctgtcctcaggcgcctctgccctgttacggatattacccatgtttcaggggaagcgacaacaggctcgcccataggagacagactgttctgcgcgaaaagggtagacgtcttgccaatcggggtccagcttatatgttttctgatcggagtacctctctgagcattgaggaagagagattcctcgatgccgcagagtacggtaacatacctgttgtccgaaagatgttggaggagtgtcactcccttaacgtcaactgtgtggattatatgggtcaaaacgccttacagctagcagttgccaacgagcatctcgaaattaccgaattgctcctgaagaaggagaacttaagccgtgtcggcgacgctttactgctggcaatcagtaagggatacgtacgcatcgtggaggccatcttaagccaccccgcatttgccgaggggaagagactggccaccagcccttctcagagtgagctgcagcaggatgatttttatgcctacgacgaagatgggactcggttttcacacgacgtgaccccaattatcttagctgctcattgtcaagagtatgagatcgtccacacactgctgcggaagggtgccaggatagagcgccctcacgactatttttgcaaatgcaatgattgcaatcaaaagcagaaacacgacagcttctcgcacagtaggtctagaatcaatgcttacaaaggcctggcttcccccgcttacctatctctgtcgtcggaagatcctgtaatgacggctctggagctttctaacgagctggcagtcttggccaacattgaaaaggaattcaagaacgattataaaaagttgagcatgcagtgtaaggattttgtggttggtcttttggatctgtgtaggaacacagaggaggttgaagctattttgaacggtgacgtggaaacgctacagtcgggcgatcacggtcgacccaatctatctagattgaagctagccatcaaatatgaagttaaaaaatttgtcgcacatcctaactgccagcagcagttactgtccatctggtacgagaacttgtccggcctgagacagcagaccatggccgtcaaattcctggtggtgctggccgtggccataggtctgccttttcttgccttgatttactggttcgccccatgtagcaagatgggaaagatcatgcgcggtccctttatgaagtttgttgcccacgccgcttcatttaccatctttctgggtctgctcgtgatgaatgccgcagacagatttgaaggaaccaagctactccctaatgaaacctcaaccgataacgccaagcagttgttccgcatgaaaacaagttgtttctcatggatggaaatgctgatcatttcttgggtgatcggcatgatttgggccgagtgtaaggagatttggactcagggccctaaagaatacctgttcgagctatggaatatgttggatttcggaatgttggcaatttttgctgcctcattcatagccaggtttatggccttctggcatgcaagcaaggcacagtccattattgacgccaacgacacgcttaaggaccttaccaaggtgactctaggcgacaacgtgaagtattataacctagctcgcattaagtgggatcctagtgacccccagatcattagtgaaggactttacgctatcgccgtcgtcctgagcttctccagaatagcctatattcttcccgcaaatgaatcatttgggccactgcagatctctctcgggcgaaccgtaaaagacatcttcaaatttatggtcatatttattatggttttcgttgccttcatgatcggcatgttcaatttgtatagctattacattggcgctaaacagaatgaagcattcaccaccgtggaagagtccttcaagacactgttttgggccatttttggtctctccgaagtcaagtccgtcgtgattaattataaccataagttcatcgagaacattggttacgtgctgtacggtgtatacaacgttacaatggttatcgtgcttctgaatatgctcatcgccatgataaattccagctttcaggagatagaggacgatgctgacgtggagtggaaattcgctcgagccaagctctggttctcttatttcgaggaaggtcgaacattgcccgtacccttcaacttagtcccttctcctaaatcgttgttttacctgctgcttaagctgaaaaaatggatctccgaattgtttcagggccataaaaagggtttccaagaggacgccgagatgaacaaaattaacgaggagaagaagcttggcattcttggtagccatgaagacttgagcaagctcagcctggacaaaaaacaggtgggacacaacaaacagccctctatccgctcctccgaggattttcatctcaattctttcaataatcctcctcgccagtaccaaaaaattatgaagcgcctgatcaagaggtatgttcttcaagcacagatcgataaggagagcgacgaggtaaatgaaggggagctgaaggaaataaaacaggacattagttcactgcgttacgagctgctcgaagagaagtcccagaatacagaagatcttgctgaattgatccgcgagctgggggagaaactcagcatggaaccaaatcaggaggaaaccaatcggtag

SEQ ID NO: 148169 - DNA, 2631 bp, Artificial Sequence
  derived and/or modified sequence
atgagtcaaagtcccgcttttgggccaagaaggggatcttctcctaggggggcagctggtgctgccgctcgacgcaacgaatctcaggactatctgctgatggactctgagctgggagaagacggctgtcctcaggcacctcttccgtgttacggttactatccttgctttcggggaagtgacaatcggctggcacataggcggcagaccgtgctccgagaaaaggggcgtcgacttgccaaccgaggcccagcttacatgttctcagatcggagtacttctttatccatagaggaggaaaggttcttggacgccgcagagtacggcaatattcccgttgttagaaagatgctcgaagaatgtcactcgctgaacgtgaactgcgtagactacatgggccaaaacgcactgcagctggctgtggctaatgaacacctggagataacagagctccttctaaaaaaggaaaatctctctcgggttggagacgccctactgctggcaatatctaaaggttatgtgagaattgtggaggcgattctttctcaccctgcatttgcggagggcaagcgacttgctacatctcccagccagtcagagctccagcaagacgatttttacgcatatgatgaagacggaacccgttttagtcacgatgtgactccaattattctcgctgcccactgccaggagtacgagatcgttcatactctgctccgaaaaggtgcaagaatcgaacgccctcacgactacttctgcaagtgcaacgactgcaaccaaaaacagaagcacgacagttttagccactctcggagccggatcaacgcctataagggactcgcaagtcctgcatatttatcgctctctagcgaagaccccgttatgactgcccttgagctgagtaatgaattggcagtcttagctaacatagaaaaagaattcaagaacgattataagaaactttcgatgcagtgcaaggatttcgtggtaggactcctggacctatgtcgcaacaccgaagaagttgaggctatcttgaacggagatgtcgagactctgcaaagcggcgatcacggcagaccaaatctctccagactcaagctggctatcaaatacgaagtcaaaaagatgggcaaaattatgaggggtccttttatgaagttcgtcgcacacgcagctagctttactatatttctcgggttactggtgatgaatgccgctgatcggttcgaaggaaccaaactcttgccaaatgagacctcaacagataatgcaaaacagctcttccgcatgaaaacctcttgcttttcttggatggagatgctgatcatatcttgggtcatcggcatgatatgggccgaatgcaaagagatctggactcagggaccaaaggagtacctgtttgagctttggaatatgctcgatttcgggatgctggctatttttgccgctagctttatagccagattcatggctttctggcatgcttccaaggcacagagcatcatagatgctaatgacacattaaaagaccttactaaggtaactctgggcgacaatgtgaagtactacaacctggccaggataaaatgggacccctccgatccgcagataatttccgaaggtttgtatgctatagcagtagtcctcagcttcagtagaatcgcctacatcctgcccgctaacgaaagtttcgggcctcttcagattagcctgggtagaactgtcaaagacatcttcaagttcatggtgatatttattatggtcttcgtggcttttatgattggaatgtttaacctttactcatactatatcggcgcaaaacagaacgaagctttcactaccgttgaggagtcctttaaaacactcttctgggcgatctttggcttgtccgaagttaagtccgtggtcatcaactataatcataaatttatcgagaacataggatatgtactgtatggcgtctataacgttacgatggtcatagtcttacttaacatgctgatcgccatgattaactcaagctttcaagagattgaagatgatgccgatgtggagtggaaattcgcgcgtgcaaagctctggttttcttacttcgaggaaggccgaactcttccagtccctttcaatctcgtgccatctccaaaatctctgttctaccttcttctaaagctcaagaagtggatcagcgaactgttccagggacacaaaaaaggattccaagaggacgcagaaatgaacaagattaacgaggagaagaagttgggcattctgggtagccacgaggatctgtccaagttgagtttagataagaaacaggtgggccataacaaacagccttctatccgctccagcgaagatttccatctcaattcattcaataacccaccacgccagtaccaaaagatcatgaagagactaataaaaaggtacgttctgcaagctcagatagacaaggaatcagatgaagtaaatgaaggagagctgaaggagatcaagcaggatatttcttctttgcggtacgagcttctggaggagaaatcccaaaacaccgaggatttagccgaactgattcgggaactcggcgagaaactgtcaatggaacctaaccaagaggaaaccaacaggtag

SEQ ID NO: 148170 - DNA, 4612 bp, Artificial Sequence
  derived and/or modified sequence
gggatcttgacggagagtgcgggggatgaaggcgggagctgagggctggagagtctctgttgacatagtaactcttcagctccgtctcccttgctctccgctcttacgcttcgctaccaccagcggccccgcctgtgccctctctgcccgggcgccccagacgcatcctcgcggggtctcctcggcctgacctgctcaggtcaagatcctctttgcacccccttaagtggtgacttttccccgggccagtgggcgagccacttgcggcgggcgtctgcaccccctgcttcaccgtcgtcccctgggcaccggtctgcccaggtccagttcggccgctgacgcgaaccctccgcaccgggtccccgctggaactgcccactcggctcccccgggagcggggcccaggccagtcgggcgttcccgccatgagccagagcccggcgttcgggccccggaggggcagttctccccggggcgctgccggagccgctgcgcggcgcaacgagagccaggactatctgctcatggactcggagctgggagaagacggctgcccgcaagccccgctgccttgctacggctactacccctgcttccggggatctgacaacagactggctcaccggcggcagacagttctccgtgagaaggggagaaggttagctaatcgaggaccagcatacatgtttagtgatcgctccacaagcctatctatagaggaggaacgctttttggatgcagctgaatatggtaacatcccagtggtgcggaagatgttagaagaatgccactcactcaacgttaactgtgtggattacatgggccagaatgccctacagttggcagtggccaatgagcatctggaaattacagaacttcttctcaagaaagaaaacctctctcgagttggggatgctttgcttctagctattagtaaaggttatgttcggattgtggaagcaattctcagtcatccggcttttgctgaaggcaagaggttagcaaccagccctagccagtctgaactccagcaagatgatttttatgcctatgatgaagatgggacacggttctcccatgatgtgactccaatcattctggctgcccactgccaggaatatgaaattgtgcataccctcctgcggaagggtgctaggattgaacggcctcatgattatttctgcaagtgcaatgactgcaaccagaaacagaagcatgactcgtttagccactccagatctaggattaatgcctataaaggcctggcaagtccggcttacctgtcattgtctagtgaagatccagtcatgacggctttagaacttagcaatgaactggcagttctggccaatattgagaaagagttcaagaatgactacaaaaaactgtcaatgcagtgcaaagactttgttgttggactccttgatctgtgcagaaacactgaagaagtcgaggccattctgaatggggatgttgaaacgctccagagtggtgatcacggtcgcccaaatctcagccgtttaaaacttgccattaaatatgaagtaaaaaaatttgtagctcatccaaactgccaacagcaacttctctccatttggtatgagaatctttctggtttacgacagcagacaatggcggtcaagttccttgtggtccttgctgttgccattggactgcccttcctggctctcatttactggtttgctccatgcagcaagatggggaagataatgcgtggaccattcatgaagtttgtagcacacgcagcctccttcaccatttttctgggactgctagtcatgaatgcagctgacagatttgaaggcacaaaactccttcctaatgaaaccagcacagataatgcaaaacagctgttcaggatgaaaacatcctgcttctcatggatggagatgctcattatatcctgggtaataggcatgatatgggctgaatgtaaagaaatctggactcagggccccaaggaatatttgtttgagttgtggaacatgcttgattttggtatgttagcaattttcgcagcatcattcattgcgagattcatggcattttggcatgcttccaaagcccagagcatcattgacgcaaatgatactttgaaggacttgacgaaagtaacattgggagacaatgtgaaatactacaatttggccaggataaagtgggacccctctgatcctcaaataatatctgaaggtctttatgcaattgctgtagttttaagtttctctaggatagcttatattttaccagcaaatgaaagctttggacctctgcagatatcacttggaagaacagtcaaagacatcttcaagttcatggtcatattcattatggtgtttgtggcctttatgattggaatgttcaatctctactcctactacattggtgcaaaacaaaatgaagccttcacaacagttgaagagagttttaagacactgttctgggctatatttggactttctgaagtgaaatcagtggtcatcaactataaccacaaattcattgaaaacattggttacgttctttatggagtctataatgttacgatggtcattgttttgctaaatatgttaattgccatgatcaacagttcattccaggaaattgaggatgacgctgatgtggagtggaaatttgcaagggccaaactctggttttcctactttgaggagggcagaacacttcctgtacccttcaatctggtgccgagtccaaagtccctgttttatctcttactgaagcttaaaaaatggatttctgagctgttccagggccataaaaaaggtttccaggaagatgcagagatgaacaagataaatgaagaaaagaaacttggaattttaggaagtcatgaagacctttcaaaattatcacttgacaaaaaacaggttgggcacaataaacaaccaagtataaggagctcagaagatttccatctaaatagtttcaataatcctccaagacaatatcagaaaataatgaaaaggctcattaaaagatatgtactgcaggcccagatagataaggagagtgatgaagtgaacgaaggggaactgaaggaaattaagcaggacatctcaagtctccgctatgaactccttgaagaaaaatctcagaatacagaagacctagcagaacttattagagaacttggagagaaattatccatggaaccaaatcaagaggaaaccaatagataatgcgaagacttccttagaaattcatatttatttgtccacttgaagccatattattttctgatttattttcttaagtgccaatgggcccaccttttaaacaagaaaacgttaaataacttgggccatcctatcatctggagccctagtatctaatttttttggtgattaaactccattgttcagggtaaaggctgtagataatgaggaaaattatgcccagttgtttggtgcttgttttataaactgctttcttggatataactaactcttgtgatgatgtcattgccatgtagtgtctgcctgaaaatgggtcccagcggacaggggctgacccacgttactccccatgcggtttttcctctgaagtttatttcaggttccttcttgcctgctctgtggatcccctgctggggactcccagctctgaaatttgggaaaaagtagcccatgggcctttagaatgctttaatcctttctttagaatgctgtttaaacaccatttaccctacttatccctcaatgcacatgattgataccgttcatacaaaatggtcttacatctatgtaaaattttctgattcatctatttgaaaacattacacttaacaatgaaaaaagtttttcctccactgaaccctggaaacatggtccagttttgtgtgtgtgcgtgtgtgtaaatgtgtacacacagacataaagtacttgccctagtttgtggctaatgtggacacacaaaagctctttatgttataaatttttattgtcactaaaaaattttactgtctaaataagtaccttttattggagaaaaatcaaaaccccaaacaaacactgtggttgtttggttccattatagcacaattttgtgccatttctgggagcatttacagatgaatccccacacttagccattgaatgtaaaggggaaaaataaggtgagaatttgtaaatacttatctgttattttcaatatgttctatccttctacccaaatatataaaacaggaatttgcattcatgtgcatttaccaagaggttgttgttgttacttactgatcatgtgaagtggtgtcttaaacaactaaaagcgatgaaggttcatatgtttactcaaagaccattggcattcagaggatgctggacattaactggaactgctacttccaattcaataatgggagatttcaaatgcaaatctttaacttcatcttaaagatgaaatggttgcagaaaatctgtttagctccaactttggcttaatttaaatcaaagaacatttatgtaaccagatcagaaaatacagctgaaaatttatattcagtgattttgtatttgtggatactacttatggaaaagttacttggtgatacataaagatcgattttcaaata

SEQ ID NO: 148171 - DNA, 2631 bp, Artificial Sequence
  derived and/or modified sequence
atgagccagagcccggcgttcgggccccggaggggcagttctccccggggcgctgccggagccgctgcgcggcgcaacgagagccaggactatctgctcatggactcggagctgggagaagacggctgcccgcaagccccgctgccttgctacggctactacccctgcttccggggatctgacaacagactggctcaccggcggcagacagttctccgtgagaaggggagaaggttagctaatcgaggaccagcatacatgtttagtgatcgctccacaagcctatctatagaggaggaacgctttttggatgcagctgaatatggtaacatcccagtggtgcggaagatgttagaagaatgccactcactcaacgttaactgtgtggattacatgggccagaatgccctacagttggcagtggccaatgagcatctggaaattacagaacttcttctcaagaaagaaaacctctctcgagttggggatgctttgcttctagctattagtaaaggttatgttcggattgtggaagcaattctcagtcatccggcttttgctgaaggcaagaggttagcaaccagccctagccagtctgaactccagcaagatgatttttatgcctatgatgaagatgggacacggttctcccatgatgtgactccaatcattctggctgcccactgccaggaatatgaaattgtgcataccctcctgcggaagggtgctaggattgaacggcctcatgattatttctgcaagtgcaatgactgcaaccagaaacagaagcatgactcgtttagccactccagatctaggattaatgcctataaaggcctggcaagtccggcttacctgtcattgtctagtgaagatccagtcatgacggctttagaacttagcaatgaactggcagttctggccaatattgagaaagagttcaagaatgactacaaaaaactgtcaatgcagtgcaaagactttgttgttggactccttgatctgtgcagaaacactgaagaagtcgaggccattctgaatggggatgttgaaacgctccagagtggtgatcacggtcgcccaaatctcagccgtttaaaacttgccattaaatatgaagtaaaaaaaatggggaagataatgcgtggaccattcatgaagtttgtagcacacgcagcctccttcaccatttttctgggactgctagtcatgaatgcagctgacagatttgaaggcacaaaactccttcctaatgaaaccagcacagataatgcaaaacagctgttcaggatgaaaacatcctgcttctcatggatggagatgctcattatatcctgggtaataggcatgatatgggctgaatgtaaagaaatctggactcagggccccaaggaatatttgtttgagttgtggaacatgcttgattttggtatgttagcaattttcgcagcatcattcattgcgagattcatggcattttggcatgcttccaaagcccagagcatcattgacgcaaatgatactttgaaggacttgacgaaagtaacattgggagacaatgtgaaatactacaatttggccaggataaagtgggacccctctgatcctcaaataatatctgaaggtctttatgcaattgctgtagttttaagtttctctaggatagcttatattttaccagcaaatgaaagctttggacctctgcagatatcacttggaagaacagtcaaagacatcttcaagttcatggtcatattcattatggtgtttgtggcctttatgattggaatgttcaatctctactcctactacattggtgcaaaacaaaatgaagccttcacaacagttgaagagagttttaagacactgttctgggctatatttggactttctgaagtgaaatcagtggtcatcaactataaccacaaattcattgaaaacattggttacgttctttatggagtctataatgttacgatggtcattgttttgctaaatatgttaattgccatgatcaacagttcattccaggaaattgaggatgacgctgatgtggagtggaaatttgcaagggccaaactctggttttcctactttgaggagggcagaacacttcctgtacccttcaatctggtgccgagtccaaagtccctgttttatctcttactgaagcttaaaaaatggatttctgagctgttccagggccataaaaaaggtttccaggaagatgcagagatgaacaagataaatgaagaaaagaaacttggaattttaggaagtcatgaagacctttcaaaattatcacttgacaaaaaacaggttgggcacaataaacaaccaagtataaggagctcagaagatttccatctaaatagtttcaataatcctccaagacaatatcagaaaataatgaaaaggctcattaaaagatatgtactgcaggcccagatagataaggagagtgatgaagtgaacgaaggggaactgaaggaaattaagcaggacatctcaagtctccgctatgaactccttgaagaaaaatctcagaatacagaagacctagcagaacttattagagaacttggagagaaattatccatggaaccaaatcaagaggaaaccaatagataa

SEQ ID NO: 148172 - protein, 228 aa, Artificial Sequence
  derived and/or modified sequence
MSVSEIFVELQGFLAAEQDIREEIRKVVQSLEQTAREILTLLQGVHQGAGFQDIPKRCLKAREHFGTVKTHLTSLKTKFPAEQYYRFHEHWRFVLQRLVFLAAFVVYLETETLVTREAVTEILGIEPDREKGFHLDVEDYLSGVLILASELSRLSVNSVTAGDYSRPLHISTFINELDSGFRLLNLKNDSLRKRYDGLKYDVKKVEEVVYDLSIRGFNKETAAACVEK

SEQ ID NO: 148173 - protein, 194 aa, Artificial Sequence
  derived and/or modified sequence
MSVSEIFVELQGFLAAEQDIPKRCLKAREHFGTVKTHLTSLKTKFPAEQYYRFHEHWRFVLQRLVFLAAFVVYLETETLVTREAVTEILGIEPDREKGFHLDVEDYLSGVLILASELSRLSVNSVTAGDYSRPLHISTFINELDSGFRLLNLKNDSLRKRYDGLKYDVKKVEEVVYDLSIRGFNKETAAACVEK

SEQ ID NO: 148174 - DNA, 687 bp, Artificial Sequence
  derived and/or modified sequence
atgagcgtgagcgagatcttcgtggagctgcagggcttcctggccgccgagcaggacatcagagaggagatcagaaaggtggtgcagagcctggagcagaccgccagagagatcctgaccctgctgcagggcgtgcaccagggcgccggcttccaggacatccccaagagatgcctgaaggccagagagcacttcggcaccgtgaagacccacctgaccagcctgaagaccaagttccccgccgagcagtactacagattccacgagcactggagattcgtgctgcagagactggtgttcctggccgccttcgtggtgtacctggagaccgagaccctggtgaccagagaggccgtgaccgagatcctgggcatcgagcccgacagagagaagggcttccacctggacgtggaggactacctgagcggcgtgctgatcctggccagcgagctgagcagactgagcgtgaacagcgtgaccgccggcgactacagcagacccctgcacatcagcaccttcatcaacgagctggacagcggcttcagactgctgaacctgaagaacgacagcctgagaaagagatacgacggcctgaagtacgacgtgaagaaggtggaggaggtggtgtacgacctgagcatcagaggcttcaacaaggagaccgccgccgcctgcgtggagaagtag

SEQ ID NO: 148175 - DNA, 585 bp, Artificial Sequence
  derived and/or modified sequence
atgagcgtgagcgagatcttcgtggagctgcagggcttcctggccgccgagcaggacatccccaagagatgcctgaaggccagagagcacttcggcaccgtgaagacccacctgaccagcctgaagaccaagttccccgccgagcagtactacagattccacgagcactggagattcgtgctgcagagactggtgttcctggccgccttcgtggtgtacctggagaccgagaccctggtgaccagagaggccgtgaccgagatcctgggcatcgagcccgacagagagaagggcttccacctggacgtggaggactacctgagcggcgtgctgatcctggccagcgagctgagcagactgagcgtgaacagcgtgaccgccggcgactacagcagacccctgcacatcagcaccttcatcaacgagctggacagcggcttcagactgctgaacctgaagaacgacagcctgagaaagagatacgacggcctgaagtacgacgtgaagaaggtggaggaggtggtgtacgacctgagcatcagaggcttcaacaaggagaccgccgccgcctgcgtggagaagtag

SEQ ID NO: 148176 - DNA, 687 bp, Artificial Sequence
  derived and/or modified sequence
atgtcagtctctgaaatcttcgtcgagctgcaggggttcttggccgccgagcaggatatccgggaggagattcggaaggtggtccagtccctggagcagacagcccgagaaattttaactctgctgcagggcgtccaccagggggccggttttcaggacatcccaaaaagatgcttgaaggcccgcgaacactttggaactgtgaaaacacatctgacctcccttaaaaccaaatttcccgcagaacaatattaccggttccacgaacattggcgattcgtgctccagcgtctggtgttcttggccgctttcgtagtctatctggaaaccgagacgttagtaacaagggaagccgtcacagagattcttgggattgagccagatagggagaaaggattccatcttgacgtcgaggattatttaagcggtgtgctcatccttgcctccgagctctctaggctctctgtcaattcagtaacggccggggactactcacgtccgctccatattagcacattcataaacgaattagactcgggctttcgactcctgaacctgaagaatgacagcctccggaaaaggtacgatggcctgaagtatgacgtgaagaaagtggaagaggtcgtttatgacttatcaatacgcggttttaataaggaaacggctgctgcctgtgtggagaagtag

SEQ ID NO: 148177 - DNA, 585 bp, Artificial Sequence
  derived and/or modified sequence
atgagcgtgtccgaaatcttcgtggagctgcagggcttcttggcagccgagcaggatatccctaagagatgtcttaaagcaagggaacatttcggcaccgtgaaaacccacctgacctccctgaaaacaaaattccccgccgaacagtactataggtttcacgagcattggcggttcgtgctgcagaggctggttttcctcgccgcttttgttgtgtacctcgaaacggagacactcgtgaccagggaggctgtgaccgagatcctaggaattgaacccgatagagagaagggcttccacttggatgtcgaggattatttatccggtgtgctaatattggcaagcgagctgtcaaggctcagtgttaactcagtgactgcgggggactactctcggccactgcacatctcaacctttatcaacgagctcgacagtgggttcaggctgctgaatttgaaaaatgattctctccgcaaaagatacgatggacttaagtacgatgttaaaaaggtcgaagaagttgtttacgacctcagtatccgtgggtttaacaaggagaccgcggccgcctgtgtggaaaagtag

SEQ ID NO: 148178 - DNA, 687 bp, Artificial Sequence
  derived and/or modified sequence
atgtctgtgtctgagatctttgtggagctgcagggcttcctggccgctgagcaggacatccgggaggagatcaggaaggtggtgcagagcctggagcagacagcccgggagatcctgaccctgctgcagggcgtgcaccagggcgccggcttccaggacatccccaagcgctgcctgaaggcccgggagcactttggaacagtgaagacccacctgaccagcctgaagaccaagtttcctgctgagcagtactaccgcttccacgagcactggaggtttgtgctgcagaggctggtgttcctggccgcctttgtggtgtacctggagacagagaccctggtgacccgggaggccgtgacagagatcctgggcattgaaccagaccgggagaagggcttccacctggatgtggaggactacctgagcggcgtgctgatcctggccagcgagctgagccggctgtctgtgaacagcgtgacagctggggactacagccggcccctgcacatcagcaccttcatcaatgagctggacagcggcttccggctgctgaacctgaagaatgacagcctgaggaagagatatgatggcctgaagtatgatgtgaagaaggtggaggaggtggtgtatgacctgagcatccggggcttcaacaaggagacagctgctgcctgtgtggagaagtag

SEQ ID NO: 148179 - DNA, 585 bp, Artificial Sequence
  derived and/or modified sequence
atgtctgtgtctgagatctttgtggagctgcagggcttcctggccgctgagcaggacatccccaagcgctgcctgaaggcccgggagcactttggaacagtgaagacccacctgaccagcctgaagaccaagtttcctgctgagcagtactaccgcttccacgagcactggaggtttgtgctgcagaggctggtgttcctggccgcctttgtggtgtacctggagacagagaccctggtgacccgggaggccgtgacagagatcctgggcattgaaccagaccgggagaagggcttccacctggatgtggaggactacctgagcggcgtgctgatcctggccagcgagctgagccggctgtctgtgaacagcgtgacagctggggactacagccggcccctgcacatcagcaccttcatcaatgagctggacagcggcttccggctgctgaacctgaagaatgacagcctgaggaagagatatgatggcctgaagtatgatgtgaagaaggtggaggaggtggtgtatgacctgagcatccggggcttcaacaaggagacagctgctgcctgtgtggagaagtag

SEQ ID NO: 148180 - DNA, 687 bp, Artificial Sequence
  derived and/or modified sequence
atgagcgtgagcgagatcttcgtggagctgcagggcttcctggccgccgagcaggacattcgcgaagagattaggaaggtcgtacagagtttggaacagacggctagagaaatcctcactctgctgcaaggagtccaccagggggccggtttccaagatattccaaaacggtgcctcaaggcccgcgagcattttggaactgttaaaacccaccttacatcacttaagactaagtttcccgcagagcagtactaccgcttccatgaacattggcgattcgttctgcaaaggctggtcttcttagcagctttcgtggtttacctagagacggagacactggtaacccgtgaagctgtcacagagatactaggtatcgagcccgacagggagaaagggttccacttggatgttgaagattacctatctggggtccttatcttggcctcagagctgtctaggttgtcagtgaattcggtgacagcaggcgactattcaagacccctgcacatttctacatttattaatgagctggactcaggcttccggctgctgaatctgaaaaacgacagtctgcggaaaaggtacgatggccttaagtatgatgtgaagaaagttgaagaagttgtttatgacctctctatcagaggctttaataaggagaccgctgctgcttgtgtggaaaaatag

SEQ ID NO: 148181 - DNA, 585 bp, Artificial Sequence
  derived and/or modified sequence
atgagcgtgagcgagatcttcgtggagctgcagggcttcctggccgctgaacaagacattcctaaaaggtgcctgaaagcgcgtgagcacttcggcaccgtgaagacccacctgacaagtctgaagactaaattccccgcggaacagtattatagattccatgaacactggcggtttgtcctgcagaggctggtctttctagccgctttcgtggtatatctggagacagagaccctcgtgacgcgagaggcagtgacagagattctaggaatcgaacccgaccgtgagaagggcttccatttggatgtggaggactacctatcaggagttttaatcctggcatcagaactgtctcggttgtctgttaactcggtgacggccggggattattcacggccactgcacatttccacatttatcaatgaactggattctggtttccgcctgctcaacctgaaaaacgactctcttcggaagcgatatgacgggctgaagtacgacgtgaagaaggtcgaggaggttgtctacgatctctctatccggggatttaacaaagagactgctgcggcctgcgtggagaagtag

SEQ ID NO: 148182 - DNA, 687 bp, Artificial Sequence
  derived and/or modified sequence
atgtcagtgtccgagatctttgtcgagctccagggttttttggccgctgagcaggacatcagggaagaaatcaggaaagtcgttcagagcctagaacagaccgccagagaaatcctaactctcctgcaaggggtgcatcaaggcgcagggttccaggatatcccgaagagatgcctgaaggccagggaacatttcgggaccgtcaaaacccacttgacatccctcaaaacgaagtttccagcagagcagtactatagattccacgagcattggagattcgtgctccagagacttgtttttctcgccgcttttgtagtttatctagagaccgaaactttggtcactcgggaggccgtgacggagatcctgggtatagagcccgatagagagaaggggttccatctcgacgtcgaggactatttatctggagtgctgatcctggcttctgaactcagcaggctgtcggttaattctgtgactgctggggactattctagacccctgcacattagtacattcatcaacgagctggattctggattcagattactcaacctaaaaaacgatagcctccgaaagcggtatgatggcctgaagtatgacgtgaaaaaagtggaagaggtggtatacgacctgtccatccgcggattcaacaaggagacagctgcagcttgtgtcgagaagtag

SEQ ID NO: 148183 - DNA, 585 bp, Artificial Sequence
  derived and/or modified sequence
atgagtgtctcagaaatctttgttgagctccaaggttttctggcggctgagcaagacatccccaaaagatgtctcaaagcccgtgaacacttcggcacggtgaagacgcacctgactagcctgaagaccaaatttccagccgaacagtattatcgtttccacgagcactggcgatttgtgttgcagcggctggtctttttagcagccttcgtggtgtacctagaaacagaaaccctagtgacccgggaagccgtcaccgagattctcggcattgaaccggaccgagagaaaggcttccacctggacgtcgaggattacctctcaggcgtgctgatattggcttccgagttgtcacgactttcggtgaacagcgtgacggcaggagattacagtcgaccgttacacattagcaccttcataaatgaactcgattccggatttcgtttgctgaatctcaaaaacgattccctgagaaagcggtatgacggcttgaagtacgatgtcaagaaagttgaagaggtggtttacgacctctctatcaggggcttcaataaagagactgctgccgcttgtgtagaaaaatag

SEQ ID NO: 148184 - DNA, 3420 bp, Artificial Sequence
  derived and/or modified sequence
cctctcctctgccctttggacgcgcgcctcggttccgaacgcagcggacggcgcctcaggcagcgcggcggacagcccgtcctccggcgcgccgcgagcctcggaggaccctagcgacggtcgtggcgtaagaccggggggacgcggcggtagcggcggccgttgcgattgattgcgctggttgcctgcggcgtccacttccttggccgcccttgctacactggctgattgttgtgcagccggcgccatgtctgtgagcgagatcttcgtggagctgcagggctttttggctgccgagcaggacatccgagaggaaatcagaaaagttgtacagagtttagaacaaacagctcgagagattttaactctactgcaaggggtccatcagggtgctgggtttcaggacattccaaagaggtgtttgaaagctcgagaacattttggtacagtaaaaacacatctaacatctttgaagaccaaatttcctgctgaacagtattacagatttcatgagcactggaggtttgtgttgcagcgcttggtcttcttggcagcatttgttgtgtatttggaaacagaaacactagtgactcgagaagcagttacagaaattcttggcattgagccagatcgggagaaaggatttcatctggatgtagaagattatctctcaggagttctaattcttgccagtgaactgtcgaggctgtctgtcaacagcgtgactgctggagactactcccgacccctccacatctccaccttcatcaatgagctggattccggttttcgccttctcaacctgaaaaatgactccctgaggaagcgctacgacggattgaaatatgacgtgaagaaagtagaggaagtggtctatgatctctccatccggggctttaataaggagacggcagcagcttgtgttgaaaaataggaggctctccttgctcctggccttgctgacctcagcggttgccaggaaggggtgagcacagagtgcctcttacggtagttaggatgctcagttgctaaacactgcgctttattttcttaaccagttgtggtgtgagtatcagaattgaaacacttttttgggggtaaaaaatatagcctttacatggacagaattttttttgttgtttcagtgaatatgcctgtaattcagtgtatttcagttccgtcagaaagtgtaaatgttagtttcttggtaaagtccttttcttgcttaccttgactgttgatgtactgattgagaagttcattgtctcgtttgtgattcttccagatgtgatgcttgatattttctatatgcgagttagccatccacacccaggcatagcctggatacagtataaaaatagataattaaaaagatggttgccaagcaaggaaaacttattttatattttcccttccttattttaagcattgtgagtaaatcagatgttgaattcttttgccaagggaattatagctgcaggttctctctcactgccatcaaactgtaaaagattaaactgcgaagtcaagctcaacagattattttggaaagtttttgtattaagggatttagtaacatcattttgttttccaccaggcagggagtagggcttagtgttttaaaacacctctgctttctgatgttgccttaatattctgctattgcagcaattaaaaattgtcttcatgtacatttggaactaacacgtgatgtgatatattcctaaactatgaaacctttttcctagtagtcagctagatcatttgttctgggagtataaagccacccacgtaagttaataagcaaaatcctgactattatgttgttagagaaaaatgctttgctttgtctggaagaaagataaaatagtgaattataaataagtcaggccgggcgtggtggctcacacctgtaatcccagcacactgggaggccgaggcagggggactgcttgagctcaggagttcgagaccagcctgggcaacaaagtgagactccatctctatataaaaacaaaaaccacgaaagcacacacaaaataaatcagtgggatttggtaatgtgttttagagtaagaaatttcaggttgttggtgactatcccaacagtcatgttttaaatgtacagtttggggcaagtcatgtaaatactgttggtggtcttccccacacgccccaattttcaggtagtactaagagtatgtgccaggaaactcttgctattgaattgagatgattaaaatggtgacttaatccgtagttattttgcacccactgaaaggaaagtgctttccagaataatatgaagtatctaaaagtgtcaccttttcttgcctgatcaacaatttgggcttcctgtttgtacaaggggccatttggcatacctttcacagcttttatcaggccaagttaaaggctgactacattttttcatcatgaggaaagcagttgaaatgaggcatgagttactgtgcattgggattttagaacaattttcttgtgacagctctttttgtgaagttaggttcttaaaagtgcccatgatggtcacttaaaatgtgcagtaatagcactgccaggatcaagcatgaaaggcttttaaattagatcatcccacagacaatacgtttgataatagttttttcttttaacctctttaagtattgattctgcttgagaatattgaagtacttgccagaagttgtggatttcagttttaacaaatgctattaaagtggagaagcacactctggtcttggaattccatttgaggatttagaagtgtcatgtttataactattcagttgtgtttgttgctggcttgttgtaaagcaataaaatttttttggtctttttgtaagtgagtgtgctgctgtaagaaatctcccatgtgcataacaaattctgaatattttttgaggctaaagaagaccggggtgacaagcagatactgctgtgtaatggttacactaaccaaaagacaccagccactcagagttctatactgtaaagcgcagataacatttgtgtgttataccttgattggggaattaaaagtcatttaactgaagatgttgagaaacctgggctctggttttagtataccggaattacttttttccaattttagaaaatcaagcaggttagagaaaatagagatgaattaggggacactgtcttatggattcatttataagaagagaaccagccatatacacttggggagatttgccacatcttaaacttgaataatagtatgagtaatgcttaagggagtttaatagagaaggaaagctttggcagtgttttgagaacttaagtggctaaagagatgagacaaacatgcaggtcgctactggcatagtttcataattgtgtactcggaaattaaagtttgcttgtttcttggtctggattaaa

SEQ ID NO: 148185 - DNA, 1089 bp, Artificial Sequence
  derived and/or modified sequence
agcggcggccgttgcgattgattgcgctggttgcctgcggcgtccacttccttggccgcccttgctacactggctgattgttgtgcagccggcgccatgtctgtgagcgagatcttcgtggagctgcagggctttttggctgccgagcaggacatcccaaagaggtgtttgaaagctcgagaacattttggtacagtaaaaacacatctaacatctttgaagaccaaatttcctgctgaacagtattacagatttcatgagcactggaggtttgtgttgcagcgcttggtcttcttggcagcatttgttgtgtatttggaaacagaaacactagtgactcgagaagcagttacagaaattcttggcattgagccagatcgggagaaaggatttcatctggatgtagaagattatctctcaggagttctaattcttgccagtgaactgtcgaggctgtctgtcaacagcgtgactgctggagactactcccgacccctccacatctccaccttcatcaatgagctggattccggttttcgccttctcaacctgaaaaatgactccctgaggaagcgctacgacggattgaaatatgacgtgaagaaagtagaggaagtggtctatgatctctccatccggggctttaataaggagacggcagcagcttgtgttgaaaaataggaggctctccttgctcctggccttgctgacctcagcggttgccaggaaggggtgagcacagagtgcctcttacggtagttaggatgctcagttgctaaacactgcgctttattttcttaaccagttgtggtgtgagtatcagaattgaaacacttttttgggggtaaaaaatatagcctttacatggacagaattttttttgttgtttcagtgaatatgcctgtaattcagtgtatttcagttccgtcagaaagtgtaaatgttagtttcttggtaaagtccttttcttgcttaccttgactgttgatgtactgattgagaagttcattgtctcgtttgtgattcttccagatgtgatgcttgatattttctatatgcgagttagccatccacacccaggcatagcct

SEQ ID NO: 148186 - DNA, 1088 bp, Artificial Sequence
  derived and/or modified sequence
ggtagcggcggccgttgcgattgattgcgctggttgcctgcggcgtccacttccttggccgcccttgctacactggctgattgttgtgcagccggcgccatgtctgtgagcgagatcttcgtggagctgcagggctttttggctgccgagcaggacatccgagaggaaatcagaaaagttgtacagagtttagaacaaacagctcgagagattttaactctactgcaaggggtccatcagggtgctgggtttcaggacattccaaagaggtgtttgaaagctcgagaacattttggtacagtaaaaacacatctaacatctttgaagaccaaatttcctgctgaacagtattacagatttcatgagcactggaggtttgtgttgcagcgcttggtcttcttggcagcatttgttgtgtatttggaaacagaaacactagtgactcgagaagcagttacagaaattcttggcatcgaggctgtctgtcaacagcgtgactgctggagactactcccgacccctccacatctccaccttcatcaatgagctggattccggttttcgccttctcaacctgaaaaatgactccctgaggaagcgctacgacggattgaaatatgacgtgaagaaagtagaggaagtggtctatgatctctccatccggggctttaataaggagacggcagcagcttgtgttgaaaaataggaggctctccttgctcctggccttgctgacctcagcggttgccaggaaggggtgagcacagagtgcctcttacggtagttaggatgctcagttgctaaacactgcgctttattttcttaaccagttgtggtgtgagtatcagaattgaaacacttttttgggggtaaaaaatatagcctttacatggacagaattttttttgttgtttcagtgaatatgcctgtaattcagtgtatttcagttccgtcagaaagtgtaaatgttagtttcttggtaaagtccttttcttgcttaccttgactgttgatgtactgattgagaagttcattgtctcgtttgtgattcttccagatgtgatgcttgatattttctatatgcgagt

SEQ ID NO: 148187 - protein, 457 aa, Artificial Sequence
  derived and/or modified sequence
MRPPSPLPARWLCVLAGALAWALGPAGGQAARLQEECDYVQMIEVQHKQCLEEAQLENETIGCSKMWDNLTCWPATPRGQVVVLACPLIFKLFSSIQGRNVSRSCTDEGWTHLEPGPYPIACGLDDKAASLDEQQTMFYGSVKTGYTIGYGLSLATLLVATAILSLFRKLHCTRNYIHMHLFISFILRAAAVFIKDLALFDSGESDQCSEGSVGCKAAMVFFQYCVMANFFWLLVEGLYLYTLLAVSFFSERKYFWGYILIGWGVPSTFTMVWTIARIHFEDYGCWDTINSSLWWIIKGPILTSILVNFILFICIIRILLQKLRPPDIRKSDSSPYSRLARSTLLLIPLFGVHYIMFAFFPDNFKPEVKMVFELVVGSFQGFVVAILYCFLNGEVQAELRRKWRRWHLQGVLGWNPKYRHPSGGSNGATCSTQVSMLTRVSPGARRSSSFQAEVSLV

SEQ ID NO: 148188 - DNA, 1374 bp, Artificial Sequence
  derived and/or modified sequence
atgagaccccccagccccctgcccgccagatggctgtgcgtgctggccggcgccctggcctgggccctgggccccgccggcggccaggccgccagactgcaggaggagtgcgactacgtgcagatgatcgaggtgcagcacaagcagtgcctggaggaggcccagctggagaacgagaccatcggctgcagcaagatgtgggacaacctgacctgctggcccgccacccccagaggccaggtggtggtgctggcctgccccctgatcttcaagctgttcagcagcatccagggcagaaacgtgagcagaagctgcaccgacgagggctggacccacctggagcccggcccctaccccatcgcctgcggcctggacgacaaggccgccagcctggacgagcagcagaccatgttctacggcagcgtgaagaccggctacaccatcggctacggcctgagcctggccaccctgctggtggccaccgccatcctgagcctgttcagaaagctgcactgcaccagaaactacatccacatgcacctgttcatcagcttcatcctgagagccgccgccgtgttcatcaaggacctggccctgttcgacagcggcgagagcgaccagtgcagcgagggcagcgtgggctgcaaggccgccatggtgttcttccagtactgcgtgatggccaacttcttctggctgctggtggagggcctgtacctgtacaccctgctggccgtgagcttcttcagcgagagaaagtacttctggggctacatcctgatcggctggggcgtgcccagcaccttcaccatggtgtggaccatcgccagaatccacttcgaggactacggctgctgggacaccatcaacagcagcctgtggtggatcatcaagggccccatcctgaccagcatcctggtgaacttcatcctgttcatctgcatcatcagaatcctgctgcagaagctgagaccccccgacatcagaaagagcgacagcagcccctacagcagactggccagaagcaccctgctgctgatccccctgttcggcgtgcactacatcatgttcgccttcttccccgacaacttcaagcccgaggtgaagatggtgttcgagctggtggtgggcagcttccagggcttcgtggtggccatcctgtactgcttcctgaacggcgaggtgcaggccgagctgagaagaaagtggagaagatggcacctgcagggcgtgctgggctggaaccccaagtacagacaccccagcggcggcagcaacggcgccacctgcagcacccaggtgagcatgctgaccagagtgagccccggcgccagaagaagcagcagcttccaggccgaggtgagcctggtgtag

SEQ ID NO: 148189 - DNA, 1374 bp, Artificial Sequence
  derived and/or modified sequence
atgcggcccccatcgccccttccagcgcggtggctctgtgttttggccggtgctttggcctgggcgttagggcccgcaggcggtcaagcggccaggctacaagaggaatgcgattacgtacagatgatcgaggtacagcacaaacagtgcctggaggaggcacaactggagaacgaaactatcggctgcagcaagatgtgggacaatttgacttgctggcccgccacacctcgcggccaggtcgtggtccttgcctgtccgctcatttttaagcttttttcgagcatccagggacggaacgtttctcgtagctgtactgatgagggttggacacatctggagccaggcccttaccctatcgcttgtggactggatgacaaggctgcttcgttggacgaacagcaaaccatgttttatggttcagtgaagacaggctacaccatcgggtacggtctgtcactcgccacgctgctggtggccaccgcaattctgagtctctttagaaagctacactgcacccggaattatatacacatgcacctcttcatttccttcatcctgcgcgccgcagctgtcttcattaaagacctggccttattcgattctggcgaatcggatcagtgcagtgaagggagcgtgggctgcaaagctgctatggtgttcttccagtattgtgtcatggctaattttttttggcttttggtggagggcctctatctgtacacccttcttgcagttagcttctttagcgagcgcaagtacttctggggatacattctgattggatggggcgtgccgtcaacattcacaatggtgtggactatcgctcggatccattttgaggactatgggtgttgggatactataaattccagtctctggtggatcatcaagggtccaatcctgacgagtatccttgtgaacttcatcctgttcatatgtataattaggattcttctgcagaaactgcgtcctcccgacatccgcaaaagcgactcttccccatactctcggctggcacgcagcaccctgctcttaatcccactcttcggtgttcactatatcatgttcgccttcttccctgacaatttcaagcctgaggtaaagatggtgtttgagctggtggtgggttcctttcaaggatttgtggtggccattctgtactgttttctaaatggagaggtccaggctgagctgcgtaggaagtggcgacgatggcacctgcaaggtgttctcggctggaaccctaagtatcggcaccctagcggcgggtctaatggggccacttgtagcactcaggtgagtatgctgaccagagtgtccccaggagcgcgccgcagtagctccttccaggcagaagtatccctggtgtag

SEQ ID NO: 148190 - DNA, 1374 bp, Artificial Sequence
  derived and/or modified sequence
atgaggcctcccagccccctgcctgcccgctggctgtgtgtgctggccggggccctggcctgggccctgggccctgctgggggccaggccgcccggctgcaggaggagtgtgactatgtgcagatgattgaggtgcagcacaagcagtgcctggaggaggcccagctggagaatgagaccatcggctgcagcaagatgtgggacaacctgacctgctggccagccaccccccggggccaggtggtggtgctggcctgccccctcatcttcaagctgttcagcagcatccagggcagaaatgtgagccgcagctgcacagatgagggctggacccacctggagcccggcccctaccccatcgcctgtggcctggatgacaaggccgccagcctggatgagcagcagaccatgttttatggctctgtgaagacaggctacaccatcggctacggcctgagcctggccaccctgctggtggccacagccatcctgagcctcttcaggaagctgcactgcaccaggaactacatccacatgcacctgttcatctccttcatcctgcgggctgctgctgtgttcatcaaggacctggccctgtttgacagcggggagagtgaccagtgcagcgagggctctgtgggctgcaaggccgccatggtgttcttccagtactgtgtgatggccaacttcttctggctgctggtggagggcctgtacctgtacaccctgctggccgtgtccttcttcagcgagaggaagtacttctggggctacatcctgattggctggggcgtgcccagcaccttcaccatggtgtggaccatcgcccgcatccactttgaagattatggctgctgggacaccatcaacagcagcctgtggtggatcatcaagggccccatcctgaccagcatcctggtgaacttcatcctcttcatctgcatcatccgcatcctgctgcagaagctgcggcccccagacatcaggaagagtgacagcagcccctacagccggctggcccggagcaccctgctgctgatccccctgtttggagtgcactacatcatgtttgccttcttcccagacaacttcaagccagaggtgaagatggtgtttgagctggtggtgggcagcttccagggctttgtggtggccatcctgtactgcttcctgaatggagaggtgcaggccgagctgcggaggaagtggaggcgctggcacctgcagggcgtgctgggctggaaccccaagtaccgccaccccagcggcggcagcaatggagccacctgcagcacccaggtgtccatgctgaccagggtgtcccctggggcccggcgcagcagcagcttccaggccgaggtgtccctggtgtag

SEQ ID NO: 148191 - DNA, 1374 bp, Artificial Sequence
  derived and/or modified sequence
atgcggccccccagccccctgcccgcccggtggctgtgcgtgctggctggagcattggcatgggctctgggcccagccggcgggcaagctgcgaggctacaggaagagtgcgattacgtgcagatgatagaggttcagcacaagcagtgtctcgaggaggcccagctggagaacgagaccatcggttgttctaaaatgtgggacaatctgacatgttggccggctacccctagaggacaggtggtggtgctggcctgccctcttatctttaaactgttcagcagtattcaaggccgcaacgtgtcccgctcctgtacagatgaaggatggacccatttagaacccgggccctaccctatcgcgtgtgggctggatgacaaggccgcctctctagatgagcagcagacgatgttctatggctctgtgaagaccggctacacgattgggtacgggttgtctctcgctactctcctggtggctacagcgatcttgagtctgtttaggaagctccattgtacccgaaattacattcacatgcacctgtttatatccttcattctcagggccgctgccgttttcattaaggatctggccctgtttgactcaggagaatcagatcagtgcagcgagggatcagtggggtgcaaggcagccatggtgttttttcaatactgtgtaatggccaatttcttctggctgctggtggaagggttatatctctacacgcttctggcagtctcttttttttcggagcggaaatacttctgggggtacattctcattgggtggggagtcccatctaccttcaccatggtgtggacgattgcaagaatccatttcgaggattatggatgctgggacacgatcaactcgagcctctggtggatcattaaaggaccaattcttaccagcatcttagttaatttcatacttttcatttgcatcatccgtatattgctgcagaagctgcggcctccagatatacgaaaatcagacagctctccgtattcacggttggctcggagtaccctactcctcattcccctcttcggcgtgcattacatcatgtttgccttcttccccgacaacttcaagccagaggtcaaaatggtcttcgaacttgtggttgggtcctttcagggattcgtggtagcaattttatactgtttcctcaatggagaagttcaggccgagctcaggcgtaagtggcgtcgctggcaccttcaaggggtattgggctggaaccctaagtacaggcacccaagtggtggttccaacggggctacttgtagcacccaggtttctatgttaaccagggtttcacccggagcccgccgatcatcctcatttcaggctgaggtctcactggtctag

SEQ ID NO: 148192 - DNA, 1374 bp, Artificial Sequence
  derived and/or modified sequence
atgcggccaccctcacctctccccgctaggtggctgtgtgtactggccggtgccttagcttgggccctgggccctgccggaggccaggctgccagactgcaggaggagtgtgattatgtgcaaatgattgaggtgcagcataagcagtgtttggaagaggctcagctggaaaacgagacaattggctgctcaaagatgtgggacaacctgacgtgctggccagccaccccacgaggccaggttgtggtccttgcctgccccctgattttcaaactgttctcctcgatacaagggagaaatgtcagccgcagctgcaccgatgaaggctggacccatctcgaaccaggcccttacccaatcgcctgtgggctggatgacaaggcagccagtctggatgagcaacagacaatgttttatgggagcgtcaaaacaggttatacaatcggatacggtctgagcctggccactctgctggtcgcaacagctattctgtctctgttcagaaagttgcattgcacccgcaattatattcatatgcacctgttcatttcttttatcctgcgcgcagctgcagtcttcatcaaagacctagccctcttcgatagtggcgagtctgaccagtgttcagaaggcagtgtaggctgtaaggctgcaatggtcttttttcagtactgcgtgatggcaaacttcttctggctcctggttgaaggcctatatctgtatacgcttttagccgtgagcttcttctctgaacgcaaatatttctggggctacatactgataggctggggggtgccatcaacattcaccatggtgtggaccatcgctcgtatacattttgaagattacggctgctgggacaccatcaacagtagcctttggtggatcattaaaggaccaattttgaccagcatcctggtcaactttatcttgtttatttgcatcattaggattctgctgcaaaaactgcgcccacccgatattcgaaaatcggatagctctccttactctcgcctcgcacggagcacgttgctactgattcctctcttcggcgttcattatataatgttcgcattcttcccagataattttaagcccgaagttaaaatggtctttgaactggtggtggggtccttccagggttttgtagttgccattctctattgttttctgaacggggaagtccaagccgaactccgaaggaagtggcgacggtggcatctgcagggagtgttaggatggaacccaaagtacaggcatccctctgggggatcaaacggagcgacctgttcaacccaggtgtctatgcttactcgagtctccccaggggcacggagatcctcatccttccaggctgaagtgtctctcgtgtag

SEQ ID NO: 148193 - DNA, 2773 bp, Artificial Sequence
  derived and/or modified sequence
ggggccacagcgccagcgccactctgccaggctcccggccatcgcccgcctggtgcgccgcccgccagctctttgcccgcgcggggccgcccgccgcgggctcagggcagaccatgcgcccgccaagtccgctgcccgcccgctggctatgcgtgctggcaggcgccctcgcctgggcccttgggccggcgggcggccaggcggccaggctgcaggaggagtgtgactatgtgcagatgatcgaggtgcagcacaagcagtgcctggaggaggcccagctggagaatgagacaataggctgcagcaagatgtgggacaacctcacctgctggccagccacccctcggggccaggtagttgtcttggcctgtcccctcatcttcaagctcttctcctccattcaaggccgcaatgtaagccgcagctgcaccgacgaaggctggacgcacctggagcctggcccgtaccccattgcctgtggtttggatgacaaggcagcgagtttggatgagcagcagaccatgttctacggttctgtgaagaccggctacaccattggctacggcctgtccctcgccacccttctggtcgccacagctatcctgagcctgttcaggaagctccactgcacgcggaactacatccacatgcacctcttcatatccttcatcctgagggctgccgctgtcttcatcaaagacttggccctcttcgacagcggggagtcggaccagtgctccgagggctcggtgggctgtaaggcagccatggtctttttccaatattgtgtcatggctaacttcttctggctgctggtggagggcctctacctgtacaccctgcttgccgtctccttcttctctgagcggaagtacttctgggggtacatactcatcggctggggggtacccagcacattcaccatggtgtggaccatcgccaggatccattttgaggattatgggtgctgggacaccatcaactcctcactgtggtggatcataaagggccccatcctcacctccatcttggtaaacttcatcctgtttatttgcatcatccgaatcctgcttcagaaactgcggcccccagatatcaggaagagtgacagcagtccatactcaaggctagccaggtccacactcctgctgatccccctgtttggagtacactacatcatgttcgccttctttccggacaattttaagcctgaagtgaagatggtctttgagctcgtcgtggggtctttccagggttttgtggtggctatcctctactgcttcctcaatggtgaggtgcaggcggagctgaggcggaagtggcggcgctggcacctgcagggcgtcctgggctggaaccccaaataccggcacccgtcgggaggcagcaacggcgccacgtgcagcacgcaggtttccatgctgacccgcgtcagcccaggtgcccgccgctcctccagcttccaagccgaagtctccctggtctgaccaccaggatcccaggggcccaaggcggcccctcccgccccttcccactcaccccggcagacgccggggacagaggcctgcccgggcgcggccagccccggccctgggctcggaggctgcccccggccccctggtctctggtccggacactcctagagaacgcagccctagagcctgcctggagcgtttctagcaagtgagagagatgggagctcctctcctggaggattgcaggtggaactcagtcattagactcctcctccaaaggccccctacgccaatcaagggcaaaaagtctacatactttcatcctgactctgccccctgctggctcttctgcccaattggaggaaagcaaccggtggatcctcaaacaacactggtgtgacctgagggcagaaaggttctgcccgggaaggtcaccagcaccaacaccacggtagtgcctgaaatttcaccattgctgtcaagttcctttgggttaagcattaccactcaggcatttgactgaagatgcagctcactaccctattctctctttacgcttagttatcagctttttaaagtgggttattctggagtttttgtttggagagcacacctatcttagtggttccccaccgaagtggactggcccctgggtcagtctggtgggaggacggtgcaacccaaggactgagggactctgaagcctctgggaaatgagaaggcagccaccagcgaatgctaggtctcggactaagcctacctgctctccaagtctcagtggcttcatctgtcaagtgggatctgtcacaccagccatacttatctctctgtgctgtggaagcaacaggaatcaagagctgccctccttgtccacccacctatgtgccaactgttgtaactaggctcagagatgtgcacccatgggctctgacagaaagcagatacctcaccctgctacacatacaggatttgaactcagatctgtctgataggaatgtgaaagcacggactcttactgctaacttttgtgtatcgtaaccagccagatcctcttggttatttgtttaccacttgtattattaatgccattatccctgaatcccccttgccaccccaccctccctggagtgtggctgaggaggcctccatctcatgtatcatctggataggagcctgctggtcacagcctcctctgtctgcccttcaccccagtggccactcagcttcctacccacacctctgccagaagatcccctcaggactgcaacaggcttgtgcaacaataaatgttggcttgg

SEQ ID NO: 148194 - DNA, 3161 bp, Artificial Sequence
  derived and/or modified sequence
attttcccagcttactagtggaaaagcagcttctttcccacagttccagcaaaagccccagggctgatgctcattggcccaggttggggcatgtgaccattggcaagactcccattggccaggcctggggcaggtgctcactactggagccagagcggagtataagccctacccaatcactgaactacgtgggtcaagagtaaaggagctgtggcttccccccaatcagaagggcactggatgatggatgaactctgtgtggtgcgtcttcacactgacaccaggaggataaggaagtgactccctcagctgagtggctggcatgtgccaggctagagcagcttggctatggcagaacatccagccccaccgtgtggacggcagagatgaggaaactggtgtggggttgccggggccagcaaccacttttctaaagccaaagacgcagaaggtgctgccagtccaacgcttcctccatggaggccttcacccacccacacccatctaagagttcccaagacctgttttttctggctattcctagacagccatcacccccactcacatgtcttccacaagggcggccaggcggccaggctgcaggaggagtgtgactatgtgcagatgatcgaggtgcagcacaagcagtgcctggaggaggcccagctggagaatgagacaataggctgcagcaagatgtgggacaacctcacctgctggccagccacccctcggggccaggtagttgtcttggcctgtcccctcatcttcaagctcttctcctccattcaaggccgcaatgtaagccgcagctgcaccgacgaaggctggacgcacctggagcctggcccgtaccccattgcctgtggtttggatgacaaggcagcgagtttggatgagcagcagaccatgttctacggttctgtgaagaccggctacaccattggctacggcctgtccctcgccacccttctggtcgccacagctatcctgagcctgttcaggaagctccactgcacgcggaactacatccacatgcacctcttcatatccttcatcctgagggctgccgctgtcttcatcaaagacttggccctcttcgacagcggggagtcggaccagtgctccgagggctcggtgggctgtaaggcagccatggtctttttccaatattgtgtcatggctaacttcttctggctgctggtggagggcctctacctgtacaccctgcttgccgtctccttcttctctgagcggaagtacttctgggggtacatactcatcggctggggggtacccagcacattcaccatggtgtggaccatcgccaggatccattttgaggattatgggtgctgggacaccatcaactcctcactgtggtggatcataaagggccccatcctcacctccatcttggtaaacttcatcctgtttatttgcatcatccgaatcctgcttcagaaactgcggcccccagatatcaggaagagtgacagcagtccatactcaaggctagccaggtccacactcctgctgatccccctgtttggagtacactacatcatgttcgccttctttccggacaattttaagcctgaagtgaagatggtctttgagctcgtcgtggggtctttccagggttttgtggtggctatcctctactgcttcctcaatggtgaggtgcaggcggagctgaggcggaagtggcggcgctggcacctgcagggcgtcctgggctggaaccccaaataccggcacccgtcgggaggcagcaacggcgccacgtgcagcacgcaggtttccatgctgacccgcgtcagcccaggtgcccgccgctcctccagcttccaagccgaagtctccctggtctgaccaccaggatcccaggggcccaaggcggcccctcccgccccttcccactcaccccggcagacgccggggacagaggcctgcccgggcgcggccagccccggccctgggctcggaggctgcccccggccccctggtctctggtccggacactcctagagaacgcagccctagagcctgcctggagcgtttctagcaagtgagagagatgggagctcctctcctggaggattgcaggtggaactcagtcattagactcctcctccaaaggccccctacgccaatcaagggcaaaaagtctacatactttcatcctgactctgccccctgctggctcttctgcccaattggaggaaagcaaccggtggatcctcaaacaacactggtgtgacctgagggcagaaaggttctgcccgggaaggtcaccagcaccaacaccacggtagtgcctgaaatttcaccattgctgtcaagttcctttgggttaagcattaccactcaggcatttgactgaagatgcagctcactaccctattctctctttacgcttagttatcagctttttaaagtgggttattctggagtttttgtttggagagcacacctatcttagtggttccccaccgaagtggactggcccctgggtcagtctggtgggaggacggtgcaacccaaggactgagggactctgaagcctctgggaaatgagaaggcagccaccagcgaatgctaggtctcggactaagcctacctgctctccaagtctcagtggcttcatctgtcaagtgggatctgtcacaccagccatacttatctctctgtgctgtggaagcaacaggaatcaagagctgccctccttgtccacccacctatgtgccaactgttgtaactaggctcagagatgtgcacccatgggctctgacagaaagcagatacctcaccctgctacacatacaggatttgaactcagatctgtctgataggaatgtgaaagcacggactcttactgctaacttttgtgtatcgtaaccagccagatcctcttggttatttgtttaccacttgtattattaatgccattatccctgaatcccccttgccaccccaccctccctggagtgtggctgaggaggcctccatctcatgtatcatctggataggagcctgctggtcacagcctcctctgtctgcccttcaccccagtggccactcagcttcctacccacacctctgccagaagatcccctcaggactgcaacaggcttgtgcaacaataaatgttggcttgg

SEQ ID NO: 148195 - protein, 349 aa, Artificial Sequence
  derived and/or modified sequence
MNRKARRCLGHLFLSLGMVYLRIGGFSSVVALGASIICNKIPGLAPRQRAICQSRPDAIIVIGEGSQMGLDECQFQFRNGRWNCSALGERTVFGKELKVGSREAAFTYAIIAAGVAHAITAACTQGNLSDCGCDKEKQGQYHRDEGWKWGGCSADIRYGIGFAKVFVDAREIKQNARTLMNLHNNEAGRKILEENMKLECKCHGVSGSCTTKTCWTTLPQFRELGYVLKDKYNEAVHVEPVRASRNKRPTFLKIKKPLSYRKPMDTDLVYIEKSPNYCEEDPVTGSVGTQGRACNKTAPQASGCDLMCCGRGYNTHQYARVWQCNCKFHWCCYVKCNTCSERTEMYTCK

SEQ ID NO: 148196 - DNA, 1050 bp, Artificial Sequence
  derived and/or modified sequence
atgaacagaaaggccagaagatgcctgggccacctgttcctgagcctgggcatggtgtacctgagaatcggcggcttcagcagcgtggtggccctgggcgccagcatcatctgcaacaagatccccggcctggcccccagacagagagccatctgccagagcagacccgacgccatcatcgtgatcggcgagggcagccagatgggcctggacgagtgccagttccagttcagaaacggcagatggaactgcagcgccctgggcgagagaaccgtgttcggcaaggagctgaaggtgggcagcagagaggccgccttcacctacgccatcatcgccgccggcgtggcccacgccatcaccgccgcctgcacccagggcaacctgagcgactgcggctgcgacaaggagaagcagggccagtaccacagagacgagggctggaagtggggcggctgcagcgccgacatcagatacggcatcggcttcgccaaggtgttcgtggacgccagagagatcaagcagaacgccagaaccctgatgaacctgcacaacaacgaggccggcagaaagatcctggaggagaacatgaagctggagtgcaagtgccacggcgtgagcggcagctgcaccaccaagacctgctggaccaccctgccccagttcagagagctgggctacgtgctgaaggacaagtacaacgaggccgtgcacgtggagcccgtgagagccagcagaaacaagagacccaccttcctgaagatcaagaagcccctgagctacagaaagcccatggacaccgacctggtgtacatcgagaagagccccaactactgcgaggaggaccccgtgaccggcagcgtgggcacccagggcagagcctgcaacaagaccgccccccaggccagcggctgcgacctgatgtgctgcggcagaggctacaacacccaccagtacgccagagtgtggcagtgcaactgcaagttccactggtgctgctacgtgaagtgcaacacctgcagcgagagaaccgagatgtacacctgcaagtag

SEQ ID NO: 148197 - DNA, 1050 bp, Artificial Sequence
  derived and/or modified sequence
atgaatcggaaagctcgcaggtgtttagggcacctgttcctctccctgggtatggtgtatctgcgtatcggcggtttctcttccgtagtggctctgggggccagcatcatttgtaataagattccaggattagcacccagacaaagagccatctgtcagagccgtccagacgccatcatcgtcatcggagagggtagccagatgggtctggatgagtgccagttccaattcaggaacgggagatggaactgctctgcattaggggagcggactgtgtttgggaaggaattgaaagtgggctcccgggaagctgctttcacatatgcgatcatagccgcaggcgtggctcacgctattactgccgcctgcacccagggcaacctgtcggactgcggatgcgacaaggagaaacagggtcagtaccatagagacgaggggtggaagtggggtgggtgctctgctgatatccgctacggcattggattcgccaaggtatttgtggacgctagagaaataaaacagaacgctcgcactctcatgaatctccacaataacgaagccggccggaagattctcgaggaaaacatgaaactggagtgtaaatgccacggagtgtccgggagctgcacgaccaagacctgctggaccaccctgccccagtttcgtgagttaggatatgtgctgaaagacaagtacaacgaggctgtgcatgtcgagcccgtccgcgcctcccgcaacaagagacccacctttctcaagatcaagaagccccttagttatcgcaagccaatggataccgacctggtgtacatcgagaaaagcccaaattactgtgaggaggatcccgtgaccggatcagtcggcacccaaggtagggcatgcaacaaaacagcgccccaggcctcaggctgtgacctgatgtgctgtggacgcggttacaacactcaccagtacgcacgggtctggcaatgtaactgcaagtttcactggtgctgttacgtgaagtgtaacacctgtagcgagcgcactgaaatgtatacatgtaagtag

SEQ ID NO: 148198 - DNA, 1050 bp, Artificial Sequence
  derived and/or modified sequence
atgaacaggaaggcccggcgctgcctgggccacctgttcctgagcctgggcatggtgtacctgagaattggaggcttcagctctgtggtggccctgggcgccagcatcatctgcaacaagatccctggcctggccccccggcagagggccatctgccagagcaggccagatgccatcatcgtcatcggggagggcagccagatgggcctggatgagtgccagttccagttcagaaatggccgctggaactgcagcgccctgggggagaggacagtgtttgggaaggagctgaaggtgggcagccgggaggccgccttcacctacgccatcatcgctgctggggtggcccacgccatcacagctgcctgcacccagggcaacctgagtgactgtggctgtgacaaggagaagcagggccagtaccacagagatgagggctggaagtggggcggctgcagcgctgacatccgctatggcatcggctttgccaaggtgtttgtggatgcccgggagatcaagcagaatgcccggaccctgatgaacctgcacaacaatgaagctggcaggaagatcctggaggagaacatgaagctggagtgcaagtgccacggcgtgtctggcagctgcaccaccaagacctgctggaccaccctgccccagttccgggagctgggctacgtgctgaaggacaagtacaatgaagctgtgcacgtggagcctgtgcgggccagcaggaacaagaggcccaccttcctgaagatcaagaagcccctgagctacaggaagcccatggacacagacctggtgtacatcgagaagagccccaactactgtgaggaggaccctgtgacaggctctgtgggcacccagggccgggcctgcaacaagacagccccccaggccagcggctgtgacctgatgtgctgcggccggggctacaacacccaccagtatgcccgggtgtggcagtgcaactgcaagttccactggtgctgctacgtgaagtgcaacacctgcagcgagaggacagagatgtacacctgcaagtag

SEQ ID NO: 148199 - DNA, 1050 bp, Artificial Sequence
  derived and/or modified sequence
atgaaccggaaggcccggcggtgcctgggccacctgttcctgagcctcggcatggtatacttgcgcatcggtgggttctcttccgtggtggctcttggggcaagcattatttgtaataagatcccagggctggcaccccgccagcgggccatctgccagtcaaggccagatgccattattgtgatcggagagggctcacagatggggctggacgagtgtcagtttcaatttaggaacggccgatggaactgctctgcactgggagaacgcacagtgtttggcaaggagctgaaggtggggtccagggaagccgctttcacttacgctatcattgcggccggtgtggcccatgcaatcactgctgcgtgcactcaggggaatcttagtgactgtggttgtgacaaggaaaagcagggacagtaccacagggatgagggatggaagtggggcggatgcagtgccgatataagatacggcatcggattcgcgaaggttttcgtggacgctcgcgagatcaagcagaacgcacgcacactgatgaacctgcacaacaatgaagctggcagaaaaatactggaagagaatatgaagctggagtgtaaatgccatggcgtttctggttcatgcactacaaagacatgttggacgacactgccacagttccgggagctcggctatgtcctcaaagacaagtacaatgaggccgtgcatgtcgaaccggtgagagccagtcgtaacaaaagacccacatttctgaagatcaaaaagcctcttagttacaggaagcctatggacacagatctcgtttatatcgagaagtctccaaattactgcgaagaggaccccgtcactgggtccgttggcactcagggcagggcttgtaataagacagccccacaggcttctgggtgcgacctcatgtgttgtggccgcgggtacaacacccatcagtacgcccgggtctggcagtgcaattgtaaatttcattggtgctgctatgtgaaatgcaacacctgctccgaacgcactgagatgtacacatgtaagtag

SEQ ID NO: 148200 - DNA, 1050 bp, Artificial Sequence
  derived and/or modified sequence
atgaaccgaaaagcccgtcgctgtctgggccatttatttctgagcttggggatggtttacctgcgtattgggggattctcaagcgtcgtggcattgggtgctagcattatttgcaataagatccccggtctggcgcctagacaacgcgctatctgccaatcccggccagatgccataattgtaattggagagggatcacagatgggcctggacgagtgtcagtttcagttccggaacggaagatggaactgtagcgcccttggcgaacggacagtgttcggcaaagagctgaaggtcggcagccgggaggctgcttttacatatgccattatcgccgcaggcgtggcccacgctattacagcggcttgcactcagggaaacctcagtgactgcgggtgtgacaaagaaaagcagggccaataccacagagacgaagggtggaagtggggcggatgcagcgccgatattagatacggaataggctttgccaaagtgttcgtcgacgcacgcgaaatcaagcagaacgctcgaactttaatgaatcttcacaataacgaggctgggcgaaagatcctggaggaaaatatgaaattggaatgcaagtgccacggggtgagtggtagctgtacaactaagacatgctggacaaccctaccacagttccgcgaactggggtatgtgctgaaagacaagtacaacgaggccgtgcacgtggagcccgtgcgcgcttcgcgaaataagaggcctacatttctcaagataaagaaacctctgtcttaccgcaaacctatggatacggacctcgtttatatcgagaaatccccaaactactgtgaggaagacccagtaaccggtagtgtgggaacacagggacgcgcatgcaacaagactgcccctcaggcaagtggttgtgacctgatgtgttgtgggaggggctataatacacaccagtatgctagggtctggcagtgcaattgtaaatttcattggtgctgctatgtgaagtgcaatacttgctcagagcggactgagatgtacacgtgcaaatag

SEQ ID NO: 148201 - DNA, 4041 bp, Artificial Sequence
  derived and/or modified sequence
gaggggcgggggctggaggcagcagcgcccccgcactccccgcgtctcgcacacttgcaccggtcgctcgcgcgcagcccggcgtcgccccacgccgcgctcgctcctccctccctcctcccgctccgtggctcccgtgctcctggcgaggctcaggcgcggagcgcgcggacgggcgcaccgacagacggccccggggacgcctcggctcgcgcctcccgggcgggctatgttgattgccccgccggggccggcccgcgggatcagcacagcccggcccgcggccccggcggccaatcgggactatgaaccggaaagcgcggcgctgcctgggccacctctttctcagcctgggcatggtctacctccggatcggtggcttctcctcagtggtagctctgggcgcaagcatcatctgtaacaagatcccaggcctggctcccagacagcgggcgatctgccagagccggcccgacgccatcatcgtcataggagaaggctcacaaatgggcctggacgagtgtcagtttcagttccgcaatggccgctggaactgctctgcactgggagagcgcaccgtcttcgggaaggagctcaaagtggggagccgggaggctgcgttcacctacgccatcattgccgccggcgtggcccacgccatcacagctgcctgtacccagggcaacctgagcgactgtggctgcgacaaagagaagcaaggccagtaccaccgggacgagggctggaagtggggtggctgctctgccgacatccgctacggcatcggcttcgccaaggtctttgtggatgcccgggagatcaagcagaatgcccggactctcatgaacttgcacaacaacgaggcaggccgaaagatcctggaggagaacatgaagctggaatgtaagtgccacggcgtgtcaggctcgtgcaccaccaagacgtgctggaccacactgccacagtttcgggagctgggctacgtgctcaaggacaagtacaacgaggccgttcacgtggagcctgtgcgtgccagccgcaacaagcggcccaccttcctgaagatcaagaagccactgtcgtaccgcaagcccatggacacggacctggtgtacatcgagaagtcgcccaactactgcgaggaggacccggtgaccggcagtgtgggcacccagggccgcgcctgcaacaagacggctccccaggccagcggctgtgacctcatgtgctgtgggcgtggctacaacacccaccagtacgcccgcgtgtggcagtgcaactgtaagttccactggtgctgctatgtcaagtgcaacacgtgcagcgagcgcacggagatgtacacgtgcaagtgagccccgtgtgcacaccaccctcccgctgcaagtcagattgctgggaggactggaccgtttccaagctgcgggctccctggcaggatgctgagcttgtcttttctgctgaggagggtacttttcctgggtttcctgcaggcatccgtgggggaaaaaaaatctctcagagccctcaactattctgttccacacccaatgctgctccaccctcccccagacacagcccaggtccctccgcggctggagcgaagccttctgcagcaggaactctggacccctgggcctcatcacagcaatatttaacaatttattctgataaaaataatattaatttatttaattaaaaagaattcttccacctcgtcgggatccgttttctgcaatcaaagtggactgcttgctttcctagcaggatgattttgttgctaggacaaggagccgtgtagaagtgtacataactattctttatgcagatatttctactagctgattttgcaggtacccaccttgcagcactagatgtttaagtacaagaggagacatcttttatgcatatatagatatacacacacacatttttttttttttttttgctgtttgctgctacttatccagaaatttaagctggtccagatttggagacgttttttccagagtatgttttccatccttttgccctccccagttcaaacttcaccattagaaaaatccagtttggaataaatagagaggaaaaataataaattcccagcagtttccatctttcggaaagtgagccaccggataagagagaatattttgtaagagactatttttatatgaatattttatttatatcgagtctactgtatcattccacggcctgtgcttcttcttaattctggtactcacttaggggtaaggaggggcgatgcctggttgtggcgtcaggccccatggggccccttgcacagctggattcttgagttctgtttgccaagtgggcacaagctgcccctggatgcctggggttgaggcatcatctcatccatgttagccgggaaagaaatcaaatccccagcctcagcctgttaagctcaggcctttcaagcagggccactgagtggtagcttcgaaatgagtcactgtggtgggtggtcatcgtgcccctcacagggacttgaccgtcatcctgcagcagaggccagttcagggagccccacacctcaccaagacactagccattgcctgcgtgtcctggaaggtgagatgtagtcctcaggtgaggtgacccaaagcagatggggtgaggggccgatgagcagccgggcccagcggggcttcctggatatcctgctcccaaggccaagcagcagagagaggttcaagtgaggccactttgctttgggtccagctacacccagagcctcagcctagaaagctgtcctccagcaggctgggggtgttctaatatgtgtccgtttgcatttccggtgtgtgtgtgtgtgtgtgtgtgtgtgtgtgtgtgtgtgtgtgtgtgtactgtatcttcttagggacttgagtgtagtcacgtgactttgcgccttgcagcgcctccgccgtactcgtgtgtgtatgtgtctgtgtgtttccgtgctacccaagcgtctgtttctctccgtgtgcctgggagatcaggtctcaggcatggagctgcatgcctttgcatctgctgctccccagagtctctgcttgcatgtgagggctggtggtatgaggcagacagcagagattgtgtgtgattgtgttgaaccgccaagagaaggcacctctgaactctgtccccacacccatgggtgaaaaccagacacctctgagaccacagcacagccccatggccccacctgctgggagcccttcagtatctaggctgtgtctgactcctcagtgtccacactgagcctggatcacagcatgggcaaataaaagtgactggatggttgcatggtttcttcccttggacatttttttccatttttcttttacttgggtgtctggaggagtgggcatgtgaaggggccatggagtgaatggatggagggatggatgaatgtgtgagtaggtaggtaggtgaatgggtagatgtgtggatggataagtaggtgggtgggtgaatggataaatggatggatgggtagatggatggatgaagggataaacagatgggtggatggattgataagtgagcggatgaatggatgaatagctaggaaagtgggtgggtggatgagggtgggttgatgaggtaggtacacctacagataggtaagtgagcagtttcttgggagtccacaggtcacattttatctttgctttggaaaacctagcagatctgccatgatcaggatggcttcccgaccttgcaacccttctgcttctgacctccttggcacctgggaatgggggagattctgaccagcctccccagatgagtgttcaatgatagttacataaacacagtctcagaagagtcatccctgtgtcctccctcactgtgggttcccagctctggggcctgccctctctcgggtgccctgttcagctgtgctctgagccccagtttctccacctgtgaaatcagaataacacctacctcacagggctgttgtgaggatcctcccagtaatgactgtatggcactttgagttgcaaagcaatggatgaa

SEQ ID NO: 148202 - protein, 354 aa, Artificial Sequence
  derived and/or modified sequence
MRARPQVCEALLFALALQTGVCYGIKWLALSKTPSALALNQTQHCKQLEGLVSAQVQLCRSNLELMHTVVHAAREVMKACRRAFADMRWNCSSIELAPNYLLDLERGTRESAFVYALSAAAISHAIARACTSGDLPGCSCGPVPGEPPGPGNRWGGCADNLSYGLLMGAKFSDAPMKVKKTGSQANKLMRLHNSEVGRQALRASLEMKCKCHGVSGSCSIRTCWKGLQELQDVAADLKTRYLSATKVVHRPMGTRKHLVPKDLDIRPVKDSELVYLQSSPDFCMKNEKVGSHGTQDRQCNKTSNGSDSCDLMCCGRGYNPYTDRVVERCHCKYHWCCYVTCRRCERTVERYVCK

SEQ ID NO: 148203 - protein, 253 aa, Artificial Sequence
  derived and/or modified sequence
MRARPQVCEALLFALALQTGVCYGIKWLALSKTPSALALNQTQHCKQLEGLVSAQVQLCRSNLELMHTVVHAAREVMKACRRAFADMRWNCSSIELAPNYLLDLERGTRESAFVYALSAAAISHAIARACTSGDLPGCSCGPVPGEPPGPGNRWGGCADNLSYGLLMGAKFSDAPMKVKKTGSQANKLMRLHNSEVGRQALRASLLVNSRCQAWEAACALPSLGSHQEQKVWPPWKEGRTSKETDKIKNNLAA

SEQ ID NO: 148204 - DNA, 1065 bp, Artificial Sequence
  derived and/or modified sequence
atgagagccagaccccaggtgtgcgaggccctgctgttcgccctggccctgcagaccggcgtgtgctacggcatcaagtggctggccctgagcaagacccccagcgccctggccctgaaccagacccagcactgcaagcagctggagggcctggtgagcgcccaggtgcagctgtgcagaagcaacctggagctgatgcacaccgtggtgcacgccgccagagaggtgatgaaggcctgcagaagagccttcgccgacatgagatggaactgcagcagcatcgagctggcccccaactacctgctggacctggagagaggcaccagagagagcgccttcgtgtacgccctgagcgccgccgccatcagccacgccatcgccagagcctgcaccagcggcgacctgcccggctgcagctgcggccccgtgcccggcgagccccccggccccggcaacagatggggcggctgcgccgacaacctgagctacggcctgctgatgggcgccaagttcagcgacgcccccatgaaggtgaagaagaccggcagccaggccaacaagctgatgagactgcacaacagcgaggtgggcagacaggccctgagagccagcctggagatgaagtgcaagtgccacggcgtgagcggcagctgcagcatcagaacctgctggaagggcctgcaggagctgcaggacgtggccgccgacctgaagaccagatacctgagcgccaccaaggtggtgcacagacccatgggcaccagaaagcacctggtgcccaaggacctggacatcagacccgtgaaggacagcgagctggtgtacctgcagagcagccccgacttctgcatgaagaacgagaaggtgggcagccacggcacccaggacagacagtgcaacaagaccagcaacggcagcgacagctgcgacctgatgtgctgcggcagaggctacaacccctacaccgacagagtggtggagagatgccactgcaagtaccactggtgctgctacgtgacctgcagaagatgcgagagaaccgtggagagatacgtgtgcaagtag

SEQ ID NO: 148205 - DNA, 762 bp, Artificial Sequence
  derived and/or modified sequence
atgagagccagaccccaggtgtgcgaggccctgctgttcgccctggccctgcagaccggcgtgtgctacggcatcaagtggctggccctgagcaagacccccagcgccctggccctgaaccagacccagcactgcaagcagctggagggcctggtgagcgcccaggtgcagctgtgcagaagcaacctggagctgatgcacaccgtggtgcacgccgccagagaggtgatgaaggcctgcagaagagccttcgccgacatgagatggaactgcagcagcatcgagctggcccccaactacctgctggacctggagagaggcaccagagagagcgccttcgtgtacgccctgagcgccgccgccatcagccacgccatcgccagagcctgcaccagcggcgacctgcccggctgcagctgcggccccgtgcccggcgagccccccggccccggcaacagatggggcggctgcgccgacaacctgagctacggcctgctgatgggcgccaagttcagcgacgcccccatgaaggtgaagaagaccggcagccaggccaacaagctgatgagactgcacaacagcgaggtgggcagacaggccctgagagccagcctgctggtgaacagcagatgccaggcctgggaggccgcctgcgccctgcccagcctgggcagccaccaggagcagaaggtgtggcccccctggaaggagggcagaaccagcaaggagaccgacaagatcaagaacaacctggccgcctag

SEQ ID NO: 148206 - DNA, 1065 bp, Artificial Sequence
  derived and/or modified sequence
atgagggcaagacctcaggtgtgcgaggcattgctgtttgcgctggctctgcaaacaggcgtctgctatggtattaagtggctggccttatccaaaaccccatctgccctggcgctcaaccagacccagcattgcaaacagctagaggggctggtgtctgcacaggtacagctgtgccggtcaaacctcgaactgatgcataccgttgttcacgctgcccgtgaggtgatgaaagcgtgtagaagagcctttgcggacatgaggtggaactgcagctcaattgagctggcaccaaactacctgttggacttagagaggggcactagggagagcgctttcgtgtacgccctgtcagccgcagcgattagccacgctatcgcaagggcttgcacatccggagatctccccggctgtagctgcggcccagtgcccggcgagcctccaggtcctggaaacagatggggaggatgcgctgataatttgagctacgggcttctaatgggggctaagttctcagacgctccaatgaaagtgaaaaaaacaggttcccaggccaacaaactcatgcggttgcacaacagcgaggtgggcagacaagcactgagggctagcctcgagatgaagtgtaagtgccacggcgtaagtggttcctgttcaatacgaacatgctggaaaggactccaggagttacaagatgtcgccgctgatctcaagacccggtatctgtctgcaactaaggtggtacataggccgatggggacgcgcaaacatctcgtaccaaaagacttagatatccgacccgtgaaagattctgagctcgtgtatctgcagtctagtcctgacttctgcatgaaaaacgagaaagtgggcagtcacggcacacaggatcgccagtgtaacaagacgtcaaatgggagcgacagctgtgatctgatgtgttgcggccgggggtataacccctacacagaccgggtggtggagcggtgtcactgcaaatatcactggtgctgttatgtgacttgccgacgatgtgaaaggactgtggagcgctacgtctgcaagtag

SEQ ID NO: 148207 - DNA, 762 bp, Artificial Sequence
  derived and/or modified sequence
atgcgggctagaccccaggtgtgcgaagcactgctttttgctttggccctccaaaccggcgtctgttacggaattaagtggctggctttatctaaaacaccaagcgccctcgcgctgaaccagacccagcactgcaagcagctagagggcttggtatctgcacaggtgcagctttgtcgcagcaatctcgagcttatgcatacagtcgttcacgccgctcgggaggttatgaaagcgtgtcggagagcgttcgcagacatgcggtggaattgctcctctattgagctggctcctaactacttactggacctggaacgcggtacccgagaaagcgcctttgtatatgctttatctgccgctgccatctcacacgcaattgctcgggcctgtacgtcgggcgacctcccgggttgctcatgtggcccagtccctggagaaccacctggtccgggaaatcgttggggaggttgcgccgataatctgagctacggattgctcatgggggccaaattttccgacgcgccaatgaaagtcaagaaaacagggagtcaggccaacaagctcatgcgtctacacaattcagaagtgggccgccaagctcttagagcctctctgctggtgaatagcaggtgccaggcatgggaagctgcctgcgccctgcctagtctgggtagccaccaggaacagaaggtctggccaccctggaaggaaggcaggacctcgaaggagactgacaagattaagaacaaccttgcagcctag

SEQ ID NO: 148208 - DNA, 1065 bp, Artificial Sequence
  derived and/or modified sequence
atgagggcccggccccaggtgtgtgaggccctgctgtttgccctggccctgcagacaggagtgtgctacggcatcaagtggctggccctgagcaagaccccatctgccctggccctgaaccagacccagcactgcaagcagctggagggcctggtgtctgcccaggtgcagctgtgccgcagcaacctggagctgatgcacacagtggtgcacgccgcccgggaggtgatgaaggcctgcagaagagcctttgctgacatgcgctggaactgcagcagcattgagctggcccccaactacctgctggacctggagcggggcacccgggagagcgcctttgtgtatgccctgtctgctgctgccatcagccacgccatcgcccgggcctgcaccagcggggacctgcccggctgcagctgtggccctgtgcctggagagcccccaggccctggcaaccgctggggcggctgtgccgacaacctgtcctatggcctgctgatgggcgccaagttcagtgatgcccccatgaaggtgaagaagacaggcagccaggccaacaagctgatgaggctgcacaacagcgaggtgggccggcaggccctgcgggccagcctggagatgaagtgcaagtgccacggcgtgtctggcagctgcagcatccgcacctgctggaagggcctgcaggagctgcaggatgtggccgctgacctgaagacccgctacctgagcgccaccaaggtggtgcaccggcccatgggcaccaggaagcacctggtgcccaaggacctggacatccggcctgtgaaggacagcgagctggtgtacctgcagagcagcccagacttctgcatgaagaatgagaaggtgggcagccacggcacccaggaccggcagtgcaacaagaccagcaatggaagtgacagctgtgacctgatgtgctgcggccggggctacaacccctacacagacagagtggtggagcgctgccactgcaagtaccactggtgctgctacgtgacctgccgccgctgtgagaggacagtggagagatatgtgtgcaagtag

SEQ ID NO: 148209 - DNA, 762 bp, Artificial Sequence
  derived and/or modified sequence
atgagggcccggccccaggtgtgtgaggccctgctgtttgccctggccctgcagacaggagtgtgctacggcatcaagtggctggccctgagcaagaccccatctgccctggccctgaaccagacccagcactgcaagcagctggagggcctggtgtctgcccaggtgcagctgtgccgcagcaacctggagctgatgcacacagtggtgcacgccgcccgggaggtgatgaaggcctgcagaagagcctttgctgacatgcgctggaactgcagcagcattgagctggcccccaactacctgctggacctggagcggggcacccgggagagcgcctttgtgtatgccctgtctgctgctgccatcagccacgccatcgcccgggcctgcaccagcggggacctgcccggctgcagctgtggccctgtgcctggagagcccccaggccctggcaaccgctggggcggctgtgccgacaacctgtcctatggcctgctgatgggcgccaagttcagtgatgcccccatgaaggtgaagaagacaggcagccaggccaacaagctgatgaggctgcacaacagcgaggtgggccggcaggccctgcgggccagcctgctggtgaacagccgctgccaggcctgggaggccgcctgtgccctgcccagcctgggcagccaccaggagcagaaggtgtggccaccctggaaggagggccgcaccagcaaggagacagacaagatcaagaacaacctggccgcctag

SEQ ID NO: 148210 - DNA, 1065 bp, Artificial Sequence
  derived and/or modified sequence
atgcgggcccggccccaggtgtgcgaggccctgctgttcgccctggcactccagacaggtgtgtgctacgggatcaagtggctggcactgtctaaaaccccatctgcactcgcactgaatcagacccagcattgcaaacaactggaggggctggtgtcggcacaggtccagctgtgtaggtctaatctcgagctgatgcataccgtggtgcacgccgctagggaggtcatgaaggcctgccgacgggcgttcgcagacatgcgctggaattgttcctcaatcgagcttgccccgaattacttactagatttggagcggggcacccgggagagcgcttttgtatatgccctgtccgccgcagctattagccacgctatcgccagggcttgtaccagcggggacctgccggggtgttcttgcggccctgttcctggagagccccctggcccgggtaataggtggggagggtgcgctgataacttgtcttatggtctgctgatgggggctaaattctctgatgctccaatgaaggtcaagaagactggctcacaagctaacaaactgatgagactccacaatagcgaggtgggaaggcaggcactacgggcgagcctggagatgaaatgtaaatgtcatggcgttagcggatcatgctctatccgaacgtgctggaaaggactccaagaactccaagacgtcgctgccgatctaaaaacacggtatctgtcagccactaaggtggtgcacaggcccatgggaacccgcaagcacctggttcctaaggatctcgatatccggccagtgaaagactcggagcttgtttaccttcagtcatctcccgatttctgtatgaaaaacgaaaaggtcggaagccacgggacccaggacaggcagtgcaacaaaactagtaatggcagcgactcctgtgacctgatgtgttgtgggagaggctataatccctatactgatcgggttgttgaacggtgccactgtaagtaccactggtgttgctacgtgacctgccggcgttgtgaaaggacagtggagagatacgtgtgcaaatag

SEQ ID NO: 148211 - DNA, 762 bp, Artificial Sequence
  derived and/or modified sequence
atgcgggcccggccccaggtgtgcgaggccctgctgttcgccctggctctgcagaccggggtttgctacggaatcaagtggctggctctttctaagaccccatccgccctggcgctcaatcagacacagcactgtaagcagctcgagggtctggtgtccgctcaggtccagttgtgtagatctaatctcgaattgatgcacactgtcgtccatgccgctcgcgaggtgatgaaagcctgtcgtcgagcattcgccgatatgcgctggaactgtagttccatcgagctcgcccctaactatctcttggatttggagcggggcactagggaaagtgctttcgtatacgctctgtctgcagccgctatcagccatgcaatagcacgggcctgtacctccggagacctccctggctgttcctgtgggccagttcccggggagcctcccgggcccggcaatcgttggggaggctgcgctgacaacctgtcttatgggcttctcatgggcgcgaagtttagtgatgctccaatgaaggttaagaaaactgggtctcaggctaacaagctaatgagactccacaactcagaggttgggagacaggctttgagagcctctctgctggtgaattcccggtgccaggcctgggaggcagcttgtgcgctgccttcattaggcagtcaccaggagcagaaggtgtggcctccctggaaagagggcaggaccagcaaagagacagacaaaatcaaaaacaacctggctgcatag

SEQ ID NO: 148212 - DNA, 1065 bp, Artificial Sequence
  derived and/or modified sequence
atgagagccaggcctcaagtctgtgaagcccttttgttcgccttggccctgcagaccggggtgtgctacggcataaaatggcttgcacttagtaagacgccttcagctctcgctctgaaccagacacagcattgcaagcaacttgaggggttagtttccgcacaggtacagctttgcaggtccaatcttgagctgatgcacacagtggtgcatgcagcaagagaggtgatgaaggcgtgcagacgcgcttttgccgacatgaggtggaactgttcttccatagagttggccccaaattacctcctcgatctcgagcggggaacacgcgaaagcgcgtttgtatacgccctgtcagccgcagccatcagtcacgccatcgctcgcgcatgtacatctggggatctgcctggttgtagttgcggccctgtacctggtgaaccaccaggaccaggaaaccgttggggcggatgtgctgacaatcttagttatgggcttctcatgggggctaaattctcggacgcccctatgaaggtgaagaagaccggatcgcaggccaacaaactgatgcgattgcacaattcggaagttgggagacaggcattgcgggcttcgctggaaatgaaatgtaaatgtcatggagtttcagggtcctgctccattcgcacttgttggaagggtttgcaggaacttcaagatgtggcagcggatttaaagaccagatatctctcggccaccaaagtggtgcatagaccgatggggaccagaaaacacctcgtgccaaaggatctggatattcggccagttaaggattccgagctggtatatctccagtcctcacccgacttttgcatgaagaacgaaaaggtggggtcccatggaactcaggaccgacagtgcaacaagactagtaatggctcagattcttgtgatctgatgtgttgcggaagaggatacaatccttacactgacagggtggtggaaaggtgccactgcaagtaccactggtgttgttacgttacctgccggaggtgtgaaagaacagttgagagatatgtatgcaagtag

SEQ ID NO: 148213 - DNA, 762 bp, Artificial Sequence
  derived and/or modified sequence
atgcgcgcaaggccgcaagtttgtgaggctctcctgtttgcgctagcactccagacgggagtctgctatggcatcaaatggctcgcgttgtccaagacaccttctgcactggccctaaatcagacccagcattgtaaacagctagaaggtctcgtcagtgcacaggtgcaactttgcagaagcaatcttgagcttatgcacaccgtggttcatgccgcacgggaagtcatgaaagcttgcaggcgcgctttcgcagacatgagatggaactgttctagcatcgaactggctcccaactacttattagacctcgaacggggtactagagagtctgcgtttgtgtatgcactttccgctgctgctatcagtcacgcaatagcacgggcttgcacctcaggggatctccctgggtgttcctgcgggccagtgcccggagaacctcccggacctggtaaccgctggggcggttgcgcagacaatctgtcctatggtctcctgatgggagccaagttcagtgacgcacctatgaaggtgaagaaaaccggctcacaggctaacaagctgatgcggctgcacaattcagaagtgggtcggcaggccctgcgggcttccctgctcgtcaacagccgctgccaggcatgggaggccgcttgtgctctgccttcgctgggaagtcaccaggaacagaaggtttggcctccgtggaaggaaggcagaacgtcaaaagagactgataagataaaaaacaaccttgcggcatag

SEQ ID NO: 148214 - DNA, 1930 bp, Artificial Sequence
  derived and/or modified sequence
cttaacccgccgcctccgctctccccggctgcaggcggcgtgcaggaccagcggcggccgtgcaggcggaggacttcggcgcggctcctcctgggtgtgaccccgggcgcgcccgccgcgcgacgatgagggcgcggccgcaggtctgcgaggcgctgctcttcgccctggcgctccagaccggcgtgtgctatggcatcaagtggctggcgctgtccaagacaccatcggccctggcactgaaccagacgcaacactgcaagcagctggagggtctggtgtctgcacaggtgcagctgtgccgcagcaacctggagctcatgcacacggtggtgcacgccgcccgcgaggtcatgaaggcctgtcgccgggcctttgccgacatgcgctggaactgctcctccattgagctcgcccccaactatttgcttgacctggagagagggacccgggagtcggccttcgtgtatgcgctgtcggccgccgccatcagccacgccatcgcccgggcctgcacctccggcgacctgcccggctgctcctgcggccccgtcccaggtgagccacccgggcccgggaaccgctggggaggatgtgcggacaacctcagctacgggctcctcatgggggccaagttttccgatgctcctatgaaggtgaaaaaaacaggatcccaagccaataaactgatgcgtctacacaacagtgaagtggggagacaggctctgcgcgcctctctggaaatgaagtgtaagtgccatggggtgtctggctcctgctccatccgcacctgctggaaggggctgcaggagctgcaggatgtggctgctgacctcaagacccgatacctgtcggccaccaaggtagtgcaccgacccatgggcacccgcaagcacctggtgcccaaggacctggatatccggcctgtgaaggactcggaactcgtctatctgcagagctcacctgacttctgcatgaagaatgagaaggtgggctcccacgggacacaagacaggcagtgcaacaagacatccaacggaagcgacagctgcgaccttatgtgctgcgggcgtggctacaacccctacacagaccgcgtggtcgagcggtgccactgtaagtaccactggtgctgctacgtcacctgccgcaggtgtgagcgtaccgtggagcgctatgtctgcaagtgaggccctgccctccgccccacgcaggagcgaggactctgctcaaggaccctcagcaactggggccaggggcctggagacactccatggagctctgcttgtgaattccagatgccaggcatgggaggcggcttgtgctttgccttcacttggaagccaccaggaacagaaggtctggccaccctggaaggagggcaggacatcaaaggaaaccgacaagattaaaaataacttggcagcctgaggctctggagtgcccacaggctggtgtaaggagcggggcttgggatcggtgagactgatacagacttgacctttcagggccacagagaccagcctccgggaaggggtctgcccgccttcttcagaatgttctgcgggaccccctggcccaccctggggtctgagcctgctgggcccaccacatggaatcactagcttgggttgtaaatgttttcttttgttttttgctttttcttcctttgggatgtggaagctacagaaatatttataaaacatagctttttctttggggtggcacttctcaattcctctttatatattttatatatataaatatatatgtatatatataatgatctctattttaaaactagctttttaagcagctgtatgaaataaatgctgagtgagccccagcccgcccctgcagttcccggcctcgtcaagtgaactcggcagaccctggggctggcagagggagctctccagtttccaggcaa

SEQ ID NO: 148215 - DNA, 1638 bp, Artificial Sequence
  derived and/or modified sequence
agatcgcgccaggcgaggaggagagctcgggcgagcggcgagcacaggccacgggagctgagcgcagcagagagcagccggagtccgcgcctgactccgcgcgggtcctgagccggccgcagcttgccaggatccccggcgtccttctcgcgccgcttcacgaagagggcgccttcgccgctcgcccagccggagtgcgcacgggcccgctggaaaccgcactcgccgctccctgggcaggccggggcacccgggcacgcagggcgcgcctggcgagcgccccgggaggcggcgtgcaggaccagcggcggccgtgcaggcggaggacttcggcgcggctcctcctgggtgtgaccccgggcgcgcccgccgcgcgacgatgagggcgcggccgcaggtctgcgaggcgctgctcttcgccctggcgctccagaccggcgtgtgctatggcatcaagtggctggcgctgtccaagacaccatcggccctggcactgaaccagacgcaacactgcaagcagctggagggtctggtgtctgcacaggtgcagctgtgccgcagcaacctggagctcatgcacacggtggtgcacgccgcccgcgaggtcatgaaggcctgtcgccgggcctttgccgacatgcgctggaactgctcctccattgagctcgcccccaactatttgcttgacctggagagagggacccgggagtcggccttcgtgtatgcgctgtcggccgccgccatcagccacgccatcgcccgggcctgcacctccggcgacctgcccggctgctcctgcggccccgtcccaggtgagccacccgggcccgggaaccgctggggaggatgtgcggacaacctcagctacgggctcctcatgggggccaagttttccgatgctcctatgaaggtgaaaaaaacaggatcccaagccaataaactgatgcgtctacacaacagtgaagtggggagacaggctctgcgcgcctctctgcttgtgaattccagatgccaggcatgggaggcggcttgtgctttgccttcacttggaagccaccaggaacagaaggtctggccaccctggaaggagggcaggacatcaaaggaaaccgacaagattaaaaataacttggcagcctgaggctctggagtgcccacaggctggtgtaaggagcggggcttgggatcggtgagactgatacagacttgacctttcagggccacagagaccagcctccgggaaggggtctgcccgccttcttcagaatgttctgcgggaccccctggcccaccctggggtctgagcctgctgggcccaccacatggaatcactagcttgggttgtaaatgttttcttttgttttttgctttttcttcctttgggatgtggaagctacagaaatatttataaaacatagctttttctttggggtggcacttctcaattcctctttatatattttatatatataaatatatatgtatatatataatgatctctattttaaaactagctttttaagcagctgtatgaaataaatgctgagtgagccccagcccgcccctgcagttcccggcctcgtcaagtgaactcggcagaccctggggctggcagagggagctctccagtttccaggc

SEQ ID NO: 148216 - protein, 174 aa, Artificial Sequence
  derived and/or modified sequence
MSSAAADHWAWLLVLSFVFGCNVLRILLPSFSSFMSRVLQKDAEQESQMRAEIQDMKQELSTVNMMDEFARYARLERKINKMTDKLKTHVKARTAQLAKIKWVISVAFYVLQAALMISLIWKYYSVPVAVVPSKWITPLDRLVAFPTRVAGGVGITCWILVCNKVVAIVLHPFS

SEQ ID NO: 148217 - protein, 172 aa, Artificial Sequence
  derived and/or modified sequence
MSSAAADHWAWLLVLSFVFGCNVLRILLPSFSSFMSRVLQKDAEQESQMRAEIQDMKQELSTVNMMDEFARYARLERKINKMTDKLKTHVKARTAQLAKIKWVISVAFYVLQAALMISLIWKYYSVPVAVVPSKWITPLDRLVAFPTRVAVFSSSIWTSKCFSSPDKSILEK

SEQ ID NO: 148218 - DNA, 525 bp, Artificial Sequence
  derived and/or modified sequence
atgagcagcgccgccgccgaccactgggcctggctgctggtgctgagcttcgtgttcggctgcaacgtgctgagaatcctgctgcccagcttcagcagcttcatgagcagagtgctgcagaaggacgccgagcaggagagccagatgagagccgagatccaggacatgaagcaggagctgagcaccgtgaacatgatggacgagttcgccagatacgccagactggagagaaagatcaacaagatgaccgacaagctgaagacccacgtgaaggccagaaccgcccagctggccaagatcaagtgggtgatcagcgtggccttctacgtgctgcaggccgccctgatgatcagcctgatctggaagtactacagcgtgcccgtggccgtggtgcccagcaagtggatcacccccctggacagactggtggccttccccaccagagtggccggcggcgtgggcatcacctgctggatcctggtgtgcaacaaggtggtggccatcgtgctgcaccccttcagctag

SEQ ID NO: 148219 - DNA, 519 bp, Artificial Sequence
  derived and/or modified sequence
atgagcagcgccgccgccgaccactgggcctggctgctggtgctgagcttcgtgttcggctgcaacgtgctgagaatcctgctgcccagcttcagcagcttcatgagcagagtgctgcagaaggacgccgagcaggagagccagatgagagccgagatccaggacatgaagcaggagctgagcaccgtgaacatgatggacgagttcgccagatacgccagactggagagaaagatcaacaagatgaccgacaagctgaagacccacgtgaaggccagaaccgcccagctggccaagatcaagtgggtgatcagcgtggccttctacgtgctgcaggccgccctgatgatcagcctgatctggaagtactacagcgtgcccgtggccgtggtgcccagcaagtggatcacccccctggacagactggtggccttccccaccagagtggccgtgttcagcagcagcatctggaccagcaagtgcttcagcagccccgacaagagcatcctggagaagtag

SEQ ID NO: 148220 - DNA, 525 bp, Artificial Sequence
  derived and/or modified sequence
atgagctcagccgctgccgaccactgggcttggttgctggtgctgtcatttgtgttcgggtgcaatgtgctccgaatcctgctgccctctttctcctcgtttatgtcgagggtccttcagaaagacgccgagcaggaatcacaaatgagggctgaaatccaggacatgaagcaggagctttctaccgtgaacatgatggatgaattcgcccggtacgcacgtctcgaaagaaaaatcaacaaaatgactgacaagttgaaaacccatgttaaagctcgtaccgcgcagctggcaaaaattaagtgggtgatcagcgtggcattttacgtgcttcaggcagctctgatgatctccctgatctggaagtattacagcgtccctgtggctgttgtgccgtccaagtggattacacccctcgaccgactcgtggcctttccaacacgggtcgccggaggcgtgggaattacctgttggattctggtgtgcaataaagtcgtggccatcgtgttgcaccccttttcttag

SEQ ID NO: 148221 - DNA, 519 bp, Artificial Sequence
  derived and/or modified sequence
atgtcctccgcggccgccgatcattgggcgtggctgctcgtgctgagcttcgtcttcggctgtaacgttctccgcatcctccttccctcatttagttccttcatgtcccgggtcctgcagaaggacgccgagcaagaatcgcagatgcgagcagagatccaggacatgaagcaggagctgagcacagtcaatatgatggatgaattcgccagatacgctcgactagaaagaaagatcaataaaatgaccgacaaactcaagacccatgtgaaagctcggaccgcccagcttgccaaaattaaatgggttatcagcgtggccttctatgtgttgcaggctgcccttatgatctccctcatctggaaatattatagtgttcctgtagcggtggttccttctaagtggataactccgttggatcgcctggttgccttcccaacgcgcgtcgcagtcttcagctcatcgatctggacctccaaatgcttctcaagccctgacaaaagcatcctcgagaagtag

SEQ ID NO: 148222 - DNA, 525 bp, Artificial Sequence
  derived and/or modified sequence
atgagcagcgctgctgctgaccactgggcctggctgctggtgctgagctttgtgtttggctgcaatgtgctgcgcatcctgctgcccagcttcagcagcttcatgagccgggtgctgcagaaggatgctgagcaggagagccagatgagagctgagatccaggacatgaagcaggagctgagcacagtgaacatgatggatgaatttgcccgctatgcccggctggagaggaagatcaacaagatgacagacaagctgaagacccacgtgaaggccaggacagcccagctggccaagatcaagtgggtgatctctgtggccttctacgtgctgcaggccgccctgatgatcagcctcatctggaagtactacagcgtgcctgtggccgtggtgcccagcaagtggatcacccccctggaccggctggtggccttccccaccagggtggccggcggcgtgggcatcacctgctggatcctggtgtgcaacaaggtggtggccatcgtgctgcaccccttctcctag

SEQ ID NO: 148223 - DNA, 519 bp, Artificial Sequence
  derived and/or modified sequence
atgagcagcgctgctgctgaccactgggcctggctgctggtgctgagctttgtgtttggctgcaatgtgctgcgcatcctgctgcccagcttcagcagcttcatgagccgggtgctgcagaaggatgctgagcaggagagccagatgagagctgagatccaggacatgaagcaggagctgagcacagtgaacatgatggatgaatttgcccgctatgcccggctggagaggaagatcaacaagatgacagacaagctgaagacccacgtgaaggccaggacagcccagctggccaagatcaagtgggtgatctctgtggccttctacgtgctgcaggccgccctgatgatcagcctcatctggaagtactacagcgtgcctgtggccgtggtgcccagcaagtggatcacccccctggaccggctggtggccttccccaccagggtggccgtgttcagcagcagcatctggaccagcaagtgcttcagcagcccagacaagagcatcctggagaagtag

SEQ ID NO: 148224 - DNA, 525 bp, Artificial Sequence
  derived and/or modified sequence
atgagcagcgccgccgccgaccactgggcctggctgctggtgctgagctttgtgtttggctgtaatgtgttacgcattctattgccgtcattttctagctttatgagccgcgtgctccagaaggatgctgagcaggaatcacaaatgcgggcagagatccaggacatgaagcaggaactgtctacggtcaatatgatggacgaatttgctcggtacgctaggctcgaacggaaaatcaacaagatgaccgacaagctgaagacccacgttaaggccaggacagcccaactagccaaaattaagtgggtaatcagcgtggctttttatgtcctgcaggccgctctgatgattagcctgatttggaagtattattctgtgccagtagcggttgtcccatccaagtggatcactccattagatagattagtggcattcccaacccgagtggccgggggtgtgggcattacctgttggatcctggtctgtaacaaagtcgtggccattgtccttcaccccttttcctag

SEQ ID NO: 148225 - DNA, 519 bp, Artificial Sequence
  derived and/or modified sequence
atgagcagcgccgccgccgaccactgggcctggctgctggtgctgagtttcgtgtttgggtgtaacgtgctcaggattctgctgccttcattcagcagtttcatgtccagagtattacaaaaggatgccgagcaggaatctcagatgagagccgaaatccaggatatgaaacaggagctgagtaccgtgaacatgatggacgagtttgctagatacgcgagactcgagaggaagataaataagatgaccgacaagctgaagacccacgtgaaggctcgcactgcccaactggcaaagatcaagtgggtgatatccgtcgcgttttatgtgctccaggccgctctcatgatatccctgatatggaaatattacagcgtgccagttgccgtcgtgccctcaaagtggattactcccttggatcgccttgtcgctttcccaacgcgtgtggctgttttctcatcaagtatatggaccagcaaatgttttagtagtccggacaaatcaattctcgagaagtag

SEQ ID NO: 148226 - DNA, 525 bp, Artificial Sequence
  derived and/or modified sequence
atgtcctcagccgcagccgatcactgggcctggctcctggtgctgtcctttgtcttcggctgtaacgtgctgcgtatattactgccttcatttagctctttcatgtcgcgcgttcttcagaaggacgctgaacaggaaagccaaatgcgcgcagaaatccaagatatgaagcaggaactttccacggtcaatatgatggacgagtttgcccgttatgccaggctggagaggaaaattaataaaatgacagacaaactgaaaacgcatgtgaaagcccgtacggctcagttggccaaaattaaatgggtgatttccgtcgctttttacgtcctgcaggctgccctcatgatctcactaatttggaagtattactccgttccagtggcagtggtgccatccaagtggataacacctctggatagactggtcgccttccctacgagagttgcaggaggagtgggcatcacctgctggatcctggtgtgcaacaaggtagtggcaatcgtcctgcatcccttttcctag

SEQ ID NO: 148227 - DNA, 519 bp, Artificial Sequence
  derived and/or modified sequence
atgagctctgctgcagcagatcattgggcatggcttctggtgctctcattcgtgttcggttgcaacgtgctccgtatccttctgccctctttttcttcatttatgtctcgcgtgctgcagaaagacgctgagcaggagtcccagatgagagcggagattcaggatatgaaacaggagctctctacagttaatatgatggacgagttcgcaagatacgcgcgactcgaaaggaaaattaacaaaatgactgacaagttgaaaacccacgtgaaagccagaacagcccagctggccaaaatcaagtgggtgatcagcgtggcattttacgtactccaggctgcgctgatgatttcactgatctggaaatactactccgtgcctgtcgctgtggtgccttccaagtggattacgcccctggacaggcttgtggcctttcccacccgcgttgccgtgttcagctcaagcatctggacatcaaagtgtttctcaagcccagataaaagcatattagaaaagtag

SEQ ID NO: 148228 - DNA, 1616 bp, Artificial Sequence
  derived and/or modified sequence
cgcgagggcgacgcagttcgcaggcgcgtcggcgcgcctgttctggggcgcttggcttcaccgcgcaggcgcggtcgccgctgttgttgtggtccccatggagctgccgtagcggacccagcacagccaggagcgtccgggatgagctcagccgcggccgaccactgggcgtggttgctggtgctcagcttcgtgtttggatgcaatgttcttaggatcctcctcccgtccttctcatccttcatgtccagggtgctgcagaaggacgcggagcaggagtcacagatgagagcggagatccaggacatgaagcaggagctctccacagtcaacatgatggacgagtttgccagatatgccaggctggaaagaaagatcaacaagatgacggataagctcaaaacccatgtgaaagctcggacagctcaattagccaagataaaatgggtgataagtgtcgctttctacgtattgcaggctgccctgatgatctcactcatttggaagtattattctgtccctgtggctgtcgtgccgagtaaatggataacccctctagaccgcctggtagcctttcctactagagtagcaggtggtgttggaattacctgttggattttagtctgtaacaaagttgtcgctattgtgcttcatccgttcagctgaacaggaggatggatacagccgcgaggctaaaaaacggatttcctcttcctagcttaaaatctgatttacactgttttgttttttaagaaacaaaagtgcatagtttagattttttttttgttgaatatgtttgttcttggactttatgagagagtcttataagaatcacgattttctacacctgtcattgagccaagaaagtccagtttatgacacgtatgtactagtgaacaccgtcctcgatctgtacgaaatgtgaaatgtttagggacatctccatgctgtcacttgtgatttgccctcttatgtattttggtcatattgccaactggaaagtcaaaattttctaacaactttaagtaagttctttgaagacttagtgctgtttttaatccagtttagaaagtaacttaattttaataccactactaaaaattcgaaaatttcttctttaatcacattcaatatggttaaaagaacaacactaattgacattgcgtgggctttttctccctttgtttaaaatgtcatttgttgagcaagagttgtatagtattatctacttacttgaggctgttaatttttcattacagtgttttgtaaatgtatccacgagaccatgatgcattgttttgtgctcaacttgtgttttgtatttaaagcattttgaatgaagtgtattttataagcatttaatatttatgctctttagaatggaacacagaaaacaaaccttataagtcctgattaatctgaaccaataacctgtgtggcctacaaagtataattctattaaatgttccttaaaacacttttttctaattaaaatctttgcaaatgcttgtgtaacttcctgccttacagctacttgtttgctgtgagccacccgcaactgacaagtggctgttaactgagtcaccatatcccagtaaagctgaattttctcacta

SEQ ID NO: 148229 - DNA, 1392 bp, Artificial Sequence
  derived and/or modified sequence
agcggacccagcacagccaggagcgtccgggatgagctcagccgcggccgaccactgggcgtggttgctggtgctcagcttcgtgtttggatgcaatgttcttaggatcctcctcccgtccttctcatccttcatgtccagggtgctgcagaaggacgcggagcaggagtcacagatgagagcggagatccaggacatgaagcaggagctctccacagtcaacatgatggacgagtttgccagatatgccaggctggaaagaaagatcaacaagatgacggataagctcaaaacccatgtgaaagctcggacagctcaattagccaagataaaatgggtgataagtgtcgctttctacgtattgcaggctgccctgatgatctcactcatttggaagtattattctgtccctgtggctgtcgtgccgagtaaatggataacccctctagaccgcctggtagcctttcctactagagtagcagtattctccagcagtatttggacttccaaatgtttctcttcccctgataaatctatattagaaaaataggcaatttagtgctgtttaaaatgaatggatctctatttcaagatggcatgtctagtacacttacgtgcaccgcctcacaagcacactgaaatgacagaaaaggacactatgaattaggacaatggactgaaaaataagcagaaaatttaaacacaccagtgaccacagtgcaactgcaactgacgatcagtttccaccaaactgcaacagagagagtggctttgccgtctgggccagctgaggactctccttggaacccaaagaagcagtttgtttccacctactcccaagagctgaagattataagccagaagcaaacaaaggcaggcaaggaaatttgaggttgttgcatctggaagtaaacatgtagctacttcttctaataaaacagagttctatcttttgatttggtctggacacctggaggtcagcaaccgagagcaggaaggaggcacagcaacaacagaacaacaacaagaggctgcgacaggggcggcgtgggtcaaaaggaagcaacctggaggacggtcctccttgcggcttggagcagagcttcaggttgggcaccacgacagagctgggccagaagtctaacacagcctgtttggaacacaacccgggatacttgtgtggttgggttcagtcagtcaagggaaacaagaagctaacccgtggctgggagtgttcatgcaatgctcgtggaatactcagcgcaaagcctgcccgcaagcacaaagggtatcaaggaagagttaaatgggaagttgggtcatggtgtggaatcatattaaggtcagcattgatggcttccggaacttagatagaaagcagtgtcttaatgc

SEQ ID NO: 148230 - protein, 940 aa, Artificial Sequence
  derived and/or modified sequence
MARKRAAGGEPRGRELRSQKSKAKSKARREEEEEDAFEDEKPPKKSLLSKVSQGKRKRGCSHPGGSADGPAKKKVAKVTVKSENLKVIKDEALSDGDDLRDFPSDLKKAHHLKRGATMNEDSNEEEEESENDWEEVEELSEPVLGDVRESTAFSRSLLPVKPVEIEIETPEQAKTRERSEKIKLEFETYLRRAMKRFNKGVHEDTHKVHLLCLLANGFYRNNICSQPDLHAIGLSIIPARFTRVLPRDVDTYYLSNLVKWFIGTFTVNAELSASEQDNLQTTLERRFAIYSARDDEELVHIFLLILRALQLLTRLVLSLQPIPLKSATAKGKKPSKERLTADPGGSSETSSQVLENHTKPKTSKGTKQEETFAKGTCRPSAKGKRNKGGRKKRSKPSSSEEDEGPGDKQEKATQRRPHGRERRVASRVSYKEESGSDEAGSGSDFELSSGEASDPSDEDSEPGPPKQRKAPAPQRTKAGSKSASRTHRGSHRKDPSLPAASSSSSSSKRGKKMCSDGEKAEKRSIAGIDQWLEVFCEQEEKWVCVDCVHGVVGQPLTCYKYATKPMTYVVGIDSDGWVRDVTQRYDPVWMTVTRKCRVDAEWWAETLRPYQSPFMDREKKEDLEFQAKHMDQPLPTAIGLYKNHPLYALKRHLLKYEAIYPETAAILGYCRGEAVYSRDCVHTLHSRDTWLKKARVVRLGEVPYKMVKGFSNRARKARLAEPQLREENDLGLFGYWQTEEYQPPVAVDGKVPRNEFGNVYLFLPSMMPIGCVQLNLPNLHRVARKLDIDCVQAITGFDFHGGYSHPVTDGYIVCEEFKDVLLTAWENEQAVIERKEKEKKEKRALGNWKLLAKGLLIRERLKRRYGPKSEAAAPHTDAGGGLSSDEEEGTSSQAEAARILAASWPQNREDEEKQKLKGGPKKTKREKKAAASHLFPFEQL

SEQ ID NO: 148231 - protein, 903 aa, Artificial Sequence
  derived and/or modified sequence
MARKRAAGGEPRGRELRSQKSKAKSKARREEEEEDAFEDEKPPKKSLLSKVSQGKRKRGCSHPGGSADGPAKKKVAKVTVKSENLKVIKDEALSDGDDLRDFPSDLKKAHHLKRGATMNEDSNEEEEESENDWEEAKTRERSEKIKLEFETYLRRAMKRFNKGVHEDTHKVHLLCLLANGFYRNNICSQPDLHAIGLSIIPARFTRVLPRDVDTYYLSNLVKWFIGTFTVNAELSASEQDNLQTTLERRFAIYSARDDEELVHIFLLILRALQLLTRLVLSLQPIPLKSATAKGKKPSKERLTADPGGSSETSSQVLENHTKPKTSKGTKQEETFAKGTCRPSAKGKRNKGGRKKRSKPSSSEEDEGPGDKQEKATQRRPHGRERRVASRVSYKEESGSDEAGSGSDFELSSGEASDPSDEDSEPGPPKQRKAPAPQRTKAGSKSASRTHRGSHRKDPSLPAASSSSSSSKRGKKMCSDGEKAEKRSIAGIDQWLEVFCEQEEKWVCVDCVHGVVGQPLTCYKYATKPMTYVVGIDSDGWVRDVTQRYDPVWMTVTRKCRVDAEWWAETLRPYQSPFMDREKKEDLEFQAKHMDQPLPTAIGLYKNHPLYALKRHLLKYEAIYPETAAILGYCRGEAVYSRDCVHTLHSRDTWLKKARVVRLGEVPYKMVKGFSNRARKARLAEPQLREENDLGLFGYWQTEEYQPPVAVDGKVPRNEFGNVYLFLPSMMPIGCVQLNLPNLHRVARKLDIDCVQAITGFDFHGGYSHPVTDGYIVCEEFKDVLLTAWENEQAVIERKEKEKKEKRALGNWKLLAKGLLIRERLKRRYGPKSEAAAPHTDAGGGLSSDEEEGTSSQAEAARILAASWPQNREDEEKQKLKGGPKKTKREKKAAASHLFPFEQL

SEQ ID NO: 148232 - protein, 58 aa, Artificial Sequence
  derived and/or modified sequence
MCSDGEKAEKRSIAGIDQWLEVFCEQEEKWVCVDCRCGGPASDLLQVRHQAHDLCGGH

SEQ ID NO: 148233 - DNA, 2823 bp, Artificial Sequence
  derived and/or modified sequence
atggccagaaagagagccgccggcggcgagcccagaggcagagagctgagaagccagaagagcaaggccaagagcaaggccagaagagaggaggaggaggaggacgccttcgaggacgagaagccccccaagaagagcctgctgagcaaggtgagccagggcaagagaaagagaggctgcagccaccccggcggcagcgccgacggccccgccaagaagaaggtggccaaggtgaccgtgaagagcgagaacctgaaggtgatcaaggacgaggccctgagcgacggcgacgacctgagagacttccccagcgacctgaagaaggcccaccacctgaagagaggcgccaccatgaacgaggacagcaacgaggaggaggaggagagcgagaacgactgggaggaggtggaggagctgagcgagcccgtgctgggcgacgtgagagagagcaccgccttcagcagaagcctgctgcccgtgaagcccgtggagatcgagatcgagacccccgagcaggccaagaccagagagagaagcgagaagatcaagctggagttcgagacctacctgagaagagccatgaagagattcaacaagggcgtgcacgaggacacccacaaggtgcacctgctgtgcctgctggccaacggcttctacagaaacaacatctgcagccagcccgacctgcacgccatcggcctgagcatcatccccgccagattcaccagagtgctgcccagagacgtggacacctactacctgagcaacctggtgaagtggttcatcggcaccttcaccgtgaacgccgagctgagcgccagcgagcaggacaacctgcagaccaccctggagagaagattcgccatctacagcgccagagacgacgaggagctggtgcacatcttcctgctgatcctgagagccctgcagctgctgaccagactggtgctgagcctgcagcccatccccctgaagagcgccaccgccaagggcaagaagcccagcaaggagagactgaccgccgaccccggcggcagcagcgagaccagcagccaggtgctggagaaccacaccaagcccaagaccagcaagggcaccaagcaggaggagaccttcgccaagggcacctgcagacccagcgccaagggcaagagaaacaagggcggcagaaagaagagaagcaagcccagcagcagcgaggaggacgagggccccggcgacaagcaggagaaggccacccagagaagaccccacggcagagagagaagagtggccagcagagtgagctacaaggaggagagcggcagcgacgaggccggcagcggcagcgacttcgagctgagcagcggcgaggccagcgaccccagcgacgaggacagcgagcccggcccccccaagcagagaaaggcccccgccccccagagaaccaaggccggcagcaagagcgccagcagaacccacagaggcagccacagaaaggaccccagcctgcccgccgccagcagcagcagcagcagcagcaagagaggcaagaagatgtgcagcgacggcgagaaggccgagaagagaagcatcgccggcatcgaccagtggctggaggtgttctgcgagcaggaggagaagtgggtgtgcgtggactgcgtgcacggcgtggtgggccagcccctgacctgctacaagtacgccaccaagcccatgacctacgtggtgggcatcgacagcgacggctgggtgagagacgtgacccagagatacgaccccgtgtggatgaccgtgaccagaaagtgcagagtggacgccgagtggtgggccgagaccctgagaccctaccagagccccttcatggacagagagaagaaggaggacctggagttccaggccaagcacatggaccagcccctgcccaccgccatcggcctgtacaagaaccaccccctgtacgccctgaagagacacctgctgaagtacgaggccatctaccccgagaccgccgccatcctgggctactgcagaggcgaggccgtgtacagcagagactgcgtgcacaccctgcacagcagagacacctggctgaagaaggccagagtggtgagactgggcgaggtgccctacaagatggtgaagggcttcagcaacagagccagaaaggccagactggccgagccccagctgagagaggagaacgacctgggcctgttcggctactggcagaccgaggagtaccagccccccgtggccgtggacggcaaggtgcccagaaacgagttcggcaacgtgtacctgttcctgcccagcatgatgcccatcggctgcgtgcagctgaacctgcccaacctgcacagagtggccagaaagctggacatcgactgcgtgcaggccatcaccggcttcgacttccacggcggctacagccaccccgtgaccgacggctacatcgtgtgcgaggagttcaaggacgtgctgctgaccgcctgggagaacgagcaggccgtgatcgagagaaaggagaaggagaagaaggagaagagagccctgggcaactggaagctgctggccaagggcctgctgatcagagagagactgaagagaagatacggccccaagagcgaggccgccgccccccacaccgacgccggcggcggcctgagcagcgacgaggaggagggcaccagcagccaggccgaggccgccagaatcctggccgccagctggccccagaacagagaggacgaggagaagcagaagctgaagggcggccccaagaagaccaagagagagaagaaggccgccgccagccacctgttccccttcgagcagctgtag

SEQ ID NO: 148234 - DNA, 2712 bp, Artificial Sequence
  derived and/or modified sequence
atggccagaaagagagccgccggcggcgagcccagaggcagagagctgagaagccagaagagcaaggccaagagcaaggccagaagagaggaggaggaggaggacgccttcgaggacgagaagccccccaagaagagcctgctgagcaaggtgagccagggcaagagaaagagaggctgcagccaccccggcggcagcgccgacggccccgccaagaagaaggtggccaaggtgaccgtgaagagcgagaacctgaaggtgatcaaggacgaggccctgagcgacggcgacgacctgagagacttccccagcgacctgaagaaggcccaccacctgaagagaggcgccaccatgaacgaggacagcaacgaggaggaggaggagagcgagaacgactgggaggaggccaagaccagagagagaagcgagaagatcaagctggagttcgagacctacctgagaagagccatgaagagattcaacaagggcgtgcacgaggacacccacaaggtgcacctgctgtgcctgctggccaacggcttctacagaaacaacatctgcagccagcccgacctgcacgccatcggcctgagcatcatccccgccagattcaccagagtgctgcccagagacgtggacacctactacctgagcaacctggtgaagtggttcatcggcaccttcaccgtgaacgccgagctgagcgccagcgagcaggacaacctgcagaccaccctggagagaagattcgccatctacagcgccagagacgacgaggagctggtgcacatcttcctgctgatcctgagagccctgcagctgctgaccagactggtgctgagcctgcagcccatccccctgaagagcgccaccgccaagggcaagaagcccagcaaggagagactgaccgccgaccccggcggcagcagcgagaccagcagccaggtgctggagaaccacaccaagcccaagaccagcaagggcaccaagcaggaggagaccttcgccaagggcacctgcagacccagcgccaagggcaagagaaacaagggcggcagaaagaagagaagcaagcccagcagcagcgaggaggacgagggccccggcgacaagcaggagaaggccacccagagaagaccccacggcagagagagaagagtggccagcagagtgagctacaaggaggagagcggcagcgacgaggccggcagcggcagcgacttcgagctgagcagcggcgaggccagcgaccccagcgacgaggacagcgagcccggcccccccaagcagagaaaggcccccgccccccagagaaccaaggccggcagcaagagcgccagcagaacccacagaggcagccacagaaaggaccccagcctgcccgccgccagcagcagcagcagcagcagcaagagaggcaagaagatgtgcagcgacggcgagaaggccgagaagagaagcatcgccggcatcgaccagtggctggaggtgttctgcgagcaggaggagaagtgggtgtgcgtggactgcgtgcacggcgtggtgggccagcccctgacctgctacaagtacgccaccaagcccatgacctacgtggtgggcatcgacagcgacggctgggtgagagacgtgacccagagatacgaccccgtgtggatgaccgtgaccagaaagtgcagagtggacgccgagtggtgggccgagaccctgagaccctaccagagccccttcatggacagagagaagaaggaggacctggagttccaggccaagcacatggaccagcccctgcccaccgccatcggcctgtacaagaaccaccccctgtacgccctgaagagacacctgctgaagtacgaggccatctaccccgagaccgccgccatcctgggctactgcagaggcgaggccgtgtacagcagagactgcgtgcacaccctgcacagcagagacacctggctgaagaaggccagagtggtgagactgggcgaggtgccctacaagatggtgaagggcttcagcaacagagccagaaaggccagactggccgagccccagctgagagaggagaacgacctgggcctgttcggctactggcagaccgaggagtaccagccccccgtggccgtggacggcaaggtgcccagaaacgagttcggcaacgtgtacctgttcctgcccagcatgatgcccatcggctgcgtgcagctgaacctgcccaacctgcacagagtggccagaaagctggacatcgactgcgtgcaggccatcaccggcttcgacttccacggcggctacagccaccccgtgaccgacggctacatcgtgtgcgaggagttcaaggacgtgctgctgaccgcctgggagaacgagcaggccgtgatcgagagaaaggagaaggagaagaaggagaagagagccctgggcaactggaagctgctggccaagggcctgctgatcagagagagactgaagagaagatacggccccaagagcgaggccgccgccccccacaccgacgccggcggcggcctgagcagcgacgaggaggagggcaccagcagccaggccgaggccgccagaatcctggccgccagctggccccagaacagagaggacgaggagaagcagaagctgaagggcggccccaagaagaccaagagagagaagaaggccgccgccagccacctgttccccttcgagcagctgtag

SEQ ID NO: 148235 - DNA, 2823 bp, Artificial Sequence
  derived and/or modified sequence
atggccagaaagcgcgctgccggaggagagccaaggggacgcgagcttcgcagccagaaatcaaaggcaaagagcaaggcccgcagggaagaggaggaagaggacgcatttgaagacgagaagccccctaagaagtctctcctgtccaaagttagtcaagggaaaaggaagagggggtgcagccacccaggtgggtctgctgacgggcctgcaaaaaagaaagtcgccaaggttactgttaagtctgaaaaccttaaggttattaaagatgaagcactctcagacggcgacgatctgagagacttccctagtgatctcaaaaaggctcaccatctgaaaaggggcgccaccatgaatgaggactccaatgaggaggaggaagaatcagagaacgactgggaggaggtcgaggagctttctgagcccgtgttgggagacgtccgcgagtctactgcattctctaggagcttgctgcccgtaaaacctgtggagattgagatcgaaaccccagaacaggctaagacacgcgagagatccgagaagattaaattagagtttgaaacttacttgcggagagccatgaagcgattcaataagggtgttcatgaagatacacacaaggttcatctgctttgtctgcttgctaacggattctatcggaacaacatctgcagccaacccgacctccatgcaattgggctgagcattataccagctcgcttcacacgcgttcttccgcgggatgtagatacttactacttgagcaatctggtcaagtggttcatcgggacgtttacagtgaatgcagaactctcggcttcagaacaagataatttgcaaacaactctagaaagaagattcgccatttacagcgctcgggatgacgaagagctcgtccacatttttctattgattcttcgggccctccagctgctcactcgcctcgtattgtcactgcaaccaattccactaaagagcgccacggcaaagggaaaaaagcccagcaaagagagactcacagcagacccaggaggcagctcagagacatcatcacaagttctcgagaaccatacgaagcctaaaacctctaagggcacaaagcaggaggagacatttgcaaagggcacctgccgccccagtgcaaaggggaagcgcaacaagggaggtcggaagaaacgctcaaagcccagtagcagtgaggaagacgagggacctggcgataagcaggaaaaagcaacacaacgcaggcctcacggccgcgaaagaagggtcgcatcacgggtgagttataaagaggagtcaggatccgacgaggcgggcagcgggtcagattttgagctgtcttcaggcgaagcctcggatccaagcgacgaagatagcgaaccaggaccccctaaacagcgtaaggccccagccccccagagaaccaaggctggcagcaagagcgccagccggactcataggggtagtcataggaaggacccctccctgcccgcagcttcatcttctagcagttcctcgaaacggggcaagaagatgtgttcagacggggagaaagccgaaaagcgctccatcgccggcatcgatcagtggctggaggtattttgtgagcaggaggagaagtgggtgtgcgtggattgtgttcacggcgtggtcggtcagcctctgacatgttataagtatgccaccaagccaatgacctacgtagtcggtatcgattcggatggctgggtgcgcgacgtcacccagcggtacgaccctgtttggatgacggtgacgcgcaagtgccgcgtcgacgccgagtggtgggccgagacattgaggccctaccagtctccctttatggaccgcgagaaaaaagaggacctggaattccaggcaaaacacatggatcagcccctgccaacagcaatagggctttacaaaaatcaccctttatatgcgttaaagcgacacctactcaagtatgaagcaatctacccagagactgccgccatcctcggttactgcagaggagaggccgtgtactcgagagactgcgtccacacactacactcaagagacacctggcttaaaaaggcgcgagtcgtacgactcggcgaggtgccttataagatggtgaaaggtttttctaaccgggcccggaaggctcgcttggcagagccacagcttagagaggaaaatgatctggggttgtttgggtattggcaaacagaggagtatcagccaccagtggcggtcgacggcaaagtacccaggaacgaatttggcaatgtctatttatttctgccttctatgatgccgatcggctgcgtgcagctcaatcttcccaatttacatcgcgtggctagaaagctcgacattgattgtgtacaggctattacagggtttgacttccatggcggatattcacatcccgtaaccgatggatacatcgtctgtgaggaattcaaggacgtactcttgacagcctgggagaacgagcaggccgtcatcgaacggaaagaaaaagagaaaaaggagaagcgtgcgcttggcaattggaagttactggccaaaggattgctgatcagagaaaggcttaagaggcggtacggccctaaatctgaagccgcagccccccacacggatgctgggggaggcctcagctcggacgaggaagagggtacatcatctcaagctgaagccgcccggatattggcggcatcctggccccagaacagagaggatgaagaaaagcagaagttaaagggggggcctaagaagaccaaaagggagaagaaggccgccgctagtcatctgtttccatttgaacagctttag

SEQ ID NO: 148236 - DNA, 2712 bp, Artificial Sequence
  derived and/or modified sequence
atggcaaggaaaagagccgccgggggagaacctcgcggccgtgagttgcggagccagaagagcaaggcaaagtccaaggcccgcagagaggaagaagaagaagatgccttcgaagacgaaaagcctccaaaaaagtcccttctgagtaaagtctcgcaaggcaagcggaaaagaggatgcagccacccggggggaagtgccgacgggcccgccaagaagaaggttgcgaaggtgacagtgaaatcagagaacttgaaggtgatcaaagacgaggcactgtccgatggcgatgatttacgcgactttcccagtgacctgaaaaaggcgcatcacctcaagaggggtgctaccatgaatgaggacagcaatgaggaagaggaggaatctgagaacgattgggaggaagctaagacccgagagagaagtgaaaagatcaaactggagttcgagacctacctgagaagagccatgaagaggttcaacaagggggttcatgaagatacccacaaggtgcatttgctgtgcctcctggccaatgggttctacagaaataacatatgctctcaaccagacctgcacgctattggactctcaataatacccgcccgctttaccagggtgctacctagagacgtggacacctactacctgagtaacttggtgaaatggtttattggtacgtttacagtaaatgcagaactctcagcctctgaacaggacaacctgcagactaccctcgagagaagatttgcgatttactcagcgagggacgatgaggagctagtgcatatctttttacttatcctcagggcgctacagctcctgaccaggctggtcttgagcctgcagccaatccctctgaagtctgctacggcaaaggggaaaaaaccctctaaagagcggctgacagcggacccaggcggttctagtgagaccagctctcaagtcctggagaaccacactaagcccaaaacgtcgaagggaaccaagcaggaagagacatttgccaaaggcacatgtagaccatctgcaaagggaaagaggaacaagggtgggcggaaaaagaggtccaagccatcgagctccgaggaagacgaaggacccggtgataaacaggaaaaggctactcaaaggcgcccacatggaagggaacgcagggtggctagtagagtgtcatataaggaggagagcggtagtgatgaggctggttcaggttctgattttgaactcagctctggagaagccagcgatcccagtgatgaagatagcgagcccgggccaccgaagcaacgtaaagcgccagccccccagcgtactaaagccggatccaagagtgcctctagaacgcaccgcggatcacaccggaaagatccttcactgcccgctgcaagcagtagctcttcctcttccaagagaggcaaaaaaatgtgttctgatggtgaaaaagcggagaagcgttccatcgcgggaatcgatcaatggttggaggtgttttgtgagcaggaggaaaaatgggtctgcgttgattgcgtgcacggagtcgtcggacaacctctgacctgttacaagtatgccaccaagccaatgacatacgtggttggaatcgactctgatggctgggttagggatgtcacgcaaagatatgatcctgtgtggatgactgtgacgcgtaagtgtcgcgtggatgcggaatggtgggctgaaacactaagaccataccagtctccatttatggatagagaaaaaaaggaagacctggaattccaggcaaagcacatggaccagccgctcccaaccgctatcggactgtacaaaaatcatcccttgtatgcactgaagcgacatctgctgaaatacgaggcaatatatcccgaaaccgccgcgattctgggctattgtcggggcgaggccgtctacagtagagactgcgtgcacactctgcactcccgggacacttggttgaaaaaggccagagtggtcagactgggggaggtgccgtacaagatggtcaaggggttcagcaacagggctcgcaaggctagactcgcagaacctcaactgcgagaagagaacgacctgggcctgtttggatactggcagaccgaggagtatcagccacctgtggccgtcgacggaaaggtgccccggaatgagttcggtaatgtctacttgtttctgccctccatgatgccgatcggctgtgtacagctgaacctccctaatctgcatagggtggcaaggaaactggatattgactgtgttcaggcgatcaccgggttcgacttccacggaggatacagtcatcccgtgacggacgggtatattgtctgcgaggagttcaaggacgtgctgctcacagcctgggagaacgagcaagcagtcattgagaggaaagaaaaagaaaaaaaggagaagcgtgcactgggtaattggaagctgctcgctaagggtctgctcatccgcgagagattaaaacgccgatatgggccaaagtcggaggcagccgcacctcacaccgacgcaggaggaggactatctagcgacgaggaggagggtacttcctcccaggccgaggcggcccgaatcctggcggctagctggccccaaaacagagaggacgaggagaaacaaaagctcaaaggaggacctaagaagacaaagcgcgagaaaaaagcggccgcgtctcacctgtttccctttgagcaactgtag

SEQ ID NO: 148237 - DNA, 2823 bp, Artificial Sequence
  derived and/or modified sequence
atggccaggaagagagctgctggaggagagccccggggccgggagctgcggagccagaagagcaaggccaagagcaaggcccggcgggaggaggaggaggaggatgcctttgaagatgagaagccacccaagaagagcctgctgagcaaggtgtcccagggcaagaggaagaggggctgcagccaccctgggggcagcgcagatggccctgccaagaagaaggtggccaaggtgacagtgaagtctgagaacctgaaggtgatcaaggatgaggccctgagtgatggagatgacctgcgggacttccccagcgacctgaagaaggcccaccacctgaagagaggagccaccatgaatgaagacagcaatgaggaggaggaggagagtgaaaatgactgggaggaggtggaggagctgtctgagcctgtgctgggagatgtgcgggagagcacagccttcagccgcagcctgctgcctgtgaagcctgtggagattgaaattgagaccccagagcaggccaagacccgggagaggtctgagaagatcaagctggagtttgagacctacctgcggcgggccatgaagcgcttcaacaagggcgtgcatgaggacacccacaaggtgcacctgctgtgcctgctggccaacggcttctacagaaacaacatctgcagccagcctgacctgcacgccatcggcctgagcatcatcccagcccgcttcaccagggtgctgcccagagatgtggacacctactacctgagcaacctggtgaagtggttcatcggcaccttcaccgtgaatgctgagctgagcgccagcgagcaggacaacctgcagaccaccctggagaggagatttgccatctacagcgccagagatgatgaggagctggtgcacatcttcctgctgatcctgcgggccctgcagctgctgacccggctggtgctgagcctgcagcccatccccctgaagagcgccacagccaagggcaagaagcccagcaaggagcggctgacagctgaccccggcggcagcagcgagaccagcagccaggtgctggagaaccacaccaagcccaagaccagcaagggcaccaagcaggaggagacctttgccaagggcacctgccggcccagcgccaagggcaagagaaataaaggaggcaggaagaagaggagcaagcccagcagcagtgaagaagatgagggccctggggacaagcaggagaaggccacccagaggcggccccacggccgggagcggcgggtggccagccgggtgtcctacaaggaggagagcggcagtgatgaagctggcagcggcagtgactttgagctgagcagtggagaggccagtgaccccagtgatgaggacagcgagcccggcccccccaagcagaggaaggccccagccccccagaggaccaaggccggcagcaagagcgccagcaggacccaccggggcagccacaggaaggaccccagcctgcctgctgccagcagcagcagcagcagcagcaagaggggcaagaagatgtgcagtgatggagagaaggccgagaagaggagcattgctggcatcgaccagtggctggaggtgttctgtgagcaggaggagaagtgggtgtgtgtggactgtgtgcatggagtggtgggccagcccctgacctgctacaagtatgccaccaagcccatgacctacgtggtgggcatcgacagtgatggctgggtgagagatgtgacccagagatatgaccctgtgtggatgacagtgaccaggaaatgtcgggtggatgctgagtggtgggccgagaccctgcggccctaccagagccccttcatggaccgggagaagaaggaggacctggagttccaggccaagcacatggaccagcccctgcccacagccatcggcctgtacaagaaccaccccctgtatgccctgaagaggcacctgctgaagtatgaggccatctacccagagacagctgccatcctgggctactgccgcggggaggccgtgtacagccgggactgtgtgcacaccctgcacagccgggacacctggctgaagaaggcccgggtggtgcggctgggggaggtgccctacaagatggtgaagggcttcagcaacagagccaggaaggcccggctggccgagccccagctgcgggaggagaatgacctgggcctgtttggctactggcagacagaggagtaccagccccctgtggccgtggatggcaaggtgcccagaaatgaatttggaaatgtgtacctgttcctgcccagcatgatgcccatcggctgtgtgcagctgaacctgcccaacctgcaccgggtggccaggaagctggacatcgactgtgtgcaggccatcactggatttgacttccacggcggctacagccaccctgtgacagatggctacatcgtgtgtgaggagttcaaggatgtgctgctgacagcctgggagaatgagcaggccgtcatcgagaggaaggagaaggagaagaaggagaagagggccctgggcaactggaagctgctggccaagggcctgctgatccgggagcggctgaagagaagatatggccccaagtctgaggccgccgccccccacacagatgctgggggcggcctgagcagtgatgaggaggagggcaccagcagccaggccgaggccgcccgcatcctggccgcctcctggccccagaacagagaagatgaggagaagcagaagctgaagggcggccccaagaagaccaagcgggagaagaaggccgccgccagccacctgttcccctttgagcagctgtag

SEQ ID NO: 148238 - DNA, 2712 bp, Artificial Sequence
  derived and/or modified sequence
atggccaggaagagagctgctggaggagagccccggggccgggagctgcggagccagaagagcaaggccaagagcaaggcccggcgggaggaggaggaggaggatgcctttgaagatgagaagccacccaagaagagcctgctgagcaaggtgtcccagggcaagaggaagaggggctgcagccaccctgggggcagcgcagatggccctgccaagaagaaggtggccaaggtgacagtgaagtctgagaacctgaaggtgatcaaggatgaggccctgagtgatggagatgacctgcgggacttccccagcgacctgaagaaggcccaccacctgaagagaggagccaccatgaatgaagacagcaatgaggaggaggaggagagtgaaaatgactgggaggaggccaagacccgggagaggtctgagaagatcaagctggagtttgagacctacctgcggcgggccatgaagcgcttcaacaagggcgtgcatgaggacacccacaaggtgcacctgctgtgcctgctggccaacggcttctacagaaacaacatctgcagccagcctgacctgcacgccatcggcctgagcatcatcccagcccgcttcaccagggtgctgcccagagatgtggacacctactacctgagcaacctggtgaagtggttcatcggcaccttcaccgtgaatgctgagctgagcgccagcgagcaggacaacctgcagaccaccctggagaggagatttgccatctacagcgccagagatgatgaggagctggtgcacatcttcctgctgatcctgcgggccctgcagctgctgacccggctggtgctgagcctgcagcccatccccctgaagagcgccacagccaagggcaagaagcccagcaaggagcggctgacagctgaccccggcggcagcagcgagaccagcagccaggtgctggagaaccacaccaagcccaagaccagcaagggcaccaagcaggaggagacctttgccaagggcacctgccggcccagcgccaagggcaagaggaacaagggcggcaggaagaagaggagcaagcccagcagcagcgaggaggatgagggccctggggacaagcaggagaaggccacccagaggcggccccacggccgggagaggagagtggccagccgggtgtcctacaaggaggagagcggcagtgatgaggccggcagcggcagtgactttgagctgagcagcggggaggccagtgaccccagtgatgaagattctgagcccggcccccccaagcagaggaaggccccagccccccagaggaccaaggccggcagcaagagcgccagcaggacccaccggggcagccacaggaaggaccccagcctgcctgctgccagcagcagcagcagcagcagcaagaggggcaagaagatgtgcagtgatggagagaaggccgagaagaggagcattgctggcatcgaccagtggctggaggtgttctgtgagcaggaggagaagtgggtgtgtgtggactgtgtgcacggcgtggtgggccagcccctgacctgctacaagtatgccaccaagcccatgacctacgtggtgggcatcgacagtgatggctgggtgagagatgtgacccagagatatgaccctgtgtggatgacagtgaccaggaagtgccgggtggatgctgagtggtgggccgagaccctgcggccctaccagagccccttcatggaccgggagaagaaggaggacctggagttccaggccaagcacatggaccagcccctgcccacagccatcggcctgtacaagaaccaccccctgtatgccctgaagaggcacctgctgaagtatgaggccatctacccagagacagctgccatcctgggctactgccgcggggaggccgtgtacagccgggactgtgtgcacaccctgcacagccgggacacctggctgaagaaggcccgggtggtgcggctgggggaggtgccctacaagatggtgaagggcttcagcaacagagccaggaaggcccggctggccgagccccagctgcgggaggagaatgacctgggcctgtttggctactggcagacagaggagtaccagccccctgtggccgtggatggcaaggtgcccagaaatgaatttggaaatgtgtacctgttcctgcccagcatgatgcccatcggctgtgtgcagctgaacctgcccaacctgcaccgggtggccaggaagctggacatcgactgtgtgcaggccatcaccggctttgacttccatggaggctacagccaccctgtgacagatggctacatcgtgtgtgaggagttcaaggatgtgctgctgacagcctgggagaatgagcaggccgtgattgaaaggaaggagaaggagaagaaggagaagagggccctgggcaactggaagctgctggccaagggcctgctgatccgggagcggctgaagagaagatatggccccaagtctgaggccgccgccccccacacagatgctgggggcggcctgagcagtgatgaggaggagggcaccagcagccaggccgaggccgcccgcatcctggccgcctcctggccccagaaccgggaggatgaggagaagcagaagctgaagggcggccccaagaagaccaagcgggagaagaaggctgctgccagccacctgttcccctttgagcagctgtag

SEQ ID NO: 148239 - DNA, 2823 bp, Artificial Sequence
  derived and/or modified sequence
atggcccggaagcgggccgccggcggcgagccccggggccgggagctgagaagccagaagtccaaagcgaagtctaaggctcggagagaggaagaagaagaggatgcctttgaagacgaaaaaccacctaagaaaagcctgctgtccaaggtttctcaggggaagcgtaagagggggtgttcacatccagggggctcagccgatggtcccgcgaagaagaaggtggcgaaggtgactgtaaagagcgaaaatctgaaggtgatcaaggacgaagccctgtctgacggggacgacctgcgcgactttccttcagacctgaaaaaagctcatcaccttaagcggggagcaacgatgaatgaggattccaacgaagaagaggaggaatctgaaaatgactgggaggaggttgaagagctgtccgagcccgtgctcggggatgtcagagaatcgactgctttttccaggtctctgctaccggtaaaacctgtggaaattgaaattgagacaccggagcaggcaaaaactcgagaacgatctgagaagattaagctcgagtttgagacttatctcagacgagccatgaagcgctttaacaaaggcgtccacgaggacacccataaagtgcacctcctgtgcctcctagcaaacggcttttaccggaataatatctgttctcagcccgacttacacgcaattggcctttctataatcccggctagattcacacgggtcctccccagggacgtggacacttattatctgagcaacttggtgaagtggttcataggcacttttactgttaatgccgagttgtccgcttcagaacaagataatctccaaacaacactggagagaaggtttgccatttatagcgctagagatgatgaagagctggtgcacattttcctcctgatcctgcgggcactgcaacttctaacgagacttgtgttgagcttacaacctatcccgcttaagagcgccaccgctaaggggaaaaaaccatctaaagaacggttaacagctgatcctggcgggtccagcgaaacatcctctcaggttctggagaaccacacaaaaccaaaaacaagcaaaggtaccaagcaagaggagaccttcgccaaggggacatgtaggccttctgccaaaggcaagcgtaacaagggaggaaggaagaaacgttcaaagccaagttcctccgaggaggacgaggggccaggcgacaagcaggaaaaggccacgcagcgtaggcctcatgggcgggagcgcagagtggctagtcgagtctcatacaaagaggaatctggctccgatgaggctggctccggcagtgatttcgagctttctagtggagaggcaagcgatcctagtgacgaggatagtgagcctgggcctcctaaacagaggaaagcccctgccccgcagagaaccaaggctggaagcaaatcagcgagtcgcacacatagaggaagtcaccgcaaggatcctagcctgccagctgccagcagctcatcttcttcatcaaaacgtgggaagaagatgtgttcagatggggaaaaagctgaaaagcgttctatcgccgggattgatcagtggcttgaggtcttttgcgagcaagaagaaaaatgggtgtgcgtggattgtgtacatggcgtcgtgggtcagcctctgacttgttataaatatgccacgaaacctatgacctacgtagtggggattgattctgacggttgggtgcgcgacgtgacccagcggtacgacccggtctggatgactgtgactcgcaagtgtagggtggatgctgaatggtgggctgagactctgaggccctaccaaagcccatttatggatcgtgagaaaaaagaggatttggaattccaagccaaacatatggaccagcctttgcctaccgctatagggctgtacaaaaaccatcctctgtatgcactgaaacgccacctgctcaagtatgaggccatctatcccgagacagctgctatactcggttactgccggggcgaagcggtgtactctcgcgattgtgttcatactctgcacagccgggacacttggcttaagaaggcccgggttgtgcgcttgggagaggtgccctacaagatggtcaaggggttttccaaccgcgccaggaaagctcgtttagccgaaccgcaactccgcgaggaaaacgatctgggtcttttcggctattggcagaccgaagagtaccaaccacccgtcgccgtcgatgggaaagttccgcggaatgaattcggtaacgtgtatttattcctgcccagcatgatgccaatcggatgcgtacagctaaaccttccgaatctccaccgcgtcgctcgcaaacttgatattgattgcgtccaggcaattactggattcgactttcatgggggatattctcacccagtgacagatggctatatagtctgcgaggaatttaaagatgtgctgcttacagcttgggaaaatgagcaggccgtgatcgagcggaaggaaaaagaaaagaaggaaaagcgcgccctgggaaattggaagcttttggctaagggccttctcatacgggagcgactaaaaaggcgctatggcccaaagtctgaggcggccgcaccccatacagacgctggagggggactgtccagcgacgaggaagagggaaccagttctcaggcggaagccgcccgcattctggcagcgagttggcctcagaatcgagaagacgaggagaaacaaaaattgaaggggggccccaaaaaaaccaagcgggagaaaaaggccgctgcttcccatttatttccatttgaacaactgtag

SEQ ID NO: 148240 - DNA, 2712 bp, Artificial Sequence
  derived and/or modified sequence
atggcccggaagcgggccgccggcggcgagccccggggccgggagctccggagccagaagtcgaaggctaagtcaaaggcaaggagagaggaagaggaagaggacgctttcgaagacgagaagccccccaagaagagtctcttgtctaaagtgtcgcaaggaaagaggaagcgtggatgcagtcatcctggtgggtccgcggacggtccggccaagaaaaaggtggccaaagtcactgtcaagtccgaaaatctcaaagttataaaggatgaggccttgtccgacggagacgacctgagggacttcccatctgatctcaaaaaagcacatcatcttaaacggggagcaacaatgaacgaagacagcaacgaggaagaggaggaaagcgaaaatgattgggaagaggccaaaaccagggaacggagcgagaaaattaaactagagttcgagacgtatctgcgacgggcaatgaagcgcttcaataaaggcgttcacgaggatacccataaagtgcatcttttgtgtctcctggccaatggattttatagaaacaatatctgctctcagccagacctgcacgccataggtctttcgataattcccgcccggtttacccgcgtgctgccgagggatgtcgatacctactatctatccaacctcgtgaagtggttcatcggcacttttaccgtaaacgccgaactgagcgcgagcgagcaagacaatttgcagactacattagaacgtaggtttgcaatatatagcgctagggatgacgaggaactggtacacatttttctgctcattctccgcgctctgcaacttctgactagattagtactatctttgcagcctatcccactgaagtctgcaacagcaaagggtaaaaagccttcaaaagagaggctcactgcagaccctggcggatccagcgagactagtagccaggtactggagaaccatacgaagccaaaaacctccaagggtaccaaacaggaagagaccttcgccaaaggaacctgtcgaccttcagccaagggtaaacggaacaaggggggcagaaagaaacggagcaagccgagttctagcgaagaggacgaaggacccggcgataagcaggagaaggcaacccagcgaagaccccacggccgcgaaagacgcgttgccagccgcgttagctacaaggaggagagcggcagcgatgaggcagggtccggctctgactttgaactgagttccggtgaggccagcgacccctctgatgaagactccgagcccggaccccctaagcagagaaaagcacctgccccacaacgcactaaggccgggagcaaaagtgctagcagaacccacaggggcagccataggaaagacccgagcttgccagctgcgagctcttcgtcgtcttcatctaagaggggaaaaaagatgtgtagcgatggagagaaagcagaaaagagatccatagcaggcattgaccagtggcttgaggtgttctgcgagcaggaggagaagtgggtctgtgttgactgcgtgcatggcgtggtgggtcaacccctgacatgttacaaatacgccacaaaacccatgacatacgtcgtaggcatcgattccgatggttgggtgcgagacgtcacccagaggtacgaccccgtatggatgactgtgacccgaaaatgcagggtggacgccgagtggtgggccgagactctcagaccttaccagagtccctttatggacagagaaaaaaaggaggatctggagtttcaggcaaagcatatggatcagcctttaccgactgcaataggactatacaagaatcacccattgtatgcactcaagaggcatctgctcaaatacgaagcaatctacccagagaccgccgccatactgggctactgtcgtggtgaagccgtctattcgcgtgattgtgtgcatacactccacagcagagatacttggcttaagaaggctagagttgttagattgggcgaggtcccttacaagatggtgaaaggtttctcaaatagagcccgaaaagccaggctggccgagccgcagctgcgcgaggaaaatgacctgggcctgtttggttactggcagactgaggagtaccaaccccctgtcgcagtggacggcaaggttcccaggaacgaatttggtaacgtgtatctgtttctcccaagcatgatgcccattggatgtgtccagcttaatctccccaacttgcatcgcgtggctcgcaagctcgacatcgattgtgtgcaggctatcacaggttttgactttcacggcggctactctcacccagtgactgacggttatattgtatgcgaagaattcaaagatgtccttctcaccgcctgggaaaacgaacaagcagttatcgaacggaaagaaaaggaaaagaaggagaagcgcgccctgggaaattggaagctcctggccaaaggcctcctcatccgtgaacgccttaaaaggcggtatggccccaagtcagaggccgcagctcctcatactgacgccggaggagggttgtcctcagacgaggaggaggggaccagcagtcaggcagaggcagcacgaatccttgcagctagctggcctcagaatagggaagatgaagagaaacagaagcttaaaggaggacccaagaaaactaagagggagaagaaggctgcggcctcccacctcttcccatttgagcagctctag

SEQ ID NO: 148241 - DNA, 2823 bp, Artificial Sequence
  derived and/or modified sequence
atggctcgaaaacgggcagctggaggcgaacccagaggacgagagctcaggagccagaaatccaaagcgaaaagtaaagcccgaagagaagaagaggaggaggacgcttttgaggatgagaaaccccctaaaaagtccctgctgtctaaagtcagccaaggcaaacggaaacgcggatgctctcatcctggagggagtgccgacgggcctgcaaagaagaaagtggcaaaggtgactgtgaagagcgaaaacctgaaggtcattaaagatgaggccctgtcagatggagatgaccttagggactttccttcggatctcaaaaaggcccaccacctgaaaaggggtgcgaccatgaatgaggattctaacgaggaagaagaagaaagcgagaatgactgggaggaagtggaagagctgagcgaaccagtgctcggggatgtccgagaatcaacagcttttagtaggtctctactcccagtgaagccggtcgagatcgaaattgagacccctgaacaggccaagacccgcgagcgatcggagaagattaagctcgaatttgagacctatctccgaagagctatgaagaggttcaacaaaggagtgcacgaggacacccacaaggtgcacctcttgtgcctcctggcaaacggtttctataggaacaatatttgcagtcagccggacctccatgccattggactgagcatcattcccgcacgctttacaagagttcttccacgagatgtggatacctattatctgtccaaccttgttaaatggtttatcggaacgttcaccgttaatgctgagctgtccgcaagcgagcaggacaatttgcagaccactttggaaagacggttcgccatttactctgcccgtgacgacgaggagcttgtgcatatatttctcttgatcctccgagcgctccaactgctgacgcgcctggtgctgagcctgcagcccatccctctgaagtccgctactgctaaaggcaaaaaaccctctaaagaaaggctcactgccgatccaggcggatctagcgagacctcttcccaggtactggaaaatcatactaaaccaaagacctccaaaggaacaaaacaggaggagacattcgccaaggggacgtgccggccatcagctaaggggaagagaaacaagggtgggcgaaaaaagcgatcgaaaccatcctcctctgaagaggacgagggccctggcgataagcaggagaaggccacgcagcgcagaccccacggcagggagcgtcgggtcgcttcaagagtaagttacaaagaggagtccggatcagatgaggcgggtagcggctccgactttgagttaagctccggcgaggccagcgaccctagtgatgaagactccgaacccggaccaccaaaacaacgcaaggcgccagcccctcagagaaccaaagcaggtagcaaaagcgcttctcgcacccaccgcggtagtcataggaaggatccgtcactgcccgctgctagctcaagcagctcatcctctaaacgagggaagaagatgtgttccgacggcgagaaggccgagaaacgaagcattgctgggattgaccagtggctggaagtcttttgcgaacaggaagaaaaatgggtctgcgtggattgcgtacatggggtcgtggggcagccactgacatgttacaagtacgccactaaaccaatgacatacgtcgtaggtatagattccgacggttgggtgagagacgtgacgcagcgttatgatccagtgtggatgacagtgacaaggaagtgccgggttgacgccgaatggtgggccgaaactctccgtccatatcaaagccccttcatggaccgagagaagaaggaagatctcgaatttcaggccaagcacatggatcagccactgcctaccgcaatcggtctgtacaagaatcaccctctgtacgccctcaaacgtcatctgcttaagtatgaggccatttaccccgagactgccgctatcctcggatactgtcgtggggaagccgtgtattctcgcgactgtgtgcatacactgcactcacgggatacatggctgaagaaggcacgagttgtgcgcctgggtgaggttccatataagatggtaaagggtttctccaacagggccagaaaggctcggcttgccgagccccagcttagagaggagaacgacctgggcctcttcggatattggcaaacagaggaatatcagccaccagtcgccgtggacggtaaagtccccaggaatgagtttggcaacgtgtacttgtttctgccctcaatgatgccaattggttgcgtacagctcaacctccctaatctgcacagagtagcacgtaagctggacatagattgtgttcaggcgataacgggatttgactttcatggaggttactctcatccagtaaccgacggatacatcgtctgcgaagaatttaaagatgttctgctaaccgcgtgggaaaatgaacaggcagtcatcgaacgaaaggagaaagaaaagaaagagaagagggcacttggcaactggaaattgctggccaagggcctccttatccgcgaacgcctgaagcggagatacgggcctaagtcagaagctgctgctccccacacggatgctggcggaggtttgtctagcgatgaagaggaaggcacatctagccaagcggaagccgctcgcatcctggccgcaagctggccccagaaccgagaggatgaggagaaacagaagctgaaagggggtcccaagaagaccaagagagaaaagaaagctgctgcatctcacctctttccatttgaacagctttag

SEQ ID NO: 148242 - DNA, 2712 bp, Artificial Sequence
  derived and/or modified sequence
atggctagaaaaagagccgctgggggtgaacccagaggaagagagctgaggtcccaaaagagcaaggcaaagtcgaaagctaggcgggaagaagaagaagaggacgcctttgaagatgaaaaacccccaaagaaatctctgctcagtaaggtgtcacagggaaagaggaaacgcggttgcagtcacccaggaggcagcgccgatgggcctgccaagaaaaaggttgctaaagtgacagtcaaatcagaaaacctaaaagtgattaaggatgaggccttgtctgacggtgatgacctcagggatttcccatccgacttgaagaaagcccatcatttgaagagaggcgctaccatgaatgaggattctaacgaggaagaggaagaatcggaaaacgactgggaggaagccaaaaccagagaaagaagtgaaaagattaagttggaattcgagacgtatctcaggcgggcaatgaaacgatttaacaaaggcgttcacgaagacacgcacaaagttcacctgctgtgtttgttggctaatggattctatcgtaacaacatctgttcacaacctgaccttcacgccatcggtctgtcaatcatcccagctaggtttaccagggtgctaccccgtgacgtagatacctactacctcagtaatctggtaaagtggttcattggcacctttacagtgaatgccgaactgtcagcaagcgaacaggacaacctgcagacaacgttggagagacggtttgcaatctattccgctagggatgatgaggagctggtgcacatctttctcttgatattgcgcgcactgcagctgctgacaaggcttgtactctccttgcagcccattcctctgaagagtgcgaccgccaagggaaaaaagccaagcaaggagcgcttgacagctgatcctggtggctcgtccgagactagttcgcaagtgctcgagaatcacactaagcccaaaacatccaagggtacaaagcaggaggaaactttcgcgaagggcacttgccgaccttccgccaaggggaagagaaataaaggaggcagaaaaaagcggtcaaaaccatcttctagcgaagaggatgaggggccaggcgacaagcaggagaaggccacccaacgtcgaccccacggtcgagagcggagagtggcttctagagtgagttataaggaagaatccggcagcgatgaagctggctctggctctgacttcgagcttagtagcggagaagcttctgacccctcggacgaggattccgaacccggaccccctaaacagcggaaagcaccagcccctcagagaacaaaagcagggagtaagtcagctagtaggactcaccggggatcacacagaaaggacccttctctgcccgcagcttcgtcctcgtcgtctagctccaagcgcggaaaaaagatgtgttctgatggcgaaaaagcagaaaaacgcagtattgccggaattgaccagtggctggaagtgttttgcgagcaagaagagaaatgggtctgtgtggactgcgttcacggcgtcgtcggacagcctctgacatgttacaagtacgccacgaagccgatgacctacgtggtgggtatcgacagtgacggatgggtccgtgatgtcactcaacgatatgaccctgtgtggatgacagtgaccagaaaatgcagagtagatgctgagtggtgggccgaaactctcagaccgtaccagtctcctttcatggaccgcgagaagaaagaggacctcgaattccaggctaagcatatggaccagcctctgcctaccgctatcggcctgtacaaaaatcatcccttgtatgcactgaagcggcatctgctgaagtatgaagctatttatcccgagactgccgcaattttaggatactgtcgaggcgaggctgtttattccagagattgtgtccacaccctgcactctcgggatacatggctgaagaaggccagagtggtgaggctgggagaggtgccatacaaaatggtcaagggattcagcaatagagctcgcaaggctcgcctggcggaaccacagctcagggaagagaacgaccttgggctgttcggctattggcaaaccgaagagtaccagcctccggtggccgtggacgggaaggtgccccgtaacgagtttgggaatgtgtatctgttcctacctagcatgatgcctattggttgcgtgcagctcaacttgccgaacttacatagagtcgcaagaaagctcgacattgactgtgtgcaggcaataaccggtttcgacttccacggcggttacagccatcccgtcaccgacggatatatagtttgcgaagagttcaaggacgtgctcctgactgcgtgggagaatgagcaggccgtaatagaacggaaggaaaaagagaaaaaagaaaaacgcgcactgggaaattggaaactgctagcgaaaggcctgttgattcgcgaacgacttaagaggagatatggtcccaaaagcgaggcagcagcgcctcacaccgacgccggtggcggactatcttcagacgaggaagaggggaccagcagccaggcggaggccgcacgcattctggctgcctcctggcctcagaaccgggaggacgaggaaaagcagaaactcaaaggtgggccaaaaaaaaccaagcgggagaaaaaagctgcagcaagccatctttttcccttcgaacagttgtag

SEQ ID NO: 148243 - DNA, 3832 bp, Artificial Sequence
  derived and/or modified sequence
atacaccggaaatagagagaaacctgttgtgctctttcctgcttcccgcagttttttagtggccacgggtatggggtggagcttcctttaggggcgtgactaggcctccaacgaaggggcgtggccaagcgcaccgcctcggggcggggccggcgttctagcgcatcgcggccgggtgcgtcactcgcgaagtggaatttgcccagacaagcaacatggctcggaaacgcgcggccggcggggagccgcggggacgcgaactgcgcagccagaaatccaaggccaagagcaaggcccggcgtgaggaggaggaggaggatgcctttgaagatgagaaacccccaaagaagagccttctctccaaagtttcacaaggaaagaggaaaagaggctgcagtcatcctgggggttcagcagatggtccagcaaaaaagaaagtggccaaggtgactgttaaatctgaaaacctcaaggttataaaggatgaagccctcagcgatggggatgacctcagggactttccaagtgacctcaagaaggcacaccatctgaagagaggggctaccatgaatgaagacagcaatgaagaagaggaagaaagtgaaaatgattgggaagaggttgaagaacttagtgagcctgtgctgggtgacgtgagagaaagtacagccttctctcgatctcttctgcctgtgaagccagtggagatagagattgaaacgccagagcaggcgaagacaagagaaagaagtgaaaagataaaactggagtttgagacatatcttcggagggcgatgaaacgtttcaataaaggggtccatgaggacacacacaaggttcaccttctctgcctgctagcaaatggcttctatcgaaataacatctgcagccagccagatctgcatgctattggcctgtccatcatcccagcccgctttaccagagtgctgcctcgagatgtggacacctactacctctcaaacctggtgaagtggttcattggaacatttacagttaatgcagaactttcagccagtgaacaagataacctgcagactacattggaaaggagatttgctatttactctgctcgagatgatgaggaattggtccatatattcttactgattctccgggctctgcagctcttgacccggctggtattgtctctacagccaattcctctgaagtcagcaacagcaaagggaaagaaaccttccaaggaaagattgactgcggatccaggaggctcctcagaaacttccagccaagttctagaaaaccacaccaaaccaaagaccagcaaaggaaccaaacaagaggaaacctttgctaagggcacctgcaggccaagtgccaaagggaagaggaacaagggaggcagaaagaaacggagcaagccctcctccagcgaggaagatgagggcccaggagacaagcaggagaaggcaacccagcgacgtccgcatggccgggagcggcgggtggcctccagggtgtcttataaagaggagagtgggagtgatgaggctggcagcggctctgattttgagctctccagtggagaagcctctgatccctctgatgaggattccgaacctggccctccaaagcagaggaaagcccccgctcctcagaggacaaaggctgggtccaagagtgcctccaggacccatcgtgggagccatcgtaaggacccaagcttgccagcggcatcctcaagctcttcaagcagtaaaagaggcaagaaaatgtgcagcgatggtgagaaggcagaaaaaagaagcatagctggtatagaccagtggctagaggtgttctgtgagcaggaggaaaagtgggtatgtgtagactgtgtgcacggtgtggtgggccagcctctgacctgttacaagtacgccaccaagcccatgacctatgtggtgggcattgacagtgacggctgggtccgagatgtcacacagaggtacgacccagtctggatgacagtgacccgcaagtgccgggttgatgctgagtggtgggccgagaccttgagaccataccagagcccatttatggacagggagaagaaagaagacttggagtttcaggctaaacacatggaccagcctttgcccactgccattggcttatataagaaccaccctctgtatgccctgaagcggcatctcctgaaatatgaggccatctatcccgagacagctgccatccttgggtattgtcgtggagaagcggtctactccagggattgtgtgcacactctgcattccagggacacgtggctgaagaaagcaagagtggtgaggcttggagaagtaccctacaagatggtgaaaggcttttctaaccgtgctcggaaagcccgacttgctgagccccagctgcgggaagaaaatgacctgggcctgtttggctactggcagacagaggagtatcagcccccagtggccgtggacgggaaggtgccccggaacgagtttgggaatgtgtacctcttcctgcccagcatgatgcctattggctgtgtccagctgaacctgcccaatctacaccgcgtggcccgcaagctggacatcgactgtgtccaggccatcactggctttgatttccatggcggctactcccatcccgtgactgatggatacatcgtctgcgaggaattcaaagacgtgctcctgactgcctgggaaaatgagcaggcagtcattgaaaggaaggagaaggagaaaaaggagaagcgggctctagggaactggaagttgctggccaaaggtctgctcatcagggagaggctgaagcgtcgctacgggcccaagagtgaggcagcagctccccacacagatgcaggaggtggactctcttctgatgaagaggaggggaccagctctcaagcagaagcggccaggatactggctgcctcctggcctcaaaaccgagaagatgaagaaaagcagaagctgaagggtgggcccaagaagaccaaaagggaaaagaaagcagcagcttcccacctgttcccatttgagcagctgtgagctgagcgcccactagaggggcacccaccagttgctgctgccccactacaggccccacacctgccctgggcatgcccagcccctggtggtgggggcttctctgctgagaaggcaaactgaggcagcatgcacggaggcggggtcaggggagacgaggccaagctgaggaggtgctgcaggtcccgtctggctccagcccttgtcagattcacccagggtgaagccttcaaagctttttgctaccaaagcccactcaccctttgagctacagaacactttgctaggagatactcttctgcctcctagacctgttctttccatctttagaaacatcagtttttgtatggaagccaccgggagatttctggatggtggtgcatccgtgaatgcgctgatcgtttcttccagttagagtcttcatctgtccgacaagttcactcgcctcggttgcggacctaggaccatttctctgcaggccacttaccttcccctgagtcaggcttactaatgctgccctcactgcctctttgcagtaggggagagagcagagaagtacaggtcatctgctgggatctagttttccaagtaacattttgtggtgacagaagcctaaaaaaagctaaaatcaggaaagaaaaggaaaaatacgaattgaaaattaaggaaatgttagtaaaatagatgagtgttaaactagattgtattcattactagataaaatgtataaagctctctgtactaaggagaaatgacttttataacattttgagaaaataataaagcatttatctaaa

SEQ ID NO: 148244 - DNA, 2712 bp, Artificial Sequence
  derived and/or modified sequence
atggctcggaaacgcgcggccggcggggagccgcggggacgcgaactgcgcagccagaaatccaaggccaagagcaaggcccggcgtgaggaggaggaggaggatgcctttgaagatgagaaacccccaaagaagagccttctctccaaagtttcacaaggaaagaggaaaagaggctgcagtcatcctgggggttcagcagatggtccagcaaaaaagaaagtggccaaggtgactgttaaatctgaaaacctcaaggttataaaggatgaagccctcagcgatggggatgacctcagggactttccaagtgacctcaagaaggcacaccatctgaagagaggggctaccatgaatgaagacagcaatgaagaagaggaagaaagtgaaaatgattgggaagaggcgaagacaagagaaagaagtgaaaagataaaactggagtttgagacatatcttcggagggcgatgaaacgtttcaataaaggggtccatgaggacacacacaaggttcaccttctctgcctgctagcaaatggcttctatcgaaataacatctgcagccagccagatctgcatgctattggcctgtccatcatcccagcccgctttaccagagtgctgcctcgagatgtggacacctactacctctcaaacctggtgaagtggttcattggaacatttacagttaatgcagaactttcagccagtgaacaagataacctgcagactacattggaaaggagatttgctatttactctgctcgagatgatgaggaattggtccatatattcttactgattctccgggctctgcagctcttgacccggctggtattgtctctacagccaattcctctgaagtcagcaacagcaaagggaaagaaaccttccaaggaaagattgactgcggatccaggaggctcctcagaaacttccagccaagttctagaaaaccacaccaaaccaaagaccagcaaaggaaccaaacaagaggaaacctttgctaagggcacctgcaggccaagtgccaaagggaagaggaacaagggaggcagaaagaaacggagcaagccctcctccagcgaggaagatgagggcccaggagacaagcaggagaaggcaacccagcgacgtccgcatggccgggagcggcgggtggcctccagggtgtcttataaagaggagagtgggagtgatgaggctggcagcggctctgattttgagctctccagtggagaagcctctgatccctctgatgaggattccgaacctggccctccaaagcagaggaaagcccccgctcctcagaggacaaaggctgggtccaagagtgcctccaggacccatcgtgggagccatcgtaaggacccaagcttgccagcggcatcctcaagctcttcaagcagtaaaagaggcaagaaaatgtgcagcgatggtgagaaggcagaaaaaagaagcatagctggtatagaccagtggctagaggtgttctgtgagcaggaggaaaagtgggtatgtgtagactgtgtgcacggtgtggtgggccagcctctgacctgttacaagtacgccaccaagcccatgacctatgtggtgggcattgacagtgacggctgggtccgagatgtcacacagaggtacgacccagtctggatgacagtgacccgcaagtgccgggttgatgctgagtggtgggccgagaccttgagaccataccagagcccatttatggacagggagaagaaagaagacttggagtttcaggctaaacacatggaccagcctttgcccactgccattggcttatataagaaccaccctctgtatgccctgaagcggcatctcctgaaatatgaggccatctatcccgagacagctgccatccttgggtattgtcgtggagaagcggtctactccagggattgtgtgcacactctgcattccagggacacgtggctgaagaaagcaagagtggtgaggcttggagaagtaccctacaagatggtgaaaggcttttctaaccgtgctcggaaagcccgacttgctgagccccagctgcgggaagaaaatgacctgggcctgtttggctactggcagacagaggagtatcagcccccagtggccgtggacgggaaggtgccccggaacgagtttgggaatgtgtacctcttcctgcccagcatgatgcctattggctgtgtccagctgaacctgcccaatctacaccgcgtggcccgcaagctggacatcgactgtgtccaggccatcactggctttgatttccatggcggctactcccatcccgtgactgatggatacatcgtctgcgaggaattcaaagacgtgctcctgactgcctgggaaaatgagcaggcagtcattgaaaggaaggagaaggagaaaaaggagaagcgggctctagggaactggaagttgctggccaaaggtctgctcatcagggagaggctgaagcgtcgctacgggcccaagagtgaggcagcagctccccacacagatgcaggaggtggactctcttctgatgaagaggaggggaccagctctcaagcagaagcggccaggatactggctgcctcctggcctcaaaaccgagaagatgaagaaaagcagaagctgaagggtgggcccaagaagaccaaaagggaaaagaaagcagcagcttcccacctgttcccatttgagcagctgtga

SEQ ID NO: 148245 - DNA, 2944 bp, Artificial Sequence
  derived and/or modified sequence
actcgcgaagtggaatttgcccagacaagcaacatggctcggaaacgcgcggccggcggggagccgcggggacgcgaactgcgcagccagaaatccaaggccaagagcaaggcccggcgtgaggaggaggaggaggatgcctttgaagatgagaaacccccaaagaagagccttctctccaaagtttcacaaggaaagaggaaaagaggctgcagtcatcctgggggttcagcagatggtccagcaaaaaagaaagtggccaaggtgactgttaaatctgaaaacctcaaggttataaaggatgaagccctcagcgatggggatgacctcagggactttccaagtgacctcaagaaggcacaccatctgaagagaggggctaccatgaatgaagacagcaatgaagaagaggaagaaagtgaaaatgattgggaagaggttgaagtgaaaagataaaactggagtttgagacatatcttcggagggcgatgaaacgtttcaataaaggggtccatgaggacacacacaaggttcaccttctctgcctgctagcaaatggcttctatcgaaataacatctgcagccagccagatctgcatgctattggcctgtccatcatcccagcccgctttaccagagtgctgcctcgagatgtggacacctactacctctcaaacctggtgaagtggttcattggaacatttacagttaatgcagaactttcagccagtgaacaagataacctgcagactacattggaaaggagatttgctatttactctgctcgagatgatgaggaattggtccatatattcttactgattctccgggctctgcagctcttgacccggctggtattgtctctacagccaattcctctgaagtcagcaacagcaaagggaaagaaaccttccaaggaaagattgactgcggatccaggaggctcctcagaaacttccagccaagttctagaaaaccacaccaaaccaaagaccagcaaaggaaccaaacaagaggaaacctttgctaagggcacctgcaggccaagtgccaaagggaagaggaacaagggaggcagaaagaaacggagcaagccctcctccagcgaggaagatgagggcccaggagacaagcaggagaaggcaacccagcgacgtccgcatggccgggagcggcgggtggcctccagggtgtcttataaagaggagagtgggagtgatgaggctggcagcggctctgattttgagctctccagtggagaagcctctgatccctctgatgaggattccgaacctggccctccaaagcagaggaaagcccccgctcctcagaggacaaaggctgggtccaagagtgcctccaggacccatcgtgggagccatcgtaaggacccaagcttgccagcggcatcctcaagctcttcaagcagtaaaagaggcaagaaaatgtgcagcgatggtgagaaggcagaaaaaagaagcatagctggtatagaccagtggctagaggtgttctgtgagcaggaggaaaagtgggtatgtgtagactgtgtgcacggtgtggtgggccagcctctgacctgttacaagtacgccaccaagcccatgacctatgtggtgggcattgacagtgacggctgggtccgagatgtcacacagaggtacgacccagtctggatgacagtgacccgcaagtgccgggttgatgctgagtggtgggccgagaccttgagaccataccagagcccatttatggacagggagaagaaagaagacttggagtttcaggctaaacacatggaccagcctttgcccactgccattggcttatataagaaccaccctctgtatgccctgaagcggcatctcctgaaatatgaggccatctatcccgagacagctgccatccttgggtattgtcgtggagaagcggtctactccagggattgtgtgcacactctgcattccagggacacgtggctgaagaaagcaagagtggtgaggcttggagaagtaccctacaagatggtgaaaggcttttctaaccgtgctcggaaagcccgacttgctgagccccagctgcgggaagaaaatgacctgggcctgtttggctactggcagacagaggagtatcagcccccagtggccgtggacgggaaggtgccccggaacgagtttgggaatgtgtacctcttcctgcccagcatgatgcctattggctgtgtccagctgaacctgcccaatctacaccgcgtggcccgcaagctggacatcgactgtgtccaggccatcactggctttgatttccatggcggctactcccatcccgtgactgatggatacatcgtctgcgaggaattcaaagacgtgctcctgactgcctgggaaaatgagcaggcagtcattgaaaggaaggagaaggagaaaaaggagaagcgggctctagggaactggaagttgctggccaaaggtctgctcatcagggagaggctgaagcgtcgctacgggcccaagagtgaggcagcagctccccacacagatgcaggaggtggactctcttctgatgaagaggaggggaccagctctcaagcagaagcggccaggatactggctgcctcctggcctcaaaaccgagaagatgaagaaaagcagaagctgaagggtgggcccaagaagaccaaaagggaaaagaaagcagcagcttcccacctgttcccatttgagcagctgtgagctgagcgcccactagaggggcacccaccagttgctgctgccccactacaggccccacacctgccctgggcatgcccagcccctggtggtgggggcttctctgctgagaaggcaaactgaggcagcatgcacggaggcggggtcaggggagacgaggccaagctgaggaggtgctgcaggtcccgtctggctccagcccttgtcagattcac

SEQ ID NO: 148246 - DNA, 1868 bp, Artificial Sequence
  derived and/or modified sequence
tcaagcagtaaaagaggcaagaaaatgtgcagcgatggtgagaaggcagaaaaaagaagcatagctggtatagaccagtggctagaggtgttctgtgagcaggaggaaaagtgggtatgtgtagactgtgtgcacggtgtggtgggccagcctctgacctgttacaagtacgccaccaagcccatgacctatgtggtgggcattgacagtgacggctgggtccgagatgtcacacagaggtacgacccagtctggatgacagtgacccgcaagtgccgggttgatgctgagtggtgggccgagaccttgagaccataccagagcccatttatggacagggagaagaaagaagacttggagggattgtgtgcacactctgcattccagggacacgtggctgaagaaagcaagagtggtgaggcttggagaagtaccctacaagatggtgaaaggcttttctaaccgtgctcggaaagcccgacttgctgagccccagctgcgggaagaaaatgacctgggcctgtttggctactggcagacagaggagtatcagcccccagtggccgtggacgggaaggtgccccggaacgagtttgggaatgtgtacctcttcctgcccagcatgatgcctattggctgtgtccagctgaacctgcccaatctacaccgcgtggcccgcaagctggacatcgactgtgtccaggccatcactggctttgatttccatggcggctactcccatcccgtgactgatggatacatcgtctgcgaggaattcaaagacgtgctcctgactgcctgggaaaatgagcaggcagtcattgaaaggaaggagaaggagaaaaaggagaagcgggctctagggaactggaagttgctggccaaaggtctgctcatcagggagaggctgaagcgtcgctacgggcccaagagtgaggcagcagctccccacacagatgcaggaggtggactctcttctgatgaagaggaggggaccagctctcaagcagaagcggccaggatactggctgcctcctggcctcaaaaccgagaagatgaagaaaagcagaagctgaagggtgggcccaagaagaccaaaagggaaaagaaagcagcagcttcccacctgttcccatttgagcagctgtgagctgagcgcccactagaggggcacccaccagttgctgctgccccactacaggccccacacctgccctgggcatgcccagcccctggtggtgggggcttctctgctgagaaggcaaactgaggcagcatgcacggaggcggggtcaggggagacgaggccaagctgaggaggtgctgcaggtcccgtctggctccagcccttgtcagattcacccagggtgaagccttcaaagctttttgctaccaaagcccactcaccctttgagctacagaacactttgctaggagatactcttctgcctcctagacctgttctttccatctttagaaacatcagtttttgtatggaagccaccgggagatttctggatggtggtgcatccgtgaatgcgctgatcgtttcttccagttagagtcttcatctgtccgacaagttcactcgcctcggttgcggacctaggaccatttctctgcaggccacttaccttcccctgagtcaggcttactaatgctgccctcactgcctctttgcagtaggggagagagcagagaagtacaggtcatctgctgggatctagttttccaagtaacattttgtggtgacagaagcctaaaaaaagctaaaatcaggaaagaaaaggaaaaatacgaattgaaaattaaggaaatgttagtaaaatagatgagtgttaaactagattgtattcattactagataa

SEQ ID NO: 148247 - DNA, 177 bp, Artificial Sequence
  derived and/or modified sequence
atgtgcagcgatggtgagaaggcagaaaaaagaagcatagctggtatagaccagtggctagaggtgttctgtgagcaggaggaaaagtgggtatgtgtagactgtcggtgtggtgggccagcctctgacctgttacaagtacgccaccaagcccatgacctatgtggtgggcattga

SEQ ID NO: 148248 - DNA, 569 bp, Artificial Sequence
  derived and/or modified sequence
aagccctcctccagcgaggaagatgagggcccaggagacaagcaggagaaggcaacccagcgacgtccgcatggccgggagcggcgggtggcctccagggtgtcttataaagaggagagtgggagtgatgaggctggcagcggctctgattttgagctctccagtggagaagcctctgatccctctgatgaggattccgaacctggccctccaaagcagaggaaagcccccgctcctcagaggacaaaggctgggtccaagagtgcctccaggacccatcgtgggagccatcgtaaggacccaagcttgccagcggcatcctcaagctcttcaagcagtaaaagaggcaagaaaatgtgcagcgatggtgagaaggcagaaaaaagaagcatagctggtatagaccagtggctagaggtgttctgtgagcaggaggaaaagtggtgacggctgggtccgagatgtcacacagaggtacgacccagtctggatgacagtgacccgcaagtgccgggttgatgctgagtggtgggccgagaccttgagaccataccagagcccatttatgg

SEQ ID NO: 148249 - protein, 622 aa, Artificial Sequence
  derived and/or modified sequence
MSRQTTSVGSSCLDLWREKNDRLVRQAKVAQNSGLTLRRQQLAQDALEGLRGLLHSLQGLPAAVPVLPLELTVTCNFIILRASLAQGFTEDQAQDIQRSLERVLETQEQQGPRLEQGLRELWDSVLRASCLLPELLSALHRLVGLQAALWLSADRLGDLALLLETLNGSQSGASKDLLLLLKTWSPPAEELDAPLTLQDAQGLKDVLLTAFAYRQGLQELITGNPDKALSSLHEAASGLCPRPVLVQVYTALGSCHRKMGNPQRALLYLVAALKEGSAWGPPLLEASRLYQQLGDTTAELESLELLVEALNVPCSSKAPQFLIEVELLLPPPDLASPLHCGTQSQTKHILASRCLQTGRAGDAAEHYLDLLALLLDSSEPRFSPPPSPPGPCMPEVFLEAAVALIQAGRAQDALTLCEELLSRTSSLLPKMSRLWEDARKGTKELPYCPLWVSATHLLQGQAWVQLGAQKVAISEFSRCLELLFRATPEEKEQGAAFNCEQGCKSDAALQQLRAAALISRGLEWVASGQDTKALQDFLLSVQMCPGNRDTYFHLLQTLKRLDRRDEATALWWRLEAQTKGSHEDALWSLPLYLESYLSWIRPSDRDAFLEEFRTSLPKSCDL

SEQ ID NO: 148250 - protein, 215 aa, Artificial Sequence
  derived and/or modified sequence
MSRQTTSVGSSCLDLWREKNDRLVRQAKVAQNSGLTLRRQQLAQDALEGLRGLLHSLQGLPAAVPVLPLELTVTCNFIILRASLAQGFTEDQAQDIQRSLERVLETQEQQGPRLEQGLRELWDSVLRASCLLPELLSALHRLVGLQAALWLSADRLGDLALLLETLNGSQSGASKDLLLLLKTWSPPAEELDAPLTLQDAQGLKDVLLTAFAYRQ

SEQ ID NO: 148251 - protein, 448 aa, Artificial Sequence [sequence omitted]

SEQ ID NO: 148252 - DNA, 1869 bp, Artificial Sequence
  derived and/or modified sequence
atgagcagacagaccaccagcgtgggcagcagctgcctggacctgtggagagagaagaacgacagactggtgagacaggccaaggtggcccagaacagcggcctgaccctgagaagacagcagctggcccaggacgccctggagggcctgagaggcctgctgcacagcctgcagggcctgcccgccgccgtgcccgtgctgcccctggagctgaccgtgacctgcaacttcatcatcctgagagccagcctggcccagggcttcaccgaggaccaggcccaggacatccagagaagcctggagagagtgctggagacccaggagcagcagggccccagactggagcagggcctgagagagctgtgggacagcgtgctgagagccagctgcctgctgcccgagctgctgagcgccctgcacagactggtgggcctgcaggccgccctgtggctgagcgccgacagactgggcgacctggccctgctgctggagaccctgaacggcagccagagcggcgccagcaaggacctgctgctgctgctgaagacctggagcccccccgccgaggagctggacgcccccctgaccctgcaggacgcccagggcctgaaggacgtgctgctgaccgccttcgcctacagacagggcctgcaggagctgatcaccggcaaccccgacaaggccctgagcagcctgcacgaggccgccagcggcctgtgccccagacccgtgctggtgcaggtgtacaccgccctgggcagctgccacagaaagatgggcaacccccagagagccctgctgtacctggtggccgccctgaaggagggcagcgcctggggcccccccctgctggaggccagcagactgtaccagcagctgggcgacaccaccgccgagctggagagcctggagctgctggtggaggccctgaacgtgccctgcagcagcaaggccccccagttcctgatcgaggtggagctgctgctgcccccccccgacctggccagccccctgcactgcggcacccagagccagaccaagcacatcctggccagcagatgcctgcagaccggcagagccggcgacgccgccgagcactacctggacctgctggccctgctgctggacagcagcgagcccagattcagccccccccccagcccccccggcccctgcatgcccgaggtgttcctggaggccgccgtggccctgatccaggccggcagagcccaggacgccctgaccctgtgcgaggagctgctgagcagaaccagcagcctgctgcccaagatgagcagactgtgggaggacgccagaaagggcaccaaggagctgccctactgccccctgtgggtgagcgccacccacctgctgcagggccaggcctgggtgcagctgggcgcccagaaggtggccatcagcgagttcagcagatgcctggagctgctgttcagagccacccccgaggagaaggagcagggcgccgccttcaactgcgagcagggctgcaagagcgacgccgccctgcagcagctgagagccgccgccctgatcagcagaggcctggagtgggtggccagcggccaggacaccaaggccctgcaggacttcctgctgagcgtgcagatgtgccccggcaacagagacacctacttccacctgctgcagaccctgaagagactggacagaagagacgaggccaccgccctgtggtggagactggaggcccagaccaagggcagccacgaggacgccctgtggagcctgcccctgtacctggagagctacctgagctggatcagacccagcgacagagacgccttcctggaggagttcagaaccagcctgcccaagagctgcgacctgtag

SEQ ID NO: 148253 - DNA, 648 bp, Artificial Sequence
  derived and/or modified sequence
atgagcagacagaccaccagcgtgggcagcagctgcctggacctgtggagagagaagaacgacagactggtgagacaggccaaggtggcccagaacagcggcctgaccctgagaagacagcagctggcccaggacgccctggagggcctgagaggcctgctgcacagcctgcagggcctgcccgccgccgtgcccgtgctgcccctggagctgaccgtgacctgcaacttcatcatcctgagagccagcctggcccagggcttcaccgaggaccaggcccaggacatccagagaagcctggagagagtgctggagacccaggagcagcagggccccagactggagcagggcctgagagagctgtgggacagcgtgctgagagccagctgcctgctgcccgagctgctgagcgccctgcacagactggtgggcctgcaggccgccctgtggctgagcgccgacagactgggcgacctggccctgctgctggagaccctgaacggcagccagagcggcgccagcaaggacctgctgctgctgctgaagacctggagcccccccgccgaggagctggacgcccccctgaccctgcaggacgcccagggcctgaaggacgtgctgctgaccgccttcgcctacagacagtag

SEQ ID NO: 148254 - DNA, 1347 bp, Artificial Sequence
  derived and/or modified sequence
atgagcagacagaccaccagcgtgggcagcagctgcctggacctgtggagagagaagaacgacagactggtgagacaggccaaggtggcccagaacagcggcctgaccctgagaagacagcagctggcccaggacgccctggagggcctgagaggcctgctgcacagcctgcagggcctgcccgccgccgtgcccgtgctgcccctggagctgaccgtgacctgcaacttcatcatcctgagagccagcctggcccagggcttcaccgaggaccaggcccaggacatccagagaagcctggagagagtgctggagacccaggagcagcagggccccagactggagcagggcctgagagagctgtgggacagcgtgctgagagccagctgcctgctgcccgagctgctgagcgccctgcacagactggtgggcctgcaggccgccctgtggctgagcgccgacagactgggcgacctggccctgctgctggagaccctgaacggcagccagagcggcgccagcaaggacctgctgctgctgctgaagacctggagcccccccgccgaggagctggacgcccccctgaccctgcaggacgcccagggcctgaaggacgtgctgctgaccgccttcgcctacagacagggcctgcaggagctgatcaccggcaaccccgacaaggccctgagcagcctgcacgaggccgccagcggcctgtgccccagacccgtgctggtgcaggtgtacaccgccctgggcagctgccacagaaagatgggcaacccccagagagccctgctgtacctggtggccgccctgaaggagggcagcgcctggggcccccccctgctggaggccagcagactgtaccagcagctgggcgacaccaccgccgagctggagagcctggagctgctggtggaggccctgaacgtgccctgcagcagcaaggccccccagttcctgatcgaggtggagctgctgctgcccccccccgacctggccagccccctgcactgcggcacccagagccagaccaagcacatcctggccagcagatgcctgcagaccggcagagccggcgacgccgccgagcactacctggacctgctggccctgctgctggacagcagcgagcccagattcagccccccccccagcccccccggcccctgcatgcccgaggtgttcctggaggccgccgtggccctgatccaggccggcagagcccaggacgccctgaccctgtgcgaggagctgctgagcagaaccagcagcctgctgcccaagatgagcagactgtgggaggacgccagaaagagaaccagaggcagcttccagctgtag

SEQ ID NO: 148255 - DNA, 1869 bp, Artificial Sequence
  derived and/or modified sequence
atgtccaggcagactacatccgtgggaagtagttgcctcgatctatggagggagaaaaacgacagactggtgcgccaggctaaggtcgctcagaactctggtcttactttacgtcgccagcagctggctcaggacgccctcgagggtcttcgcggcctgctgcatagcctgcagggcctgcccgccgcagtccccgttcttccactagagctaacagtgacctgtaatttcatcatcctacgcgcaagcctggctcaggggttcacagaagaccaggcccaagatattcagcgatcccttgaaagagtcctggaaacccaagaacagcaagggccacgactggagcaggggcttagagaactgtgggattccgtactgcgagcgtcctgtctgctaccagaattgttaagtgctctgcataggctggtcggcttgcaggccgccctctggctttccgccgataggctgggcgacctggccctactgcttgagaccttaaacggaagtcagtctggggcaagtaaagacctacttttgctgctaaagacttggtcccctccagcggaggagctggacgcacccctcaccctgcaagacgcccagggactcaaggacgtcctacttactgcgttcgcatacaggcaaggactgcaggagctgattactggaaatccagacaaggcacttagctcccttcacgaagccgccagtggtttgtgtcctagaccagtcctggtgcaggtgtacaccgctttgggtagctgtcacaggaagatgggaaacccacaacgcgctctgctttacctggtagctgctctcaaagaagggagtgcttgggggccgcctctgttggaggctagcaggctgtatcagcagttaggcgacaccaccgccgagctggagagtctggagctgctggtggaggccctgaatgttccttgttcctccaaagccccccagttcctcattgaggttgaacttttactgccgccccccgacttagcaagccccctccattgcggcacacagtcacagaccaagcatatcctagcttctcggtgcctgcagaccggcagagctggtgatgctgctgagcactacctcgacttactggcactcctgttagactcatccgagccaagattctcgccacctcccagtccgcccgggccctgtatgcctgaggtttttttggaggcggccgttgcgctaatccaggcgggccgcgcccaggacgcccttacactgtgcgaagaactactgagtcggacctcctctctacttccaaaaatgtcccggctgtgggaagacgcccgaaaaggaacaaaggaacttccttattgccctttgtgggtctcagctacacatctcctccagggccaggcttgggttcagctcggcgcccagaaggtagcaatttctgaattttcacggtgcctggagctgttattcagggcaacccccgaggaaaaggagcagggggccgcattcaactgtgagcagggctgcaagagcgacgccgcactgcagcagctccgcgccgctgccctaatctctcgagggctcgagtgggttgcttcagggcaggacaccaaggcactgcaggattttctgctgtctgtgcagatgtgcccgggtaacagagacacttacttccatctgctacaaacactcaagcggttggaccggagagacgaagctacagccctttggtggcggctggaagcgcaaaccaaaggcagccacgaggacgctctgtggagtcttcccctatatctggaatcttatttaagctggattcgcccctctgaccgggacgcttttttggaggaatttaggacgtcccttcccaagagctgtgacctgtag

SEQ ID NO: 148256 - DNA, 648 bp, Artificial Sequence
  derived and/or modified sequence
atgtctcgccagacgacatctgtaggctcctcctgtcttgacctgtggcgcgagaaaaacgatcggcttgtgcgccaggccaaagtggcacagaatagtgggttgaccctgagaaggcagcagttagctcaagacgctcttgaaggtctgagggggctgcttcattcgctgcagggcctcccagcagctgttcctgtactgccactggagctcaccgttacttgtaacttcatcatcctcagggccagcctggcgcaaggctttactgaagatcaagcccaggacattcagcggtcactagagcgtgtgctggagactcaagaacaacagggccccaggctggaacagggtttgagggagctctgggacagcgttctgcgagccagttgcctattaccagagctactgtccgctctgcaccgattggtgggtctccaagctgctctatggctttcagctgataggctgggcgatcttgccttgttgctggagacactcaatggaagtcaaagcggagcctcaaaagacctcctgctgcttctgaagacctggtcaccaccggctgaggagctcgacgcacccttgactctgcaggatgcccaggggctgaaggatgtcctcttgacagcctttgcatacaggcagtag

SEQ ID NO: 148257 - DNA, 1347 bp, Artificial Sequence
  derived and/or modified sequence
atgagccgccagacaacctctgtgggctcttcttgcctggatttgtggcgagagaagaatgatcgactagtgcgacaggcgaaggtggctcagaatagcggcctgaccctcagaaggcaacaactggctcaggatgccctggagggactgagagggctcctccactctctgcagggtctgccagcagctgtgcccgtgctcccactagagctgactgtgacctgtaatttcattatcctccgcgccagtctggctcagggattcactgaagaccaagcacaggatatccagcgaagccttgaacgggtcttggagactcaggagcagcagggccccagactcgaacagggactaagagagctgtgggatagcgtattgagggcctcttgcctgcttccagagctgctgagtgcattgcacaggttagtcggactgcaggctgctctgtggctgagcgccgacaggctgggtgacctggctttgctcttggaaacactcaatggaagccagtcgggagccagcaaggatttgctactactcctcaagacttggtccccccctgcagaggagctggacgcccctctcaccctgcaggacgcccaaggtctgaaagacgtattgcttaccgcctttgcgtaccgacaaggtctgcaggagctaataaccggtaatcctgataaggccctgtcttcattgcatgaagcagcctctgggctgtgtccccgccctgtactagtgcaggtttacaccgccttgggaagctgccaccggaagatgggcaatccccagcgcgctctgctttacctggttgcagctctgaaggaggggtctgcatgggggccaccattactcgaggcatcccgtctataccagcagctgggggatactactgcggagctggagtccctggagctcctggtggaggctttaaatgttccttgcagctcaaaagccccacagttcctgatcgaggtcgaattgctcctcccacccccggacctcgcatcaccactgcattgcggaactcagtcacagaccaagcacatacttgcctctcgctgcctgcagacaggcagagccggcgacgcggctgaacactacttggatctcctcgcactgctgctcgactcaagcgagccgcgctttagccctccacctagccctccaggaccatgtatgcccgaggttttccttgaagccgccgtggctttgatccaggcaggtcgtgctcaagatgcgctcacattatgtgaggaactgctgtccaggacatcgtcgctactgccaaagatgtcaagactgtgggaggacgcaaggaagagaacacgcgggagcttccagctctag

SEQ ID NO: 148258 - DNA, 2631 bp, Artificial Sequence
  derived and/or modified sequence
aggaggacctgggggtgtggcagcgaggaagggccgagccacggactgtggggccgaaactcgctcccgcccaccctttctcgaggctgtggcctccgcgagagccgagcgggccgcaccgccggccgtgcgactgccccagtcagacacgaccccggcttctagcccgcctaagcctgtttggggttgctgactcgtttcctccccgagtttcccgcgggaactaactcttcaagaggaccaaccgcagcccagagcttcgcagacccggccaaccagaggcgaggttgagagcccggcgggccgcggggagagagcgtcccatctgtcctggaaagcctgggcgggtggattgggaccccgagagaagcaggggagctcggcggggtgcagaagtgcccaggcccctccccgctggggttgggagcttgggcaggccagcttcacccttcctaagtccgcttctggtctccgggcccagcctcggccaccatgtcccgccagaccacctctgtgggctccagctgcctggacctgtggagggaaaagaatgaccggctcgttcgacaggccaaggtggctcagaactccggtctgactctgaggcgacagcagttggctcaggatgcactggaagggctcagagggctcctccatagtctgcaagggctccctgcagctgttcctgttcttcccttggagctgactgtcacctgcaacttcattatcctgagggcaagcttggcccagggtttcacagaggatcaggcccaggatatccagcggagcctagagagagtgctggagacacaggagcagcaggggcccaggttggaacaggggctcagggagctgtgggactctgtccttcgtgcttcctgccttctgccggagctgctgtctgccctgcaccgcctggttggcctgcaggctgccctctggttgagtgctgaccgtcttggggacctggccttgttactagagaccctgaatggcagccagagtggagcctctaaggatctgctgttacttctgaaaacttggagtcccccagctgaggaattagatgctccattgaccctgcaggatgcccagggattgaaggatgtcctcctgacagcatttgcctaccgccaaggtctccaggagctgatcacagggaacccagacaaggcactaagcagccttcatgaagcggcctcaggcctgtgtccacggcctgtgttggtccaggtgtacacagcactggggtcctgtcaccgtaagatgggaaatccacagagagcactgttgtacttggttgcagccctgaaagagggatcagcctggggtcctccacttctggaggcctctaggctctatcagcaactgggggacacaacagcagagctggagagtctggagctgctagttgaggccttgaatgtcccatgcagttccaaagccccgcagtttctcattgaggtagaattactactgccaccacctgacctagcctcaccccttcattgtggcactcagagccagaccaagcacatactagcaagcaggtgcctacagacggggagggcaggagacgctgcagagcattacttggacctgctggccctgttgctggatagctcggagccaaggttctccccacccccctcccctccagggccctgtatgcctgaggtgtttttggaggcagcggtagcactgatccaggcaggcagagcccaagatgccttgactctatgtgaggagttgctcagccgcacatcatctctgctacccaagatgtcccggctgtgggaagatgccagaaaaggaaccaaggaactgccatactgcccactctgggtctctgccacccacctgcttcagggccaggcctgggttcaactgggtgcccaaaaagtggcaattagtgaatttagcaggtgcctcgagctgctcttccgggccacacctgaggaaaaagaacaaggggcagctttcaactgtgagcagggatgtaagtcagatgcggcactgcagcagcttcgggcagccgccctaattagtcgtggactggaatgggtagccagcggccaggataccaaagccttacaggacttcctcctcagtgtgcagatgtgcccaggtaatcgagacacttactttcacctgcttcagactctgaagaggctagatcggagggatgaggccactgcactctggtggaggctggaggcccaaactaaggggtcacatgaagatgctctgtggtctctccccctgtacctagaaagctatttgagctggatccgtccctctgatcgtgacgccttccttgaagaatttcggacatctctgccaaagtcttgtgacctgtagctgccacgttttgaagagcttgagctgggtccccagtgggctgtctctctgtggggagggctttctgcttcaccatcattaggaatgtgaccattcctatataattcctggactggtgagattggtggtaggcctgtgaaatttgccctagttactaccattctcgttttggaggaaacaatctctgccaccaccaagtcattgactttgctcgaggcaccttttttcctgtttctccttttctgttgtcgagtaaaatttcatatttat

SEQ ID NO: 148259 - DNA, 868 bp, Artificial Sequence
  derived and/or modified sequence
cctttctcgaggctgtggcctccgcgagagccgagcgggccgcaccgccggccgtgcgactgccccagtcagacacgaccccggcttctagcccgcctaagcctgtttggggttgctgactcgtttcctccccgagtttcccgcgggaactaactcttcaagaggaccaaccgcagcccagagcttcgcagacccggccaaccagaggcgagcctcggccaccatgtcccgccagaccacctctgtgggctccagctgcctggacctgtggagggaaaagaatgaccggctcgttcgacaggccaaggtggctcagaactccggtctgactctgaggcgacagcagttggctcaggatgcactggaagggctcagagggctcctccatagtctgcaagggctccctgcagctgttcctgttcttcccttggagctgactgtcacctgcaacttcattatcctgagggcaagcttggcccagggtttcacagaggatcaggcccaggatatccagcggagcctagagagagtgctggagacacaggagcagcaggggcccaggttggaacaggggctcagggagctgtgggactctgtccttcgtgcttcctgccttctgccggagctgctgtctgccctgcaccgcctggttggcctgcaggctgccctctggttgagtgctgaccgtcttggggacctggccttgttactagagaccctgaatggcagccagagtggagcctctaaggatctgctgttacttctgaaaacttggagtcccccagctgaggaattagatgctccattgaccctgcaggatgcccagggattgaaggatgtcctcctgacagcatttgcctaccgccaa

SEQ ID NO: 148260 - DNA, 1971 bp, Artificial Sequence
  derived and/or modified sequence
gcaccgccggccgtgcgactgccccagtcagacacgaccccggcttctagcccgcctaagcctgtttggggttgctgactcgtttcctccccgagtttcccgcgggaactaactcttcaagaggaccaaccgcagcccagagcttcgcagacccggccaaccagaggcgagcctcggccaccatgtcccgccagaccacctctgtgggctccagctgcctggacctgtggagggaaaagaatgaccggctcgttcgacaggccaaggtggctcagaactccggtctgactctgaggcgacagcagttggctcaggatgcactggaagggctcagagggctcctccatagtctgcaagggctccctgcagctgttcctgttcttcccttggagctgactgtcacctgcaacttcattatcctgagggcaagcttggcccagggtttcacagaggatcaggcccaggatatccagcggagcctagagagagtgctggagacacaggagcagcaggggcccaggttggaacaggggctcagggagctgtgggactctgtccttcgtgcttcctgccttctgccggagctgctgtctgccctgcaccgcctggttggcctgcaggctgccctctggttgagtgctgaccgtcttggggacctggccttgttactagagaccctgaatggcagccagagtggagcctctaaggatctgctgttacttctgaaaacttggagtcccccagctgaggaattagatgctccattgaccctgcaggatgcccagggattgaaggatgtcctcctgacagcatttgcctaccgccaaggtctccaggagctgatcacagggaacccagacaaggcactaagcagccttcatgaagcggcctcaggcctgtgtccacggcctgtgttggtccaggtgtacacagcactggggtcctgtcaccgtaagatgggaaatccacagagagcactgttgtacttggttgcagccctgaaagagggatcagcctggggtcctccacttctggaggcctctaggctctatcagcaactgggggacacaacagcagagctggagagtctggagctgctagttgaggccttgaatgtcccatgcagttccaaagccccgcagtttctcattgaggtagaattactactgccaccacctgacctagcctcaccccttcattgtggcactcagagccagaccaagcacatactagcaagcaggtgcctacagacggggagggcaggagacgctgcagagcattacttggacctgctggccctgttgctggatagctcggagccaaggttctccccacccccctcccctccagggccctgtatgcctgaggtgtttttggaggcagcggtagcactgatccaggcaggcagagcccaagatgccttgactctatgtgaggagttgctcagccgcacatcatctctgctacccaagatgtcccggctgtgggaagatgccagaaaaagaacaaggggcagctttcaactgtgagcagggatgtaagtcagatgcggcactgcagcagcttcgggcagccgccctaattagtcgtggactggaatgggtagccagcggccaggataccaaagccttacaggacttcctcctcagtgtgcagatgtgcccaggtaatcgagacacttactttcacctgcttcagactctgaagaggctagatcggagggatgaggccactgcactctggtggaggctggaggcccaaactaaggggtcacatgaagatgctctgtggtctctccccctgtacctagaaagctatttgagctggatccgtccctctgatcgtgacgccttccttgaagaatttcggacatctctgccaaagtcttgtgacctgtagctgccacgttttgaagagcttgagctgggtccccagtgggctgtctctctgtggggagggctttctgcttca

SEQ ID NO: 148261 - DNA, 1869 bp, Artificial Sequence
  derived and/or modified sequence
atgagccggcagaccacctctgtgggcagcagctgcctggacctgtggagggagaagaatgaccggctggtgcggcaggccaaggtggcccagaacagcggcctgaccctgcggcggcagcagctggcccaggatgccctggagggcctgcggggcctgctgcacagcctgcagggcctgcctgctgctgtgcctgtgctgcccctggagctgactgtgacctgcaacttcatcatcctgcgggccagcctggcccagggcttcacagaggaccaggcccaggacatccagaggagcctggagcgggtgctggagacccaggagcagcagggcccccggctggagcagggcctgcgggagctgtgggacagcgtgctgcgggccagctgcctgctgcctgagctgctgagcgccctgcaccggctggtgggcctgcaggccgccctgtggctgtctgctgaccggctgggggacctggccctgctgctggagaccctgaatggcagccagagcggggccagcaaggacctgctgctgctgctgaagacctggagccccccagctgaggagctggatgcccccctgaccctgcaggatgcccagggcctgaaggatgtgctgctgacagcctttgcctaccggcagggcctgcaggagctgatcaccggcaacccagacaaggccctgagcagcctgcatgaagctgccagcggcctgtgccccaggcctgtgctggtgcaggtgtacacagccctgggcagctgccacaggaagatgggcaacccccagagggccctgctgtacctggtggccgccctgaaggagggcagcgcctggggcccccccctgctggaggccagccggctgtaccagcagctgggggacaccacagctgagctggagagcctggagctgctggtggaggccctgaatgtgccctgcagcagcaaggccccccagttcctgattgaggtggagctgctgctgcccccaccagacctggccagccccctgcactgcggcacccagagccagaccaagcacatcctggccagccgctgcctgcagacaggccgggctggagatgctgctgagcactacctggacctgctggccctgctgctggacagcagcgagccccgcttcagccccccacccagccccccaggcccctgcatgcctgaggtgttcctggaggccgctgtggccctgatccaggccggccgggcccaggatgccctgaccctgtgtgaggagctgctgagcaggaccagcagcctgctgcccaagatgagccggctgtgggaggatgccaggaagggcaccaaggagctgccctactgccccctgtgggtgtctgccacccacctgctgcagggccaggcctgggtgcagctgggcgcccagaaggtggccatcagcgagttcagccgctgcctggagctgctcttccgggccaccccagaggagaaggagcagggcgccgccttcaactgtgagcagggctgcaagagtgatgctgccctgcagcagctgcgggctgctgccctgatcagccggggcctggagtgggtggccagcggccaggacaccaaggccctgcaggacttcctgctgtctgtgcagatgtgccccggcaacagagacacctacttccacctgctgcagaccctgaagaggctggacagaagagatgaggccacagccctgtggtggaggctggaggcccagaccaagggcagccatgaagatgccctgtggagcctgcccctgtacctggagagctacctgtcctggatccggcccagcgacagagatgccttcctggaggagttccgcaccagcctgcccaagagctgtgacctgtag

SEQ ID NO: 148262 - DNA, 648 bp, Artificial Sequence
  derived and/or modified sequence
atgagccggcagaccacctctgtgggcagcagctgcctggacctgtggagggagaagaatgaccggctggtgcggcaggccaaggtggcccagaacagcggcctgaccctgcggcggcagcagctggcccaggatgccctggagggcctgcggggcctgctgcacagcctgcagggcctgcctgctgctgtgcctgtgctgcccctggagctgactgtgacctgcaacttcatcatcctgcgggccagcctggcccagggcttcacagaggaccaggcccaggacatccagaggagcctggagcgggtgctggagacccaggagcagcagggcccccggctggagcagggcctgcgggagctgtgggacagcgtgctgcgggccagctgcctgctgcctgagctgctgagcgccctgcaccggctggtgggcctgcaggccgccctgtggctgtctgctgaccggctgggggacctggccctgctgctggagaccctgaatggcagccagagcggggccagcaaggacctgctgctgctgctgaagacctggagccccccagctgaggagctggatgcccccctgaccctgcaggatgcccagggcctgaaggatgtgctgctgacagcctttgcctaccggcagtag

SEQ ID NO: 148263 - DNA, 1347 bp, Artificial Sequence
  derived and/or modified sequence
atgagccggcagaccacctctgtgggcagcagctgcctggacctgtggagggagaagaatgaccggctggtgcggcaggccaaggtggcccagaacagcggcctgaccctgcggcggcagcagctggcccaggatgccctggagggcctgcggggcctgctgcacagcctgcagggcctgcctgctgctgtgcctgtgctgcccctggagctgactgtgacctgcaacttcatcatcctgcgggccagcctggcccagggcttcacagaggaccaggcccaggacatccagaggagcctggagcgggtgctggagacccaggagcagcagggcccccggctggagcagggcctgcgggagctgtgggacagcgtgctgcgggccagctgcctgctgcctgagctgctgagcgccctgcaccggctggtgggcctgcaggccgccctgtggctgtctgctgaccggctgggggacctggccctgctgctggagaccctgaatggcagccagagcggggccagcaaggacctgctgctgctgctgaagacctggagccccccagctgaggagctggatgcccccctgaccctgcaggatgcccagggcctgaaggatgtgctgctgacagcctttgcctaccggcagggcctgcaggagctgatcaccggcaacccagacaaggccctgagcagcctgcatgaagctgccagcggcctgtgccccaggcctgtgctggtgcaggtgtacacagccctgggcagctgccacaggaagatgggcaacccccagagggccctgctgtacctggtggccgccctgaaggagggcagcgcctggggcccccccctgctggaggccagccggctgtaccagcagctgggggacaccacagctgagctggagagcctggagctgctggtggaggccctgaatgtgccctgcagcagcaaggccccccagttcctgattgaggtggagctgctgctgcccccaccagacctggccagccccctgcactgcggcacccagagccagaccaagcacatcctggccagccgctgcctgcagacaggccgggctggagatgctgctgagcactacctggacctgctggccctgctgctggacagcagcgagccccgcttcagccccccacccagccccccaggcccctgcatgcctgaggtgttcctggaggccgctgtggccctgatccaggccggccgggcccaggatgccctgaccctgtgtgaggagctgctgagcaggaccagcagcctgctgcccaagatgagccggctgtgggaggatgccaggaagaggacccggggcagcttccagctgtag

SEQ ID NO: 148264 - DNA, 1869 bp, Artificial Sequence
  derived and/or modified sequence
atgagccggcagaccaccagcgtgggcagcagctgcctggacctgtggagggagaagaacgatcggcttgtgagacaagcaaaagttgcccagaactctgggctgaccctgcgaagacaacagctggcccaggacgcgctcgagggactgagaggattgctgcactcgctgcaaggtctgccagccgcagtgcctgtactgcctcttgagcttaccgtgacctgcaactttatcatactccgagccagcctggcccaggggttcactgaagatcaggctcaggacatccagcggagtcttgagagagtcttggagacccaggagcagcagggacccagactggagcaaggacttcgggaattgtgggacagcgtgcttagagccagctgtttgctccctgaattattgtcagcccttcatcggctcgttggtctgcaagctgcgctgtggctgagcgccgacaggctaggcgaccttgcactgctcctagagactctgaacggatcccaatctggagcgagcaaggatcttctgctcttgctgaaaacttggagtccaccagctgaggaactggacgctccacttacattgcaggacgcccaggggcttaaagatgtcctgttgactgctttcgcttacaggcagggcctccaagaattaatcacggggaacccagacaaagccctgagcagtttacacgaggccgcctctgggctgtgcccaaggcccgtgctggtgcaagtgtacaccgcattgggatcctgtcataggaaaatgggaaatccccagcgcgccttgttatacctggttgccgcactcaaagaaggctctgcttggggaccacctctcctggaagcatcaaggctgtaccagcagttgggagataccaccgctgaactcgaatccttagagcttttggtcgaggcactgaacgtaccctgctcttccaaagcacctcaatttctaatcgaggtcgaactcctgctgcctcctcccgatctcgcttcaccactgcactgcgggacccagagtcagacaaaacacattctggcctctcgttgtttgcaaacagggcgggccggcgatgccgcagagcactatctggacctactggccctgctgctggatagttctgaaccccgcttttcccccccacccagcccccccgggccctgcatgcccgaagtatttctggaggccgccgtggcattgatacaggccggacgggcacaggacgcattgacactttgcgaagaactcctcagtcgtacatcttccctgctgcctaaaatgtcccgcctgtgggaggatgccagaaagggcacgaaggaactgccatactgtcccctgtgggtctcagccacccacctgttgcaggggcaggcctgggtgcagctgggagcccaaaaggttgccatctctgagttctcacgctgcctggaactgctgttcagggccacacccgaggagaaggagcagggcgccgcgttcaactgtgagcagggatgcaaatccgatgcagctctacagcagctacgggctgccgccctgatatcccggggcctagaatgggtggcatcaggccaggataccaaggccttgcaggacttccttctctcagtacagatgtgtcctggtaacagagacacttattttcatctcctgcagacccttaagcgtctggacaggagagacgaggctacggctctgtggtggaggcttgaggcgcagacaaaggggtcccacgaagacgcactgtggagcctgccactgtacctcgagtcgtatctaagttggattagaccctccgaccgagacgcatttctcgaggaatttagaaccagcctccctaagtcatgcgacctttag

SEQ ID NO: 148265 - DNA, 648 bp, Artificial Sequence
  derived and/or modified sequence
atgagccggcagaccaccagcgtgggcagcagctgcctggacctgtggagagagaagaacgataggctggtgcggcaggcgaaggtggcgcagaattccggcctgacactccggagacaacagctggcacaagatgcgctcgaagggctcagaggactgctgcactctttacaggggctcccggctgcagtacccgtcctgcccctggagttaacagtcacatgtaacttcatcatccttcgtgccagcctggcccaggggttcactgaggaccaggcccaagatatccagcgaagtctggagagggtgcttgaaacacaggagcaacagggcccgcgcctggagcaagggttgcgggaactgtgggacagcgttttaagggcaagttgtctgttgccagaactccttagtgctctgcacaggcttgttggcctccaggccgcactgtggctgtctgcagaccgcttaggggacctggcactgttgctggaaaccctgaacggctctcagtccggggcctctaaggatttgctactcctgttaaagacctggagcccacccgccgaagaattagacgcgccactgacgctgcaggacgcccagggcctgaaagacgttctgctgactgctttcgcgtaccgccagtag

SEQ ID NO: 148266 - DNA, 1347 bp, Artificial Sequence
  derived and/or modified sequence
atgagccggcagaccaccagcgtgggcagcagctgcctggacctgtggcgcgagaagaatgataggctcgtacgtcaggctaaggtagctcaaaacagcggccttaccctgaggcgacagcagttagcgcaggatgctctagaagggctaagaggtctgctccactcactccagggtctccctgccgcagtaccagtcctacccctggagctcactgtgacctgtaacttcattatccttcgggcaagccttgcgcaggggtttacagaagaccaggcccaggacatccagaggtccctggaacgagtactggagacacaagagcaacagggacccagactcgagcaggggttgagggagctgtgggactccgtgttgcgggccagctgtcttttgcctgagttgttaagtgccttgcacaggctggtgggcctccaggcagccctgtggctatcagctgacaggcttggagacctcgcgttgctgctggagacattaaatgggagccagtcgggcgcgagcaaagatctgctcttgctgctgaagacctggtctccccccgccgaagagctcgatgcccccttgactttgcaggatgcccagggtctgaaagatgtcctgctcacggcctttgcatacaggcaggggctgcaggagctgatcacaggtaatcctgataaagcactgtcctccttgcatgaggcagctagtggtctgtgtccaagaccagttctcgtccaagtttacactgcactcggctcgtgtcacaggaaaatggggaatcctcagcgagcattgctatacctcgttgcagccctgaaagagggaagcgcatggggaccgccattgctggaggccagtcgcctgtaccaacaactaggagacacgactgcggaactggagagcttggagctgttagttgaggctctgaatgtcccctgcagctccaaggctccccagttccttatcgaagtggagctgttgctgccacctccagacctcgcgtccccacttcattgcggaacgcagtcacagactaaacacatcctggccagtcgatgcctacagacagggcgggccggcgatgccgcagagcattacctggatttgctagctctgctgttggattctagcgaacctcggttttcaccccccccctccccacctggaccatgtatgccagaagtgtttcttgaggctgctgttgcgctaattcaagcgggcagggctcaggacgctctgactctctgcgaggagttattatctcgtacctcaagtctccttcccaagatgtccaggttatgggaagacgctaggaagcggaccagggggagctttcagctgtag

SEQ ID NO: 148267 - DNA, 1869 bp, Artificial Sequence
  derived and/or modified sequence
atgtctcgccagaccaccagtgtagggagctcctgtctggacttatggcgggaaaaaaacgaccggctggtccgacaagccaaagtcgcacaaaattcgggtctgacactgcggaggcaacagctagctcaggatgcactggagggtctcagaggcctgctccactcacttcaaggcctcccagcagctgtaccagtccttccactcgaactcacagtgacctgtaactttatcatacttagagcaagtctcgcccaaggatttacagaggaccaggcacaggatatccagagaagcctggagagagtgttagagacccaggaacagcagggtcccagactggagcaggggctgcgagagctgtgggacagcgttttgagggcctcgtgtctgctgccggagttgctctctgccctccatcgattggtaggtctccaagctgccctgtggttgtcagcagaccgtctcggtgatctggcccttcttttggagacattaaatggatcccagtccggtgcaagtaaggatctccttctcctgctcaagacctggagtccgcctgctgaagagctggatgccccactaacattgcaagatgcccagggcctcaaggatgtgctgctgaccgcatttgcttatcgtcaagggctacaagagctgatcaccggtaaccccgacaaagctctgtcttccctgcatgaagctgcgtctggcttgtgccctcgtccagtgttggtgcaagtgtatactgctctcggcagctgccaccggaaaatgggtaacccacaacgggcactgctttacctcgtcgccgcactgaaggaggggagcgcttgggggcctccattacttgaagccagcaggctgtatcaacagttgggcgacaccaccgccgaactggagagcctcgaactcctcgtggaggcactgaacgttccttgctctagcaaggcaccacagtttctgatcgaggttgagttgttgctccctcctcctgacctggcctcgccactccactgtgggacacaatcccagacaaagcacatcttagcctcccggtgtttgcagactggtcgagccggtgacgcagctgaacattacctggacctgctggcgctgctcctggatagttccgaaccacgcttttcgcctcccccttcccctcccggaccatgcatgccagaagtcttcctggaagcagctgtcgccctaattcaggcaggcagggctcaggatgcacttaccctctgtgaggaacttttaagtagaacctcctcactactcccaaagatgtcacggttgtgggaggacgcccgtaagggcaccaaggaactgccctattgtccgctgtgggttagcgctacacatcttctgcagggtcaggcgtgggtccaactcggtgcacagaaggtagctatttccgagttttcacggtgtctcgaactcctgtttcgcgctacacccgaagagaaagagcagggtgccgcatttaactgcgaacaagggtgcaagagtgacgcagccctgcaacaactcagggcggctgccttaataagtcggggattagagtgggtggcaagtggtcaggatactaaagctttacaggacttcttgctgagcgtccagatgtgcccaggcaatcgtgacacatacttccatctactgcaaactctgaagcggttagataggagggatgaggcaactgcgctttggtggcggctggaggctcagaccaaaggatctcatgaggacgctctctggtctctacctctctacttggagagctatctcagctggatacggccttcagacagagatgcctttttagaggagttcagaacaagtttgccgaagtcatgcgacttgtag

SEQ ID NO: 148268 - DNA, 648 bp, Artificial Sequence
  derived and/or modified sequence
atgtcccgtcagacaaccagcgttggcagcagctgcctggatctatggagggagaagaacgatcggctggttagacaggccaaagtggcgcagaactcaggactgaccctgaggcggcagcagctggcgcaggacgctcttgaaggtcttcggggacttctgcacagtctgcagggtttgcccgcagccgtgcctgtcctgcctctggaattgacggtgacctgcaacttcataattctgagggcctccctcgcccagggattcactgaagaccaagctcaggatatccagcgcagcctcgagcgggtcctggagacccaggagcagcaggggccacggctagaacaaggcctgcgggaattgtgggattctgttcttcgggcatcctgcctgctccccgagctgttatccgctttgcacaggctagtcggactgcaggccgcactctggctgtctgctgaccgtctgggagatctggccttattgctggagacgctgaatgggtcccagtccggggcatccaaagacctgttgttacttctcaagacctggagccccccagctgaagagctcgacgcacctctgactttgcaggacgcccagggtttaaaagacgttctgctgaccgcattcgcttaccggcagtag

SEQ ID NO: 148269 - DNA, 1347 bp, Artificial Sequence
  derived and/or modified sequence
atgtcaagacagaccacgtcagtggggtcatcttgccttgatctgtggcgagaaaagaatgacagactcgtacggcaggccaaggtggcccagaattcaggccttacactcaggagacaacaactggcccaggacgccctagagggtttgcggggtttactgcactccctacaggggctcccagctgcagttccggtgctcccactggagctgaccgttacttgcaacttcatcatcctccgggcaagtctggcacaaggttttacagaggaccaggcacaggacatccagcggtctctggagagggttctggagactcaggagcagcaaggacctcgtcttgaacaggggttacgggagctgtgggattctgtcctgcgggcttcctgtcttctgcccgagctgcttagcgctctgcatagactggtgggcctccaggccgcactttggctcagtgccgatcgactcggcgacttggcccttctgctagagactttaaacgggagccagtcaggagcaagcaaggatctgcttttgctcctgaagacgtggagccctccagcagaagagctggatgctcccctgacgttacaggatgcccaaggtcttaaagacgtgcttctcacagcatttgcctatcgacagggcctacaggagctgatcacgggcaaccctgacaaagctctatccagcctccatgaggccgcaagtggtctgtgtccgaggcctgtgctcgttcaggtctatactgcattgggcagttgccacaggaagatgggaaatccgcagcgggctctgctctatctcgtcgccgcacttaaggaaggcagtgcctggggtcctcccctcctcgaggctagccggctttatcaacagctgggagacaccaccgccgagcttgaatctctcgaactgttggtggaagccctcaatgtcccttgctccagtaaggcccctcagtttcttattgaggtcgaactgctgttgccgccacccgatctcgctagcccgctgcactgtggcacacagagccaaacaaaacacattctggcgagccggtgcctgcaaactggacgagcaggcgatgccgctgaacattacctggacttgctcgcccttttgctggattcctcagagcccagatttagcccaccgccttctcctcccggaccctgcatgcctgaggtatttctcgaagccgcagtggccctgattcaggcgggacgtgcccaggacgctctgactctttgcgaggaactgctcagccgtaccagctcactgttgcctaagatgagcaggctgtgggaggatgccagaaagcgcacccgtggctcttttcaactgtag

SEQ ID NO: 148270 - protein, 639 aa, Artificial Sequence
  derived and/or modified sequence
MATGANATPLDFPSKKRKRSRWNQDTMEQKTVIPGMPTVIPPGLTREQERAYIVQLQIEDLTRKLRTGDLGIPPNPEDRSPSPEPIYNSEGKRLNTREFRTRKKLEEERHNLITEMVALNPDFKPPADYKPPATRVSDKVMIPQDEYPEINFVGLLIGPRGNTLKNIEKECNAKIMIRGKGSVKEGKVGRKDGQMLPGEDEPLHALVTANTMENVKKAVEQIRNILKQGIETPEDQNDLRKMQLRELARLNGTLREDDNRILRPWQSSETRSITNTTVCTKCGGAGHIASDCKFQRPGDPQSAQDKARMDKEYLSLMAELGEAPVPASVGSTSGPATTPLASAPRPAAPANNPPPPSLMSTTQSRPPWMNSGPSESRPYHGMHGGGPGGPGGGPHSFPHPLPSLTGGHGGHPMQHNPNGPPPPWMQPPPPPMNQGPHPPGHHGPPPMDQYLGSTPVGSGVYRLHQGKGMMPPPPMGMMPPPPPPPSGQPPPPPSGPLPPWQQQQQQPPPPPPPSSSMASSTPLPWQQNTTTTTTSAGTGSIPPWQQQQAAAAASPGAPQMQGNPTMVPLPPGVQPPLPPGAPPPPPPPPPGSAGMMYAPPPPPPPPMDPSNFVTMMGMGVAGMPPFGMPPAPPPPPPQN

SEQ ID NO: 148271 - protein, 613 aa, Artificial Sequence
  derived and/or modified sequence
MEQKTVIPGMPTVIPPGLTREQERAYIVQLQIEDLTRKLRTGDLGIPPNPEDRSPSPEPIYNSEGKRLNTREFRTRKKLEEERHNLITEMVALNPDFKPPADYKPPATRVSDKVMIPQDEYPEINFVGLLIGPRGNTLKNIEKECNAKIMIRGKGSVKEGKVGRKDGQMLPGEDEPLHALVTANTMENVKKAVEQIRNILKQGIETPEDQNDLRKMQLRELARLNGTLREDDNRILRPWQSSETRSITNTTVCTKCGGAGHIASDCKFQRPGDPQSAQDKARMDKEYLSLMAELGEAPVPASVGSTSGPATTPLASAPRPAAPANNPPPPSLMSTTQSRPPWMNSGPSESRPYHGMHGGGPGGPGGGPHSFPHPLPSLTGGHGGHPMQHNPNGPPPPWMQPPPPPMNQGPHPPGHHGPPPMDQYLGSTPVGSGVYRLHQGKGMMPPPPMGMMPPPPPPPSGQPPPPPSGPLPPWQQQQQQPPPPPPPSSSMASSTPLPWQQNTTTTTTSAGTGSIPPWQQQQAAAAASPGAPQMQGNPTMVPLPPGVQPPLPPGAPPPPPPPPPGSAGMMYAPPPPPPPPMDPSNFVTMMGMGVAGMPPFGMPPAPPPPPPQN

SEQ ID NO: 148272 - DNA, 1197 bp, Artificial Sequence
  derived and/or modified sequence
atgcttcgcctctatgtactcgtgatgggtgtgtctgcatttacgctccagcctgccgcgcacacaggggctgcgcgctcatgcagattccggggcaggcactacaaaagggaattccgattggaaggagagcctgtcgcgctgaggtgcccccaggtcccctactggttgtgggccagcgtttcccctcggatcaatctcacatggcataaaaacgatagtgccagaaccgtgcccggtgaggaagaaacccggatgtgggctcaggacggtgccctatggctgttgccagctctgcaggaggatagcggaacatacgtgtgtaccactagaaatgcatcttactgcgacaagatgtcaattgagttacgcgtgtttgagaatacagatgcctttttgccttttataagctatcctcagattctgacactttccacttcaggggttctcgtgtgccctgacctgtctgagttcacacgggacaagactgacgtaaaaattcagtggtacaaggactcattgttgctcgacaaagacaacgagaaattcctctccgtcaggggcaccacccacctgcttgtccacgatgtggctttggaggatgccggctactacaggtgtgttctgacctttgctcatgagggacaacagtacaacatcaccaggtctatcgagctgagaataaagaaaaaaaaggaggaaacaatacccgtcattatctcaccactcaagaccatatccgcatcattggggtctagactcactattccttgcaaagtcttcctcggcaccggtactccccttactacaatgctgtggtggactgccaatgacactcacatagagtccgcataccccggcggccgggtgaccgagggccctaggcaggagtattcagaaaataacgagaactacatagaggtcccacttatttttgaccctgttaccagagaggaccttcatatggattttaagtgcgtagtgcataacaccttatctttccaaactctgagaactacggtcaaggaagcctcatccacctttagctggggtatcgtgctggctcccctctccctcgccttccttgtgttaggtggcatctggatgcatcgtaggtgcaagcatcggacaggaaaggcagatggattgaccgtcctctggcctcaccatcaggacttccagagttaccccaagtag

SEQ ID NO: 148273 - DNA, 1197 bp, Artificial Sequence
  derived and/or modified sequence
atgctgaggctgtatgtcctggtgatgggagttagcgcttttaccctccagcctgctgcacatactggcgctgccagatcgtgcagatttcggggacgacactataaaagagaattcagactggagggcgaacccgttgccctgcggtgtccacaggtgccctactggttatgggcaagcgtctcccccaggattaaccttacgtggcacaagaacgattccgcgcgcactgtgcccggagaggaagagacccgtatgtgggcccaggatggggctctgtggctgctgcccgctctgcaggaagattccggcacttacgtgtgcacaacccggaacgcctcctattgcgacaagatgagtatcgagctgagggtgtttgagaataccgacgccttccttcccttcataagctacccccagatccttaccctgagtacctcaggagtattagtctgtcctgacctctccgagtttacacgtgacaagactgacgtgaaaattcagtggtacaaggactctctcttgttagacaaagataacgaaaaattcctgtcggtcagagggaccacacacctcctagtccatgacgtagcgttagaggatgcagggtactacagatgtgtccttacctttgcccacgaggggcagcaatacaacatcacccggtctatagaactgcgcataaagaaaaaaaaagaagagacaatccccgtcattatatctccattaaaaaccatctcagcctccttgggctctcgacttaccataccttgtaaggtgttcctgggaaccgggacaccactcaccaccatgttatggtggactgccaacgacacccacattgagtccgcctatcccggggggcgtgtcacagaggggccacgacaggaatattcagagaacaatgagaattatatcgaagtgcctttgatattcgatcctgtgaccagagaggacttacatatggacttcaaatgcgtcgtgcacaacacactgagtttccagactctgcgtactaccgtcaaggaagctagttctaccttttcctggggcatcgtcctcgctcccttaagcctggcatttctcgtgctgggggggatttggatgcatcgccgctgcaaacataggaccggaaaagccgacggcctcactgttttgtggccccatcaccaggatttccagtcataccctaaatag

SEQ ID NO: 148274 - DNA, 1197 bp, Artificial Sequence
  derived and/or modified sequence
atgctgcggctgtatgtgctggtgatgggcgtgtctgccttcaccctgcagcctgctgcccacactggagctgcccggagctgccgcttccggggccgccactacaagcgggagttccggctggagggggagcctgtggccctgcgctgcccccaggtgccctactggctgtgggcctctgtgagcccccgcatcaacctgacctggcacaagaatgacagcgccaggacagtgcctggagaggaggagaccaggatgtgggcccaggatggagccctgtggctgctgcctgccctgcaggaggacagcggcacctacgtgtgcaccaccagaaatgccagctactgtgacaagatgagcattgagctgcgggtgtttgaaaatacagatgccttcctgcccttcatctcctacccccagatcctgaccctgagcaccagcggcgtgctggtgtgcccagacctgtctgagttcacccgggacaagacagatgtgaagatccagtggtacaaggacagcctgctgctggacaaggacaatgagaagttcctgtctgtgcggggcaccacccacctgctggtgcatgatgtggccctggaggatgctggctactaccgctgtgtgctgacctttgcccacgagggccagcagtacaacatcaccaggagcattgagctgcgcatcaagaagaagaaggaggagaccatccctgtgatcatcagccccctgaagaccatcagcgccagcctgggcagccggctgaccatcccctgcaaggtgttcctgggcaccggcacccccctgaccaccatgctgtggtggacagccaatgacacccacattgaaagtgcctacccaggcggccgggtgacagagggcccccggcaggagtacagcgagaacaatgaaaactacatcgaggtgcccctcatctttgatcctgtgacccgggaggacctgcacatggacttcaagtgtgtggtgcacaacaccctgtccttccagaccctgcggaccaccgtgaaggaggccagcagcaccttctcctggggcatcgtgctggcccccctgagcctggccttcctggtgctgggcggcatctggatgcaccggcgctgcaagcacaggacaggcaaggcagatggcctgactgtgctgtggccccaccaccaggacttccagagctaccccaagtag

SEQ ID NO: 148275 - DNA, 1197 bp, Artificial Sequence
  derived and/or modified sequence
atgctgcggctgtacgtgctggtgatgggcgtgagcgccttcaccttacaacctgccgcccatactggggcagccaggtcatgtaggtttagggggaggcactataagcgagaattcagactggagggagagcccgtcgcactaaggtgtccccaagtcccctactggttatgggcatcagtgtcaccccggattaacctgacctggcataagaacgacagtgcaaggaccgtgcctggggaggaggaaacgcgcatgtgggcacaggatggcgccctgtggctactccccgccctgcaggaggattcaggtacctatgtgtgcaccacccgcaatgcctcttattgtgataaaatgtccattgagctgagagtgttcgagaataccgacgccttcctgccctttatcagttatccacaaattttgactctgagtacaagtggggtgctggtttgcccagacctctccgagttcacacgagataagaccgatgtgaaaattcagtggtacaaggacagcctattgttggacaaggacaacgaaaaatttttgtcggtgagaggcactacacacttactggttcatgacgtcgccctagaagatgcgggttactaccgctgcgtgttgaccttcgcacacgagggtcagcagtacaatattacgaggagcattgagttgcgaatcaaaaaaaaaaaggaggagaccatccccgtgatcataagcccgctcaagaccatttctgccagtctgggctcaagactgactataccctgcaaggtatttttgggcaccgggactcctctcaccactatgctatggtggaccgctaatgacactcatattgaatcagcttatcccggtggaagagttacagaaggcccccggcaagagtactcggagaacaacgagaattacatcgaagtccccctgatttttgatcctgtcacacgggaggatctacacatggattttaagtgcgtcgttcacaacacgttgagctttcagacccttcgcactacagtgaaagaggcttcaagtaccttttcctggggcatcgtgctggctcccctgtcgctggcatttctggtgctgggtggaatctggatgcaccgaaggtgtaaacatcgaactggaaaggctgacggacttactgtcctatggccccatcatcaggatttccaatcttacccaaagtag

SEQ ID NO: 148276 - DNA, 1197 bp, Artificial Sequence
  derived and/or modified sequence
atgctgcggctgtacgtgctggtgatgggcgtgagcgccttcaccctgcagcccgccgcccacacaggcgccgcccgcagctgtagatttcgcggccggcactacaagagggaattccggcttgaaggtgagcccgtggccctccggtgtccacaggttccatattggctgtgggctagcgtgtctccacgaatcaacctcacctggcataaaaatgacagcgcaaggactgtacccggggaggaggaaacgcgtatgtgggctcaggacggcgccctgtggttgctgccggctcttcaggaggattcaggcacttacgtttgcacaacacgcaatgccagctattgtgacaagatgtccattgagttacgggtcttcgagaataccgacgccttcctgccttttataagctatcctcagattctcactctgtccaccagtggagtgctggtctgccctgacctgagtgagtttacccgcgataagacagacgtgaaaattcagtggtacaaagacagcctgctgctagacaaagacaatgagaaattcctgagcgttagaggtactacacatttgttagtccatgacgtggctctcgaagatgccgggtattacagatgtgtgctcacatttgcacatgagggccaacagtataatataacccgctctatcgaactgagaatcaagaagaaaaaggaggaaaccatacctgtgatcattagtccactgaagacaatttcagcgtccctaggatcccgccttaccattccttgtaaggtattcctaggaaccggtacgcccttaacgactatgctctggtggacagcgaacgacacgcatatagagtctgcttatcccggggggagagtcaccgaagggccgcgccaggaatactccgagaacaatgaaaactacattgaggtaccactgatcttcgatcctgttacccgagaagatttgcatatggattttaagtgcgttgtccacaacaccctgagctttcaaacattgcgcactactgtaaaggaggccagcagcacatttagctggggaattgtgctggcacccctttccctggcattcctggtactaggcggcatttggatgcataggaggtgtaaacaccgtactggtaaggccgacggtctaaccgtattgtggcctcatcaccaggacttccaaagctaccctaagtag

SEQ ID NO: 148277 - DNA, 1197 bp, Artificial Sequence
  derived and/or modified sequence
atgctgagactctatgttctggtcatgggcgtatcagcatttacgctccagccggcagctcatacaggtgctgcgaggagctgtaggtttaggggcaggcattataagagggagttcagactggagggggagcccgtggccctacggtgcccacaagtgccttattggctctgggcgagtgtgtcccccagaatcaatctgacatggcacaaaaacgactccgcaagaactgtgcccggtgaagaggaaacacgaatgtgggcccaggacggagccttatggctgttgccggcactgcaggaagacagtggcacttatgtgtgtacaactcgaaacgccagctactgcgataagatgtcaatagagctgagagtgttcgagaataccgatgccttcctgccctttattagctaccctcagatcctaaccttgagtacctccggggtgcttgtgtgcccggacctgtcagaatttactcgagataagacggacgtgaaaatacagtggtacaaggattcactcctgctggataaggataatgaaaagtttctctcagtacgtggaacgactcatttactggtgcatgacgtagccctggaggacgccggatattacaggtgtgtgttaaccttcgcacacgaggggcaacagtacaacatcactcgaagtatcgaactgaggattaaaaagaaaaaagaagagaccatacctgtgattatcagccctttaaaaactattagtgccagtctgggctcccgcttgacaatcccctgtaaggtgttcctaggtactggcactcccctgactaccatgctctggtggaccgcaaacgatacacacatcgaaagtgcgtaccccggtggcagagtcaccgaaggccctagacaggagtatagcgaaaataatgagaactacattgaagttccactgatcttcgatccagtgacacgtgaagacctgcatatggacttcaagtgtgtcgtgcacaatacactgtcgttccagactctgcgcactaccgtaaaagaggccagttcaacgtttagctggggcatagtgttggcacctctgtccctggcctttctggtgcttggaggcatatggatgcatcgaagatgtaagcatcggactgggaaggccgatggactgaccgttttgtggccccatcaccaagattttcagagttaccccaaatag

SEQ ID NO: 148278 - DNA, 1197 bp, Artificial Sequence
  derived and/or modified sequence
atgctgaggctgtacgtcttagtcatgggagttagtgccttcaccttgcaaccagcagctcacacgggggctgccaggagttgccgatttcgtggtcgacattacaagcgagagttccgtttggagggcgagcccgtggccctaagatgccctcaggtgccttattggttatgggcctcggtgtctcctaggattaatcttacatggcacaaaaatgactctgccaggacggtccctggggaggaggaaacacgaatgtgggcccaagatggtgccctctggttactgcctgccctgcaggaagactccgggacctacgtctgcacaacacgcaacgccagctactgtgataaaatgtccatcgaactccgggtgttcgagaacaccgacgcctttctgccgtttatctcataccctcagatacttacattgagtacatctggtgtactagtgtgcccagatctcagtgagtttaccagagacaaaacggatgttaaaatccagtggtataaggactcattgcttctggacaaggacaatgaaaaatttttaagcgtcagaggcaccactcacctactcgtccatgacgtcgctcttgaggatgcgggatactatagatgcgtcttgacatttgctcacgagggtcagcagtataatattacacgttcaattgagctgcgaattaaaaaaaagaaggaggaaaccattccagtgattattagccccctgaagactatcagcgcctctcttgggagtcggcttactatcccatgtaaagttttcctcggcaccggcacccccctcaccacaatgttatggtggaccgcgaatgacactcacattgaatctgcctatccgggagggagggttacggaaggaccaaggcaggagtatagcgagaacaatgagaactacattgaagttcccctcatcttcgatcctgtgacccgcgaggatttgcatatggatttcaagtgcgtggtccacaatactttatcgttccagacccttcggacaaccgtcaaggaagcttcctccacattcagctggggcatcgtgctcgcaccgttaagtctggcattcctcgtcctgggtgggatttggatgcatcgtagatgcaagcatagaacggggaaggccgatgggttaaccgttctgtggccccatcaccaggatttccagagctatcccaaatag

SEQ ID NO: 148279 - DNA, 1197 bp, Artificial Sequence
  derived and/or modified sequence
atgctgagactgtacgtgctggtgatgggcgtgagcgccttcaccctgcagcccgccgcccacaccggcgccgccagaagctgcagattcagaggcagacactacaagagagagttcagactggagggcgagcccgtggccctgagatgcccccaggtgccctactggctgtgggccagcgtgagccccagaatcaacctgacctggcacaagaacgacagcgccagaaccgtgcccggcgaggaggagaccagaatgtgggcccaggacggcgccctgtggctgctgcccgccctgcaggaggacagcggcacctacgtgtgcaccaccagaaacgccagctactgcgacaagatgagcatcgagctgagagtgttcgagaacaccgacgccttcctgcccttcatcagctacccccagatcctgaccctgagcaccagcggcgtgctggtgtgccccgacctgagcgagttcaccagagacaagaccgacgtgaagatccagtggtacaaggacagcctgctgctggacaaggacaacgagaagttcctgagcgtgagaggcaccacccacctgctggtgcacgacgtggccctggaggacgccggctactacagatgcgtgctgaccttcgcccacgagggccagcagtacaacatcaccagaagcatcgagctgagaatcaagaagaagaaggaggagaccatccccgtgatcatcagccccctgaagaccatcagcgccagcctgggcagcagactgaccatcccctgcaaggtgttcctgggcaccggcacccccctgaccaccatgctgtggtggaccgccaacgacacccacatcgagagcgcctaccccggcggcagagtgaccgagggccccagacaggagtacagcgagaacaacgagaactacatcgaggtgcccctgatcttcgaccccgtgaccagagaggacctgcacatggacttcaagtgcgtggtgcacaacaccctgagcttccagaccctgagaaccaccgtgaaggaggccagcagcaccttcagctggggcatcgtgctggcccccctgagcctggccttcctggtgctgggcggcatctggatgcacagaagatgcaagcacagaaccggcaaggccgacggcctgaccgtgctgtggccccaccaccaggacttccagagctaccccaagtag

SEQ ID NO: 148280 - DNA, 1056 bp, Artificial Sequence
  derived and/or modified sequence
atgacgatgaaaatgatggtacatatatatttcgtatcattattgttattgctattccacagttacgccatagacatcgaaaatgaaatcacagaattcttcaataaaatgagagatactctaccagctaaagactctaaatggttgaatccagcatgtatgttcggaggcacaatgaatgatatagccgctctaggagagccattcagcgcaaagtgtcctcctattgaagacagtcttttatcgcacagatataaagactatgtggttaaatgggaaaggctagaaaaaaatagacggcgacaggtttctaataaacgtgttaaacatggtgatttatggatagccaactatacatctaaattcagtaaccgtaggtatttgtgcaccgtaactacaaagaatggtgactgtgttcagggtatagttagatctcatattagaaaacctccttcatgcattccaaaaacatatgaactaggtactcatgataagtatggcatagacttatactgtggaattctttacgcaaaacattataataatataacttggtataaagataataaggaaattaatatcgacgacattaagtattcacaaacgggaaaggaattaattattcataatccagagttagaagatagcggaagatacgactgttacgttcattacgacgacgttagaatcaagaatgatatcgtagtatcaagatgtaaaatacttacggttataccgtcacaagaccacaggtttaaactaatactagatccaaaaatcaacgtaacgataggagaacctgccaatataacatgcactgctgtgtcaacgtcattattgattgacgatgtactgattgaatgggaaaatccatccggatggcttataggattcgattttgatgtatactctgttttaactagtagaggcggtattaccgaggcgaccttgtactttgaaaatgttactgaagaatatataggtaatacatataaatgtcgtggacacaactattattttgaaaaaacccttacaactacagtagtattggagtaa

SEQ ID NO: 148281 - DNA, 1247 bp, Artificial Sequence
  derived and/or modified sequence
aagcttttggaccctcgtacagaagctaatacgactcactatagggaaataagagagaaaagaagagtaagaagaaatataagagccaccatgacgatgaaaatgatggtacatatatatttcgtatcattattgttattgctattccacagttacgccatagacatcgaaaatgaaatcacagaattcttcaataaaatgagagatactctaccagctaaagactctaaatggttgaatccagcatgtatgttcggaggcacaatgaatgatatagccgctctaggagagccattcagcgcaaagtgtcctcctattgaagacagtcttttatcgcacagatataaagactatgtggttaaatgggaaaggctagaaaaaaatagacggcgacaggtttctaataaacgtgttaaacatggtgatttatggatagccaactatacatctaaattcagtaaccgtaggtatttgtgcaccgtaactacaaagaatggtgactgtgttcagggtatagttagatctcatattagaaaacctccttcatgcattccaaaaacatatgaactaggtactcatgataagtatggcatagacttatactgtggaattctttacgcaaaacattataataatataacttggtataaagataataaggaaattaatatcgacgacattaagtattcacaaacgggaaaggaattaattattcataatccagagttagaagatagcggaagatacgactgttacgttcattacgacgacgttagaatcaagaatgatatcgtagtatcaagatgtaaaatacttacggttataccgtcacaagaccacaggtttaaactaatactagatccaaaaatcaacgtaacgataggagaacctgccaatataacatgcactgctgtgtcaacgtcattattgattgacgatgtactgattgaatgggaaaatccatccggatggcttataggattcgattttgatgtatactctgttttaactagtagaggcggtattaccgaggcgaccttgtactttgaaaatgttactgaagaatatataggtaatacatataaatgtcgtggacacaactattattttgaaaaaacccttacaactacagtagtattggagtaagctgccttctgcggggcttgccttctggccatgcccttcttctctcccttgcacctgtacctcttggtctttgaataaagcctgagtaggaaggcggccgc

SEQ ID NO: 148282 - protein, 207 aa, Artificial Sequence
  derived and/or modified sequence
MTSRKKVLLKVIILGDSGVGKTSLMNQYVNKKFSNQYKATIGADFLTKEVMVDDRLVTMQIWDTAGQERFQSLGVAFYRGADCCVLVFDVTAPNTFKTLDSWRDEFLIQASPRDPENFPFVVLGNKIDLENRQVATKRAQAWCYSKNNIPYFETSAKEAINVEQAFQTIARNALKQETEVELYNEFPEPIKLDKNDRAKASAESCSC

SEQ ID NO: 148283 - protein, 150 aa, Artificial Sequence
  derived and/or modified sequence
MTSRKKVLLKVIILGDSGVGKTSLMNQYVNKKFSNQYKATIGADFLTKEVMVDDRLVTMQIWDTAGQERFQSLGVAFYRGADCCVLVFDVTAPNTFKTLDSWRDEFLIQASPRDPENFPFVVLGNKIDLENRQVATKRAQAWCYSKNNIP

SEQ ID NO: 148284 - DNA, 453 bp, Artificial Sequence
  derived and/or modified sequence
atgaccagcagaaagaaggtgctgctgaaggtgatcatcctgggcgacagcggcgtgggcaagaccagcctgatgaaccagtacgtgaacaagaagttcagcaaccagtacaaggccaccatcggcgccgacttcctgaccaaggaggtgatggtggacgacagactggtgaccatgcagatctgggacaccgccggccaggagagattccagagcctgggcgtggccttctacagaggcgccgactgctgcgtgctggtgttcgacgtgaccgcccccaacaccttcaagaccctggacagctggagagacgagttcctgatccaggccagccccagagaccccgagaacttccccttcgtggtgctgggcaacaagatcgacctggagaacagacaggtggccaccaagagagcccaggcctggtgctacagcaagaacaacatcccctag

SEQ ID NO: 148285 - DNA, 624 bp, Artificial Sequence
  derived and/or modified sequence
atgacatcacgcaaaaaagtcctgttgaaagtgattattttgggggacagcggtgtggggaagacctctctcatgaatcagtacgtcaacaagaaattctccaatcagtacaaagcgactattggcgccgactttctcacgaaggaagtgatggtcgatgaccgcctcgtcaccatgcagatctgggacactgctggacaagaacgatttcaaagccttggtgtagcattttatcgcggcgccgattgttgcgtcttagtgttcgacgttacggctcccaacacctttaagactttggacagctggagggacgaatttctaatccaggcttctccgcgtgatccggaaaattttccttttgtcgttctgggaaataagatcgacctggagaacaggcaggtcgctaccaaacgggcccaggcctggtgttactcaaaaaacaacatcccttatttcgaaacgtcagcaaaagaggccatcaatgtggaacaggctttccagaccatcgccaggaacgccttaaagcaggaaaccgaagtggagctctacaatgagttcccggagcccatcaagctggataaaaacgatagagccaaagcctcagccgagagctgtagctgctag

SEQ ID NO: 148286 - DNA, 453 bp, Artificial Sequence
  derived and/or modified sequence
atgacgtcacggaagaaggtcttgctcaaggtgatcattctgggagatagcggtgtcgggaaaacatctttgatgaaccagtatgtgaacaagaaattttctaatcagtacaaggccaccatcggtgccgacttcttaacaaaagaggtgatggtggatgaccggcttgtgacaatgcagatctgggataccgcgggacaggaaaggttccaaagcctgggcgtggccttctatagaggtgcggactgttgcgttttggtgttcgatgtgaccgctcccaatacatttaagacgctggactcatggagggacgaatttctgatacaggccagccccagggatccggagaattttccatttgtagttttaggaaataagatagacttagaaaacagacaagtcgcaacaaagcgtgctcaggcatggtgttattcaaagaataatattccctag

SEQ ID NO: 148287 - DNA, 624 bp, Artificial Sequence
  derived and/or modified sequence
atgaccagcaggaagaaggtgctgctgaaggtgatcatcctgggggacagcggcgtgggcaagaccagcctgatgaaccagtatgtgaacaagaagttcagcaaccagtacaaggccaccatcggggctgacttcctgaccaaggaggtgatggtggatgaccggctggtgaccatgcagatctgggacacagctggccaggagcgcttccagagcctgggcgtggccttctacagaggagctgactgctgcgtgctggtgtttgatgtgacagcccccaacaccttcaagaccctggacagctggagagatgagttcctgatccaggccagcccccgggaccctgagaacttcccctttgtggtgctgggcaacaagattgacctggagaaccggcaggtggccaccaagagggcccaggcctggtgctacagcaagaacaacatcccctactttgagaccagcgccaaggaggccatcaacgtggagcaggccttccagaccatcgccagaaatgccctgaagcaggagacagaggtggagctgtacaatgagttccctgagcccatcaagctggacaagaatgaccgggccaaggccagcgctgagagctgcagctgctag

SEQ ID NO: 148288 - DNA, 453 bp, Artificial Sequence
  derived and/or modified sequence
atgaccagcaggaagaaggtgctgctgaaggtgatcatcctgggggacagcggcgtgggcaagaccagcctgatgaaccagtatgtgaacaagaagttcagcaaccagtacaaggccaccatcggggctgacttcctgaccaaggaggtgatggtggatgaccggctggtgaccatgcagatctgggacacagctggccaggagcgcttccagagcctgggcgtggccttctacagaggagctgactgctgcgtgctggtgtttgatgtgacagcccccaacaccttcaagaccctggacagctggagagatgagttcctgatccaggccagcccccgggaccctgagaacttcccctttgtggtgctgggcaacaagattgacctggagaaccggcaggtggccaccaagagggcccaggcctggtgctacagcaagaacaacatcccctag

SEQ ID NO: 148289 - DNA, 624 bp, Artificial Sequence
  derived and/or modified sequence
atgaccagccggaagaaggtgctgctgaaggtgatcatcctgggcgattctggggtgggcaaaacctccctgatgaaccagtacgtcaacaaaaagttctcaaatcagtacaaggcaacaatcggggcagactttttaactaaggaagtcatggtagatgatcggttggtgacaatgcaaatttgggatacggccggtcaggaacgcttccagtctctgggcgtggcattctatcgcggagcggactgttgcgtgctggtgttcgacgtgaccgcccccaatacctttaaaacactggactcatggcgggatgagttcctgattcaggcatctccgagagaccccgagaacttccccttcgtagtgctcggcaataaaattgacttagaaaaccggcaggtcgctacaaagagagctcaggcatggtgttattccaaaaacaatataccctacttcgaaacgagcgccaaggaagctattaacgttgaacaggccttccaaacgatagcacgtaatgctcttaagcaggagaccgaagtggagctgtataatgagttcccggagccgatcaaattggacaagaatgaccgggctaaagcttccgccgaatcatgttcttgctag

SEQ ID NO: 148290 - DNA, 453 bp, Artificial Sequence
  derived and/or modified sequence
atgaccagccggaagaaggtgctgctgaaggtgatcatcctgggcgattctggcgtcgggaaaacttctttgatgaaccagtatgtcaacaagaaattcagtaatcagtataaagctacaatcggagcggattttttgaccaaggaagtcatggtcgacgacagacttgtgacaatgcaaatctgggatactgctggacaggagagattccaatcccttggcgttgccttttacaggggagccgactgttgtgtccttgtgtttgatgtaacagcaccaaataccttcaagacactcgatagctggcgcgacgagttcctgattcaggcttcccccagagaccctgaaaactttcctttcgtcgttctggggaacaaaatcgatttagagaataggcaagtcgcgacaaagcgggcacaggcatggtgctattccaagaacaatataccatag

SEQ ID NO: 148291 - DNA, 624 bp, Artificial Sequence
  derived and/or modified sequence
atgacttcccgcaagaaggtccttctgaaggtgattatcttgggagatagcggtgtgggtaagacctcccttatgaaccaatatgtcaacaaaaagttttcgaaccaatataaagcaaccataggggcagactttctgaccaaggaagtcatggtggacgacagattagtcaccatgcagatttgggacactgccggacaggaacgtttccagtctctcggcgttgccttttatagaggagctgactgttgcgtgttggtttttgacgtgacagcgcctaacactttcaagaccctcgattcttggagagatgagtttttgatccaggcctcccccagggaccctgagaatttccccttcgtagttttgggtaataagatcgatctagaaaaccgtcaggttgccacaaaacgagcccaagcctggtgttacagcaaaaataacattccttattttgaaacgtcagcaaaagaagctattaatgtggagcaggcctttcagaccatagctcgaaatgccctcaaacaggagacagaggtggaactttacaacgaatttcctgaacccatcaaactcgacaagaacgaccgggcaaaggcctctgctgaatcttgttcttgctag

SEQ ID NO: 148292 - DNA, 453 bp, Artificial Sequence
  derived and/or modified sequence
atgaccagccgcaagaaggtgctgctgaaggtgattatactgggagacagcggcgtaggaaagacaagtcttatgaaccagtatgtcaacaagaaattcagcaaccagtataaggccacgatcggagcagactttctcacgaaggaagtgatggtggacgaccgcctggtcactatgcagatttgggataccgccggacaggaaaggtttcagagcctcggagtggctttctatcggggagctgactgctgtgtactagtgttcgacgtcacggcccctaatacttttaaaacccttgattcttggcgcgatgagttcctgattcaggcctctccgcgagaccctgagaacttcccttttgtcgtgctgggcaataaaatcgacctggaaaacagacaggtagcaactaagagggctcaagcctggtgttactccaagaacaacattccatag

SEQ ID NO: 148293 - DNA, 576 bp, Artificial Sequence
  derived and/or modified sequence
tagcaggaaggttcagggccctgcactgttggggctgctcagacatttgtgcaagggaggtgttttgttttggtgtttccatcacactcacagtgatttctccttttccccctttagtttgaaggatgacctctaggaagaaagtgttgctgaaggttatcatcctgggagattctggagtcgggaagacatcactcatgaaccagtatgtgaataagaaattcagcaatcagtacaaagccacaataggagctgactttctgaccaaggaggtgatggtggatgacaggctagtcacaatgcagatatgggacacagcaggacaggaacggttccagtctctcggtgtggccttctacagaggtgcagactgctgcgttctggtatttgatgtgactgcccccaacacattcaaaaccctagatagctggagagatgagtttctcatccaggccagtccccgagatcctgaaaacttcccatttgttgtgttgggaaacaagattgacctcgaaaacagacaagtggccacaaagcgggcacaggcctggtgctacagcaaaaacaacattccct

SEQ ID NO: 148294 - DNA, 2244 bp, Artificial Sequence
  derived and/or modified sequence
gtctcgtgacaggtacttccgctcggggcggcggcggtggcggaagtgggagcgggcctggagtcttggccataaagcctgaggcggcggcagcggcggagttggcggcttggagagctcgggagagttccctggaaccagaacttggaccttctcgcttctgtcctccgtttagtctcctcctcggcgggagccctcgcgacgcgcccggcccggagcccccagcgcagcggccgcgtttgaaggatgacctctaggaagaaagtgttgctgaaggttatcatcctgggagattctggagtcgggaagacatcactcatgaaccagtatgtgaataagaaattcagcaatcagtacaaagccacaataggagctgactttctgaccaaggaggtgatggtggatgacaggctagtcacaatgcagatatgggacacagcaggacaggaacggttccagtctctcggtgtggccttctacagaggtgcagactgctgcgttctggtatttgatgtgactgcccccaacacattcaaaaccctagatagctggagagatgagtttctcatccaggccagtccccgagatcctgaaaacttcccatttgttgtgttgggaaacaagattgacctcgaaaacagacaagtggccacaaagcgggcacaggcctggtgctacagcaaaaacaacattccctactttgagaccagtgccaaggaggccatcaacgtggagcaggcgttccagacgattgcacggaatgcacttaagcaggaaacggaggtggagctgtacaacgaatttcctgaacctatcaaactggacaagaatgaccgggccaaggcctcggcagaaagctgcagttgctgagggggcagtgagagttgagcacagagtccttcacaaaccaagaacacacgtaggccttcaacacaattcccctctcctcttccaaacaaaacatacattgatctctcacatccagctgccaaaagaaaaccccatcaaacacagttacaccccacatatctctcacacacacacacacacgcacacacacacacacagatctgacgtaatcaaactccagcccttgcccgtgatggctccttggggtctgcctgcccacccacatgagcccgcgagtatggcagcaggacaagccagcggtggaagtcattctgatatggagttggcattggaagcttattctttttgttcactggagagagagagaactgtttacagttaatctgtgtctaattatctgattttttttattggtcttgtggtctttttaccccccctttcccctccctccttgaaggctaccccttgggaaggctggtgccccatgccccattacaggctcacacccagtctgatcaggctgagttttgtatgtatctatctgttaatgcttgttacttttaactaatcagatctttttacagtatccatttattatgtaatgcttcttagaaaagaatcttatagtacatgttaatatatgcaaccaattaaaatgtataaattagtgtaagaaattcttggattatgtgtttaagtcctgtaatgcaggcctgtaaggtggagggttgaaccctgtttggattgcagagtgttactcagaattgggaaatccagctagcggcagtattctgtacagtagacacaagaattatgtacgccttttatcaaagacttaagagccaaaaagcttttcatctctccagggggaaaactgtctagttcccttctgtgtctaaattttccaaaacgttgatttgcataatacagtggtatgtgcaatggataaattgccgttatttcaaaaattaaaattctcattttctttcttttttttcccccctgctccacacttcaaaactcccgttagatcagcattctactacaagagtgaaaggaaaaccctaacagatctgtcctagtgattttacctttgttctagaaggcgctcctttcagggttgtggtattcttaggttagcggagctttttcctcttttccccacccatctccccaatattgcccattattaattaacctctttctttggttggaaccctggcagttctgctcccttcctaggatctgcccctgcattgtagcttgcttaacggagcacttctcctttttccaaaggtctacattctagggtgtgggctgagttcttctgtaaagagatgaacgcaatgccaataaaattgaacaagaacaatg

SEQ ID NO: 148295 - DNA, 624 bp, Artificial Sequence
  derived and/or modified sequence
atgaccagcagaaagaaggtgctgctgaaggtgatcatcctgggcgacagcggcgtgggcaagaccagcctgatgaaccagtacgtgaacaagaagttcagcaaccagtacaaggccaccatcggcgccgacttcctgaccaaggaggtgatggtggacgacagactggtgaccatgcagatctgggacaccgccggccaggagagattccagagcctgggcgtggccttctacagaggcgccgactgctgcgtgctggtgttcgacgtgaccgcccccaacaccttcaagaccctggacagctggagagacgagttcctgatccaggccagccccagagaccccgagaacttccccttcgtggtgctgggcaacaagatcgacctggagaacagacaggtggccaccaagagagcccaggcctggtgctacagcaagaacaacatcccctacttcgagaccagcgccaaggaggccatcaacgtggagcaggccttccagaccatcgccagaaacgccctgaagcaggagaccgaggtggagctgtacaacgagttccccgagcccatcaagctggacaagaacgacagagccaaggccagcgccgagagctgcagctgctag

SEQ ID NO: 148296 - protein, 1132 aa, Artificial Sequence
  derived and/or modified sequence
MEPNDSTSTAVEEPDSLEVLVKTLDSQTRTFIVGAQMNVKEFKEHIAASVSIPSEKQRLIYQGRVLQDDKKLQEYNVGGKVIHLVERAPPQTHLPSGASSGTGSASATHGGGSPPGTRGPGASVHDRNANSYVMVGTFNLPSDGSAVDVHINMEQAPIQSEPRVRLVMAQHMIRDIQTLLSRMETLPYLQCRGGPQPQHSQPPPQPPAVTPEPVALSSQTSEPVESEAPPREPMEAEEVEERAPAQNPELTPGPAPAGPTPAPETNAPNHPSPAEYVEVLQELQRLESRLQPFLQRYYEVLGAAATTDYNNNHEGREEDQRLINLVGESLRLLGNTFVALSDLRCNLACTPPRHLHVVRPMSHYTTPMVLQQAAIPIQINVGTTVTMTGNGTRPPPTPNAEAPPPGPGQASSVAPSSTNVESSAEGAPPPGPAPPPATSHPRVIRISHQSVEPVVMMHMNIQDSGTQPGGVPSAPTGPLGPPGHGQTLGQQVPGFPTAPTRVVIARPTPPQARPSHPGGPPVSGTLQGAGLGTNASLAQMVSGLVGQLLMQPVLVAQGTPGMAPPPAPATASASAGTTNTATTAGPAPGGPAQPPPTPQPSMADLQFSQLLGNLLGPAGPGAGGSGVASPTITVAMPGVPAFLQGMTDFLQATQTAPPPPPPPPPPPPAPEQQTMPPPGSPSGGAGSPGGLGLESLSPEFFTSVVQGVLSSLLGSLGARAGSSESIAAFIQRLSGSSNIFEPGADGALGFFGALLSLLCQNFSMVDVVMLLHGHFQPLQRLQPQLRSFFHQHYLGGQEPTPSNIRMATHTLITGLEEYVRESFSLVQVQPGVDIIRTNLEFLQEQFNSIAAHVLHCTDSGFGARLLELCNQGLFECLALNLHCLGGQQMELAAVINGRIRRMSRGVNPSLVSWLTTMMGLRLQVVLEHMPVGPDAILRYVRRVGDPPQPLPEEPMEVQGAERASPEPQRENASPAPGTTAEEAMSRGPPPAPEGGSRDEQDGASAETEPWAAAVPPEWVPIIQQDIQSQRKVKPQPPLSDAYLSGMPAKRRKTMQGEGPQLLLSEAVSRAAKAAGARPLTSPESLSRDLEAPEVQESYRQQLRSDIQKRLQEDPNYSPQRFPNAQRAFADDP

SEQ ID NO: 148297 - protein, 233 aa, Artificial Sequence
  derived and/or modified sequence
MEPNDSTSTAVEEPDSLEVLVKTLDSQTRTFIVGAQMNVKEFKEHIAASVSIPSEKQRLIYQGRVLQDDKKLQEYNVGGKVIHLVERAPPQTHLPSGASSGTGSASATHGGGSPPGTRGPGASVHDRNANSYVMVGTFNLPSDGSAVDVHINMEQAPIQSEPRVRLVMAQHMIRDIQTLLSRMETLPYLQCRGGPQPQHSQPPPQPPAVTPEPVALSSQTSEPVESEAPPREP

SEQ ID NO: 148298 - protein, 1132 aa, Artificial Sequence
  derived and/or modified sequence
MEPNDSTSTAVEEPDSLEVLVKTLDSQTRTFIVGAQMNVKEFKEHIAASVSIPSEKQRLIYQGRVLQDDKKLQEYNVGGKVIHLVERAPPQTHLPSGASSGTGSASATHGGGSPPGTRGPGASVHDRNANSYVMVGTFNLPSDGSAVDVHINMEQAPIQSEPRVRLVMAQHMIRDIQTLLSRMETLPYLQCRGGPQPQHSQPPPQPPAVTPEPVALSSQTSEPVESEAPPREPMEAEEVEERAPAQNPELTPGPAPAGPTPAPETNAPNHPSPAEYVEVLQELQRLESRLQPFLQRYYEVLGAAATTDYNNNHEGREEDQRLINLVGESLRLLGNTFVALSDLRCNLACTPPRHLHVVRPMSHYTTPMVLQQAAIPIQINVGTTVTMTGNGTRPPPTPNAEAPPPGPGQASSVAPSSTNVESSAEGAPPPGPAPPPATSHPRVIRISHQSVEPVVMMHMNIQDSGTQPGGVPSAPTGPLGPPGHGQTLGQQVPGFPTAPTRVVIARPTPPQARPSHPGGPPVSGTLQGAGLGTNASLAQMVSGLVGQLLMQPVLVAQGTPGMAPPPAPATASASAGTTNTATTAGPAPGGPAQPPPTPQPSMADLQFSQLLGNLLGPAGPGAGGPGVASPTITVAMPGVPAFLQGMTDFLQATQTAPPPPPPPPPPPPAPEQQTMPPPGSPSGGAGSPGGLGLESLSPEFFTSVVQGVLSSLLGSLGARAGSSESIAAFIQRLSGSSNIFEPGADGALGFFGALLSLLCQNFSMVDVVMLLHGHFQPLQRLQPQLRSFFHQHYLGGQEPTPSNIRMATHTLITGLEEYVRESFSLVQVQPGVDIIRTNLEFLQEQFNSIAAHVLHCTDSGFGARLLELCNQGLFECLALNLHCLGGQQMELAAVINGRIRRMSRGVNPSLVSWLTTMMGLRLQVVLEHMPVGPDAILRYVRRVGDPPQPLPEEPMEVQGAERASPEPQRENASPAPGTTAEEAMSRGPPPAPEGGSRDEQDGASAETEPWAAAVPPEWVPIIQQDIQSQRKVKPQPPLSDAYLSGMPAKRRKTMQGEGPQLLLSEAVSRAAKAAGARPLTSPESLSRDLEAPEVQESYRQQLRSDIQKRLQEDPNYSPQRFPNAQRAFADDP

SEQ ID NO: 148299 - DNA, 3399 bp, Artificial Sequence
  derived and/or modified sequence
atggagccgaacgactccaccagtacagccgtcgaggagcccgacagcctggaggtgctggttaagaccctcgactctcagactagaacgtttatcgtcggtgcacaaatgaacgttaaggagtttaaggagcacatagccgcttctgtttctataccatccgagaaacagcgcctgatttaccagggacgggtcctgcaggacgataaaaaactgcaagaatacaatgtgggcggaaaggtgatccacctcgtagaacgcgctcccccacaaacacacctaccatcaggcgcaagttctggcacagggtccgcctcagcgacgcacggaggcgggagtccccctggtaccaggggtcctggggcatccgtccacgaccggaacgccaatagctatgtaatggtgggcacatttaacctgccctcggatggaagcgccgtggatgtgcacattaacatggagcaggcccccatacagtcggaacccagggtccgccttgtcatggcacagcacatgatccgcgacatacagactctcctgagccggatggaaactttgccgtatctgcaatgccgcggaggtccccagccacaacattctcagcctcccccgcagcctcctgctgttacacctgagccagtcgctttgtcttctcagacctccgagccggtggaaagcgaagctccccccagagagccaatggaagcagaagaagttgaggagagagccccagcacaaaacccggagttaacccccggccccgcccctgccggcccgacccctgctcctgaaacgaatgcccctaaccacccttccccagccgagtacgtcgaagtgctgcaggagctccaacgtctcgagagccgactccagccctttctgcagcggtactacgaagtgctcggagcagctgccaccacagactacaacaacaaccacgaaggccgcgaggaggatcagcgtttgatcaatctggtcggagaaagcctgcggcttttgggtaacacgtttgttgcactgtcagacctccgatgtaatctagcgtgcacgccgccccgacatctgcacgtggtgcgccctatgagccactacaccacacctatggttctgcaacaggccgctatcccaatccagattaacgtggggactactgtgactatgactggcaacgggaccaggccccctcccacccctaacgcggaagcaccacccccaggcccgggccaggcctcctcggtggccccttcttctacaaacgtggagtcgagtgctgaaggagctccaccccccggtccagcacctccacctgcgacatcacacccccgcgttatacgcataagtcatcaatctgtggaacccgttgtcatgatgcacatgaacattcaggatagcggcactcagccaggtggtgtcccttcagcccctaccgggccactgggccccccgggccatggtcagacactcggacagcaggtgcctggcttccccaccgctccaacacgggtggtgattgctaggcccaccccaccacaagcacgcccttctcaccccggcggaccgccagtgtcaggaacattacagggagcaggtctcgggaccaatgctagcctcgcccagatggtcagcgggctggtaggccagctgctgatgcaacctgtcctagtcgcccagggcacccccgggatggccccaccccccgctcccgcaaccgcaagcgcatcagccggcaccacaaatacagctaccaccgcgggacccgccccaggtgggcctgcgcagcccccaccaacacctcaaccttctatggccgacctacagttcagccagctgttagggaatctgttgggccccgctgggcccggtgcaggaggttccggcgtggcatccccgaccattacagtggctatgcccggcgtgccagcattcctccaggggatgaccgacttcttacaggccacccaaacagccccaccccccccgccccccccccctccgcccccacctgcgccggagcagcagaccatgcccccccccggcagcccatccggcggcgccgggtccccggggggactgggactggagtctctctccccagaattcttcacctctgttgtccagggggtactctcatctcttcttggttccctcggcgccagagctggatctagcgaatccattgctgctttcatacagcgactctcgggatcgtccaatatattcgaacctggtgctgacggggccctggggttctttggagccttgctgtccttgctctgccaaaatttctctatggttgatgtagtgatgctacttcatggccatttccagcctttgcagcgtctccaaccacaattgcgctccttttttcatcagcattatcttggcggtcaggagcccaccccgagcaacattcgcatggcaacccacacgctaatcactgggttagaggaatatgtgcgggaatcattttctctggttcaagtccagcccggagtcgacattatcaggactaatctcgagttcctgcaggaacagtttaatagcattgctgctcatgtgctgcactgcacggattcaggctttggggctaggttactagaactatgcaatcaaggcctctttgagtgtttggctttgaacctgcactgcctgggaggacagcagatggagttggccgccgtaatcaatggtaggatcagacgtatgtctcgcggcgtgaatccatctttagtgagttggctcactactatgatgggactgcgtttgcaggtggtgctggaacacatgccagttggaccagacgcgattcttcgttacgtcagaagagtaggcgatccccctcagcctcttcccgaggagcccatggaagttcaaggagcagagcgcgctagcccggagccacagcgagaaaatgcatctcccgcccccggcactacagcagaggaggcgatgtctcggggacccccccctgctccagagggaggaagtagagacgagcaggacggagcctctgcagagactgaaccttgggcagccgccgtcccccctgaatgggtccccataatacagcaggatatccagtctcagcgcaaagtcaagccacaaccccctctgagcgacgcatatctgtctgggatgccagccaagcggaggaagacgatgcaaggagaagggccccagcttctcctgtcagaggctgtctctagagctgcaaaggccgcaggcgccagacccttaacttctccggagagtttgtcaagggatctggaggctccggaagttcaggagtcttacaggcagcagctgcgctccgacattcaaaagcggctgcaagaggatccgaactattccccacagaggttccctaacgctcagagagcctttgccgacgacccctag

SEQ ID NO: 148300 - DNA, 3399 bp, Artificial Sequence
  derived and/or modified sequence
atggagccaaatgactccactagcacagcagtcgaagaacctgattctttggaggtcctggtgaaaaccctcgattcccagaccagaacgttcatcgtcggggctcagatgaacgttaaggaattcaaagaacacattgccgcttcagtatctattccttccgagaaacaacggctcatataccagggccgggtgctccaggatgacaaaaaattacaggaatacaatgtcggtggaaaagtaattcatttagtggaacgggccccccctcaaactcacctgccttcaggggcatcctccggcacaggctccgcttctgctacacacggaggtggatctcctcctggaaccaggggacctggcgcgagtgttcacgatcggaacgccaatagttacgtaatggtgggaacttttaatctgccttccgacggctcagcagttgacgtccatataaatatggaacaagccccaatacaatcggagccaagagtgcgtcttgtgatggctcagcacatgatccgtgacattcagaccctgctgagccgtatggagacactgccgtacttgcagtgcagaggaggaccccagcctcagcattcccaaccacccccccagccccctgcggtgacccctgaacctgtagcgctctctagtcagacctctgaacccgtggaatctgaggctcctccccgggaacccatggaggctgaggaggtggaagagcgtgctcccgcacaaaacccagaactgacgccagggccggctcccgctggtccgacacctgcacccgagaccaacgccccaaaccacccgagccctgccgaatacgtggaagttctccaggagttacagaggctcgaatcaagactgcagcctttcctacagcgatactatgaagtcctgggcgccgccgccacaactgattataacaataaccatgaaggccgtgaggaggatcagagacttattaacctggtgggcgaaagtttgcgactgctcggcaacacctttgtggcattgtctgatctacgttgtaacctggcatgtaccccaccacgtcatctgcacgtcgttagacccatgtcccactatacaacacccatggtactccaacaagccgccatacccatacagattaacgtgggtactacagtgacaatgaccggtaatgggacaaggcccccacctacacctaacgccgaggctccccccccagggcctggtcaggcctccagtgtagccccctcatctacaaacgtggagtcttctgcagaaggcgctccaccgccaggcccagccccccccccagccacgtctcaccccagggttatcagaatttcgcaccagtccgtcgagcctgtggttatgatgcatatgaacatacaggacagcgggacacaaccgggcggcgtcccgagtgcacccaccggccccctgggcccacccgggcacggccagacgctgggccagcaggtgccgggttttcccaccgcgccaactcgagtcgtgatcgcccgcccaacccctccacaggctcgcccatcccaccctggcgggccgcctgtctctgggactctgcagggtgcagggttgggaactaacgcttccctggcacagatggtatctggacttgtgggtcagcttctcatgcagcccgttctggtggcccagggtacacctggcatggcacccccccccgctccagcgaccgccagcgcctcagcgggcactaccaacaccgcaacaaccgctggacctgccccaggaggccccgcacaacctccaccgacccctcagccatctatggccgatcttcaattttcccagttactggggaatctgcttggaccagccggtccaggagcaggtggctccggggtggccagtcctactatcaccgttgcaatgcctggggtcccagcttttctgcaaggcatgaccgatttccttcaggctacccagaccgctccgccgccaccaccacccccccctccaccacctcctgcccctgagcaacagaccatgccaccacctggcagcccttctggcggagcaggaagcccgggtggtttgggcttggagagtctaagcccagagtttttcacatcagtagtgcagggcgtgctatcttccctactcgggagtctcggtgctagggccggaagctccgagagtatcgcagcattcatccagaggctgtctggatcatcaaacatttttgagccaggagccgacggtgctcttggatttttcggggcactgctgagcctcctgtgccagaatttcagcatggttgacgttgtaatgctcctgcacggtcacttccagcccctacagcgtctgcagccccaattgcgttcttttttccaccaacactatttaggcggccaggagcctacccctagcaacattagaatggctacccatactctaattactgggctggaggagtacgtccgggagagtttttcacttgtccaggtgcagccaggcgtggatatcattagaacaaaccttgagtttctgcaggaacagtttaacagtatcgccgctcacgtactccactgtacagacagtggctttggagctagactgctagaactgtgcaaccagggcctcttcgagtgcctagcgctgaatttacattgtttaggcggccagcagatggaattggccgccgtgataaacgggcgcatcaggcgtatgtctcgcggggtcaacccctccctggtatcttggctgaccacaatgatgggtttacgccttcaggtcgtgctggagcacatgcctgtagggccagacgcgatattgcggtatgtgaggagagtaggtgaccccccacaaccactgcctgaggagccaatggaggtccagggggcagagagggcatcacctgagccccagcgtgaaaatgcatctcccgccccgggaactacggccgaggaagctatgagtaggggccctcctcctgcacctgaggggggctcgcgggacgaacaggacggggcaagtgcagaaacggaaccctgggcggcagccgtgccgccggaatgggtgccaatcattcagcaagacatacaatcacagcgcaaagtcaagccacaacctcccttgagtgatgcctacctgagtgggatgccagccaagcgtagaaaaactatgcagggtgaaggcccccagctcctgctgtcagaagccgtgagccgcgccgcgaaggcagctggggcacgcccacttacatcaccggaaagtttaagccgtgacctggaggcaccagaagtacaggagagctaccgccagcaacttcgctctgatatccagaaaagattgcaggaagacccaaactatagtccgcagaggtttcccaacgcccagagggccttcgccgacgatccttag

SEQ ID NO: 148301 - DNA, 702 bp, Artificial Sequence
  derived and/or modified sequence
atggaacctaatgattccacttccactgctgtggaggaacctgatagcctcgaggtccttgttaaaaccctggattctcagactcgcacattcatcgtgggagcgcagatgaatgttaaggaatttaaggaacatatagctgccagtgtgtccatcccctccgaaaaacagagattgatttatcaaggaagggttctacaggatgacaagaaactgcaggagtataacgttggtgggaaagtaattcatctcgtggagagagcacccccccagactcacttgccctctggcgctagttctggcacagggagcgcctcagcaacacacggaggggggtcaccaccagggacacgcggtcctggtgctagtgtacacgacagaaacgcaaatagctatgttatggtcggtacatttaacctacctagtgatgggagtgcggtggacgtgcacattaacatggaacaggcccctattcagtcagagccccgggtacgtctggtgatggctcaacatatgatcagagatattcagacattattgagtcggatggagactcttccatacctgcagtgtaggggcggaccccagccacagcattcacagccgccccctcagccccctgccgttaccccagagcctgttgctctgagtagtcaaacgtctgagcccgtggaatctgaagctcctcctagagagccctag

SEQ ID NO: 148302 - DNA, 702 bp, Artificial Sequence
  derived and/or modified sequence
atggagccaaacgattctacaagcactgccgtggaagaacctgattctttagaagtcctggtcaagactctggattcccaaacccggacattcatcgtcggtgcgcagatgaatgtgaaggagtttaaggaacacatagccgcctcagtctccataccctccgagaaacaacgtctgatctatcaaggtcgggtgctacaagacgataaaaaactgcaggaatacaacgtaggcgggaaagtgatacatttggtggagcgcgcacctcctcagacacatctgccctccggcgccagcagcggcaccgggtctgcatccgcaacgcacggcggggggtctccaccaggtactagggggcccggggcttccgtgcacgatcggaacgcgaattcttatgtgatggtagggacattcaatctgccctcagacggtagcgctgtagacgtgcatataaacatggaacaggccccaattcagagcgagcctcgcgttagactcgtcatggcccagcacatgatccgcgacatccagactctgctctcaaggatggaaacattaccgtacctccagtgccgggggggaccacaaccgcaacatagccaaccaccaccccagccaccagcggtcacaccagagcccgtagcgctgtcctcccagacatcagaacctgttgaatccgaggcccccccccgggaaccctag

SEQ ID NO: 148303 - DNA, 3399 bp, Artificial Sequence
  derived and/or modified sequence
atggagccgaacgatagcacctcaaccgctgttgaggagccggatagtctggaggtcctggtcaagaccttggacagtcagactaggacttttattgttggcgcccaaatgaatgtgaaagagtttaaagaacacattgccgcatccgtgagcattccttctgaaaaacaacgcctgatttaccaaggacgggttctccaggacgataagaaacttcaagaatacaatgtggggggcaaggtaatccacctggtagagcgggctcccccccagactcacctcccctccggtgcatcttccgggactgggtcagccagcgctacccacggggggggctctccccccgggactagaggccctggcgccagcgtccacgatcggaacgcaaacagttacgtgatggtcggcactttcaatttgccttccgatgggagtgcagtcgacgttcacatcaacatggagcaggccccaattcagtccgaacccagagttcgacttgtgatggctcagcatatgatcagagacatacagacccttctcagcaggatggagactcttccctaccttcagtgtcgcggcggtccgcaaccccagcactcacagcccccacctcagcctcccgccgtgacaccagagcccgtggcgctgtctagccagacaagcgagcctgtagagtctgaagctcccccaagagaacccatggaggctgaagaagtggaggagcgcgccccggcgcagaacccagagttgacccctgggccagccccggccggaccgactcccgcacccgagacgaacgctcccaaccacccctcacctgctgagtacgttgaagttttgcaagagctgcagcgcttggagtcacggttacagcccttcctccagcgctattatgaggtgctgggtgctgcagctacaaccgattataataataaccatgaggggagggaggaggaccaacgcctcatcaaccttgtgggagagtcactgcggctcctagggaatactttcgtagctctgtccgacctgagatgtaatctggcatgtacaccaccacgccaccttcacgtcgtgagaccgatgtctcattatacgaccccaatggtgctgcagcaggcagccatccctattcagattaatgtgggaaccactgtaacaatgaccggcaatggcacgaggccaccgcccacaccaaatgccgaggcaccacctcctggacccgggcaggcctctagcgtcgcaccatctagcaccaacgtcgagagttcagcagaaggtgcacctccgcccggcccggcccccccaccggcaacgtcacatcccagagtcataagaatctctcatcaaagtgtagaacccgttgtcatgatgcatatgaacattcaggattcagggacccaacctgggggcgtccccagtgcgccgacaggccctctgggacctcccgggcacggacagacgttggggcagcaggtacctggatttcctaccgcacccacgcgagttgtgatcgccagacctactcccccacaggccagaccttcccatcccggtggccctccggtgtctggcacgctgcaaggcgccggcctgggcacgaatgcctccctggcccagatggtgagcggtctggtgggccagttgcttatgcagcccgtcctggtggcgcaaggaactcctggcatggcccccccaccagcgcctgccactgcctctgcttccgcaggcaccactaatacagccacaacagctggtccagcccctgggggaccggcacaaccaccccccacccctcaacccagcatggccgatcttcaattcagtcagctcctgggcaacctgctgggacctgctggtcccggcgcagggggacccggtgtcgctagtcccacaattaccgttgccatgccgggggtgcccgcattcctgcagggcatgacagattttctgcaggctactcagacagccccaccaccccctccccctccacctccacctccacccgcgccagagcaacagaccatgccgcctcccgggagccctagcggcggagccggaagccctgggggcctgggactggaatctttatcccctgaattttttacctctgtggtgcagggagtgctttcaagcctcctaggcagtctgggggctagagccggaagcagcgaatcaattgctgccttcatacagcggctgagcgggagttccaacatttttgaaccaggagctgatggagccctgggattcttcggcgccctgctcagccttttatgtcaaaacttctcaatggttgacgtagtaatgttgcttcacggtcatttccagcctttgcaacgactgcaaccacagctgcgaagcttcttccaccagcattatctgggcggacaggaacccactccttctaacatccgcatggcgacacacacgttaatcacaggtctcgaggagtacgtgagagagtctttttcactagtccaggtccaaccgggggtcgacatcatcaggacaaacctcgaatttctccaggaacagtttaacagtatcgccgcacacgtgctccactgcacagactcaggcttcggcgctcgtttgcttgagctgtgtaatcaaggactgttcgaatgcctcgctctcaacctgcactgccttgggggccaacaaatggagctcgcagccgtgattaacggcagaatacgtagaatgtcgagaggcgtgaacccgagcctggtgtcatggctgacaacaatgatgggtcttcggcttcaggtagtcctagaacacatgccagtcggtccagatgcaatcctgcggtacgtgagaagggtgggtgatccaccgcagccactgccagaagaacccatggaagtccagggcgccgagagggcaagccctgaaccccagagagagaatgcttcccctgcacccggcactaccgccgaggaggccatgagccggggcccaccgcccgctcccgaaggtggaagtcgtgacgagcaagatggagctagtgccgagaccgaaccatgggccgccgccgtgccccccgagtgggttccaatcattcagcaggacatccagagtcagcgaaaggtcaaaccacagcccccactgagtgacgcttacctctctgggatgcccgcgaagcgcaggaagactatgcagggcgagggaccccagctgctgctgagcgaggctgtgtcacgcgccgctaaagccgccggcgctcggccactgacaagcccagaaagcttgtctcgggatttggaggccccggaagtccaggaaagctaccggcaacagctgaggtccgatatacagaagcggttgcaagaggacccaaattatagcccacagcgattcccgaatgcacagcgggccttcgctgatgatccatag

SEQ ID NO: 148304 - DNA, 702 bp, Artificial Sequence
  derived and/or modified sequence
atggagcctaacgacagcacttctaccgcagtggaggaacctgacagccttgaggtcctcgttaaaactctggacagtcagacccgtacttttatcgtgggcgctcagatgaatgttaaggagtttaaggaacacattgcagccagcgtgagcattccctccgaaaagcagcgcttaatttatcaggggagagtgctgcaagacgataaaaagctccaagagtataacgtgggtggtaaggtgatacacctcgtggagagggccccaccccagacccacctgccctctggtgcctcatcgggaacgggctctgcctccgccacacatggtggggggtcacccccaggaacgcgcggacctggcgccagcgtacatgatcggaatgcgaactcatacgtaatggtgggcacatttaacctgccttcggacggttctgctgttgacgtccacattaacatggagcaggccccaattcaatccgagccacgcgttaggctcgtgatggcgcagcacatgatccgcgacattcagactctgttatcccgcatggagacacttccttacctgcagtgccgaggcgggccacagcctcagcattctcaacctccaccacagccacccgctgtgactccagagcctgttgctctgagtagtcagaccagtgaacctgtggagagcgaggcgcctccaagggaaccatag

SEQ ID NO: 148305 - DNA, 3399 bp, Artificial Sequence
  derived and/or modified sequence
atggagccaaacgatagtacctccaccgctgtggaggaacccgattcactcgaggttctggtgaaaactctggactcccaaacccgtactttcatcgtgggggcccaaatgaatgtcaaggagttcaaggagcacatagctgcatctgtctccatcccctccgagaaacagagactcatttaccagggtcgggtgctccaggatgacaaaaaacttcaggaatacaacgtaggtggtaaagtcatccatttggtagaaagggcgcctcctcagacgcacctccccagcggcgcctcctccggaaccgggtcggcctctgcaacgcacgggggggggtcaccgcctggaactaggggacccggcgcttcagtccacgatcggaacgctaactcttatgtcatggtcggtacatttaatctaccttcagatgggagcgcggtggacgtgcatatcaatatggaacaggcgccaattcagagcgaaccacgcgtccggctcgtgatggctcagcacatgatccgggacatccagacccttctgtcacgcatggaaaccctcccatacttgcaatgccgcggtggaccacagccgcagcactcccagccacccccgcagccacccgctgtgaccccagagcccgtggcattgagctcccagacgtctgaaccagttgagtctgaagccccacctcgcgagcccatggaggccgaggaggtggaggaacgggctcctgcacaaaatccagagctgacaccaggtcccgcccctgctggtcccaccccagctcctgaaacaaatgctccgaatcaccctagtcccgccgagtacgtcgaggttctgcaggaattgcagaggcttgaaagcagattgcagcctttcctgcagagatactatgaggtattaggagcggccgcaaccacggactataataataaccatgaaggcagggaggaggaccaacggttgatcaatcttgtgggagagagcctgagactgttgggtaataccttcgtggcattaagcgatctgagatgtaatctcgcttgtactcccccacgtcacctgcacgtagtgagacctatgagccactacacaacacctatggttctgcagcaggctgccatccctatccagattaatgtgggcaccactgtcacaatgacgggcaatggcactcggccaccgccaacacctaatgccgaagccccaccacccggccctggtcaagccagtagtgtggcgccttcgtcaaccaacgtcgagtcaagtgccgagggcgccccacctccaggtcctgcaccacctcccgcgactagccatccgagagtgatccgaatctcacatcaaagcgtcgagcccgtcgttatgatgcacatgaacatccaggacagcggcacccagcccggaggcgtacccagcgcacctacagggccactgggtccgcctgggcacggtcagaccctgggtcagcaggttcctgggttcccgaccgctcctaccagggtggtcatagccagacctacaccaccccaggcaaggccatcccatccagggggccctccagtgtcaggcactttacagggagctgggttgggtaccaacgccagtctggcacagatggtttcaggactggtcgggcagctgcttatgcaacctgtccttgtcgcccagggaaccccgggcatggccccacccccggcaccagctaccgcctccgcaagtgcgggtaccacaaatacggccactaccgccggacctgcacccggcgggccagcccagcctcctcccaccccgcaaccatccatggctgacctgcagttttcacagctactcggcaacctcctgggacccgccggacctggcgcaggagggcctggagttgcaagtccaaccattactgtcgccatgcccggggtacccgcctttctgcagggtatgactgacttcttacaggcgacacagacagcaccccctccacccccgcctcctccccccccgccgccagctcctgaacaacagactatgccccctccagggtctccatcgggcggcgccggttcccctggcggactgggtctggagtccctgtctccagaatttttcacctccgttgtgcagggggtgctgtccagtctgcttgggtccctgggtgcacgcgcagggagttctgagagcatcgccgcattcatccaacggctctccggctcctcaaatatctttgaacctggagctgatggggctttaggtttctttggagctcttcttagtctgctgtgccagaacttcagcatggtagacgttgtcatgttgctgcacgggcatttccagcctcttcagcggcttcagccacagctgcgcagttttttccatcagcactacttggggggtcaggagcccacaccgtctaacattagaatggctacacacactctcatcaccggccttgaggaatacgtccgcgaaagtttttcgttagtgcaggtccaaccgggagtggacattatacggacaaatcttgagtttctgcaggagcagttcaattctattgccgcccacgtgttacattgcaccgattccggctttggagctcgactgctggagctctgcaatcaggggctgttcgagtgcttagcattaaacctgcactgtctgggaggacagcagatggaactggcagccgtgatcaatggcagaatacggcgaatgtctcgcggagtcaacccctccctcgtcagttggctgacgacgatgatggggctgagactacaagtggttctcgaacatatgccagtggggccagacgcaatcctcaggtacgtaaggcgagtgggagatcccccacaaccactgcctgaagagcccatggaggtgcagggcgcagagagagcttcacctgagcctcagcgtgaaaacgcatcaccggcacctgggaccacagccgaagaagccatgtctcgtggtccgccccccgctccggagggtggcagtcgcgacgagcaggacggcgcctctgctgaaacagaaccctgggcagctgctgtgcctcctgaatgggtccctatcattcaacaggacatccagtcccagaggaaagttaaacctcagccacccttatcagatgcatacttgtcaggtatgcccgccaaacggcgcaaaaccatgcagggagaaggcccgcagttgctcttaagcgaagctgtcagtagagcggctaaggctgccggtgctaggcctctgacttcccccgagagcctaagccgtgatctggaagcaccagaagtccaagaaagttatcggcagcaactgagatccgatatccaaaagcgcctccaggaggaccccaactatagcccccaacgattccctaacgcccaacgagcgttcgccgacgacccatag

SEQ ID NO: 148306 - DNA, 702 bp, Artificial Sequence
  derived and/or modified sequence
atggagcctaatgacagcacttccactgcagtggaagagcctgattccttggaggtcctggtgaagactcttgactcccagacgcggacctttattgttggagcgcagatgaacgtgaaagagtttaaagaacatattgccgcctccgtgtctatcccctccgaaaagcagagactcatctatcagggacgcgtgctccaggacgataaaaagctgcaagaatataatgtgggcggaaaggtgattcacctggtggaacgcgccccgccccagacacacctacccagtggtgcctcctcaggaaccggttcggcctccgcgactcacggcgggggaagtccccctggcacaaggggtccgggtgcaagcgtacatgacagaaacgccaactcatacgtgatggtcggtacatttaatctcccttcagacggcagcgcagttgatgtgcatattaatatggaacaggcgccaatacagagcgaacctagggttagacttgtcatggcgcagcacatgatcagggatattcagacattactttcaaggatggagacattaccttacctccagtgccggggggggccccagccccagcactcccagccacctccacaaccacccgcggttacaccagaaccagtggcactcagctcccaaacatcagaacccgttgagtccgaggcaccccctcgcgagccatag

SEQ ID NO: 148307 - DNA, 702 bp, Artificial Sequence
  derived and/or modified sequence
atggagcctaacgactccacctctacagccgttgaagagcccgactccctcgaagtgttggtcaagacgctggatagccagacaaggactttcatcgtgggggcccaaatgaacgtcaaggagttcaaagagcacattgctgcctctgtgtccatccccagtgaaaagcaacgcctgatttaccagggcagggttctccaggatgataaaaaactgcaagaatataacgtaggggggaaagtgatccatcttgtggaaagggccccacctcagactcatttacccagcggggcgagcagcggtacaggaagcgcatcggcgacccatggtgggggtagcccacccggcacccgcggccctggagctagtgtccatgatagaaacgccaattcttatgtgatggtcggcacgtttaacctgccttcagatggtagtgccgtcgatgtacacatcaatatggaacaggcccccattcagtcagaaccccgagttcgtctggtgatggcccagcacatgataagagacatccagacattactttcccggatggaaacgctgccctacctgcagtgtcgtggaggaccccaaccccagcatagccagccaccaccacagccacccgccgtgaccccggagccagtagccctgagttcacagactagtgagcctgtggaaagcgaggctcccccacgagagccatag

SEQ ID NO: 148308 - DNA, 702 bp, Artificial Sequence
  derived and/or modified sequence
atggagcctaacgactccacctctaccgccgtggaggaacccgatagccttgaggtactcgtcaaaacactggactctcaaacccggacttttattgtcggcgcacagatgaatgtcaaggagttcaaagagcacattgcagcaagcgtcagtatcccatcagagaaacagcggctcatctatcagggcagggttctccaggatgataagaagctgcaagagtataacgtgggtggcaaggtgatacatcttgtagagagagcacctcctcaaacccatctgccctccggcgcaagttccggcactggttctgcgtctgcgacgcatggtggcggatcgcctcctgggactagagggccaggagcctcagtgcacgataggaatgcaaattcctacgtaatggtgggcacgtttaacctgccctctgatgggtcggccgttgatgttcacatcaatatggagcaagcacccattcagtcagaaccccgcgttcgcctggttatggcccagcatatgatccgcgacatccagactttgctgtctagaatggaaaccctgccctatctccagtgtagaggggggccacagcctcagcatagtcagccccccccccagccaccagccgtgacccccgagcccgtggctcttagctcgcagacctctgagcctgtggagtctgaagcaccaccccgcgagccgtag

SEQ ID NO: 148309 - DNA, 702 bp, Artificial Sequence
  derived and/or modified sequence
atggaacctaatgactccactagcaccgccgttgaagagcctgactctttggaggtgctcgtgaaaaccttagactcgcagaccagaacatttatcgtgggcgcacagatgaatgtgaaagaatttaaggagcacatcgccgcctccgtatcaatcccaagcgaaaagcaaagactgatctaccagggccgggtcctccaagatgacaagaaactccaggagtacaatgttggtggcaaagtcatacacctggtggagagggccccgccccaaactcacctacccagcggtgcatcttcaggcaccggatcggcctctgcaacgcatgggggtgggagtcctcccggaactcgaggccccggcgcttctgtgcatgatagaaatgctaacagctacgtgatggttgggacctttaatctgccttccgatggctctgcagtcgatgtgcatattaatatggaacaggcgcccattcagtctgagccccgggtaagactggtgatggcccagcacatgattagagatattcagaccctgctctcaaggatggagacactaccttacctccagtgtcggggaggacctcagccacagcactcccaaccccccccccagccccccgcggtaaccccggagccagtagccctgtcgtctcaaacgtccgaacccgtggagagtgaggcacctccacgcgaaccttag

SEQ ID NO: 148310 - DNA, 3399 bp, Artificial Sequence
  derived and/or modified sequence
atggaaccgaatgacagcacatctacggctgtcgaagagccggattccttggaagtactggtgaaaacattagacagtcagacaagaacttttattgtgggcgctcaaatgaatgtgaaagaattcaaagagcacattgcggcatctgttagcatcccctctgagaaacaacgcctgatctaccaaggacgagtgctgcaggatgataaaaagctgcaggagtacaacgtcggcggaaaggtgattcacctggttgaaagggctccacctcagacccacctcccgagcggggccagctccgggactggaagtgcgtcagccacccacggaggcgggagtccacctggtacaaggggcccaggtgcgagtgtccacgatcggaacgccaacagttatgtaatggtggggaccttcaatctgcctagcgacggaagtgctgtggatgtgcacatcaacatggagcaggcgcccatccagtctgagccacgcgttcgtctggtgatggctcagcacatgatacgggacatacagacattactgtcacggatggaaaccctaccttatttgcagtgtcggggggggcctcaaccccaacattcacagcccccaccacagccgcccgcagttaccccagagcctgtggccctgagttcccagacttccgaacccgtcgagtctgaggcaccacctagggagcccatggaggccgaggaggttgaagagcgagctcccgcccaaaatcccgaactgacgccaggaccggcccccgctggacctacgcctgcgccagagacaaacgcccccaatcacccatcaccggcagaatacgtggaggttctccaggagcttcagaggctagaatcccgactccaacccttcttgcagagatattacgaggtgcttggcgctgcagcaaccaccgactacaataataatcatgagggtcgggaggaggatcagagactgataaatctggtaggtgagtctctgaggcttctgggtaacaccttcgttgctctgagcgatctgcgatgcaatttagcctgcactccccctaggcacttgcacgtggtgcggccaatgtctcactacacgaccccaatggtgttgcagcaagccgccattcctatccaaatcaacgtggggaccactgttacgatgacaggcaacgggacaaggccacccccaactccgaatgctgaagctcctcccccagggccaggacaagctagctcagtggcccccagctcaacaaatgtcgaatcatccgctgaaggggcacccccccccggccctgccccccctccggcgacatcgcatcctagagtcattaggatcagtcatcagtctgtagaacctgtggtaatgatgcacatgaatatacaagatagcggaactcagccaggcggggtgccatccgctcccacaggccctttgggcccacctggacatggccaaacgttaggccagcaagttccaggctttcctaccgcccccacaagagtggtgatcgctcgcccaacgccgcctcaggcacgcccttcccaccccgggggaccccccgtgagcggcacgctccaaggggcagggctcgggaccaacgcgtccctcgcccagatggtttccggtcttgtgggacagctgctgatgcagcccgtgctggttgcccaaggaacccctggcatggcccccccaccagccccagccaccgcatctgctagtgcaggaaccacaaatacagcaacgacggctgggcccgcgccaggaggcccggcccagcccccgcccactccccagcctagcatggccgacctgcagttcagccaattgctgggcaatctgttgggcccggccggcccaggcgcggggggctccggagtagctagccccacaattactgtcgctatgcccggggtccctgctttcctccagggcatgactgacttccttcaggcaactcagactgcgccacccccccccccccctccgccccccccccccccggctcctgaacaacagactatgccaccccccgggtcgccgagcggtggtgcgggcagtcccggcggattggggcttgaatctcttagccccgagttttttacttcagtcgtacagggcgttctcagcagtctgctggggtccctgggtgctcgtgcggggtcctcagaatccatcgctgccttcatccagaggctgagtggtagctctaacatctttgaacctggggcagatggggctctcggattctttggggccctactgagccttctgtgccaaaatttttcaatggtggatgtagtaatgctgctgcacggacacttccagccactgcaaagattacaaccgcagctgcgatctttcttccaccagcactatcttggaggacaggaacctacgccttccaatataaggatggctactcacactcttattaccggtctggaggaatacgttcgcgagagctttagtctggtccaagtgcagcccggtgtggacattatcagaacaaaccttgaattcctgcaagagcaatttaattctatcgcagcccacgtgttgcactgtactgactccggatttggagctcgcctcctcgaactgtgtaatcagggcctcttcgagtgtctggcactgaacctacactgcctgggagggcagcagatggagttggcagctgtaattaacggacggattcgcaggatgtctaggggcgtaaatccctctcttgtgagctggctgactacaatgatgggcctacgcttacaggtcgtgctggagcacatgcctgtgggccccgacgccattctgcggtacgtcaggcgcgtgggggacccgcctcagccccttcccgaggaacctatggaagtacaaggtgccgagagagcttctccagagccccagcgcgaaaatgctagtcccgctccaggtacaacagcagaagaagctatgtcacgcgggccacccccagcgccagaaggcggaagccgggacgagcaggatggcgccagtgctgaaacagagccttgggccgctgccgtaccccccgagtgggtgcctattattcagcaagacatccaatcacaaaggaaagtgaagccccagccacccttgagcgatgcctacttgagtggcatgcctgctaagcggaggaaaaccatgcaaggtgaggggccacagctgctgttgtccgaggccgtatcccgcgccgcgaaggcagcaggcgcccgacctctgacctcacccgaatcactgtcgagggatctcgaggcacctgaagtccaagagagctatcggcagcagctccgcagtgacatacagaaaaggctgcaagaggaccctaactactctccacaaagatttccaaacgcacagcgcgcctttgcggatgacccctag

SEQ ID NO: 148311 - DNA, 3399 bp, Artificial Sequence
  derived and/or modified sequence
atggagcccaacgattctacatctaccgccgtcgaggagcctgactcacttgaggttttggtcaagactctggatagtcaaaccaggactttcattgtcggcgcccaaatgaacgtcaaggaatttaaagagcatatcgcagcctccgttagcatcccctccgagaagcagcgactcatctatcaggggcgcgtgttgcaggatgataaaaagctccaggagtacaacgtgggagggaaagttatacatctcgtcgagagggccccaccacagactcacttaccatctggtgcctcatcaggaaccggttcggcctccgcgacacatgggggagggagccctccaggaacacggggacccggcgccagcgtccacgacagaaacgccaattcctacgtgatggtggggacattcaacctaccttccgacggtagcgccgtagatgtgcacattaacatggaacaggcccccatccagagcgagccccgggtacgccttgtgatggcccagcatatgatccgggatattcagaccctattatctcggatggagacactgccgtatctgcagtgtcgaggggggccacagccacagcatagccaacctcctcctcagccacctgccgtgacaccagaacctgttgctttgtctagccagacatcggagcccgtcgagagcgaagcgccaccccgcgagcctatggaagccgaagaggtagaggagcgcgcccccgctcaaaatcctgagctgacccctggacccgctcccgctgggcctacacccgcccctgagaccaacgccccaaatcacccttccccggcagagtacgtcgaagtgctccaggaactccagagactcgagtccaggttacagcctttcctccagagatactacgaggtgctgggtgcagccgccactaccgattacaacaacaaccatgaaggtagggaagaagaccagagactgattaacttggtgggagagtctttaagattgttgggaaacactttcgtggccctgagcgatctgcgctgcaatctagcttgtacccctccaaggcatctgcacgtggtgagaccgatgtcccattataccactccgatggtgctgcaacaggccgccatccccattcagatcaatgtagggacaaccgtcactatgacaggcaacggaactagacctccaccaactcctaatgccgaggcgccaccacctggacctggccaggcgtcttcagtggctccttcctcgaccaatgtcgagtcaagcgctgagggagcgcctccccccggtcctgccccccctcctgctacttctcaccccagagtaattaggatctctcaccagtcagttgagcccgtggtcatgatgcatatgaacattcaagatagcggtacacagccaggaggcgtgccgtctgctccaaccggccccctcggtcccccgggacatgggcagactctgggtcagcaggtacctggcttccctacagcaccaactcgtgtcgtaattgcccgccctacacccccgcaggcacgacccagccaccccggggggccacctgtttcgggcaccctccagggggctggcctgggcaccaatgcaagtttggctcagatggtgagcggccttgtgggccagcttctgatgcagcccgtgttggtcgcacaggggacacctggaatggccccaccccccgccccagccaccgcttctgcttccgccggcacaaccaatactgcaactacagcgggtcctgctcccggaggccccgcccagcctcccccaacccctcagccctctatggctgaccttcagttttctcagttgttaggcaacctgctggggcccgctgggccaggagctggcggcagtggcgtggccagtcccactatcactgtggccatgccgggagttccagcttttctgcagggaatgacggattttcttcaggcaacccaaacggctccacctccgcctccaccccccccccctccacctccggcccctgaacagcaaactatgcctccccccggatcaccaagtggtggagccgggtcccccggtgggctcggcctcgagtcactgtccccagagtttttcacctccgtcgtgcagggggtgttgtcttccctcctcggcagcctgggagcaagggcagggtcttctgagtccatcgctgcattcattcagcggctctccggttcaagcaacatttttgaaccaggcgctgacggcgcccttggtttcttcggggcattattatcacttctgtgtcagaacttctcgatggtagacgtagtgatgttattacacggccactttcagcctctccagagactacagccccaactgcgcagcttcttccaccaacactatctgggcggccaggagcccacaccctcaaacattaggatggccactcataccttaatcaccgggctcgaagaatatgtccgggagtctttctctctggtacaggtccagcccggcgtggatattattcgtacgaacctagaatttctccaagaacagtttaactcaatcgccgcacacgttttgcactgcactgattccggatttggtgctcgcttgctggaactgtgtaaccagggccttttcgagtgtctcgctctcaatcttcactgcctcggaggccagcagatggaacttgcagcggtgatcaatggccggatcaggcggatgtcccgcggggtaaatccatctcttgtttcctggctgactactatgatgggtctgagactgcaggtagtgctggagcatatgccagtgggcccagacgcaattctgaggtacgtcagaagagtgggggatcccccacagcccctgcctgaagaacctatggaagttcagggcgctgagcgagcaagtccagagccacagcgggaaaacgccagtcctgcgcccggaacgactgctgaggaggccatgagtcgggggcccccgccagcccctgaaggggggagccgcgatgagcaagatggtgcatccgcggaaaccgaaccatgggccgcagcagtgcctcccgagtgggtgcccatcattcagcaggatattcagtcacagcgcaaggtgaaaccgcagcctcctctgtccgacgcctacttaagtggaatgccggccaagcgccgcaaaaccatgcaaggcgaaggtccccagctcttgttaagtgaggcggtcagtagagctgctaaggctgctggcgcccggccactcacatcccccgaatctttatccagggaccttgaggccccagaggtccaagaatcataccgccagcagttaagaagcgacatccaaaaaagactgcaagaggacccaaattactccccccaacgtttccctaatgcccagcgggcttttgcggatgacccttag

SEQ ID NO: 148312 - DNA, 3399 bp, Artificial Sequence
  derived and/or modified sequence
atggagcctaatgatagcacatctaccgccgtggaggagcccgacagtctggaggtcttggtcaaaaccctggacagtcagacgaggacattcatcgtcggagctcaaatgaatgtcaaagagtttaaagagcacattgcagctagcgtctccattccttcggagaaacaacggctgatataccagggacgtgtcttgcaagatgataaaaagcttcaggagtacaatgtgggcggaaaggtcatccacctggtggagagagcacctccgcagacccatcttccgagtggggctagctccggaacagggagcgcatccgctacccacggcggggggtcgcctcctggcacgcgtggcccgggcgccagtgtgcatgatagaaacgcaaactcttacgtgatggtgggtactttcaatctacccagtgacggctctgccgtggatgtacacattaacatggaacaggccccaatccagagcgagccgcgggtgcgccttgttatggctcagcatatgattcgcgatattcagactttgctctctcgcatggagacactcccctacctgcagtgtcgcggtggcccgcagccacagcacagccagccccctccgcagccccccgcagtgacccctgaacccgtcgccttatcatcccagacgagcgaacccgtggagtctgaagcccctccgagagagccaatggaggccgaggaagtcgaagaacgcgcacctgcccagaatcccgagctgacgccgggtccggcccccgccggtccaactcctgcacctgagactaacgctccaaaccatccatcacctgccgagtacgttgaggtgcttcaggaactgcagcgattggagtcaagactgcagccgttcctgcagcgctactatgaagtgctgggagcagccgctaccactgactacaataacaaccacgagggacgagaggaagatcagagattgattaatttggttggagagtcgctgcggctgttaggaaacacctttgtcgccctgtccgacctcaggtgcaacttagcgtgtactccaccaaggcatttgcacgttgtacgccctatgtctcattacaccacccccatggtattgcaacaggcagctatcccaatccagataaatgtcggcactacagtgacaatgaccggcaacgggacccgtccaccgcctacgcctaacgccgaggcccctccccccggacccggccaggcaagtagcgttgctccctctagtaccaatgtagagagtagcgctgaaggcgcccccccacccggacccgcacccccccctgcaaccagtcacccccgggtcataagaatcagccaccaatcagtcgaacctgtcgtaatgatgcacatgaacatccaggacagcgggacccagcctggaggagtgccatccgctcccactggcccattgggaccccccgggcacggacaaactctgggccagcaagttcctggttttcccactgctcccacaagggtagtcatagctcggcccacacctccccaggcgcgtccctctcaccctggcgggccccctgtttcaggaacattgcagggggcaggtttaggtaccaatgcctcactcgcgcagatggtgagcggcctggtcgggcagctgttgatgcagcctgtccttgtggcacaaggcacccctggtatggcccccccgccagcccctgccaccgcaagcgcatcagctggcactaccaacactgcgaccacagcaggaccagctcccggtgggcctgctcagccccctcctaccccgcagcccagcatggccgatcttcaattctcacagctgttgggcaacctgcttgggcccgccggacctggcgccgggggcccgggcgtcgcctcccccaccattacagtcgccatgcccggtgtgcctgcctttttacagggcatgacagactttttgcaggcaacccagaccgccccaccacccccaccccccccgccacccccccctccagcgcccgagcagcagactatgcctcccccaggcagtccctctggcggcgccggctcacccggcggtctgggcttggagtctctgtcgcccgagttctttacttctgtggtgcagggggtcttaagtagccttctggggtccctgggggcacgcgctggctcatccgaaagtatagccgcctttatccagcgactaagcggtagctcaaacatctttgagcctggagcagatggggctctaggctttttcggggccctgttaagtctcctctgccaaaacttttccatggtggatgtcgtgatgcttctccacgggcattttcagcctctgcaaaggcttcaacctcagctccggtcttttttccatcagcactaccttggaggccaggagcctacgccttctaacataaggatggccacccatacactgatcactggtcttgaggaatatgttcgtgagtccttttccttagtgcaggtccagccaggagtcgacattattcgcactaatctggaatttctccaagaacagttcaacagcatcgctgctcatgtcttacactgcaccgactcggggtttggagcgaggctgttagaactgtgcaaccagggcctgttcgagtgcctggcactaaatctgcactgtctggggggacaacagatggagttagccgccgtaattaacggccgcatccgaagaatgagtcggggcgtgaacccttcgcttgtgtcatggctaactaccatgatgggactccgcctccaggttgtgctggaacacatgcctgtgggcccggatgccattctacgttacgtccggagagtgggtgatccaccacagccgctcccggaagagccaatggaagttcagggcgcagagcgtgccagcccagagcctcaaagggagaacgccagcccagctcccggcacaaccgctgaggaagccatgtcaagagggcctcctcccgctcctgagggggggagcagggatgagcaggatggcgcctcagctgagaccgaaccatgggcagcagccgttccccctgagtgggtgcccataattcagcaggacatccagtcacagaggaaggttaagccacaaccaccactcagtgatgcttatctgagtgggatgcccgccaaaagacgcaagacgatgcagggtgaaggtccgcagctcctgctttctgaggcagttagtcgagctgctaaggccgccggcgccaggcccctcacttcaccagaaagcctgagcagggatctggaagctcctgaggtgcaggagtcctatagacaacagctgagatcagacatccagaagagactgcaagaggatcccaactactcaccccagagatttccaaacgcacagcgggcatttgcggatgacccctag

SEQ ID NO: 148313 - DNA, 3399 bp, Artificial Sequence
  derived and/or modified sequence
atggagcccaatgacagcaccagcacagctgtggaggagccagacagcctggaggtgctggtgaagaccctggacagccagaccaggaccttcatcgtgggcgcccagatgaatgtgaaggagttcaaggagcacatcgccgcctctgtgtccatccccagcgagaagcagaggctcatctaccagggccgggtgctgcaggatgacaagaagctgcaggagtacaacgtgggcggcaaggtgatccacctggtggagcgggccccaccccagacccacctgcccagcggggccagcagcggcaccggcagcgccagcgccacccatggaggcggcagccccccaggcacccggggccctggggcctctgtgcatgacagaaatgccaacagctatgtgatggtgggcaccttcaacctgcccagtgatggcagcgctgtggatgtgcacatcaacatggagcaggcccccatccagagcgagccccgggtgcggctggtgatggcccagcacatgatccgggacatccagaccctgctgagcaggatggagaccctgccctacctgcagtgccggggcggcccccagccccagcacagccagcccccaccccagcccccagctgtgaccccagagcctgtggccctgagcagccagaccagcgagcctgtggagagcgaggccccaccccgggagcccatggaggccgaggaggtggaggagcgggccccagcccagaaccctgagctgaccccaggccctgccccagctggccccaccccagcccctgagaccaatgcccccaaccaccccagccctgcagaatatgtggaggtgctgcaggagctgcagaggctggagagccggctgcagcccttcctgcagcgctactatgaggtgctgggcgccgccgccaccacagactacaacaacaaccacgagggccgggaggaggaccagaggctcatcaacctggtgggggagagcctgcggctgctgggcaacacctttgtggccctgagtgacctgcgctgcaacctggcctgcaccccacccaggcacctgcacgtggtgcggcccatgagccactacaccacccccatggtgctgcagcaggccgccatccccatccagatcaacgtgggcaccaccgtgaccatgactggaaatggcacccggcccccacccaccccaaatgctgaggcccctcctcctggccctggccaggccagctctgtggcccccagcagcaccaacgtggagagcagcgctgagggcgcccctcctcctggccctgcccctcctccagccaccagccaccccagggtcatccgcatcagccaccagagcgtggagcctgtggtgatgatgcacatgaacatccaggacagcggcacccagcccggcggcgtgcccagcgcccccaccggccccctgggccccccaggccacggccagaccctgggccagcaggtgcccggcttccccacagcccccaccagggtggtgattgcccggcccaccccaccccaggcccggcccagccaccctgggggcccccctgtgtctggcaccctgcagggcgccggcctgggcaccaatgccagcctggcccagatggtgtctggcctggtgggccagctgctgatgcagcctgtgctggtggcccagggcaccccaggcatggcccctcctccagccccagccacagccagcgccagcgctggcaccaccaacacagccaccacagctggccctgcccctgggggccctgcccagcccccacccaccccccagcccagcatggctgacctgcagttcagccagctgctgggcaacctgctgggccctgctggccctggggccggcggcagcggcgtggccagccccaccatcaccgtggccatgcctggggtgcctgccttcctgcagggcatgacagacttcctgcaggccacccagacagcccctcctcctcctcctcctcctcctcctcctcctccagcccctgagcagcagaccatgcctcctcctggcagccccagcggcggggccggcagccctgggggcctgggcctggagagcctgagccctgagttcttcacctctgtggtgcagggcgtgctgagcagcctgctgggcagcctgggcgcccgggccggcagcagcgagagcattgctgccttcatccagaggctgagcggcagcagcaacatctttgagcccggggctgatggagccctgggcttctttggagccctgctgagcctgctgtgccagaacttctccatggtggatgtggtgatgctgctgcacggccacttccagcccctgcagaggctgcagccccagctgcgctccttcttccaccagcactacctgggcggccaggagcccacccccagcaacatccgcatggccacccacaccctcatcaccggcctggaggagtatgtgcgggagagcttcagcctggtgcaggtgcagcccggggtggacatcatccgcaccaacctggagttcctgcaggagcagttcaacagcattgctgcccacgtgctgcactgcacagattctggctttggagcccggctgctggagctgtgcaaccagggcctgtttgaatgtctggccctgaacctgcactgcctgggcggccagcagatggagctggccgctgtgatcaatggccgcatccggaggatgagcagaggagtgaaccccagcctggtgtcctggctgaccaccatgatgggcctgcggctgcaggtggtgctggagcacatgcctgtgggcccagatgccatcctgcgctacgtgagaagagtgggggaccccccccagcccctgcctgaggagcccatggaggtgcagggcgctgagcgggccagccctgagccccagcgggagaatgccagccctgcccctggcaccacagctgaggaggccatgagccggggccccccaccagcccctgagggcggcagcagagatgagcaggatggagccagcgctgagacagagccctgggccgctgctgtgcccccagagtgggtgcccatcatccagcaggacatccagagccagaggaaggtgaagccccagccccccctgagtgatgcctacctgagcggcatgcctgccaagaggaggaagaccatgcagggcgagggcccccagctgctgctgtctgaggccgtgtcccgggccgccaaggccgccggggcccggcccctgaccagccctgagagcctgagccgggacctggaggcccctgaggtgcaggagagctaccggcagcagctgcggagtgacatccagaagaggctgcaggaggaccccaactacagcccccagcgcttccccaatgcccagagggcctttgctgatgacccctag

SEQ ID NO: 148314 - DNA, 702 bp, Artificial Sequence
  derived and/or modified sequence
atggagcccaatgacagcaccagcacagctgtggaggagccagacagcctggaggtgctggtgaagaccctggacagccagaccaggaccttcatcgtgggcgcccagatgaatgtgaaggagttcaaggagcacatcgccgcctctgtgtccatccccagcgagaagcagaggctcatctaccagggccgggtgctgcaggatgacaagaagctgcaggagtacaacgtgggcggcaaggtgatccacctggtggagcgggccccaccccagacccacctgcccagcggggccagcagcggcaccggcagcgccagcgccacccatggaggcggcagccccccaggcacccggggccctggggcctctgtgcatgacagaaatgccaacagctatgtgatggtgggcaccttcaacctgcccagtgatggcagcgctgtggatgtgcacatcaacatggagcaggcccccatccagagcgagccccgggtgcggctggtgatggcccagcacatgatccgggacatccagaccctgctgagcaggatggagaccctgccctacctgcagtgccggggcggcccccagccccagcacagccagcccccaccccagcccccagctgtgaccccagagcctgtggccctgagcagccagaccagcgagcctgtggagagcgaggccccaccccgggagccctag

SEQ ID NO: 148315 - DNA, 3399 bp, Artificial Sequence
  derived and/or modified sequence
atggagcccaatgacagcaccagcacagctgtggaggagccagacagcctggaggtgctggtgaagaccctggacagccagaccaggaccttcatcgtgggcgcccagatgaatgtgaaggagttcaaggagcacatcgccgcctctgtgtccatccccagcgagaagcagaggctcatctaccagggccgggtgctgcaggatgacaagaagctgcaggagtacaacgtgggcggcaaggtgatccacctggtggagcgggccccaccccagacccacctgcccagcggggccagcagcggcaccggcagcgccagcgccacccatggaggcggcagccccccaggcacccggggccctggggcctctgtgcatgacagaaatgccaacagctatgtgatggtgggcaccttcaacctgcccagtgatggcagcgctgtggatgtgcacatcaacatggagcaggcccccatccagagcgagccccgggtgcggctggtgatggcccagcacatgatccgggacatccagaccctgctgagcaggatggagaccctgccctacctgcagtgccggggcggcccccagccccagcacagccagcccccaccccagcccccagctgtgaccccagagcctgtggccctgagcagccagaccagcgagcctgtggagagcgaggccccaccccgggagcccatggaggccgaggaggtggaggagcgggccccagcccagaaccctgagctgaccccaggccctgccccagctggccccaccccagcccctgagaccaatgcccccaaccaccccagccctgcagaatatgtggaggtgctgcaggagctgcagaggctggagagccggctgcagcccttcctgcagcgctactatgaggtgctgggcgccgccgccaccacagactacaacaacaaccacgagggccgggaggaggaccagaggctcatcaacctggtgggggagagcctgcggctgctgggcaacacctttgtggccctgagtgacctgcgctgcaacctggcctgcaccccacccaggcacctgcacgtggtgcggcccatgagccactacaccacccccatggtgctgcagcaggccgccatccccatccagatcaacgtgggcaccaccgtgaccatgactggaaatggcacccggcccccacccaccccaaatgctgaggcccctcctcctggccctggccaggccagctctgtggcccccagcagcaccaacgtggagagcagcgctgagggcgcccctcctcctggccctgcccctcctccagccaccagccaccccagggtcatccgcatcagccaccagagcgtggagcctgtggtgatgatgcacatgaacatccaggacagcggcacccagcccggcggcgtgcccagcgcccccaccggccccctgggccccccaggccacggccagaccctgggccagcaggtgcccggcttccccacagcccccaccagggtggtgattgcccggcccaccccaccccaggcccggcccagccaccctgggggcccccctgtgtctggcaccctgcagggcgccggcctgggcaccaatgccagcctggcccagatggtgtctggcctggtgggccagctgctgatgcagcctgtgctggtggcccagggcaccccaggcatggcccctcctccagccccagccacagccagcgccagcgctggcaccaccaacacagccaccacagctggccctgcccctgggggccctgcccagcccccacccaccccccagcccagcatggctgacctgcagttcagccagctgctgggcaacctgctgggccctgctggccctggggccggcggccctggggtggccagccccaccatcaccgtggccatgcctggggtgcctgccttcctgcagggcatgacagacttcctgcaggccacccagacagcccctcctcctcctcctcctcctcctcctcctcctccagcccctgagcagcagaccatgcctcctcctggcagccccagcggcggggccggcagccctgggggcctgggcctggagagcctgagccctgagttcttcacctctgtggtgcagggcgtgctgagcagcctgctgggcagcctgggcgcccgggccggcagcagcgagagcattgctgccttcatccagaggctgagcggcagcagcaacatctttgagcccggggctgatggagccctgggcttctttggagccctgctgagcctgctgtgccagaacttctccatggtggatgtggtgatgctgctgcacggccacttccagcccctgcagaggctgcagccccagctgcgctccttcttccaccagcactacctgggcggccaggagcccacccccagcaacatccgcatggccacccacaccctcatcaccggcctggaggagtatgtgcgggagagcttcagcctggtgcaggtgcagcccggggtggacatcatccgcaccaacctggagttcctgcaggagcagttcaacagcattgctgcccacgtgctgcactgcacagattctggctttggagcccggctgctggagctgtgcaaccagggcctgtttgaatgtctggccctgaacctgcactgcctgggcggccagcagatggagctggccgctgtgatcaatggccgcatccggaggatgagcagaggagtgaaccccagcctggtgtcctggctgaccaccatgatgggcctgcggctgcaggtggtgctggagcacatgcctgtgggcccagatgccatcctgcgctacgtgagaagagtgggggaccccccccagcccctgcctgaggagcccatggaggtgcagggcgctgagcgggccagccctgagccccagcgggagaatgccagccctgcccctggcaccacagctgaggaggccatgagccggggccccccaccagcccctgagggcggcagcagagatgagcaggatggagccagcgctgagacagagccctgggccgctgctgtgcccccagagtgggtgcccatcatccagcaggacatccagagccagaggaaggtgaagccccagccccccctgagtgatgcctacctgagcggcatgcctgccaagaggaggaagaccatgcagggcgagggcccccagctgctgctgtctgaggccgtgtcccgggccgccaaggccgccggggcccggcccctgaccagccctgagagcctgagccgggacctggaggcccctgaggtgcaggagagctaccggcagcagctgcggagtgacatccagaagaggctgcaggaggaccccaactacagcccccagcgcttccccaatgcccagagggcctttgctgatgacccctag

SEQ ID NO: 148316 - DNA, 3399 bp, Artificial Sequence
  derived and/or modified sequence
atggagcccaacgacagcaccagcaccgccgtggaggagcccgactccctggaagtcctggtgaaaactctcgactcgcagacacgtactttcattgtgggcgctcagatgaatgtgaaagagtttaaggaacacatcgcagcatccgtctcaatccctagtgaaaaacaacgactgatctatcaggggcgagtgctgcaggacgataaaaagttacaggagtacaatgtggggggcaaggtcatccacctcgttgagcgggccccaccacagactcatctgccgtccggagcctctagcggtaccggctccgcttcagcaactcatgggggggggtctccaccagggacacggggacctggggctagcgtccatgaccgcaatgcaaattcttacgtgatggtcggcacgttcaatctgccctctgacggctcagcagtggatgtgcatataaatatggaacaggctcctatccagtctgagccccgcgtgcgtctcgttatggcccagcacatgattcgcgacatccagactctgctgtcccggatggagacgctaccctatctccagtgtagaggaggcccccagcctcagcattcccaacccccccctcagcctcctgccgtgacgccagaacccgtggctttatccagccagacgtctgaacctgtggaatccgaagcccctcccagggagcccatggaagccgaagaggtggaagaacgtgctcctgctcaaaaccccgagctgacaccaggccctgcccccgcaggccccacgccagctcctgagacaaatgcgcccaatcacccctcccctgccgagtacgtggaagtcctgcaggagctgcagcgtctcgagtcccgactccagcctttccttcagcggtattatgaggtcttgggggctgctgcgaccaccgactacaataacaaccacgaaggacgagaggaagaccagcgcctgatcaacttagtgggcgagtcactgagactgcttggaaacactttcgtcgctctgagtgaccttcgttgtaatctcgcatgtacaccgccgagacatctccacgtggtgaggcccatgagccattatacaactcccatggttctgcaacaggccgccatccccattcaaatcaatgtcggtaccactgtgactatgacagggaacggtaccagacccccccctaccccaaatgcagaagcacccccaccagggccaggtcaagcatcaagcgtcgccccctcatctactaatgtggagtcatccgcagagggggctccgccacctggacccgcccctccaccggcaacttctcacccacgagtcatacgcatttcgcaccagtctgtggagccagtggtgatgatgcacatgaatattcaggactctggtacccagcccggcggggtgccttctgcacctactggtcccttgggaccaccaggacacggccaaacccttggccagcaggtgccgggattcccaaccgcgccaacaagagtggtcattgcaagaccgacgcctccccaagctaggccgagccaccctggagggcccccagtgagcggcacgttgcagggcgccggattaggaaccaacgcgtcactcgcccagatggttagcggcttggtcggtcagttgctcatgcagccagtattggtcgcccagggcacccccgggatggccccccctcccgcgcccgcgactgcgagcgccagtgccggcaccacaaataccgccaccactgccggacccgcccccggcggcccagcccagcccccacccacgccacagccctccatggccgatctgcagttctcccagctcctgggcaacctcctgggacctgcaggcccaggcgccggcggctccggcgtcgcttctcccacaatcaccgtggctatgccaggagtgccagcctttctacagggaatgaccgactttcttcaagcaacacagactgccccaccaccgccccccccccccccgccacctcccccggcacccgaacaacagacgatgccaccacccggctctcccagcggaggcgccggctctccaggaggcctgggccttgagtccctatctcctgagttcttcacaagcgtagtccaaggggtcctgtcatctctgctcggaagcttgggtgcgcgggccgggagcagtgaaagcatcgccgcatttatccagaggttaagcggaagctccaatattttcgagcctggtgcagatggagccctggggtttttcggtgccctgttgagcctgctctgtcagaatttcagcatggtggatgttgtcatgctgcttcacgggcacttccagcccctccaacggctgcaaccccagctgaggtcattttttcatcagcattatctagggggccaggagcccacaccttcaaatattcggatggctactcacaccttaatcacggggctggaggagtacgtacgagagagtttttcactggtgcaggtgcagcccggcgtggatattatccggactaatctggagttcttgcaggagcagtttaattcaattgccgcccacgtattacattgtaccgattcaggattcggggccaggctcctggaactgtgcaaccagggtttgttcgaatgtttagctctgaatcttcattgtctgggcggccagcagatggaactggcagctgtgattaacggcagaattaggagaatgtcacggggcgtgaacccttccctggtgtcctggctcaccacaatgatggggctccggctccaggtcgtcctcgagcatatgcctgtgggtcccgatgccatcctccgatacgtgcggcgagtgggtgaccctccccagccactgccagaggagcctatggaggtccagggggctgaaagagcaagtcccgagccccagagggaaaacgcatcacccgcacccggcacaactgcagaggaagccatgagccggggacctccacctgcacccgaaggcgggagtcgcgacgagcaggatggggcctctgccgagacggagccgtgggctgctgccgtccctcccgagtgggtgcccattatccagcaggacattcagagccaacgcaaagtaaagcctcagcctcctctctcagatgcctacctgtccggcatgccggcgaagagacgtaagacaatgcaaggcgagggcccgcagctgctgttaagcgaggccgtgtcccgcgctgcaaaggccgcaggagctcgtcccctgacatcaccagaatccctctcgcgtgatttggaggctcccgaagttcaggagagttaccggcagcaactcagaagtgacatacagaagaggctgcaagaggatcccaactattcgccacagaggtttcccaatgcgcaacgcgccttcgctgacgatccttag

SEQ ID NO: 148317 - DNA, 3399 bp, Artificial Sequence
  derived and/or modified sequence
atggagcccaacgacagcaccagcaccgccgtggaggagcccgactctctggaagtgttggtgaaaacattggatagccagacacgtacattcatcgtgggtgctcagatgaatgtgaaagagttcaaggagcatatagctgccagcgtgtcgatccctagtgaaaaacagaggcttatttaccaggggcgcgtgctccaggatgacaagaagctccaggagtacaacgttggtggcaaggtcatccaccttgtggagcgggccccaccccagacccacttaccctccggcgcgagcagcggaaccggaagcgcctctgccacccacgggggcggctcccctcccggaaccagagggccgggtgcttctgtgcacgatcgaaacgcaaactcttatgtgatggtcgggaccttcaatctaccaagtgacgggagcgccgttgatgttcacatcaatatggaacaggcccccattcagtcagaaccccgggtgcgcctcgtgatggcccagcacatgatcagggacatccagacactgctgagtcggatggagactctgccttatttgcaatgtagggggggccctcaaccccagcattcccaacccccaccccaaccacccgccgtgacgcccgaaccggtcgccctgtcgagtcagactagtgaaccggtggaatcagaagctcctccaagagaacccatggaggcagaggaggtcgaggaaagagcgccggctcagaatccagagcttacacccggccccgctccggctgggcccactccggctcccgaaactaacgctcctaaccacccctctcccgccgaatatgtcgaagtgctgcaagagctgcaacggctcgagagtcgcttacaacccttcctccagcgttactatgaggtgctaggagctgccgctacaacagattataataacaaccacgaggggcgcgaggaggaccagcgactaatcaatctggtaggcgaatctctgagactgcttggcaatacattcgtcgcactgagcgatctccgatgcaacctggcatgcaccccccctagacacctacacgtggttcggcctatgagccactacaccaccccaatggtcctgcagcaagccgccattcctatccagatcaatgttgggaccacagtgaccatgactggtaacggcacccggcccccacccacgcccaatgccgaggcccctccaccaggaccaggacaagcatcgtcggtggcacccagtagcaccaacgtggaaagctccgcagaaggcgcgccacctccgggccccgcaccacctcccgccacttcccaccctcgcgtgattcgtatcagccatcagtccgtagaaccggtggtgatgatgcacatgaatattcaagattccggtacacagcctgggggggtgcccagtgctccaactgggccattgggacctccgggacatggccagaccctgggacaacaggtgcctggatttcctaccgcacctaccagggtcgttattgcgaggccaacacctccccaagcacggccgtcccatcctgggggaccacccgtctccgggactctacaaggagctgggctgggcaccaacgccagcctggcccaaatggtttcagggctcgtgggtcaactgctcatgcaaccagtactggtagcccaaggcacccccggcatggcacctccaccagctcctgcgactgcatctgcctctgctggcactaccaatacagccactaccgccggtccggcccccggcgggcccgcacagcctcccccgacaccccagccatccatggcggacctgcagttcagccaactgctaggaaacttgttaggacccgccggcccgggcgctggggggagcggcgtcgcgtcccctactattacagttgccatgcctggtgtgccagctttcctgcagggaatgacggacttcctgcaggccacacagactgctccccccccccccccaccacctcccccccctccccccgcccctgagcaacagaccatgcccccacccggatcaccgtccgggggcgctggttcccccggcggccttggtctggaatccctatctcctgagtttttcacctccgtggtgcagggagtgctctcgagtttgcttggaagcttaggcgcgagagcaggatccagtgaatcaatagctgctttcatccaacgactttcaggcagctccaatattttcgaacccggggccgatggagcgctgggtttctttggtgccctgttgtccctgctctgccagaatttttccatggtggacgtagtgatgctgttgcatggccatttccaacctctccagcgtctgcagccccagcttaggtcatttttccaccaacactacctcggaggacaggaacccactccctccaacatccgaatggcaactcatactttaatcactggactggaagagtacgtgagagagtccttctctttggttcaggttcagccgggagttgatattattaggaccaacctggagttcctacaggagcaattcaattccatcgctgcccacgtgcttcactgcacggactcagggtttggcgccaggctcctggaactctgcaaccagggcttattcgagtgccttgccctgaacctgcattgcctgggaggccagcagatggaactggccgcagtgatcaatggccggattaggcggatgtcacgaggtgtgaatccgtccctggtctcgtggcttactaccatgatgggcctgagattacaggttgtgcttgaacatatgcctgtgggcccagacgcaatcctgcgttatgtacggcgggtgggcgatcctccccagccactcccggaagagcctatggaggtccaaggggctgagagagcctctcctgaacctcagagggagaacgcttcacccgctccgggaaccactgccgaggaagctatgagtcgggggcctcctccagctcctgagggcggctctagggatgaacaagacggcgccagcgccgagaccgaaccctgggccgcagcagtcccaccggagtgggtgcctattattcagcaagacattcagtcgcagagaaaggtgaaaccacaacctcctctgagtgacgcctatctctccggaatgccagccaagcggcgcaaaacgatgcaaggagaaggcccacaactgttgctgagtgaggccgtcagcagagctgcaaaggctgcgggggccaggccacttactagcccagaatctctgagtcgcgatctagaggccccagaggtacaggaatcctaccggcagcaattgcgctctgatatccagaaaaggctacaggaggacccgaattattccccccagagatttcctaatgctcaaagagcctttgctgatgacccatag

SEQ ID NO: 148318 - DNA, 702 bp, Artificial Sequence
  derived and/or modified sequence
atggagcccaacgacagcaccagcaccgccgtggaggagcccgactccttggaggtcctggtgaaaacacttgattcacaaacacggaccttcatcgtgggggcccagatgaacgttaaggaattcaaggagcatattgcggcctcagtgtctatcccctctgagaagcagaggctcatttaccaaggcagggtgctgcaggacgataaaaagctccaggagtataacgtgggcgggaaggtgatacatctggttgaaagagctcccccgcagactcacttgccatccggggcatcctcaggcactggatctgcgagcgccacgcatgggggggggtcgccccccggcaccaggggtcccggagccagcgtccacgatcggaatgctaactcatatgtaatggtggggacattcaatctgccatccgatggatctgccgtggacgtgcatatcaacatggaacaagcacctattcagtccgaaccccgtgttaggctggtaatggcccaacacatgattcgagatattcaaactctgttatctcgaatggagacactcccttacctacaatgtagaggagggcctcagccacagcactcccagcccccaccccagccaccagctgtgacgccagaaccagtggctctgtcgagccaaacaagtgagcctgtcgagtccgaggctccacccagggaaccatag

SEQ ID NO: 148319 - DNA, 702 bp, Artificial Sequence
  derived and/or modified sequence
atggagcccaacgacagcaccagcaccgccgtggaggagcccgacagtcttgaagtactggttaagacccttgattcacagacacgaacattcattgtaggggcacagatgaatgtcaaggagttcaaggaacatatcgcggccagcgtctcaatacccagtgaaaagcagcggttaatttaccaggggagagtccttcaggacgacaagaaacttcaggagtacaatgtgggtgggaaggtgattcatttggttgagagagccccacctcagactcatcttccttcaggagccagcagtggtacggggagtgcctctgctacccacgggggcgggagccctccggggactagagggccaggtgcatctgtgcacgaccgtaacgccaattcgtacgtcatggtcgggacatttaacctgccttctgatggatcagctgtggatgtgcacattaatatggagcaagcaccgatccagagtgagccccgggtgagactggtgatggctcaacatatgattcgagatatccaaacactgctgagtcggatggagaccctgccgtacctgcaatgccgcgggggcccacagcctcaacacagccagcctcctccccagcctccagcagtgacaccagagcctgtggccctctcttcacagacctccgagccggtcgagtccgaagccccaccaagggagccatag

SEQ ID NO: 148320 - DNA, 3399 bp, Artificial Sequence
  derived and/or modified sequence
atggagcccaacgacagcaccagcaccgccgtggaggagcccgactcccttgaggttctggtgaaaacactcgattcccaaacacggacattcattgtgggcgcacagatgaacgtgaaagagtttaaggaacacatcgcagcttccgtctccattccttctgaaaagcaacggcttatctaccaaggacgagtgttgcaggacgacaaaaagctacaggaatacaacgtcggtggtaaggttatccacctcgtggagagggctcccccccagactcacctcccatccggggcatcctctggcaccggatccgcgtccgctacccacgggggcggctctcctccaggtacacggggacccggcgcttccgtacacgatcgaaacgccaactcctatgttatggttggcactttcaatctgccatcagacgggtcagcggtggacgtgcacataaacatggagcaggctcctattcagtcagagccaagggtgcgtctggtgatggcccagcacatgatccgagatatccagactcttctcagtcgcatggaaacactcccctatctgcagtgtcggggcggaccccagccgcagcacagtcaaccccctcctcagccccccgctgtcactccagagcccgtcgccctttctagtcagacgtccgagcctgtggagagtgaggccccgcctcgtgagcccatggaggctgaggaggttgaagaacgggcaccggctcaaaatcccgagcttacacccggacccgcccccgcaggtccaacccccgcgcccgaaaccaatgctccaaatcacccaagtcccgctgagtacgtggaagtcctgcaagagttacagcggctggagtctagactgcagcctttcctacagaggtattacgaagtgttaggggctgcagccaccaccgactataataataatcacgagggtagggaggaagatcagagactgatcaatctcgtgggagaatccctcaggctgctgggcaacacattcgtcgcgctctctgatctgcggtgtaacctcgcttgcacaccgcctaggcatctccacgtggttaggccgatgtcccactataccacaccgatggtactgcagcaggccgctatcccaatacagattaatgtgggaaccactgtgactatgaccggcaatggcacaaggcctcctcctactcccaacgccgaggctcctccacccggtccagggcaggcctcctccgttgccccctcaagtaccaacgttgaatcttctgcagagggggcccctcctccaggaccagcacccccgcccgcgaccagccacccaagagtgattcgtataagccatcaaagtgttgagccagtcgtgatgatgcacatgaacatccaggactccggtacacagcccggtggggtgccttctgcgcctacaggcccattagggcccccaggacatggacagactctgggccagcaggttccgggatttccaaccgcccccacacgagtagtcatcgcccgtccaaccccaccccaggcgaggccttcacatcctggcggcccacccgtctccgggactctgcaaggtgctgggctgggtaccaatgcatctctggcccagatggtgtccggcctagtgggccagctactgatgcagccagtcttggtggctcaggggacccccggcatggcgcctcctcctgcacctgcaactgcctctgcctctgctggaaccacgaataccgctactacagctggcccagctccaggggggcccgcccagccgcccccgactcctcagccctcaatggcggacctccagttcagtcagctcctgggcaacctgttaggtccagctggccctggagctggcggaccaggggtagcaagccccaccatcacagtggccatgcccggcgttccggcctttctccaggggatgacagacttcctccaagctacccaaacagccccgcctcctcctcctccacccccgccacctccccctgcaccagaacagcagacgatgcctcctcctggctctcccagtgggggagctgggagccccggcggactgggcctggagtctctctcgcccgaattcttcacttcggtggtccaaggtgtcctctcctccctgctgggatcgctgggggcgcgagccgggtccagtgagagtatcgccgccttcatccagaggctcagtggctcttctaatatattcgagccaggcgcagacggtgctctgggattctttggcgctctgctcagcctgctgtgtcagaacttcagtatggtcgatgtcgtgatgctgcttcacggccattttcaaccactgcaacgtctacagccccaacttcggtcattctttcaccagcattaccttggcggccaagagcctacccccagtaatattcgcatggccactcacacattaattaccggactggaagagtatgtccgagaatcctttagcctggtccaggtacagcctggggtggacataattagaacaaacctggagttcctacaggaacagttcaactctatcgccgcacatgtactacactgcaccgactcgggattcggcgcacggttactcgaactctgtaatcagggtctattcgaatgcctggctctgaacctgcattgcttaggtggccagcagatggaacttgccgcagtcattaacgggcgaatcaggaggatgagcagaggcgttaacccgtccttggtaagttggctgacgaccatgatggggctgagattacaggtggtcctggagcacatgcctgtggggcctgatgctattttgcgttacgtccgtcgcgtgggtgaccctccccaacccttgcctgaggaaccaatggaagtgcagggcgctgagagagcgagtcctgagccacagcgcgagaatgcaagccccgcacccggcacaaccgcagaagaagctatgagcaggggcccaccaccagctcctgaggggggctctcgcgacgagcaggacggtgcctctgcagagactgagccctgggccgcggcagtgccccctgagtgggtaccaattatccagcaggacatccaatcgcagaggaaagtcaaaccccagcccccactgtccgatgcatatctgtccggaatgccggcaaagaggaggaaaacaatgcagggcgaaggtcctcagctgctgctcagcgaggccgtgtctcgggcagcgaaagcagccggtgcccgtcccctgacaagtcccgagtctctttctcgggatctcgaggcacctgaggtgcaggagtcatatagacaacagctcaggtctgatatccagaagcgcctccaggaggacccaaactattccccgcaacggttcccgaatgcacagcgcgcttttgccgatgatccttag

SEQ ID NO: 148321 - DNA, 702 bp, Artificial Sequence
  derived and/or modified sequence
atggagcccaacgacagcaccagcaccgccgtggaggagcccgactctctggaggtcctagtaaagacacttgacagccagacacggacattcattgtgggggcccaaatgaatgtcaaagagttcaaggaacacattgccgccagtgtctctataccaagcgaaaagcagcgcctcatttaccaaggacgggttctgcaggacgacaagaagctgcaagaatacaatgtgggagggaaagtgatacacctggtggagagagcgcccccacaaactcacctgccaagtggggcatcgagcgggacaggctctgcatcagccactcacggtggtggaagccctcccggaactagagggccgggagcgagcgtacacgataggaatgccaatagctatgtgatggtcggaactttcaacctaccttcagacggatctgcagttgatgtccatattaatatggagcaggccccaatccaatctgagcccagggtgcgccttgtcatggcccagcacatgatccgggatattcagactctgctgtccaggatggaaaccctgccttatctgcagtgtcggggcggccctcagccccaacactcccagccaccaccccaacccccggccgtgacaccagagcccgtggctcttagttcccagacaagcgaaccagtggagtctgaagctcctccaagagagccttag

SEQ ID NO: 148322 - DNA, 3399 bp, Artificial Sequence
  derived and/or modified sequence
atggagcccaacgacagcaccagcaccgccgtggaggagcccgactcactggaggtgctggtgaagactctggattcccagacgaggaccttcattgtgggagctcagatgaatgtgaaggagtttaaggagcacatagctgccagcgtctctattcccagtgaaaaacagcgactcatttaccaggggcgggttctacaggacgacaaaaaactccaggaatacaacgttgggggtaaagtgattcacttagtggaacgcgctccccctcagacacacctccccagtggtgcatcatccggaacagggtccgcttcagccactcatggaggcggctcaccacccgggacacgtggccctggcgccagcgtgcatgataggaacgcaaacagttacgtcatggtagggaccttcaacctgccatcagatggctcagcggtggatgtacacatcaatatggagcaggctccaatccaatctgaacccagagtccgactagtgatggctcagcatatgattcgcgatattcaaactcttctgtccagaatggagacccttccctacctgcaatgcagagggggtccacagccccagcactctcagccccctccccagccccccgccgtcacacccgagcctgttgcattgtcatcgcagacatctgagcccgtggagtccgaggctccccccagggagccaatggaggctgaagaggtagaggaacgcgcccctgctcaaaatcccgaactgacacccggtcccgccccagccggaccaacacctgcacctgaaaccaatgcccctaaccatcctagcccagccgagtacgtcgaagtgttgcaggagctgcaaagacttgagagtagactccagcccttcctgcagcgatactacgaggtcctgggagccgctgcaaccacggattacaataacaatcatgaaggccgcgaggaagaccaacgactaatcaacctcgtgggcgaaagtctgcgattgctcggtaataccttcgtggctttaagcgatctgaggtgtaacctggcttgcaccccacctcggcatctacatgtcgtgcggccaatgtctcattatacgaccccaatggtgctgcagcaagctgccatccctatacagattaacgtcgggacaacagtgacaatgaccgggaacggtacccgacccccacctactcctaatgctgaagcacctccccccggtccaggacaagcctcttctgttgccccttccagcacaaacgtcgaaagctctgcagagggagcacccccacctggacctgctcctccccccgcaacaagccaccctagagtgataaggattagtcatcagagcgttgagccagttgtaatgatgcatatgaatattcaggatagtggaacccagccaggcggggttcccagcgccccgacaggccccctgggccccccaggccacggccagactctgggccaacaggtccccggatttcccaccgcacctaccagggttgttattgcccggcctacccctcctcaagcccgacctagccaccccggggggccaccagtctccggtaccctgcagggcgcagggctcggcacaaatgcatcactggcccaaatggtttccgggctggtgggccagctgttgatgcagcccgtgctggtggcccaaggaactccagggatggcccctccaccggcccccgcgaccgcctccgcttctgcgggaaccacgaatactgccaccactgccgggccggctcccgggggcccagcccaacccccacccacaccgcagcccagtatggccgacctacagttctctcagttactgggaaacctgttgggccccgctggcccaggagccgggggcccgggtgttgcctctcccacaatcacagtggcgatgcccggcgttcctgcgtttctgcaaggaatgacagactttttacaggctacacagaccgctcctcctccccctcctccccccccacctcccccccctgcccccgaacagcagaccatgccacccccaggatcccccagtgggggcgcaggaagccccgggggcctgggccttgaatccctgtcccccgaattttttacaagcgtggtgcagggtgtgctaagttctctgcttggttccctcggagccagggcgggaagctctgagagcattgcagcatttattcagaggctttctgggagctctaacatcttcgagccaggagcggatggggctctggggttttttggggccctgctgtctctcctgtgccagaacttctccatggtggatgttgtgatgctgctgcatgggcatttccaacctttgcagcgcctgcaaccacagctgcgctccttctttcaccagcactatctgggagggcaggagcctaccccgagtaatatcagaatggctacccatactcttattactggcctggaagagtacgtacgggaatcttttagtctggtgcaagtccagccaggcgtggacatcataagaaccaatttggaattcctccaggaacagttcaactcaattgcagcacatgtcctccattgcacagatagtgggttcggcgctagactcctagagctgtgtaaccaaggcctgttcgaatgtttggcccttaacctccactgcctcgggggccagcaaatggagctggctgccgtcatcaacggaagaattagaaggatgtcacggggcgtgaatcctagtctggtcagctggcttacaacaatgatggggttacgccttcaagtggttttggaacacatgccagtgggacccgacgccattctgaggtatgttaggcgagtaggcgatcctccgcagccccttccagaggaacctatggaggtccaaggcgcagaacgggcatcccctgaaccacagcgtgaaaatgcttcaccagctccggggacaacggccgaagaggccatgtctcggggacctccacctgcgcccgaggggggttcacgggacgagcaggatggtgcctcagcagagaccgaaccctgggcagcagcggtgccacctgaatgggttcctattatccagcaagacatccaatcacagcggaaagtcaagccacagcctcccctgtcagatgcttatctgtccggaatgccggccaagcggaggaaaaccatgcagggagaaggtcctcagctgctgctgagcgaggccgtgtcccgagctgccaaagccgccggcgctaggccactcactagtccagaaagcctgtcaagagatttggaagctcccgaagtgcaggagtcctatagacagcagcttcgatccgatatccagaagagactgcaagaggacccaaattactccccacaaagattccccaatgctcagagagctttcgccgatgacccctag

SEQ ID NO: 148323 - DNA, 702 bp, Artificial Sequence
  derived and/or modified sequence
atggagcccaacgacagcaccagcaccgccgtggaggagcccgacagcctggaagtcctcgtcaaaacactggacagccagacaaggacctttatagtgggggcccagatgaacgtcaaagagttcaaagaacacattgccgctagtgtttctatcccgtctgagaaacaaagactgatttatcagggacgggtgctgcaagacgacaagaaattacaggagtacaacgtcggcggaaaggttatacatctggtggaaagagcacctccccagactcatcttccctccggcgcttctagcggcaccggctctgctagtgcaactcatggcggcggtagcccacctggtactcgcggccccggggcatccgtccacgaccggaacgcgaactcttacgtgatggtgggcaccttcaatttgccgtccgatggtagtgccgtcgatgtgcacattaatatggagcaggcccctattcagtcagaaccgagggttcgcctggtgatggcacaacacatgatcagagatatccagacactgctgagccgaatggagaccctcccgtaccttcaatgtagggggggtcctcagccgcagcattcccagcctcctccacaaccacccgccgtgacacctgaacccgtggccctcagttcacaaacctctgagccagtggaaagcgaagcaccccctagggagccctag

SEQ ID NO: 148324 - DNA, 702 bp, Artificial Sequence
  derived and/or modified sequence
atggagcccaacgacagcaccagcaccgccgtggaggagcccgactcccttgaggtcttggtgaagacactggattctcagacccgcacctttatagtcggcgcacagatgaatgtcaaggaatttaaagaacacatcgctgcctcagttagcattccatccgaaaagcaacgtctgatctatcagggaagggtgctacaggatgataaaaagctgcaggagtacaatgttggagggaaggtaattcatctggttgaacgagcccctccccagacacaccttccatctggagcctcttctgggaccggaagtgcatcagcaacccacgggggtggatcaccccccggcacccggggacccggcgcaagcgttcatgaccgtaacgcgaattcctatgtcatggtgggcacttttaacctgccctcggatggaagcgcagtagatgtccacataaacatggagcaggcaccgattcagagcgaaccccgagttaggttggtgatggcccagcacatgatcagagacatacagactttgctctctcgcatggagaccctgccctatctgcaatgtcgaggcggcccacagcctcagcattcccaaccccccccccagcctcctgcggtgacccccgagcccgtcgcgctgagtagtcaaacaagtgagcccgtagaaagcgaggcccccccacgggaaccctag

SEQ ID NO: 148325 - DNA, 702 bp, Artificial Sequence
  derived and/or modified sequence
atggagcccaacgacagcaccagcaccgccgtggaggagcccgacagccttgaggtattggtgaaaacccttgatagccagacccggacctttattgtgggggcccagatgaatgttaaagagttcaaggaacacattgcggcctccgttagtattccaagtgaaaagcagagactgatttaccagggtcgagtattgcaagacgataagaagctgcaggagtacaatgtgggcgggaaggtcattcatctagtggagcgcgcgccacctcagacgcatctgcctagcggggcaagcagcggaacaggctctgccagtgctactcatggagggggctccccccccggtactcgtgggcccggagcatctgtccatgaccgaaatgccaacagttacgtcatggtcggaacattcaatctaccatcggatgggtccgccgtagatgttcacattaacatggagcaggccccaatccagagcgagccaagagtgcggttagtgatggcccagcatatgatcagggatattcagacgctgctttctcggatggaaacactcccatatctgcaatgtcgcggcggcccccagcctcagcatagtcagcccccgccccagcctcctgctgtgacgcccgagccggtggcgctatcaagtcagacaagtgaacctgtcgaatcagaagctcccccgagagagccatag

SEQ ID NO: 148326 - DNA, 702 bp, Artificial Sequence
  derived and/or modified sequence
atggagcccaacgacagcaccagcaccgccgtggaggagcccgacagcctggaagtccttgtgaagaccctggatagtcagacccgtacgtttatagtgggcgcccagatgaacgtcaaagagtttaaagagcatattgcagcctctgtgagtatccccagtgagaagcagaggctgatctatcagggaagggtccttcaggacgacaagaaactccaggagtacaacgtaggcggtaaggttattcatcttgttgaaagagctcccccccagacccacctaccatctggagcttcatcaggcacgggaagtgctagtgccactcacggtggcggaagcccgccgggaacccgcggccccggcgcctcggtgcacgaccgcaacgctaacagttatgtgatggttgggacgttcaacctcccgtcagatggttcagcagtggacgtccatatcaatatggagcaagcacccatacagtcagaaccccgagttcggctcgtaatggcacagcatatgattcgggatattcagactctgctgagcagaatggaaactctaccttatctacagtgtagaggaggcccacaacctcagcatagccagccacccccccaacccccagccgtcacgccagaacctgtggctttgtcctcccaaacaagtgaacccgtggaatccgaagcccccccacgggaaccctag

SEQ ID NO: 148327 - DNA, 3399 bp, Artificial Sequence
  derived and/or modified sequence
atggagcccaacgacagcaccagcaccgccgtggaggagcccgacagccttgaggtgctggttaagacgctagattcacaaacacgaaccttcatcgttggcgcacagatgaacgttaaagagttcaaagaacacatcgctgcttctgtgagcattccttcggaaaaacagaggcttatataccaaggcagagtgttacaggacgataagaagctccaggagtataatgtgggtggaaaggtcatccacctcgtagaacgtgccccgcctcagacacatttgccctctggggcctcaagcggcacgggatccgcgtctgctactcacggaggtgggtctccccctggcacacgcggaccaggggcctcagtgcacgatcgcaacgcaaacagctacgtgatggtcggaaccttcaatctgcccagcgacggatctgccgtcgacgttcacatcaacatggaacaggctcctattcagtccgaacctcgggttagactagttatggcccagcatatgattcgggacattcaaacactgctgtcccggatggaaactttaccgtatctccagtgtcggggtgggcctcagccccaacattcccaaccgcctcctcaaccgccagcggtcacacccgaaccagtggcgctgtcctctcagacgtccgagcctgtcgagtccgaggctcctccacgggagcccatggaggcagaagaagttgaagaaagggcccccgcacagaacccggagttgacaccagggcccgccccggcaggtcccacgcccgcccccgagacaaatgccccaaaccatccctcgcccgcggaatacgtggaggtgttacaggagttgcaaagactggagagccgtctccagcccttcctccagaggtattacgaggttctcggagctgccgcaaccaccgactacaacaataaccacgaggggagagaagaggaccagcgcttgatcaatctagtcggcgaaagtctccgtttactaggcaataccttcgtagctttgagcgatctacgatgcaacttggcctgcactccaccacggcaccttcatgtcgtgcgccctatgtcccactacacgactccaatggtactacagcaggcagctatacccattcagatcaacgtcggcaccaccgtgaccatgactgggaatggcacccgaccaccccccacgcctaatgccgaagcccccccaccaggacccggacaggcatcatcagtggcgccaagcagcacaaacgtggagagctcagccgagggcgccccaccgcctggtccagcaccgccaccagccacgtcccatccacgcgtgattcggatttcccaccaatctgttgaaccagtggtcatgatgcatatgaacatccaagatagtgggacgcaacctggcggggtcccatccgccccaacgggccccctaggcccacccggtcatgggcaaacactgggccagcaagtgccagggttcccaactgcccctacgagggtcgtgatcgcacgccccacacctcctcaggcccgaccgtcccacccaggtggtcctccagtctctggtacgctgcagggcgcgggtttaggcaccaacgcttccctggctcagatggtatcaggactcgtgggtcaactgcttatgcagcctgttctggtggcacaggggactccaggaatggccccaccccccgcccccgctaccgccagcgcctccgcaggcacaacaaacacagcaactactgcaggcccggcccccggcgggccagcccaacctccacctactccacagcccagtatggccgacttgcagttttcccagcttctggggaatctgctggggccagcagggcccggggctggggggtcaggagtggcctctcctacaatcacagtggctatgccaggcgtcccagcctttcttcaaggtatgaccgatttcctgcaggccacccaaacagccccaccccctcccccacctccccctccacctccccccgccccggagcagcagactatgcccccgccgggatctccttctgggggtgcgggaagtcctggcgggcttggactagaatcgcttagtcctgaattttttacttccgtcgtacaaggggttctcagtagcctgctgggtagcctgggggcaagggccgggtcaagtgaatctatcgccgcttttatccagcgactctccgggtctagcaacatctttgagcccggcgcagacggggccctgggattcttcggagcactgctgagtttactatgccaaaacttctcaatggtggacgtcgtaatgctcctacacggccacttccaacctttacagcgcctgcagcctcaactccgcagctttttccaccagcattacctgggcggtcaagaaccaaccccctcaaatatacggatggccactcacaccttgatcaccggattagaggagtacgttagagaaagcttctccctcgtgcaggttcaacctggagtagacataatccggactaatcttgagttcctgcaagagcagtttaattctattgcggctcatgtgctccactgtactgacagtggatttggggctaggttgctggagctttgcaaccagggcttgtttgaatgtttggcccttaatttgcattgtctggggggccaacagatggagctggccgccgttattaatgggaggatccgtaggatgtctcggggcgtaaacccctcccttgtgagttggcttaccactatgatgggactgagactccaagtggtgctggagcatatgccggttgggccagatgctattcttaggtatgtcaggagagtcggcgatcccccccagcctctgcccgaggagcctatggaggttcagggggccgaaagggccagccctgaaccacagcgcgagaatgcttccccagctcctggcacgaccgccgaggaagctatgagccgaggccctcctcccgcccccgaaggagggtcccgcgatgaacaggatggggccagcgccgagacggagccctgggctgctgctgtcccccctgagtgggtacctattatccaacaggacatccagagtcagcgcaaggtgaagccgcagccgcccctgagcgacgcatacctctcgggtatgccggcgaagcgccgtaagaccatgcaaggggaaggaccgcagctgctgctgagtgaagctgtgagcagggccgccaaagccgctggggccaggccattgactagccccgagtcactgtcccgcgatctcgaagccccagaggttcaggaaagctaccgacagcagctcaggtccgacatccagaaacgcctccaggaggacccgaattatagtccacagcgctttccaaatgctcaacgagccttcgctgacgatccatag

SEQ ID NO: 148328 - DNA, 3399 bp, Artificial Sequence
  derived and/or modified sequence
atggagcccaacgacagcaccagcaccgccgtggaggagcccgacagcctagaggtcttagtcaaaactctggacagtcagacgcgcactttcatcgtcggcgcccagatgaacgtgaaggaattcaaggagcacattgctgccagcgtgtcaatcccgagtgaaaagcagaggctgatctaccagggccgagtgctgcaggatgataagaaacttcaggaatacaatgtgggcggaaaggtcatccatttggtcgagagagcccccccccagacccacctccccagcggcgcaagttcgggtaccgggagtgctagcgctacacacgggggaggatcccctcccgggacccgaggacccggcgcttctgtccacgatcgaaacgccaattcttacgtaatggtcggaacgtttaacctaccatccgacggaagcgccgttgacgtccatatcaatatggaacaggcacctatccagagcgaacctcgcgtgcggctagtaatggcgcagcatatgatacgagacatccagactttgctgagcagaatggagactctgccttatctgcaatgcagaggtgggccacagccacagcattctcagccacctcctcagccgcctgccgtaacgccggaaccagtggccctaagctcgcagacctcagagcctgtagaaagcgaggcccctcctagagagcccatggaggctgaggaggtcgaagagagggcccctgcacagaatccagagttgactcctggtcccgctcctgctgggccgaccccagctccagagaccaacgcaccaaaccaccccagcccagctgaatatgttgaagtgctacaggagttgcaaaggctagagagtcggttacagcccttcctccagcgctactatgaagtcctgggagccgctgcgacaacagactacaacaacaatcacgaaggccgtgaagaagaccagagactcatcaacctggttggcgagtccctgagactgctgggcaacacttttgtcgcgctgagcgacttgcggtgcaatttggcttgcacacccccgcggcacctccacgtggtccggccgatgagccactatactactccaatggtgctgcagcaggctgccatcccaattcaaatcaacgtgggtactaccgtgaccatgactggaaatggaacaaggccacctcccacccccaatgcagaggcacccccaccagggccaggtcaagccagttctgtggctcctagctcaaccaatgttgaatcttcggctgagggtgcgccacctcccggcccagccccccctccagctaccagccaccctagggtgatccgtattagccaccaaagcgtagagcctgtggtgatgatgcatatgaatatccaggatagcggcacccagcccgggggagtgcctagcgcaccaacaggacccctcgggcccccgggacatggtcagacactgggccaacaggtgccaggcttccctactgcccctacacgcgtggtaatagccagaccaacacccccccaagctaggcctagccatccaggaggcccccctgtaagcgggaccctgcagggagccggattgggcacaaacgcatccctggctcaaatggttagcggtctggttggacaactcctgatgcagccagtgctggtagcgcagggcacaccgggaatggcgccgcccccggcacctgccacagccagcgcaagtgctgggaccaccaacacggcgactactgccggccccgcccctggaggacccgcgcagccacctcccacccctcaacctagcatggccgatctccagttttcacaacttctcgggaacctcctggggcccgcaggccccggtgccggcggaagcggtgtcgctagtcccacgatcacggtggccatgccaggcgttcccgcgttccttcaggggatgaccgatttcctgcaagccacacaaactgccccgcctcccccgccaccccctccaccacctcctcccgcacccgaacaacagaccatgcctccccctggctcaccgagtggcggagctggcagccccggtggcctagggttggagtccctttcaccggaattttttaccagcgtggtccagggcgtgctgtccagcctgcttggctcgctcggagctcgtgctgggtcatccgagtcaatagcagcgttcattcaaaggctaagtggatctagcaacatctttgaaccaggcgctgacggtgcactgggctttttcggcgctctgctcagcttgctctgtcagaatttctcaatggtggatgtggtgatgcttctccatggtcacttccagccccttcagaggctacaaccacaactacgctccttctttcaccagcattatttaggaggccaagaacccaccccttcaaacatcaggatggccacacataccctcattacaggtttggaggagtatgtgcgggaatcattctctctcgtccaagtgcaacccggggtagatataattagaacaaaccttgaattcctgcaggaacaatttaattccattgccgcccatgtgcttcattgcaccgactctgggtttggcgccaggctgctagagctgtgcaatcagggcctcttcgagtgtctggctctgaacctccattgcttaggcggccagcaaatggaattagcggcggttatcaatggaagaatcaggcggatgtcacgtggggtgaacccctccctggtgagttggctaaccaccatgatgggattgcgactgcaggtcgtactggagcatatgccagtgggtcctgatgccatcctgagatacgtgagacgagttggcgatcctccgcagccgctgccagaagaacccatggaagtgcagggcgccgagcgcgccagccctgagccccagcgggagaacgccagcccagcccccgggaccaccgcggaagaagccatgagtaggggcccacccccagcgcccgaagggggatcccgtgatgagcaggatggtgcatctgccgaaaccgaaccatgggcagccgccgtccctcccgaatgggtgccaatcatccagcaggatattcagtcccagcgaaaggtcaagccccagcctcctctaagcgatgcctatctgtctggtatgccggctaagcgtagaaaaacaatgcagggcgaaggcccccagctactgctgtctgaggccgtgagtcgcgccgctaaagctgctggcgcgaggcccctgacatcaccagagtccctttccagagatctggaggcccccgaagtgcaggagagttatcggcaacagctccgaagcgatatacagaagaggctgcaggaggatccaaactattccccacaacgatttccaaacgcacagcgtgcttttgctgatgatccatag

SEQ ID NO: 148329 - DNA, 3399 bp, Artificial Sequence
  derived and/or modified sequence
atggagcccaacgacagcaccagcaccgccgtggaggagcccgactcactggaagtgctggtgaaaacactagactcacaaacgagaacattcatcgttggtgctcaaatgaacgtcaaggagttcaaggagcatattgcagctagcgtctctatccctagcgagaaacagaggctgatttaccagggtagggtgttacaggatgacaaaaagcttcaggaatacaatgtgggtggaaaagttattcatctggtcgagcgagcaccaccgcaaactcatctgccatccggagcttcctccggtactggcagcgccagcgccactcatggtgggggcagtccccccggtacacgaggaccaggcgcttctgttcatgatcgaaacgccaactcttacgtcatggtcggcactttcaatctccctagcgacggatcagctgttgatgtgcatattaatatggagcaggcacctatccaatccgagccacgcgtccggctggttatggcccagcacatgatccgggacatccagacacttctgagtaggatggagacgctgccctaccttcagtgccgcggaggaccacagccgcagcactcacagccaccaccccaaccgccagccgtgacgcctgagcctgttgctctctcttcccagacatcagagcccgtggagtctgaggccccgccccgagaaccaatggaggccgaggaagtcgaggaacgtgcgccggctcagaacccggagctcactccaggccctgccccagctggtcctacacctgccccagaaacaaatgctcctaatcacccttcgcctgcagaatatgtggaggtactccaggaattacaaaggcttgagtctagattgcaaccttttctgcagcggtactacgaggtgctcggagctgctgccaccaccgattacaataataaccatgaaggcagggaggaggaccaacggctaatcaacctggttggtgagtctcttcggttactgggaaacacttttgtggcactctccgatttgaggtgtaacctggcatgtacaccgcctcgtcatctgcatgtagtgcggcctatgagccactatacgactccgatggtgcttcagcaggccgcgattcctattcagataaacgtgggaactacagtgaccatgacaggaaacggaactagacccccccccacccctaacgctgaggcccctcctccagggcccggacaggccagcagtgtggcaccgtccagcacaaatgtggaatcctctgctgaaggtgcgccgcctccaggacccgcacccccccccgctacaagtcacccacgagttataagaattagccaccaatcagtagaaccggttgttatgatgcacatgaacattcaggattccggcactcaaccagggggcgtgccttccgcacccactggacctctcggccctcccggacacggccagacgttaggacagcaggtgcctggattccccaccgcacccacgagggtcgttatcgcacggcctacccccccgcaagctcgaccttcccaccccggcgggccccccgtgtccggcacgttgcagggagccggactgggcacgaatgcctccctggcacagatggtgtccggacttgtgggacagcttctcatgcagcccgtactcgtggcacaagggacgccagggatggcccctccccctgctccggccaccgcttccgcatctgccggaaccactaacactgctacaacggctggtcctgcccccggtgggcccgcacagcctccacctactcctcagccttctatggctgacctgcagttcagtcagctccttggaaacctacttgggcctgctggacccggcgccggggggccaggcgtggccagccccactatcacggtagccatgccgggcgtcccggcatttctgcaggggatgacagacttcctccaggcaacacagacggctccaccacctccacccccccccccacccccacccccggcaccagagcagcagactatgccaccgccagggagcccttccggtggcgcaggatctcccggggggctcgggctggagtcactcagcccagagttctttacctccgtcgtacaaggcgtcctgtcctcgttgttgggcagtcttggggcacgtgctggatctagtgagtcaatagccgcctttatacagaggttgagcggatcgagtaatatctttgaacctggagctgacggcgcattaggcttctttggggcactactctctctactttgtcagaacttctctatggtggacgtggtgatgctcttgcacgggcacttccagcctctccagcgactccagcctcagctgagaagctttttccatcagcactatctgggcggccaggagcctaccccttccaacatacgaatggcgactcatactctgattactggccttgaggaatatgtgcgagagtccttctccttggtacaggtacaacctggcgtggatattatccgcacgaacctggagttcctgcaggagcagttcaattctatagctgctcacgtattgcactgtactgactccgggttcggcgccagactgttggagctgtgtaaccaggggctctttgaatgccttgcgctgaacctgcactgtctcggaggccagcaaatggaactggcggctgtgatcaacggaagaatcaggagaatgtcccgcggtgtaaaccctagccttgtgtcctggttgaccaccatgatgggattgcggctgcaagtcgtgctggagcacatgcctgtcggccctgacgcaatcctgcggtacgtgagaagagttggggacccacctcagccgctccccgaggagccaatggaagtacagggggctgaaagagcatcaccagagccacagcgtgagaacgcatcgcccgctcccggcactactgcagaggaggccatgtctcggggcccccctcccgcccctgagggcgggtcccgcgacgagcaggatggcgcttctgcagaaacagagccctgggcagcagccgtcccgcctgagtgggtacctataatccagcaggatattcaatcccaacggaaggtcaaaccgcagcctcctctgtctgacgcttatctgagtggcatgcctgcaaaaaggcgcaagaccatgcagggcgaaggccctcaactcctcctgtccgaagcggtgtcacgcgcggccaaagctgcaggggcaaggccactcactagtccagagagtctgagtcgggacctggaagcccccgaggtgcaggagagttacaggcagcagctgcggagcgacatccagaaacgtctacaggaagatcccaactattcccctcaacgcttccctaatgctcagagagccttcgcagacgacccttag

SEQ ID NO: 148330 - DNA, 3399 bp, Artificial Sequence
  derived and/or modified sequence
atggagcctaacgattcaacctccaccgccgtagaggaacccgatagcttagaagtgcttgtgaaaacccttgatagtcaaactagaacatttatcgttggagcgcagatgaacgtgaaagagttcaaggagcatattgcagcctccgttagcataccttctgagaagcagagactcatttatcagggacgtgtgctgcaggacgacaagaagctgcaggagtataacgtcggagggaaggttatccacttagtcgagcgtgcccctcctcagacgcacctgccctctggcgcatcatccggaacaggaagtgctagcgctactcatgggggtggcagtcccccaggaacgagaggacccggagcctcggttcacgacagaaacgctaactcctacgttatggtagggaccttcaaccttccatcggacgggtccgccgtggacgtccatatcaacatggaacaggcgcctatacaatccgaaccccgtgtgagactcgttatggcacagcacatgattcgtgatattcaaacactcctgtctagaatggagacactcccttacctccaatgtaggggtggccctcagccccagcatagccagccgccaccccagccacccgcagtaacgcccgagcctgtggccctgtccagccagacatcagaacctgtagaaagcgaggccccacctcgtgagcctatggaagcggaggaagtggaagaacgcgctcctgcccaaaaccctgagctcacgcccggtcccgctcccgctggtcctactccagcaccggaaactaatgctcccaatcatccatcccctgctgaatacgtggaggtgctgcaagagctgcagaggctcgagtctcgtcttcaaccttttttgcagagatactacgaggtgcttggcgcagccgcaacaacagattacaacaacaatcatgaagggagagaggaagaccaacgtctgattaacttggtgggggagagccttaggctgttgggaaatacctttgtggccttaagcgacctgcgttgcaacctcgcctgtaccccccctcgtcacctgcacgtggtgcgtccaatgagtcattacacaactccaatggtccttcaacaggcagccatccctatccagatcaatgtgggcaccaccgtaacaatgactggtaacggcaccagacctcctccgacccccaacgctgaagccccaccacccggaccaggccaggcatcatcggtagccccaagctcaaccaacgtggagagctccgcggagggtgcacctccccctgggccagcaccccctcccgcaacatcccacccccgtgtgatccgcatctcacaccagtccgtcgagccagtggtaatgatgcacatgaatatccaggatagtgggacccaacccggaggcgtgccttctgcccctactggccctctggggccacctggacacgggcaaacattgggacagcaggtccctgggtttcctactgcacccacacgtgtggtgatcgccagacccactcctcctcaggcgcgacccagtcaccccggtggacccccagtgtctgggaccctgcagggggcaggtctcggaaccaacgccagtctcgcgcagatggtgtccgggcttgtcgggcagcttttgatgcaacctgtcctggtggcccagggcacccccggtatggccccacctccagctcccgctaccgcgtcggcctccgccggaaccacaaacacagccaccacagccggacccgcacctgggggacccgcacagccaccgcctacaccacaaccatctatggctgatctccagtttagccaactccttggaaacctgctgggcccagccggaccgggagcgggtggttcaggagtggcatccccaacaatcaccgtggccatgcccggagtgcctgctttcctccagggaatgaccgacttcctgcaagcaactcagactgctccacccccacccccacctccgcctcctccccctcccgcacctgagcagcagaccatgccccctcccggttcaccctccgggggagccggaagccctggcggactcggattagagtcactctcgcccgaattttttacctccgtggtgcagggggtgctgagcagccttctgggctctctcggcgcaagagctggtagcagcgagagcatcgccgcatttattcagagactgagcggatctagtaacatattcgaaccgggagcagacggagctctgggattctttggagcactccttagtcttctgtgccagaacttctcaatggtggacgtagttatgctcctacacggacactttcagcccctccagaggttacaaccccaactgcgttctttctttcaccagcactacctgggcggacaagaacccactccctctaatatcaggatggcgacacacactctgattaccgggcttgaagaatacgtccgcgagtcattcagcctcgtccaggtccaacctggcgttgacattattaggacaaatttggaattcctacaggagcagtttaattctatagctgcacacgtgctgcactgtaccgattcaggctttggcgcaagattgctagagctgtgtaatcaagggctctttgagtgcttggccttaaatttgcattgcttgggcggacagcagatggagctcgcggcagtgattaatggaagaatcaggaggatgtcaagaggggtaaacccttctttggtttcctggctgacaaccatgatggggctgcggctccaggtcgtgctagagcacatgccagtaggcccagacgcaattctgcgatacgtacgcagggttggcgacccaccccagccactgcccgaggagccgatggaggtgcagggagccgaaagggcaagccctgagcctcaacgagaaaatgccagcccggctcctggaactactgcagaagaagccatgtcaagaggccctccacctgctcccgagggtggatctcgtgacgaacaggacggggcaagtgctgaaactgagccatgggccgctgctgtcccccctgaatgggtccctataatacagcaggatatccagagccagaggaaagtgaaacctcagccccctctatccgacgcatacttgagtgggatgccggcaaagcggaggaagacaatgcagggcgaagggccacagcttcttttgtcagaagccgtctctcgcgcagcgaaggcagcgggagcaagaccactgacaagcccagagtcactgagcagagatttggaggctcctgaggtgcaagagtcttaccggcagcaactacgatcagatattcagaaacgactccaggaggaccccaattatagccctcagagatttccaaatgcccagcgggcatttgccgatgacccatag

SEQ ID NO: 148331 - DNA, 3399 bp, Artificial Sequence
  derived and/or modified sequence
atggagcccaatgactctacatctaccgcagtggaagaaccagactctctggaggtgctggtgaagactcttgactcacaaacccggacattcatcgttggcgcacagatgaatgttaaggagttcaaggagcacatagccgcatccgtcagtattcccagcgaaaaacaacgactgatataccaaggcagagtcctgcaagatgataagaagctgcaggaatataacgtcggaggaaaagtcatacacttggtcgaacgagctccacctcaaacccacttgcctagcggcgcatccagcggcacaggctccgccagtgcaacccacgggggaggcagtcctcccggaactcggggtccgggtgcctctgtgcacgatcggaatgcgaattcatatgtgatggtgggaacttttaacctgccctctgatggcagtgccgtggatgttcatatcaatatggaacaggccccaatccagtccgagccacgtgttaggctggtgatggctcagcacatgatccgcgatattcaaaccctgctgagccggatggagaccctgccctatttgcagtgtcggggaggcccacagccacagcatagccagcctccacctcaacccccagctgtgacccctgagcccgtggctctgtcaagtcagacatccgagcccgtggagtccgaagcgccaccacgggagccgatggaagcagaagaagtggaagaaagggcccctgcccaaaatcccgagctgactcctggcccagcccctgccggtcctaccccagcgcctgaaaccaatgctcccaaccatccaagccctgctgaatatgttgaagttttgcaagagctgcagcgcctagagtccaggctgcagcccttcctccagagatactacgaagttctcggggcagccgcaactacagactacaataataatcacgagggcagggaagaagatcagagactgatcaacttagtcggtgagtcactgagactcttagggaatacgttcgtcgctctgtccgacctccgatgcaacctcgcctgcaccccaccgagacaccttcatgtggtgaggccaatgtcacactacacaaccccaatggtgcttcagcaggcggcaatcccaatccagattaacgtgggcactactgtgactatgactgggaatggaactagaccccctccaacgcccaacgccgaggctcctccacctggaccagggcaggcgagcagcgtggctccctcttcgaccaacgtggaatcctcagccgagggagccccacccccaggcccagcaccccctcccgctacctcccatcccagagtcatacggatctctcatcagtcggtggagccagtggtgatgatgcatatgaatatccaggactctgggacacaacctggcggtgtcccctccgcacccaccgggcctctgggcccacccggacatggacaaacactcggtcagcaggtgcctggctttccgacggctcctacccgggtggtgatcgctagaccaacaccccctcaggcacgtcccagccatcccggtggccctcccgtttctggaacgctgcagggggctgggttaggcaccaatgcctccctggcacaaatggtgtctggactggtgggacagcttctgatgcagcctgttcttgtggctcaaggtacgcctgggatggcaccccctccagccccagccacagcctcagcttctgctggcaccacaaacaccgctactacagccggtccagctccagggggtccggctcaaccccctcctactccacagccttcgatggccgatctgcagttcagccagctcttggggaaccttctcggcccagctggaccaggggcaggaggaagtggcgtcgctagcccgacgattacagtggcgatgccgggagtacccgcttttctgcagggaatgaccgacttcctgcaggctacccagaccgcccctccccctcctccaccccctccccctccgccaccagccccagagcagcagactatgccacctcccggaagccccagcggaggagcaggcagtcccggagggctcggcctggaaagtctgagtccagagttcttcacatcagtggtgcagggcgtcttgtcatctctgctcggctctctgggtgccagggccggaagttcggaatctatagccgctttcatccagaggctgagcgggagctcaaacattttcgagccaggggcagacggggctctaggtttctttggggcactgttgagtctgctctgccagaacttcagcatggtcgatgttgtgatgctgctccacgggcatttccagcctctccagaggctgcagccccagcttaggtcctttttccaccagcattatttggggggtcaggagccaacacccagcaatatacggatggctacccatacccttatcacgggtttagaggagtacgttagagagtcatttagcctagtccaggtgcaacccggagtcgacatcatccggactaatcttgaattcctccaagagcagttcaattcaatcgccgctcatgtgctccattgcaccgattcaggctttggggcacgcctgctcgaactgtgtaatcagggcctttttgagtgcctggccctgaacttacactgcctggggggacagcagatggagttggcagctgtcattaatgggaggatcagacgcatgtccagaggagtcaatccaagccttgtgagttggctaacaacaatgatgggcctcagacttcaggtggtcttggaacacatgcctgtgggaccagatgcaatcctccggtacgtgagaagggttggggacccacctcagcccctcccagaagagcctatggaagtacaaggtgctgagagggccagcccagagccccaaagggagaacgcttctcctgcccctggcaccacagccgaagaggctatgagccgagggcctccccctgcccctgaggggggttcaagagatgaacaggatggcgcaagcgccgaaaccgagccttgggctgcagcagtgccgccagaatgggttcctatcattcagcaggatatccagtcccagagaaaggtgaaaccacagccccctctgagcgatgcatatctgtcgggcatgcctgcaaaacggaggaaaacaatgcagggcgaggggccacagctgcttcttagcgaggccgtatcccgagccgcaaaagctgctggagctagaccattaaccagccctgagtcactgtctcgcgacctcgaagcccctgaagtgcaggagtcttatcggcagcaactcagaagcgacatccagaaaaggctccaggaggaccctaattactcaccccagcgctttcccaacgcccaacgggcattcgcggatgatccctag

SEQ ID NO: 148332 - DNA, 702 bp, Artificial Sequence
  derived and/or modified sequence
atggaacccaacgatagtacaagcaccgccgtggaagaacctgactctctcgaggtgctggttaaaaccctggatagccagacacgtaccttcatcgtgggcgctcagatgaatgtcaaagagttcaaggaacatatcgcagcctccgtgagtatcccaagcgagaagcagaggctcatttatcaggggagagtgctccaggatgacaagaaattacaagagtataatgtcggaggaaaagtgattcatctggtggagagagcccctccacagacacaccttccatccggagccagtagcggcacaggttctgcttcggcaacacacggcggaggttcacctcccggaacacggggtcccggtgcatccgtccatgacaggaatgccaactcgtatgtgatggtaggtacattcaacctcccgagtgacggatcagctgttgatgtccacattaacatggaacaggcaccgatccagtcagagccccgagttagactggtgatggctcagcacatgattagggatatccagactcttctgagtcgaatggagacactaccctatctgcaatgtcgaggtggccctcagccccaacattcccagccaccaccccagcctcccgcagttactccagagcctgttgcactatccagccagacttccgagcccgtcgagagtgaggccccacccagggaaccgtag

SEQ ID NO: 148333 - DNA, 702 bp, Artificial Sequence
  derived and/or modified sequence
atggaacctaatgattcgacaagtaccgccgtagaggagccagacagcctcgaggtgctggtgaagactttggacagccagacaagaacgtttatagtcggggcacaaatgaacgtcaaagagttcaaggagcatatagccgcaagcgtttctatcccctccgagaagcaaagattgatctatcagggtcgggtcctgcaggacgacaaaaaactgcaagaatataacgttgggggaaaagtgatccatttggttgagcgcgctccaccacagacccacctgccgtctggggcatcttccgggacaggctccgcaagcgccacacacgggggtggaagtccccctggaacccggggacctggagcttcagtgcacgaccgcaacgcgaactcctatgtcatggttggcacatttaatctaccttcagacggctcagcggttgatgtccatataaatatggaacaagcacccatccagagcgagcctcgagtcagactcgtcatggcacagcacatgatcagagacatccagaccttactgtccaggatggagacactcccttacttgcagtgtaggggcggtcctcagcctcaacattcccagccccctccacagcctcccgctgtgaccccagagcctgtggccctaagctcccagaccagcgaacctgtcgaatcagaggctcctcctcgcgaaccatag

SEQ ID NO: 148334 - DNA, 3399 bp, Artificial Sequence
  derived and/or modified sequence
atggagccaaatgattctaccagtaccgccgtggaggaacctgacagtctggaagtcctcgtcaaaacattggatagtcaaactcgtacctttattgtaggagcccaaatgaacgtaaaggagtttaaggagcatatcgccgcttctgtatccatccctagtgaaaagcagcgtctgatctatcagggcagggtccttcaagacgataagaagctgcaagaatataatgttgggggtaaggtaattcacttggtcgaaagggcccctccccagactcacctgccctccggcgctagctccggcaccggctctgcgagtgccacgcatgggggagggtcaccacctgggactcgcggacctggagcctccgtgcatgatagaaatgcaaattcttacgtgatggtaggcacattcaatctgccttctgatgggtccgcagtggacgtccatattaatatggagcaagcccctattcagtccgagccgagggtccggctcgttatggctcagcatatgattcgggatattcagacactgttgagcaggatggagactttgccttacctccagtgcaggggcggtccacaaccacaacacagccagccaccacctcaacctccagcagtaacccctgagcctgtggctctctcttcccagacgagcgaacccgtggagtctgaagcacccccacgggagcccatggaagccgaagaagtagaggagagggcacctgcccagaaccctgagctgacaccagggcctgcacctgcagggcctactccagcccctgagacaaatgcacccaaccacccctcccccgcagaatacgtagaggtcctgcaggagcttcaaagactggaaagcaggctgcagcccttcctgcagagatactacgaggtgctaggtgccgcagccacgacagactacaataacaatcatgaggggagggaggaggaccagcgcctgattaacctggtcggcgagtccctccggcttcttggcaacacgttcgtggcgttgagcgacttacgctgcaatctcgcctgtaccccccctcgccatctgcatgtcgtgcggcctatgagccactacacgactccgatggtcctccagcaagcagctattccaatacagattaatgtcggcacgacggtgaccatgactggaaacggcaccagaccacctcccaccccgaatgcagaggcgccacctccgggacctggccaggcttcctcagtagcacccagcagcaccaatgtagagtctagcgctgagggggctccaccaccagggccagcccctcccccagccacatcacatccaagggtgattcggattagccatcaatctgtggaaccagtcgtgatgatgcatatgaatatccaggactcaggcacgcagcccggaggtgtcccctcagcccctacgggtcccttgggaccacccggacacgggcaaaccctcggtcaacaggttcccggtttcccaaccgctccaacccgagtcgtcatcgccagacccacgccccctcaagctcgcccttcccacccaggaggaccacctgttagtggcactctgcaaggcgcaggactaggaactaacgcttcgttggcacagatggtgtcgggtctagtggggcagcttctcatgcagcccgttcttgttgcccagggcacacccggaatggcaccacccccagctccagcaaccgcttctgcttccgccggtaccactaataccgcaaccactgccggaccagctccgggaggtcctgcacagcccccaccaacaccccagccaagcatggccgaccttcaattctcacagctgctgggtaatctactcggtccggctggtccgggagccggtggtcccggagtggccagccctacaattaccgtcgcgatgccaggcgtgccagctttcttgcagggcatgacagacttcctgcaggcaacccagaccgcccctcccccaccgcctccaccaccccctccacctcctgcacccgaacagcagaccatgccaccacccggtagcccatctggtggagccggatcacctggtgggctggggttagaatccctttcacctgagtttttcacatccgtcgtgcagggagtgctgtcatctctcttaggatccctgggtgcgagggctggctccagcgagtctatcgcggcattcatccagaggctctctggaagctcgaatatctttgagccaggggcagatggtgccttaggattcttcggcgctctcctgagtctcctctgccaaaacttctctatggtcgacgtagtgatgctcctacacgggcatttccagcctctacagaggctccaaccacaattacgcagttttttccaccaacactatctgggtggacaggaacctacaccctcgaatatccgcatggccacccacaccctgattactggcctcgaggaatatgtgcgggagagtttttctctggttcaggtccaacctggcgtagacattataagaactaacttggagtttctgcaagagcagtttaacagtattgccgcacacgtccttcactgcacagacagcggctttggtgctcgcctgctggaactttgcaatcaaggccttttcgaatgcctggctctaaacctacactgtctggggggtcaacagatggagctggccgctgtcatcaatgggagaatcaggaggatgtctcgtggagtgaatccaagtttggtgagctggctgacgaccatgatgggactgaggctgcaggtggtgttggagcatatgccggtgggccctgacgccatcttaagatatgtgcgcagggtgggagaccctccccagcccctcccagaggagcccatggaagtgcagggagccgagcgggctagccctgagcctcaaagagaaaacgctagtccagctccagggaccacagcagaggaggccatgtcacgcggaccaccacccgctcctgaagggggttcgagagatgagcaggacggcgcatcggcagagacggaaccttgggcagcagcagtccctcctgagtgggtgcccataatccagcaggatattcagtcccagcgaaaagttaagcctcagccaccactgagcgatgcctatctgagtggaatgcccgctaaacgcagaaagacgatgcagggtgaagggccacagctgctgctgagtgaagccgttagtagggcggcaaaggctgccggagctcggccactgaccagtccagagtcattgagtagggatctcgaagccccagaggtgcaggagtcatatcgacagcagcttaggagcgacatccagaagaggctccaggaggatccaaactactctccgcagcgcttccccaatgcccagcgggctttcgcggatgatccctag

SEQ ID NO: 148335 - DNA, 702 bp, Artificial Sequence
  derived and/or modified sequence
atggagcccaacgattcaacaagcaccgctgtggaagagcccgatagcctggaggtcctcgtcaagacattggacagccagaccaggactttcatcgttggagcacagatgaatgtaaaggagttcaaagaacatatcgcagctagtgtgtccattccctccgagaaacagagattgatttatcaaggcagagtccttcaggatgacaagaaattacaagagtacaacgttggaggcaaggttatacacctggtggagcgggcacccccacaaacacatctgccctctggagctagctcaggtactggaagtgccagcgctacacatgggggaggcagcccacctggcacgcgcggacccggagcatctgtgcatgacaggaacgctaatagctacgttatggttgggacattcaacctcccttctgacggatcagccgtggatgtgcatattaacatggaacaagctcctatccagtcggagccacgggtaagactcgtaatggcgcagcacatgatacgcgacattcagacgctgctgtcaaggatggaaacccttccatacctgcagtgccgcggtggaccacaacctcagcactcccagccaccgccacagcccccagcagtgacacccgaacccgtggctttaagtagccagacgagcgaaccagtggagtccgaagccccaccaagggaaccatag

SEQ ID NO: 148336 - DNA, 3399 bp, Artificial Sequence
  derived and/or modified sequence
atggaacctaacgatagcacctctacagctgttgaggagccggattcactagaagtattagtgaagaccctagatagtcagacacggacgttcattgtcggcgctcagatgaacgtgaaggagtttaaggagcacatagcggcaagcgtctccatccctagtgaaaagcagaggctgatctaccagggtagggtattgcaggatgacaaaaagttacaggagtataacgtgggaggaaaggtaatacacctggtggagcgcgctccaccacaaacccatctgccaagcggagcatcttccggaactggctccgcttctgccacccatgggggagggagccccccaggcacgagaggacctggagcctcagtccacgacaggaacgccaatagttatgtgatggtgggcaccttcaacctgccatctgatggctctgctgtcgacgttcatattaatatggagcaagcgccaatccagtccgaacctcgggtgagactggtgatggcacagcatatgatccgggatatccaaactttactgtcgaggatggagacattgccgtaccttcagtgcagaggcggtccgcagccccaacatagccagccacctccccagcctcctgccgtcaccccggagcccgtggcgctttcatcccagacaagtgagcctgttgagagcgaggctccccctcgtgaaccaatggaggcagaggaggttgaggaacgcgcacctgcccaaaaccctgagctgactcctggacccgctcctgccggacccacccctgcacctgaaacaaatgccccaaatcaccccagtcctgctgagtatgttgaggtgctgcaggaactgcagcgtctcgagagcaggctacagccgttcctccagaggtactatgaagtgttaggagccgcagccactactgattataacaataaccacgagggtcgcgaggaggatcaacgtctgattaatctggtcggcgagtcactgagactgctcgggaacacctttgtcgctttgagcgaccttaggtgcaacctggcctgcactccgcctcgacatctgcatgtggtcagacctatgtctcactataccactccgatggtgttgcagcaggcggcaattcccattcagatcaacgtcggaaccacagtaacaatgactggaaatggtacacgccctcctccaacccctaacgccgaagccccacccccaggcccagggcaagcaagcagcgtagcaccatccagtaccaacgtggaaagcagtgccgagggagcacctccccctgggcctgcaccacctcccgcaaccagccatccccgtgttatccgcattagccatcagagcgtggagccagtggtcatgatgcatatgaacatccaggactcaggaacacagcctggcggagtcccatccgccccaaccgggcctttggggccacccggacatggtcagaccctcgggcagcaagtccctgggttcccaactgctccaactcgggtcgtgatagctcggcctactccccctcaggccaggccttcacacccagggggtcctccagtgtctgggaccctgcagggagccggtctagggaccaatgctagtctagcccaaatggtgtctggactcgtcgggcagctcttgatgcaacccgtgctggttgcccaaggtactcctggaatggcaccccctccggctcccgctaccgcttccgcttcagccggtaccacaaacacggcgaccaccgccggaccggctcctgggggaccagcccaacctcctccaactccccagccttcaatggcggatctccagttctcacagctgctcggcaaccttctcgggcctgctggtcctggtgctggaggaccaggggttgccagccctaccattactgtagccatgcccggagtgcctgcttttttgcagggcatgactgactttcttcaagcaacccagaccgcccctccccctcctccccctcctccgccacccccacccgctcctgagcagcagacaatgccacctccaggcagcccttccggcggagctggctcccctggcggattgggcttagaaagcctgtctccggagttctttaccagcgtggtacagggtgttctaagttccctccttggcagcctgggggctagggctggaagcagcgagtccatcgccgcatttattcagcgcctgtcgggttcaagcaacattttcgaacctggggcagacggggctcttggattcttcggggcactcctatctctcctctgccaaaatttctctatggtggatgtggtgatgctcctacatgggcacttccaacccttgcagagactgcagccacaattacggtccttttttcatcaacattatcttggaggccaagagcctacacctagtaacatcaggatggcaacccacaccctgatcactggcctggaggaatatgtcagagaaagcttctcccttgtgcaagttcagccaggggttgatataatccgcactaacttggagttcctgcaggagcagtttaattccattgctgctcatgtgctccattgcactgattcgggtttcggagcgaggttgctcgagctttgtaaccagggtctattcgaatgtctggctttgaatctccactgcctgggcggtcaacaaatggaacttgcggcagttatcaacggtcgaatccgccgtatgagtaggggcgttaacccctctctagtgtcttggttaaccaccatgatgggcctgagactgcaggtggtgctggagcacatgccagtgggccctgatgctatactccgatatgtacgtagagttggcgacccgccacagcctcttcctgaagaacccatggaggtgcaaggcgctgagcgggctagtccagagccacagagagagaacgcatctcctgccccaggcaccacagctgaagaggctatgagccgcggaccgcctcctgccccagaaggcggaagcagggacgagcaggatggcgctagtgccgaaaccgaaccctgggcggctgccgttcccccagagtgggtccccatcattcagcaggacatccaatcgcaacgtaaagtgaaacctcagcccccattatcagatgcctatctttccggaatgcccgcaaaacgacgaaagaccatgcagggtgagggcccacagctgctcctttcggaggcggtgagccgagccgctaaggctgctggcgctcggcctctgacctctccagagtcactgtcacgggatttggaggcacccgaggtccaggagagctaccggcaacagctgaggagcgatatacagaagcgattgcaggaggatccaaattatagcccccagcgtttccccaatgcacaaagagcattcgccgacgacccctag

SEQ ID NO: 148337 - DNA, 702 bp, Artificial Sequence
  derived and/or modified sequence
atggaacctaacgactctacttccactgcagtggaagagcctgactctctggaggtgctggtaaagacgctggactctcagacacgaacgtttattgttggggcacagatgaacgttaaggagtttaaggagcacatcgcagccagtgtctctatccctagtgaaaagcagaggttgatttaccagggtagagtgctccaagacgataagaagctgcaggagtacaacgtgggcggaaaggtgattcatcttgtcgaacgagcccctccccagacccacctgccatccggggcatcgtcgggcacagggagtgctagtgctactcacgggggaggaagcccgccagggacacgcggacccggagcttccgtgcatgacaggaacgcgaattcctacgtaatggtagggacgttcaacctgccttccgacggctctgcagtggacgttcacataaatatggagcaggcacctatccagagtgagcccagagttcgcttggtgatggctcagcatatgatcagggatattcaaacacttttaagcagaatggaaaccctaccctaccttcagtgccggggtgggcctcagccccaacactcccagccccctcctcagcctcctgctgtgactcccgaacctgtggctctatccagtcagacgtctgaaccagtcgagtcagaggcacccccaagggaaccctag

SEQ ID NO: 148338 - DNA, 702 bp, Artificial Sequence
  derived and/or modified sequence
atggagcccaacgattctaccagcactgccgtagaggagccagactcactggaggttctcgtcaaaactctcgacagtcagacacggacttttatcgtaggggcacaaatgaatgtcaaagaattcaaagagcacatcgccgcaagtgtcagcattccttcagaaaagcagaggctgatttatcagggcagggtcctgcaagatgacaaaaaactacaggaatacaatgttggcggtaaagtgatccacctcgtggagcgcgcacctccacagacccacctgccaagtggcgcatcctccgggaccggaagcgctagtgccacccatggaggtgggtctccccctgggacacggggaccaggggcaagcgtgcacgataggaatgctaattcatacgtgatggttggtaccttcaatctgccatcggacgggtccgcagtcgatgttcatatcaacatggagcaagccccaattcagagtgaaccgagggtgcgcttggtgatggcccaacatatgattcgggatatccagacgttgttgtctcggatggaaaccctcccatatttgcagtgtcggggaggacctcagcctcagcactcccagccaccacctcagccacccgcagtgactcccgagcccgttgctctgagctcacagacctcagagcctgttgagtccgaggctccaccgcgagaaccttag

SEQ ID NO: 148339 - DNA, 702 bp, Artificial Sequence
  derived and/or modified sequence
atggagccgaatgactctacttccacagcagttgaggaaccagatagcctggaagtactcgtgaaaactctagattcccagacaagaacatttattgtaggcgctcagatgaatgttaaggagtttaaggagcatatcgccgcatcagtgtctataccctcagagaaacaacgtttgatttaccagggtcgggtcctccaggatgacaagaaactgcaggaatacaacgttggtggaaaagtgatccatctggtggagcgcgctcctcctcaaacccacctcccatcaggcgcatcttctggcaccggcagcgcaagcgcaacacacggcggtggcagcccccctggtacacggggtcccggtgcctcagtgcatgatcgcaacgccaactcttatgtcatggtgggcacattcaacctgcctagtgacggatctgccgtggacgttcatatcaacatggagcaagctcccatccagtcggagccgagggttcggttggtgatggctcagcatatgatacgcgatatccaaacattattgagcaggatggagactctgccttacctgcagtgcagagggggtccacaaccgcaacattctcaaccccctccgcagcctcctgcagtcactccagagcccgtggccctcagttctcagaccagtgagcctgtagagagcgaagccccaccccgtgagccctag

SEQ ID NO: 148340 - DNA, 702 bp, Artificial Sequence
  derived and/or modified sequence
atggagcctaacgactctacctccacagcggtggaggaacctgacagcctggaggtgttggttaagactctagacagccaaaccagaacgttcatcgtcggcgctcaaatgaacgtgaaagaattcaaagagcacatcgctgcttccgtgtcgattccgtctgagaagcagaggctgatataccaaggtcgggttctgcaggatgacaaaaagctacaagagtacaacgtgggaggtaaagttatccatttggtggaacgggcacccccacagactcacttgcctagcggcgcatctagtggtacaggatctgcatccgctacccatggaggagggtcccccccaggaacaagaggccctggggcttccgtgcacgatagaaatgctaactcatatgtcatggttggcacctttaatcttccatccgatggatccgccgtggatgtgcatataaatatggagcaggctccaattcagtctgaaccacgggtgcggttggtgatggcccagcacatgattagggacattcagacccttctctcacgcatggaaacactcccctacctgcagtgtagagggggaccccagccacagcatagccagcctccaccccagccacccgcagtgaccccagagcctgtcgctctgtcatcccaaactagtgagcctgtggaaagcgaagcccctcccagggagccatag

SEQ ID NO: 148341 - DNA, 3399 bp, Artificial Sequence
  derived and/or modified sequence
atggagcccaatgactcgacgtccacggccgtggaggaaccagactcactcgaggtcttagtgaagacacttgatagtcagacgagaacatttattgtgggtgcacagatgaacgtgaaagagttcaaggagcacatcgccgcttccgtttctatccccagtgagaagcaacgtttgatataccaaggacgcgtgctccaggacgataagaagttgcaggagtataacgttggcggaaaagtcatccatctggttgagcgggctcctccacaaacgcatctaccgagtggcgcttcctccggtacaggctctgcaagtgcaacgcacggaggaggaagcccacccggtaccagaggccctggcgctagtgtccacgatcgtaacgcaaatagctatgtcatggttgggacttttaatcttcctagcgacgggagcgccgtggatgtgcatatcaacatggaacaagctccaatccaaagcgaacccagagtccgactagttatggcccaacacatgatcagggatatccagaccctccttagccgtatggagacgctgccatacctgcagtgccggggtggaccgcagcctcagcattcgcaacccccacctcaaccccctgcagtgacgccagagcccgtagctctttctagccagacctctgagcctgtcgagagcgaagcgcctccaagggagccaatggaagcggaagaagtcgaggaaagggccccagcgcagaacccagaactgacaccaggcccagcccctgccggacctaccccagcgcctgaaactaacgcccctaaccacccgtcccctgccgagtacgttgaagtcctgcaggaactccagaggctcgaaagcaggctgcaaccctttctccaacggtattacgaggtgctcggtgcggctgccacgacagattacaacaataatcacgagggccgagaggaagatcagcggctgattaatctggtgggtgaaagtttgcgcctgttaggtaacacattcgtggcgctgtccgacctcaggtgtaatctggcctgtacacctcccagacatctccacgtggtccgccctatgtcacactatactactccaatggttctccagcaagcggctatcccgatccagatcaatgtggggacgacagttacgatgactgggaacggcactcgccctcccccaactcctaacgcggaggcccctccaccaggccctggtcaagcaagttcagtagcaccttcctctaccaatgtggagtcttccgcggagggggctcccccacctggtcccgcaccacctccggcaaccagtcatccaagggtgatacggatcagccatcagtccgtggaacctgtcgtaatgatgcacatgaatatacaggacagtgggacacaacccggaggtgtgccctcggcgcctacaggacctctcggtcctccaggacacggacagaccctgggccagcaggtacctggtttcccgacggcccctacgagagtggtgatagccaggcctactcctccacaagcacggccatcccacccaggtgggccacccgtgagcggaactctgcaaggcgctgggctcggaaccaacgcaagtctcgcccagatggtgtcggggctggtgggtcagctgctgatgcagcccgtactggtcgcccagggtacacctgggatggcgcctccccctgctccagccacagccagcgcctccgcaggtactacaaacacggctactaccgccggtccggcaccaggcggaccagctcagccccctccaaccccccagccctctatggctgatctgcagttctcccagctactcgggaatctcctggggcctgccggaccaggtgcaggcggaagcggagtagcctcacccacaatcaccgtcgcaatgccgggtgtccctgcttttctacaggggatgactgactttcttcaggccacacagactgctccccctccaccaccacccccaccccctccccctcctgcacctgaacagcagacaatgcccccacccggatccccttctggcggagcaggcagtcctgggggactagggctcgagtcacttagtcctgagtttttcacatccgtcgtgcagggagtgctgtcatccctactcggtagcttgggagccagggcaggctcaagtgagtccattgcagcgtttatccaacggctcagtggcagttcgaacatctttgaacctggagcggatggggcactgggttttttcggagccctgctttccctgttgtgccagaacttctcaatggtagatgtagtgatgttgctgcatgggcacttccagccactgcagcgcttacagccacagttaagaagctttttccaccagcactacctgggcggacaagaaccaacaccaagtaacattcgcatggcaacacatacccttatcacaggactggaagagtacgttcgggagtcattctccctagtgcaggtgcagcccggagtagacataataaggacaaatctagaattcctgcaggaacaattcaatagtattgcagcacatgtccttcactgcactgactcgggattcggcgcacgactgttagaactgtgcaatcaggggttgttcgaatgcctggctctgaaccttcattgtcttggaggtcagcagatggagttagctgcagttatcaatggacgcatacgccgtatgtcccgcggtgttaaccctagtctggtcagctggttaactaccatgatgggcctaaggctccaggtggttctcgagcacatgcctgtcggtccggacgccatacttcggtacgtccggagggttggggatccccctcagccgctccccgaagagcctatggaagtccagggcgctgagcgcgcttcccccgagcctcaacgggagaatgcctccccagctccaggcacaactgccgaagaggcaatgagtagaggcccaccaccagccccagaaggcggatccagagacgagcaagatggcgcatccgccgaaacagagccatgggctgctgcagtgccccctgagtgggttccaataattcaacaggatatccagagccagcggaaagtaaaaccacagccaccgctgtccgacgcctacctgtctgggatgcccgctaaacgccgaaagaccatgcagggagaagggcctcagcttctactaagcgaggctgtgtcgagggcagctaaggctgcgggtgccagaccccttacttctcccgaaagcttgtccagagacctggaggccccagaagttcaggagagctataggcaacaactccgatctgacattcagaagaggctgcaagaagaccctaactactccccccagcggttccctaacgcccagcgtgcctttgctgacgacccctag

SEQ ID NO: 148342 - DNA, 3399 bp, Artificial Sequence
  derived and/or modified sequence
atggagccaaacgactctacctccaccgcagtcgaggaacccgatagtctcgaggtgctggtgaagactctcgactcccagactaggactttcatagttggcgctcaaatgaatgtgaaggaatttaaagaacacatcgcagcatctgtgtccatccctagcgagaagcagcggcttatctatcaaggccgagtactgcaagatgacaaaaaactccaggaatataacgtgggcggtaaggtcatacacctggtggagcgtgctccccctcagactcatctgccaagcggagcaagctccggcaccggaagcgcttctgccacacacggtggtggaagtccacctggcacaagggggcctggtgcatctgttcacgaccgtaatgccaactcgtacgtgatggtcgggacctttaatcttccctcggacggctcagccgtcgatgtgcatattaatatggaacaagcccctatccagtccgagcccagagttcgcctcgtgatggcccagcatatgatccgcgacatccagacactcctgtcccggatggagactctcccttacctgcagtgccgtggtgggcctcagccacaacacagccagccaccgccacagccccctgctgtcaccccggagccagtggctctgagctctcaaacctcagagcctgtcgagagtgaagccccaccgagagaacctatggaggcggaggaggtggaggagcgcgctcccgcacagaatcccgagcttacccccggtcccgctcccgcaggcccaacacctgcccctgagactaacgctcctaatcacccgtcccctgccgagtacgttgaggtactgcaggagctccagcgcctcgagagccgtctgcagcccttcctgcaaagatattacgaggttctgggggctgccgctactacagattacaataataaccacgagggcagggaggaggaccagagactgattaacctggttggcgaatctcttaggctgcttggcaacactttcgtagccctgagcgacctgagatgcaacttggcctgtaccccccctaggcatttgcacgtggttagaccaatgtctcactacacaacaccaatggtgctacagcaggctgctatcccaatccaaattaatgttggcactacggtgactatgaccggaaatggcacccgaccccctccaacccccaatgccgaagccccacctccaggtccgggacaggctagctccgtagcccctagctcaacgaatgtggaaagtagcgcggagggggctccccctccaggcccagcccctcctcccgctacaagccatccccgtgtgatccggatttcccaccaaagcgtggagcctgtagtcatgatgcacatgaatatccaggattcggggacacagccagggggagttccatctgctcctactggtcccctgggtccccctggtcatggccagacacttgggcagcaggtgccagggttcccgacggctccaacacgcgttgttatcgctaggccaacaccgcctcaggccagaccgagtcacccagggggtccgccagtttccgggaccctgcaaggcgcagggttgggcaccaatgcctcgctggctcagatggtgtcaggcttggtggggcagctgttgatgcagccagtacttgtggcccagggcaccccgggtatggcccctccaccggcaccagccaccgcaagcgccagtgctggcaccacaaataccgcgaccacggcagggccagcaccaggcggaccagctcagccacctccaactccgcagccaagtatggcagatctccaattttcccagcttttaggcaacctgttaggacctgcaggcccaggggctggcggaagtggcgtggcgtcaccgactatcacggttgccatgcccggagttccggcatttctccagggcatgaccgattttctgcaggccacacagacagcacccccaccccctccacctcctccaccgccaccacccgctcccgaacagcagacgatgccacctcccggaagtccctcaggcggtgcgggttctcctggcggattgggcctcgaatcccttagcccagagtttttcaccagcgtggtccaaggagtactctcctccttactggggtccctgggggcaagagcgggaagctctgaatcaatcgcagccttcattcagagactctccggaagctcgaacatattcgaaccaggagccgacggcgcactgggatttttcggtgctttattatccttgctttgccagaacttttctatggtcgacgttgtcatgctactgcacgggcatttccagccgcttcaacgtctccagccccagttgagaagttttttccaccagcactatttagggggtcaggaacccacaccctccaatattaggatggccactcacacccttattacagggctagaagagtacgtcagggaaagttttagtctcgttcaagtccagccaggggtcgacatcattcggaccaatcttgaattcctgcaggaacaattcaacagtatcgcggctcacgtccttcactgcactgactctggtttcggcgcaagactcctggagttgtgtaatcagggattattcgagtgcctcgccctcaatctgcactgcctcgggggacagcagatggaacttgccgctgtcatcaacggcagaatacggagaatgtctcgcggtgtcaaccccagcctcgtctcatggctgacaaccatgatgggccttcggctccaggtggtcctcgagcatatgcccgtaggcccagacgccattctgcggtatgtgagacgggtcggagatccccctcagccactccccgaagaacctatggaagtccagggcgctgaacgcgcatcccccgagccccagagggaaaatgcttccccagccccaggcacaacagcagaggaagcaatgagccggggtcccccaccggcaccagaggggggtagcagagacgagcaagatggtgcatctgcagagacagagccctgggctgcagcagtgccccctgaatgggtccctatcattcagcaagatattcagtcccagcgcaaggtgaaaccccagcctccccttagtgacgcgtacctttctgggatgccagccaagcggagaaaaaccatgcagggagagggccctcaactgctcctttcagaagctgttagcagagcagccaaggccgcaggagcccgtcctctgacaagccccgaaagtttatcgcgcgatctggaggcccctgaagtgcaggagtcttaccgccaacaactgcgctctgacatacagaagcgcctacaggaagacccaaactattctccccagagatttccaaatgctcaacgcgcttttgctgatgacccgtag

SEQ ID NO: 148343 - DNA, 3399 bp, Artificial Sequence
  derived and/or modified sequence
atggagccgaacgattcgaccagcaccgccgtcgaggagcctgattccctggaagtcctagtgaagacattagatagccagacaaggacgtttatcgtcggcgcacagatgaacgtcaaggaattcaaggagcatatagcagcttcagtgtccatcccatccgaaaaacaaaggttgatctatcagggtcgcgttctgcaggatgacaaaaaacttcaggaatacaacgtcggcggaaaggttattcatctggtcgaacgggctcctcctcaaacccacctgccaagcggtgctagctctggcacaggcagtgcctctgcaacccacggaggcggaagcccacccggaacaaggggcccaggcgcaagcgtgcatgatcggaatgccaatagctatgtgatggtggggacctttaatcttcccagtgatgggtctgctgtagacgtccatataaacatggagcaggctcccattcagagtgaaccccgagtgcgcctggtgatggctcaacatatgattagggatattcagacactcctctctcgcatggaaacactcccatatctgcagtgccggggtggaccacaaccgcaacactcccagcctcccccacaacctcctgcggtgacccccgagcccgtggctctgtcgtcccagacctctgaaccggtcgagagtgaggcgcctcctcgggagccaatggaggctgaagaggtggaggagagggcgccagctcagaatccagagcttacaccgggacccgcacctgccggtccgacccctgcccctgagactaatgcaccgaatcatccatcacctgccgaatatgtcgaggtgttacaggagctccagcgactcgaatcacgcctgcaacccttcctgcaaagatactatgaagtgctaggggcagccgcaacgacagactataacaataaccatgaggggcgtgaggaagaccagcggctgatcaatctagtcggggagtcactgcgcctcctggggaatacattcgtcgcactttcagatttacgctgtaacctcgcatgcaccccgcctcggcatcttcatgtagtgcgccctatgtctcattacactacgcccatggtgttacagcaggcagctattccaatacagattaacgtgggcactacagtgacaatgactgggaacgggactcgtccacctccaacacctaacgccgaagctccaccacctgggccagggcaagcctcttcagtcgcccctagcagcactaacgtggaatctagcgctgaaggagctccacccccagggccagcacccccacccgctactagtcacccacgcgttatacgaatctctcaccagtccgtcgagcctgtggtgatgatgcatatgaatattcaggattcagggacacagcccggtggggtgccttcggcccctactgggccactgggcccacccggtcacggccagacactggggcagcaggtccccggtttcccgactgcccctacaagagtggtgatcgccaggcccacccctccacaggccaggcccagccatccagggggaccgcctgtttcgggaactctgcagggggcagggctcggaacaaatgctagcctggctcagatggtcagtggattggtcggacagttactcatgcagcctgtgctggtcgctcagggtacaccaggcatggccccacccccagctccagcaactgcctcagcatcagcaggcaccaccaatactgctacaactgctgggccagcgccaggcggtcccgctcagccccctcccacaccacagccttctatggcagatctgcagttttcacagctgttgggtaatctccttggccctgccggacctggcgctggtggacccggagtcgcctcaccgaccatcaccgttgctatgccaggtgttcctgcttttctgcagggcatgactgacttcctgcaggccactcagacagctccccctccgccaccccctcccccaccgccacctcctgcccctgaacagcaaacaatgccgccacccggaagcccctcaggtggagccggatctccgggtggactgggcctggaatccctgagccctgagtttttcacttctgtcgtccagggagtcctgtcctcactcctcggaagtcttggcgcaagggccggatcatccgaaagtatagcagcatttatccaacggctctcgggcagctctaatatttttgaacccggagccgacggtgcccttggattcttcggcgctcttctgagcctcctttgtcagaacttcagcatggttgacgtggtgatgttgctccatggacactttcagcctctccagcgcctgcagccgcaactaaggtcctttttccaccagcactatctggggggtcaagagccaactccctcaaacattcgtatggctacgcacacacttatcaccggccttgaggagtacgtgcgggagtctttcagcctggtacaagttcaacctggcgtcgatattatcagaaccaatctggaattcctgcaggagcaattcaactccatcgccgctcacgtgctccattgtaccgattccggctttggggctcgattacttgaactctgcaaccagggcttgttcgagtgcttagcccttaacctccattgtctgggtggtcaacagatggagctggcagccgttatcaatggccgaatcagaaggatgtcacggggtgtaaacccttcactggtgtcatggctaaccactatgatggggctcaggctgcaagtggtgctagaacacatgcccgtcggccctgacgccatcctccggtatgtgcggcgagtaggggaccccccacagcctctgccggaagaacctatggaggtgcaaggggctgaaagagcttctccagagccccagcgcgagaatgcatctcccgcaccaggaactaccgcggaggaagctatgtctagaggccctccccctgcccctgagggcggaagccgggacgagcaagatggggcatccgccgagactgagccttgggctgctgcggtcccgccagagtgggttcctataattcagcaggacatccagagtcagcgaaaagtcaagcctcaaccacccctgtccgatgcctacttaagtggaatgcctgctaaacgtaggaagacaatgcaaggggaaggccctcagctcctcctgtccgaagccgtttcaagagccgctaaagccgcaggcgcaaggcctctgacctcaccagagtctctctcccgggatctggaggccccagaggtccaggaatcataccggcagcagttaaggagcgatattcagaagagattgcaagaagaccctaactacagcccccagcgctttcccaatgctcagagagctttcgctgacgacccttag

SEQ ID NO: 148344 - DNA, 3755 bp, Artificial Sequence
  derived and/or modified sequence
ggcgacagcggtggcggctcctcggggtgctcggctccctcccacctaggccggccccggcccgactcgccctcagaaactcactgtttggggctgcggactttctcgtcgtgccccacaaaagtaaagcttggggacctggggggagccggaagtatcgcttcgagatccccaaatactatcggggaaacggaagtggccgtcggtggcaggtttgggggagaccggaagtgacgagacctgtcggccatggagcctaatgatagtaccagtaccgctgtggaggagcctgacagcttggaggtgttggtgaagaccttggactctcaaactcgtacctttattgtgggggcccagatgaatgtaaaagagtttaaggagcacattgctgcctctgtcagcatcccatctgaaaaacaacggctcatttaccagggacgagttctgcaagatgataagaagcttcaggaatacaatgttgggggaaaggttatccacctggtggaacgggctcctcctcagactcacctcccttctggggcatcttctgggacggggtctgcctcagccactcatggtgggggatccccccctggtactcgggggcctggggcctctgttcatgaccggaatgccaacagctatgtcatggttggaaccttcaatcttcctagtgacggctctgctgtggatgttcacatcaacatggaacaggccccgattcagagtgagccccgggtacggctggtgatggctcagcacatgatcagggatatacagaccttactatcccggatggagactctcccctaccttcagtgtcgaggagggccccaaccgcagcacagtcagccgcccccgcagccaccggctgtgaccccggagccagtagccttgagctctcaaacatcagaaccagttgaaagtgaagcacctccccgggagcccatggaggcagaagaagtggaggagcgtgccccagcccagaacccggagctcactcctggcccagccccagcgggcccaacacctgccccggaaacaaatgcacccaaccatccttcccctgcggagtatgtcgaggtgctccaggagctacagcggctggagagtcgcctccagcccttcttgcagcgctactacgaggttctgggtgctgctgccaccacggactacaataacaatcacgagggccgggaggaggatcagcggttgatcaacttggtaggggagagcctgcgactgctgggcaacacctttgttgcactgtctgacctgcgctgcaatctggcctgcacgcccccacgacacctgcatgtggtccggcctatgtctcactacaccacccccatggtgctccagcaggcagccattcccatacagatcaatgtgggaaccactgtgaccatgacaggaaatgggactcggccccccccaactcccaatgcagaggcacctccccctggtcctgggcaggcctcatccgtggctccgtcttctaccaatgtcgagtcctcagctgagggggctcccccgccaggtccagctcccccgccagccaccagccacccgagggtcatccggatttcccaccagagtgtggaacccgtggtcatgatgcacatgaacattcaagattctggcacacagcctggtggtgttccgagtgctcccactggccccctgggaccccctggtcatggccaaaccctgggacagcaggtgccaggcttcccaacagctccaacccgggtggtgattgcccggcccactcctccacaggctcggccttcccatcctggagggcccccagtctctgggacactgcagggcgccggtctgggtaccaatgcctcgttggcccagatggtgagcggccttgtggggcagcttcttatgcagccagtccttgtggctcaggggaccccaggtatggctccaccgccagcccctgccactgcttctgccagtgctggcaccaccaacacagctaccacagctggccccgctcctggggggcctgcccagcctccacccacccctcaaccctccatggctgatcttcagttctctcagcttctggggaacctgctagggcctgcagggccaggggctggagggtctggtgtggcttctcccaccatcactgtggcgatgcctggtgtccctgcctttctccaaggcatgactgacttcttgcaggcaacacagacagcccctccaccacccccacctcctccacccccaccacctgccccagagcagcagaccatgcccccaccaggctccccttctggtggcgcagggagtcctggaggcctgggtcttgagagcctgtcaccggagttttttacctcagtggtgcagggtgtgctcagctccctgctgggctccctgggggctcgggctggcagcagtgaaagtattgctgccttcatacaacgcctcagtggatccagcaacatctttgagcctggagctgatggggcccttggattctttggggccttgctttctcttctgtgccagaacttctctatggtggacgtagtgatgcttctccatgggcatttccagccactacaacggctccagccccagctgcgatccttcttccaccagcactacctgggtggtcaggagcccacacccagtaacatccggatggcaacccacacattgatcacggggctagaagagtatgtgcgggagagtttttccttggtgcaggttcagccaggtgtggacatcatccggacaaacctggaatttctccaagagcagtttaatagcattgctgcgcatgtgctgcattgcacagatagtggatttggggcccggttgctggagttgtgtaaccaaggcctgtttgaatgcctggccctaaacctgcactgcttggggggacagcagatggagcttgctgctgttatcaatggccgaattcgtcgtatgtctcgtggggtgaatccctccttggtgagctggctgaccactatgatgggactgaggcttcaggtggtactggagcacatgcctgtaggccctgatgccattctcagatacgttcgcagggttggtgatcccccccagccacttcctgaggagccaatggaagttcagggagcagaaagagcttcccctgagcctcagcgggagaatgcttccccagcccctggaacaacagcagaagaggccatgtcccgaggtccacctcctgctcctgaggggggctcccgggatgaacaggatggagcttcagctgagacagaaccttgggcagctgcagtccccccagaatgggtccctattatccagcaggacattcagagccagcggaaggtgaaaccgcagccccctctgagtgatgcctacctcagtggtatgcctgccaagagacgcaagacgatgcagggtgagggcccccagctgcttctctcagaggctgtgagccgggcagctaaggcagccggagctcggcccctgacgagccccgagagcctgagccgggacctggaggcaccagaggttcaggagagctacaggcagcagctccggtctgatatacaaaaacgactgcaggaagaccccaactacagtccccagcgcttccccaatgcccagcgggcctttgctgatgatccttagctctttctttgctctatggcccttcctcatcaggggaccgtttcccccctcttccttcacagtatttaagaaataaaagtcggatttttctggctgctttctctcta

SEQ ID NO: 148345 - DNA, 3751 bp, Artificial Sequence
  derived and/or modified sequence
ggcgacagcggtggcggctcctcggggtgctcggctccctcccacctaggccggccccggcccgactcgccctcagaaactcactgtttggggctgcggactttctcgtcgtgccccacaaaagtaaagcttggggacctggggggagccggaagtatcgcttcgagatccccaaatactatcggggaaacggaagtggccgtcggtggcaggtttgggggagaccggaagtgacgagacctgtcggccatggagcctaatgatagtaccagtaccgctgtggaggagcctgacagcttggaggtgttggtgaagaccttggactctcaaactcgtacctttattgtgggggcccagatgaatgtaaaagagtttaaggagcacattgctgcctctgtcagcatcccatctgaaaaacaacggctcatttaccagggacgagttctgcaagatgataagaagcttcaggaatacaatgttgggggaaaggttatccacctggtggaacgggctcctcctcagactcacctcccttctggggcatcttctgggacggggtctgcctcagccactcatggtgggggatccccccctggtactcgggggcctggggcctctgttcatgaccggaatgccaacagctatgtcatggttggaaccttcaatcttcctagtgacggctctgctgtggatgttcacatcaacatggaacaggccccgattcagagtgagccccgggtacggctggtgatggctcagcacatgatcagggatatacagaccttactatcccggatggagactctcccctaccttcagtgtcgaggagggccccaaccgcagcacagtcagccgcccccgcagccaccggctgtgaccccggagccagtagccttgagctctcaaacatcagaaccagttgaaagtgaagcacctccccgggagcccatggaggcagaagaagtggaggagcgtgccccagcccagaacccggagctcactcctggcccagccccagcgggcccaacacctgccccggaaacaaatgcacccaaccatccttcccctgcggagtatgtcgaggtgctccaggagctacagcggctggagagtcgcctccagcccttcttgcagcgctactacgaggttctgggtgctgctgccaccacggactacaataacaatcacgagggccgggaggaggatcagcggttgatcaacttggtaggggagagcctgcgactgctgggcaacacctttgttgcactgtctgacctgcgctgcaatctggcctgcacgcccccacgacacctgcatgtggtccggcctatgtctcactacaccacccccatggtgctccagcaggcagccattcccatacagatcaatgtgggaaccactgtgaccatgacaggaaatgggactcggccccccccaactcccaatgcagaggcacctccccctggtcctgggcaggcctcatccgtggctccgtcttctaccaatgtcgagtcctcagctgagggggctcccccgccaggtccagctcccccgccagccaccagccacccgagggtcatccggatttcccaccagagtgtggaacccgtggtcatgatgcacatgaacattcaagattctggcacacagcctggtggtgttccgagtgctcccactggccccctgggaccccctggtcatggccaaaccctgggacagcaggtgccaggcttcccaacagctccaacccgggtggtgattgcccggcccactcctccacaggctcggccttcccatcctggagggcccccagtctctgggacactgcagggcgccggtctgggtaccaatgcctcgttggcccagatggtgagcggccttgtggggcagcttcttatgcagccagtccttgtggctcaggggaccccaggtatggctccaccgccagcccctgccactgcttctgccagtgctggcaccaccaacacagctaccacagctggccccgctcctggggggcctgcccagcctccacccacccctcaaccctccatggctgatcttcagttctctcagcttctggggaacctgctagggcctgcagggccaggggctggagggtctggtgtggcttctcccaccatcactgtggcgatgcctggtgtccctgcctttctccaaggcatgactgacttcttgcaggcaacacagacagcccctccaccacccccacctcctccacccccaccacctgccccagagcagcagaccatgcccccaccaggctccccttctggtggcgcagggagtcctggaggcctgggtcttgagagcctgtcaccggagttttttacctcagtggtgcagggtgtgctcagctccctgctgggctccctgggggctcgggctggcagcagtgaaagtattgctgccttcatacaacgcctcagtggatccagcaacatctttgagcctggagctgatggggcccttggattctttggggccttgctttctcttctgtgccagaacttctctatggtggacgtagtgatgcttctccatgggcatttccagccactacaacggctccagccccagctgcgatccttcttccaccagcactacctgggtggtcaggagcccacacccagtaacatccggatggcaacccacacattgatcacggggctagaagagtatgtgcgggagagtttttccttggtgcaggttcagccaggtgtggacatcatccggacaaacctggaatttctccaagagcagtttaatagcattgctgcgcatgtgctgcattgcacagatagtggatttggggcccggttgctggagttgtgtaaccaaggcctgtttgaatgcctggccctaaacctgcactgcttggggggacagcagatggagcttgctgctgttatcaatggccgaattcgtcgtatgtctcgtggggtgaatccctccttggtgagctggctgaccactatgatgggactgaggcttcaggtggtactggagcacatgcctgtaggccctgatgccattctcagatacgttcgcagggttggtgatcccccccagccacttcctgaggagccaatggaagttcagggagcagaaagagcttcccctgagcctcagcgggagaatgcttccccagcccctggaacaacagcagaagaggccatgtcccgaggtccacctcctgctcctgaggggggctcccgggatgaacaggatggagcttcagctgagacagaaccttgggcagctgcagtccccccagaatgggtccctattatccagcaggacattcagagccagcggaaggtgaaaccgcagccccctctgagtgatgcctacctcagtggtatgcctgccaagagacgcaagacgatgcagggtgagggcccccagctgcttctctcagaggctgtgagccgggcagctaaggcagccggagctcggcccctgacgagccccgagagcctgagccgggacctggaggcaccagaggttcaggagagctacaggcagcagctccggtctgatatacaaaaacgactgcaggaagaccccaactacagtccccagcgcttccccaatgcccagcgggcctttgctgatgatccttagctctttgctctatggcccttcctcatcaggggaccgtttcccccctcttccttcacagtatttaagaaataaaagtcggatttttctggctgctttctctcta

SEQ ID NO: 148346 - DNA, 844 bp, Artificial Sequence
  derived and/or modified sequence
cggtcccccgggcgacagcggtggcggctcctcggggtgctcggctccctcccacctaggccggccccggcccgactcgccctcagaaactcactgtttggggctgcggactttctcgtcgtgccccacaaaaagacctgtcggccatggagcctaatgatagtaccagtaccgctgtggaggagcctgacagcttggaggtgttggtgaagaccttggactctcaaactcgtacctttattgtgggggcccagatgaatgtaaaagagtttaaggagcacattgctgcctctgtcagcatcccatctgaaaaacaacggctcatttaccagggacgagttctgcaagatgataagaagcttcaggaatacaatgttgggggaaaggttatccacctggtggaacgggctcctcctcagactcacctcccttctggggcatcttctgggacggggtctgcctcagccactcatggtgggggatccccccctggtactcgggggcctggggcctctgttcatgaccggaatgccaacagctatgtcatggttggaaccttcaatcttcctagtgacggctctgctgtggatgttcacatcaacatggaacaggccccgattcagagtgagccccgggtacggctggtgatggctcagcacatgatcagggatatacagaccttactatcccggatggagactctcccctaccttcagtgtcgaggagggccccaaccgcagcacagtcagccgcccccgcagccaccggctgtgaccccggagccagtagccttgagctctcaaacatcagaaccagttgaaagtgaagcacctccccgggagcc

SEQ ID NO: 148347 - DNA, 3751 bp, Artificial Sequence
  derived and/or modified sequence
ggcgacagcggtggcggctcctcggggtgctcggctccctcccacctaggccggccccggcccgactcgccctcagaaactcactgtttggggctgcggactttctcgtcgtgccccacaaaagtaaagcttggggacctggggggagccggaagtatcgcttcgagatccccaaatactatcggggaaacggaagtggccgtcggtggcaggtttgggggagaccggaagtgacgagacctgtcggccatggagcctaatgatagtaccagtaccgctgtggaggagcctgacagcttggaggtgttggtgaagaccttggactctcaaactcgtacctttattgtgggggcccagatgaatgtaaaagagtttaaggagcacattgctgcctctgtcagcatcccatctgaaaaacaacggctcatttaccagggacgagttctgcaagatgataagaagcttcaggaatacaatgttgggggaaaggttatccacctggtggaacgggctcctcctcagactcacctcccttctggggcatcttctgggacggggtctgcctcagccactcatggtgggggatccccccctggtactcgggggcctggggcctctgttcatgaccggaatgccaacagctatgtcatggttggaaccttcaatcttcctagtgacggctctgctgtggatgttcacatcaacatggaacaggccccgattcagagtgagccccgggtacggctggtgatggctcagcacatgatcagggatatacagaccttactatcccggatggagactctcccctaccttcagtgtcgaggagggccccaaccgcagcacagtcagccgcccccgcagccaccggctgtgaccccggagccagtagccttgagctctcaaacatcagaaccagttgaaagtgaagcacctccccgggagcccatggaggcagaagaagtggaggagcgtgccccagcccagaacccggagctcactcctggcccagccccagcgggcccaacacctgccccggaaacaaatgcacccaaccatccttcccctgcggagtatgtcgaggtgctccaggagctacagcggctggagagtcgcctccagcccttcttgcagcgctactacgaggttctgggtgctgctgccaccacggactacaataacaatcacgagggccgggaggaggatcagcggttgatcaacttggtaggggagagcctgcgactgctgggcaacacctttgttgcactgtctgacctgcgctgcaatctggcctgcacgcccccacgacacctgcatgtggtccggcctatgtctcactacaccacccccatggtgctccagcaggcagccattcccatacagatcaatgtgggaaccactgtgaccatgacaggaaatgggactcggccccccccaactcccaatgcagaggcacctccccctggtcctgggcaggcctcatccgtggctccgtcttctaccaatgtcgagtcctcagctgagggggctcccccgccaggtccagctcccccgccagccaccagccacccgagggtcatccggatttcccaccagagtgtggaacccgtggtcatgatgcacatgaacattcaagattctggcacacagcctggtggtgttccgagtgctcccactggccccctgggaccccctggtcatggccaaaccctgggacagcaggtgccaggcttcccaacagctccaacccgggtggtgattgcccggcccactcctccacaggctcggccttcccatcctggagggcccccagtctctgggacactgcagggcgccggtctgggtaccaatgcctcgttggcccagatggtgagcggccttgtggggcagcttcttatgcagccagtccttgtggctcaggggaccccaggtatggctccaccgccagcccctgccactgcttctgccagtgctggcaccaccaacacagctaccacagctggccccgctcctggggggcctgcccagcctccacccacccctcaaccctccatggctgatcttcagttctctcagcttctggggaacctgctagggcctgcagggccaggggctggagggcctggtgtggcttctcccaccatcactgtggcgatgcctggtgtccctgcctttctccaaggcatgactgacttcttgcaggcaacacagacagcccctccaccacccccacctcctccacccccaccacctgccccagagcagcagaccatgcccccaccaggctccccttctggtggcgcagggagtcctggaggcctgggtcttgagagcctgtcaccggagttttttacctcagtggtgcagggtgtgctcagctccctgctgggctccctgggggctcgggctggcagcagtgaaagtattgctgccttcatacaacgcctcagtggatccagcaacatctttgagcctggagctgatggggcccttggattctttggggccttgctttctcttctgtgccagaacttctctatggtggacgtagtgatgcttctccatgggcatttccagccactacaacggctccagccccagctgcgatccttcttccaccagcactacctgggtggtcaggagcccacacccagtaacatccggatggcaacccacacattgatcacggggctagaagagtatgtgcgggagagtttttccttggtgcaggttcagccaggtgtggacatcatccggacaaacctggaatttctccaagagcagtttaatagcattgctgcgcatgtgctgcattgcacagatagtggatttggggcccggttgctggagttgtgtaaccaaggcctgtttgaatgcctggccctaaacctgcactgcttggggggacagcagatggagcttgctgctgttatcaatggccgaattcgtcgtatgtctcgtggggtgaatccctccttggtgagctggctgaccactatgatgggactgaggcttcaggtggtactggagcacatgcctgtaggccctgatgccattctcagatacgttcgcagggttggtgatcccccccagccacttcctgaggagccaatggaagttcagggagcagaaagagcttcccctgagcctcagcgggagaatgcttccccagcccctggaacaacagcagaagaggccatgtcccgaggtccacctcctgctcctgaggggggctcccgggatgaacaggatggagcttcagctgagacagaaccttgggcagctgcagtccccccagaatgggtccctattatccagcaggacattcagagccagcggaaggtgaaaccgcagccccctctgagtgatgcctacctcagtggtatgcctgccaagagacgcaagacgatgcagggtgagggcccccagctgcttctctcagaggctgtgagccgggcagctaaggcagccggagctcggcccctgacgagccccgagagcctgagccgggacctggaggcaccagaggttcaggagagctacaggcagcagctccggtctgatatacaaaaacgactgcaggaagaccccaactacagtccccagcgcttccccaatgcccagcgggcctttgctgatgatccttagctctttgctctatggcccttcctcatcaggggaccgtttcccccctcttccttcacagtatttaagaaataaaagtcggatttttctggctgctttctctcta

SEQ ID NO: 148348 - DNA, 3399 bp, Artificial Sequence
  derived and/or modified sequence
atggagcccaacgacagcaccagcaccgccgtggaggagcccgacagcctggaggtgctggtgaagaccctggacagccagaccagaaccttcatcgtgggcgcccagatgaacgtgaaggagttcaaggagcacatcgccgccagcgtgagcatccccagcgagaagcagagactgatctaccagggcagagtgctgcaggacgacaagaagctgcaggagtacaacgtgggcggcaaggtgatccacctggtggagagagcccccccccagacccacctgcccagcggcgccagcagcggcaccggcagcgccagcgccacccacggcggcggcagcccccccggcaccagaggccccggcgccagcgtgcacgacagaaacgccaacagctacgtgatggtgggcaccttcaacctgcccagcgacggcagcgccgtggacgtgcacatcaacatggagcaggcccccatccagagcgagcccagagtgagactggtgatggcccagcacatgatcagagacatccagaccctgctgagcagaatggagaccctgccctacctgcagtgcagaggcggcccccagccccagcacagccagccccccccccagccccccgccgtgacccccgagcccgtggccctgagcagccagaccagcgagcccgtggagagcgaggccccccccagagagcccatggaggccgaggaggtggaggagagagcccccgcccagaaccccgagctgacccccggccccgcccccgccggccccacccccgcccccgagaccaacgcccccaaccaccccagccccgccgagtacgtggaggtgctgcaggagctgcagagactggagagcagactgcagcccttcctgcagagatactacgaggtgctgggcgccgccgccaccaccgactacaacaacaaccacgagggcagagaggaggaccagagactgatcaacctggtgggcgagagcctgagactgctgggcaacaccttcgtggccctgagcgacctgagatgcaacctggcctgcaccccccccagacacctgcacgtggtgagacccatgagccactacaccacccccatggtgctgcagcaggccgccatccccatccagatcaacgtgggcaccaccgtgaccatgaccggcaacggcaccagacccccccccacccccaacgccgaggcccccccccccggccccggccaggccagcagcgtggcccccagcagcaccaacgtggagagcagcgccgagggcgcccccccccccggccccgcccccccccccgccaccagccaccccagagtgatcagaatcagccaccagagcgtggagcccgtggtgatgatgcacatgaacatccaggacagcggcacccagcccggcggcgtgcccagcgcccccaccggccccctgggcccccccggccacggccagaccctgggccagcaggtgcccggcttccccaccgcccccaccagagtggtgatcgccagacccacccccccccaggccagacccagccaccccggcggcccccccgtgagcggcaccctgcagggcgccggcctgggcaccaacgccagcctggcccagatggtgagcggcctggtgggccagctgctgatgcagcccgtgctggtggcccagggcacccccggcatggcccccccccccgcccccgccaccgccagcgccagcgccggcaccaccaacaccgccaccaccgccggccccgcccccggcggccccgcccagcccccccccaccccccagcccagcatggccgacctgcagttcagccagctgctgggcaacctgctgggccccgccggccccggcgccggcggcagcggcgtggccagccccaccatcaccgtggccatgcccggcgtgcccgccttcctgcagggcatgaccgacttcctgcaggccacccagaccgccccccccccccccccccccccccccccccccccccccgcccccgagcagcagaccatgcccccccccggcagccccagcggcggcgccggcagccccggcggcctgggcctggagagcctgagccccgagttcttcaccagcgtggtgcagggcgtgctgagcagcctgctgggcagcctgggcgccagagccggcagcagcgagagcatcgccgccttcatccagagactgagcggcagcagcaacatcttcgagcccggcgccgacggcgccctgggcttcttcggcgccctgctgagcctgctgtgccagaacttcagcatggtggacgtggtgatgctgctgcacggccacttccagcccctgcagagactgcagccccagctgagaagcttcttccaccagcactacctgggcggccaggagcccacccccagcaacatcagaatggccacccacaccctgatcaccggcctggaggagtacgtgagagagagcttcagcctggtgcaggtgcagcccggcgtggacatcatcagaaccaacctggagttcctgcaggagcagttcaacagcatcgccgcccacgtgctgcactgcaccgacagcggcttcggcgccagactgctggagctgtgcaaccagggcctgttcgagtgcctggccctgaacctgcactgcctgggcggccagcagatggagctggccgccgtgatcaacggcagaatcagaagaatgagcagaggcgtgaaccccagcctggtgagctggctgaccaccatgatgggcctgagactgcaggtggtgctggagcacatgcccgtgggccccgacgccatcctgagatacgtgagaagagtgggcgaccccccccagcccctgcccgaggagcccatggaggtgcagggcgccgagagagccagccccgagccccagagagagaacgccagccccgcccccggcaccaccgccgaggaggccatgagcagaggccccccccccgcccccgagggcggcagcagagacgagcaggacggcgccagcgccgagaccgagccctgggccgccgccgtgccccccgagtgggtgcccatcatccagcaggacatccagagccagagaaaggtgaagccccagccccccctgagcgacgcctacctgagcggcatgcccgccaagagaagaaagaccatgcagggcgagggcccccagctgctgctgagcgaggccgtgagcagagccgccaaggccgccggcgccagacccctgaccagccccgagagcctgagcagagacctggaggcccccgaggtgcaggagagctacagacagcagctgagaagcgacatccagaagagactgcaggaggaccccaactacagcccccagagattccccaacgcccagagagccttcgccgacgacccctag

SEQ ID NO: 148349 - DNA, 702 bp, Artificial Sequence
  derived and/or modified sequence
atggagcccaacgacagcaccagcaccgccgtggaggagcccgacagcctggaggtgctggtgaagaccctggacagccagaccagaaccttcatcgtgggcgcccagatgaacgtgaaggagttcaaggagcacatcgccgccagcgtgagcatccccagcgagaagcagagactgatctaccagggcagagtgctgcaggacgacaagaagctgcaggagtacaacgtgggcggcaaggtgatccacctggtggagagagcccccccccagacccacctgcccagcggcgccagcagcggcaccggcagcgccagcgccacccacggcggcggcagcccccccggcaccagaggccccggcgccagcgtgcacgacagaaacgccaacagctacgtgatggtgggcaccttcaacctgcccagcgacggcagcgccgtggacgtgcacatcaacatggagcaggcccccatccagagcgagcccagagtgagactggtgatggcccagcacatgatcagagacatccagaccctgctgagcagaatggagaccctgccctacctgcagtgcagaggcggcccccagccccagcacagccagccccccccccagccccccgccgtgacccccgagcccgtggccctgagcagccagaccagcgagcccgtggagagcgaggccccccccagagagccctag

SEQ ID NO: 148350 - DNA, 3399 bp, Artificial Sequence
  derived and/or modified sequence
atggagcccaacgacagcaccagcaccgccgtggaggagcccgacagcctggaggtgctggtgaagaccctggacagccagaccagaaccttcatcgtgggcgcccagatgaacgtgaaggagttcaaggagcacatcgccgccagcgtgagcatccccagcgagaagcagagactgatctaccagggcagagtgctgcaggacgacaagaagctgcaggagtacaacgtgggcggcaaggtgatccacctggtggagagagcccccccccagacccacctgcccagcggcgccagcagcggcaccggcagcgccagcgccacccacggcggcggcagcccccccggcaccagaggccccggcgccagcgtgcacgacagaaacgccaacagctacgtgatggtgggcaccttcaacctgcccagcgacggcagcgccgtggacgtgcacatcaacatggagcaggcccccatccagagcgagcccagagtgagactggtgatggcccagcacatgatcagagacatccagaccctgctgagcagaatggagaccctgccctacctgcagtgcagaggcggcccccagccccagcacagccagccccccccccagccccccgccgtgacccccgagcccgtggccctgagcagccagaccagcgagcccgtggagagcgaggccccccccagagagcccatggaggccgaggaggtggaggagagagcccccgcccagaaccccgagctgacccccggccccgcccccgccggccccacccccgcccccgagaccaacgcccccaaccaccccagccccgccgagtacgtggaggtgctgcaggagctgcagagactggagagcagactgcagcccttcctgcagagatactacgaggtgctgggcgccgccgccaccaccgactacaacaacaaccacgagggcagagaggaggaccagagactgatcaacctggtgggcgagagcctgagactgctgggcaacaccttcgtggccctgagcgacctgagatgcaacctggcctgcaccccccccagacacctgcacgtggtgagacccatgagccactacaccacccccatggtgctgcagcaggccgccatccccatccagatcaacgtgggcaccaccgtgaccatgaccggcaacggcaccagacccccccccacccccaacgccgaggcccccccccccggccccggccaggccagcagcgtggcccccagcagcaccaacgtggagagcagcgccgagggcgcccccccccccggccccgcccccccccccgccaccagccaccccagagtgatcagaatcagccaccagagcgtggagcccgtggtgatgatgcacatgaacatccaggacagcggcacccagcccggcggcgtgcccagcgcccccaccggccccctgggcccccccggccacggccagaccctgggccagcaggtgcccggcttccccaccgcccccaccagagtggtgatcgccagacccacccccccccaggccagacccagccaccccggcggcccccccgtgagcggcaccctgcagggcgccggcctgggcaccaacgccagcctggcccagatggtgagcggcctggtgggccagctgctgatgcagcccgtgctggtggcccagggcacccccggcatggcccccccccccgcccccgccaccgccagcgccagcgccggcaccaccaacaccgccaccaccgccggccccgcccccggcggccccgcccagcccccccccaccccccagcccagcatggccgacctgcagttcagccagctgctgggcaacctgctgggccccgccggccccggcgccggcggccccggcgtggccagccccaccatcaccgtggccatgcccggcgtgcccgccttcctgcagggcatgaccgacttcctgcaggccacccagaccgccccccccccccccccccccccccccccccccccccccgcccccgagcagcagaccatgcccccccccggcagccccagcggcggcgccggcagccccggcggcctgggcctggagagcctgagccccgagttcttcaccagcgtggtgcagggcgtgctgagcagcctgctgggcagcctgggcgccagagccggcagcagcgagagcatcgccgccttcatccagagactgagcggcagcagcaacatcttcgagcccggcgccgacggcgccctgggcttcttcggcgccctgctgagcctgctgtgccagaacttcagcatggtggacgtggtgatgctgctgcacggccacttccagcccctgcagagactgcagccccagctgagaagcttcttccaccagcactacctgggcggccaggagcccacccccagcaacatcagaatggccacccacaccctgatcaccggcctggaggagtacgtgagagagagcttcagcctggtgcaggtgcagcccggcgtggacatcatcagaaccaacctggagttcctgcaggagcagttcaacagcatcgccgcccacgtgctgcactgcaccgacagcggcttcggcgccagactgctggagctgtgcaaccagggcctgttcgagtgcctggccctgaacctgcactgcctgggcggccagcagatggagctggccgccgtgatcaacggcagaatcagaagaatgagcagaggcgtgaaccccagcctggtgagctggctgaccaccatgatgggcctgagactgcaggtggtgctggagcacatgcccgtgggccccgacgccatcctgagatacgtgagaagagtgggcgaccccccccagcccctgcccgaggagcccatggaggtgcagggcgccgagagagccagccccgagccccagagagagaacgccagccccgcccccggcaccaccgccgaggaggccatgagcagaggccccccccccgcccccgagggcggcagcagagacgagcaggacggcgccagcgccgagaccgagccctgggccgccgccgtgccccccgagtgggtgcccatcatccagcaggacatccagagccagagaaaggtgaagccccagccccccctgagcgacgcctacctgagcggcatgcccgccaagagaagaaagaccatgcagggcgagggcccccagctgctgctgagcgaggccgtgagcagagccgccaaggccgccggcgccagacccctgaccagccccgagagcctgagcagagacctggaggcccccgaggtgcaggagagctacagacagcagctgagaagcgacatccagaagagactgcaggaggaccccaactacagcccccagagattccccaacgcccagagagccttcgccgacgacccctag

SEQ ID NO: 148351 - protein, 1011 aa, Artificial Sequence
  derived and/or modified sequence
MVSSDRPVSLEDEVSHSMKEMIGGCCVCSDERGWAENPLVYCDGHGCSVAVHQACYGIVQVPTGPWFCRKCESQERAARVRCELCPHKDGALKRTDNGGWAHVVCALYIPEVQFANVSTMEPIVLQSVPHDRYNKTCYICDEQGRESKAATGACMTCNKHGCRQAFHVTCAQFAGLLCEEEGNGADNVQYCGYCKYHFSKLKKSKRGSNRSYDQSLSDSSSHSQDKHHEKEKKKYKEKDKHKQKHKKQPEPSPALVPSLTVTTEKTYTSTSNNSISGSLKRLEDTTARFTNANFQEVSAHTSSGKDVSETRGSEGKGKKSSAHSSGQRGRKPGGGRNPGTTVSAASPFPQGSFSGTPGSVKSSSGSSVQSPQDFLSFTDSDLRNDSYSHSQQSSATKDVHKGESGSQEGGVNSFSTLIGLPSTSAVTSQPKSFENSPGDLGNSSLPTAGYKRAQTSGIEEETVKEKKRKGNKQSKHGPGRPKGNKNQENVSHLSVSSASPTSSVASAAGSITSSSLQKSPTLLRNGSLQSLSVGSSPVGSEISMQYRHDGACPTTTFSELLNAIHNGIYNSNDVAVSFPNVVSGSGSSTPVSSSHLPQQSSGHLQQVGALSPSAVSSAAPAVATTQANTLSGSSLSQAPSHMYGNRSNSSMAALIAQSENNQTDQDLGDNSRNLVGRGSSPRGSLSPRSPVSSLQIRYDQPGNSSLENLPPVAASIEQLLERQWSEGQQFLLEQGTPSDILGMLKSLHQLQVENRRLEEQIKNLTAKKERLQLLNAQLSVPFPTITANPSPSHQIHTFSAQTAPTTDSLNSSKSPHIGNSFLPDNSLPVLNQDLTSSGQSTSSSSALSTPPPAGQSPAQQGSGVSGVQQVNGVTVGALASGMQPVTSTIPAVSAVGGIIGALPGNQLAINGIVGALNGVMQTPVTMSQNPTPLTHTTVPPNATHPMPATLTNSASGLGLLSDQQRQILIHQQQFQQLLNSQQLTPVHRHPHFTQLPPTHFSPSMEIMQVRK

SEQ ID NO: 148352 - protein, 1027 aa, Artificial Sequence
  derived and/or modified sequence
MVSSDRPVSLEDEVSHSMKEMIGGCCVCSDERGWAENPLVYCDGHGCSVAVHQACYGIVQVPTGPWFCRKCESQERAARVRCELCPHKDGALKRTDNGGWAHVVCALYIPEVQFANVSTMEPIVLQSVPHDRYNKTCYICDEQGRESKAATGACMTCNKHGCRQAFHVTCAQFAGLLCEEEGNGADNVQYCGYCKYHFSKLKKSKRGSNRSYDQSLSDSSSHSQDKHHEKEKKKYKEKDKHKQKHKKQPEPSPALVPSLTVTTEKTYTSTSNNSISGSLKRLEDTTARFTNANFQEVSAHTSSGKDVSETRGSEGKGKKSSAHSSGQRGRKPGGGRNPGTTVSAASPFPQGSFSGTPGSVKSSSGSSVQSPQDFLSFTDSDLRNDSYSHSQQSSATKDVHKGESGSQEGGVNSFSTLIGLPSTSAVTSQPKSFENSPGDLGNSSLPTAGYKRAQTSGIEEETVKEKKRKGNKQSKHGPGRPKGNKNQENVSHLSVSSASPTSSVASAAGSITSSSLQKSPTLLRNGSLQSLSVGSSPVGSEISMQYRHDGACPTTTFSELLNAIHNDRGDSSTLTKQELKFIGIYNSNDVAVSFPNVVSGSGSSTPVSSSHLPQQSSGHLQQVGALSPSAVSSAAPAVATTQANTLSGSSLSQAPSHMYGNRSNSSMAALIAQSENNQTDQDLGDNSRNLVGRGSSPRGSLSPRSPVSSLQIRYDQPGNSSLENLPPVAASIEQLLERQWSEGQQFLLEQGTPSDILGMLKSLHQLQVENRRLEEQIKNLTAKKERLQLLNAQLSVPFPTITANPSPSHQIHTFSAQTAPTTDSLNSSKSPHIGNSFLPDNSLPVLNQDLTSSGQSTSSSSALSTPPPAGQSPAQQGSGVSGVQQVNGVTVGALASGMQPVTSTIPAVSAVGGIIGALPGNQLAINGIVGALNGVMQTPVTMSQNPTPLTHTTVPPNATHPMPATLTNSASGLGLLSDQQRQILIHQQQFQQLLNSQQLTPVHRHPHFTQLPPTHFSPSMEIMQVRK

SEQ ID NO: 148353 - protein, 360 aa, Artificial Sequence
  derived and/or modified sequence
SMEKTYTSTSNNSISGSLKRLEDTTARFTNANFQEVSAHTSSGKDVSETRGSEGKGKKSSAHSSGQRGRKPGGGRNPGTTVSAASPFPQAGYKRAQTSGIEEETVKEKKRKGNKQSKHGPGRPKGNKNQENVSHLSVSSASPTSSVASAAGSITSSSLQKSPTLLRNGSLQSLSVGSSPVGSEISMQYRHDGACPTTTFSELLNAIHNDRGDSSTLTKQELKFIGIYNSNDVAVSFPNVVSGSGSSTPVSSSHLPQQSSGHLQQVGALSPSAVSSAAPAVATTQANTLSGSSLSQAPSHMYGNRSNSSMAALIAQSENNQTDQDLGDNSRNLVGRGSSPRGSLSPRSPVSSLQIRYDQPG

SEQ ID NO: 148354 - DNA, 5140 bp, Artificial Sequence
  derived and/or modified sequence
cgcgcacgcagggctagcctcgcccaggcctcctccctcacgccggccgcaggacgggcgcgcacgccaagtgacgctccgaggaggaagcgcagcccccttcccctccctcgctgcccctggcccagcgggagccccccctccccccagtgcgcctgtgcggaggccctcttgattatgtgtgccctctccgggcgcccgcgttagcggccgggtggaggtggggagggaagacgctgaggaggaggaggaggcggaggaggcggtggaggggaggtggggggaatcagcaaggacatggctcctgactcctgtgcggaacgtgagtgactgagcggcaaagcccgaatggtctctagcgaccggcccgtgtcactggaggacgaggtctcccatagtatgaaggagatgattggaggctgttgcgtttgctcagacgagagaggctgggccgagaacccgctggtttattgcgacgggcacggctgcagcgtcgcggtgcatcaagcttgctatggcattgttcaagtacccactggaccgtggttttgcaggaaatgtgaatctcaggagagagcagccagagtgagatgtgaactttgtccccataaggatggagctttaaaaagaacagataatgggggttgggcccatgtggtttgtgccctgtatattccagaggtacaatttgccaatgtttccacaatggaaccaattgttttacagtctgttccgcatgatcgttataataagacttgctacatttgtgatgaacaaggaagagaaagcaaagcagccactggtgcttgcatgacatgtaataaacatggatgtcgacaggctttccatgtaacatgcgctcagtttgccggactgctttgtgaagaagaaggtaatggtgccgataatgtccaatactgtggctactgtaaataccattttagtaagctgaaaaagagcaaacggggatctaataggtcatatgatcaaagtttaagtgattcttcctctcactctcaggataaacatcatgagaaagagaaaaaaaaatataaagagaaggacaaacacaaacagaaacacaagaagcagccagaaccatcacctgcattggttccatccttgactgttactacagaaaaaacttatacaagcactagcaacaactctatatctggatcattgaagcgcttggaagatactactgcacgatttacaaatgcaaatttccaggaagtctctgcacacacctctagtggaaaagatgtttcagagactagagggtcagagggcaaagggaagaaatcttcagctcacagctcaggtcaaaggggaagaaagcctggtggtggaagaaatccaggaacaactgtgtcagcagctagcccttttcctcaaggcagtttttcaggaactccaggcagtgtaaagtcatcttctggaagttcagtgcagtctccccaggatttcctgagctttacagactcagatctgcgtaatgacagttactctcactcccaacagtcatcagcaaccaaagatgtacataaaggagagtctggaagccaggaagggggggtaaatagttttagtaccttaattggcctcccttcaacctcagctgttacttcacagcctaaaagctttgaaaattcacctggagatttgggtaattccagccttcctacagcaggatataagcgggctcaaacttctggcatagaagaagaaactgtaaaggaaaagaaaaggaaaggaaataaacaaagtaagcatgggcctggcagacccaaaggaaacaaaaatcaagagaatgtttctcatctctcagtttcttctgcttcaccaacatcatctgtagcatcagctgcaggaagcataacaagctctagtctgcagaaatctcctacattgctcaggaatggaagtttacagagcctcagtgttggctcatctccagttggttcagaaatttccatgcagtatcggcatgatggagcttgcccaacaactacgttctcagagttgctgaatgcaatacacaacgacagaggtgacagttctacactaacaaagcaagaacttaaattcataggtatttataacagcaatgatgtagcagtatcgtttccaaatgtagtatctggctcgggatctagtactcctgtctccagctctcacttacctcagcagtcttctgggcatttgcaacaagtaggagcgctctctccctcagctgtgtcatctgcagcccctgctgttgctacaactcaggcaaatactctatctggatcttctctcagtcaggcaccatctcatatgtatggcaatagatcaaattcatcaatggcagctcttatagctcagtctgaaaacaatcaaacagatcaagatcttggagacaatagccgcaacctagttggcagaggaagctcaccccgaggaagtctctcgccacgatcccctgtaagcagcttacagattcgctatgatcaaccaggcaacagcagtttggaaaatctgcctccagtagcagccagcatagaacagcttttggagaggcagtggagtgaaggacagcaatttttactagaacagggtactcctagtgacattttaggaatgctgaagtcattacaccaacttcaagttgaaaaccgaagattagaggaacaaattaaaaacttgactgccaaaaaggaacggcttcagttattgaatgcacagctttcagtgccttttccaacaataacagcaaatcctagtccgtctcatcaaatacacacattttcagcacagactgctcctactactgattccttgaacagcagtaagagccctcatataggaaacagctttttacctgataattctcttcctgtattaaatcaggacttaacctccagtggacaaagtaccagcagctcatcagctctttctaccccacctcctgctgggcagagtccggctcaacaaggctcaggagtgagtggagttcagcaggtcaatggcgtgacagtgggggcactagctagtggaatgcagcctgtaacttccaccattcctgccgtgtctgcagtgggtggaataattggagctttgccaggtaaccaactggcaattaatggcattgtaggagctttaaatggggttatgcagactcctgtcacaatgtcccagaaccctacccctctcacccacacaaccgtaccacctaatgcaacacatccaatgccagctacactgactaacagtgcctcaggactaggattactttctgaccagcaacgacaaatacttattcatcaacagcagtttcagcagttgttaaattctcaacagctcacaccagtacacaggcacccccacttcacacagctaccaccaacccatttctcaccatccatggagataatgcaagtcagaaagtagcaagacttagtgataaaactgggcctgtagctcaagagaaaagttgacacctgagaaacatctagaaattgcctatcctgctgttctagcacttcatctggctgcctttgcagtccttttactacagctatgaagaaacgcaacaagaaactcaatgcacaacaaaggattaattgctgcaaggacattcttgtaaggctttgattagttttcttgttgctttgttgcactgaaatggaattcccatgcccctaccccttaccccagttttttgaacatggaaagaaaatttaataactttttaaagtgacataatttacatgcaatatgtttatcaactcaagaatttaatatagttggtacacaactagttttgtttataaattggagatgcaaatagcaaaactaaatacttgctccatttacaaactacttgattttattgtacaagttgaaatatgctcttttgtttgggttacagtatgcttgctctaagtcaaattccaaggaactaatttcttctcctggagttgcattgattcagtattacaaatatatagcacatcacctgggacttggcaatctttgttaaaaaaaaatttcctttctaatgggatttggccaattttggtaatgaagttaggatggtaatgtctgcatctgctaaaggtaattttcttttgagaattgctttctttagtgttaagacctactcatattttgaagaaatcttgagttaagtgagttctgaggctgctgggggaaccagatcaattcaaagctaaatacttctttcagaaaggggccactgtggaaagtgctggtggggtttgcccttgatcaagtgcctccattgtgctgcaagggctgtagacagcagggtgggacagtcagtcctccgagcagcaggaatcatcccgtcacctgcagccttcccatgcttccgcctttattcagaactttctgtgccactgtagatagctcaggcaaaactattacctgggtatttatccactaatgagtcacaagaaaaggagtggatttggtaagaatagagatttgttttatttaaaccacttcccattactgaccattaaaagctcaccactagagttcctgaaacaggtgaaacctgtatgacagcccttccactttggggagccacgcttttgatgtgacagtaccgcagagtgattcccccactgaggatgtcatcatcaaactcttctttggtgtgtgaattattagtggaaaagacccagctgtaattagacctccactgtgtacttagctggaagaacatgttaattctgcaatatgtttcttggttaaacattgcacagttcttacctcatttctgtaaataaagttttgtgaatctgttttgtattgtgacaaattcataagataacattgatattttgatttgtaatatttctaattggtagatttaattgaaaagtaaaattaatttatttttatatgttcaggggaattttaaagtcaaatcttttgtagataatttaaaaaatcagtgtggtttattttacttatttaacccactggttgttattctgtaacagtttgtataaatggtaaattttgaatgtgttgttattttacctagatgtaaaattccacatgtattaaaatgtacaaaatgttttgttaataaaatttaataatgttaaaaaaaaaaaaaaaaaaa

SEQ ID NO: 148355 - DNA, 3036 bp, Artificial Sequence
  derived and/or modified sequence
atggtgagcagcgacagacccgtgagcctggaggacgaggtgagccacagcatgaaggagatgatcggcggctgctgcgtgtgcagcgacgagagaggctgggccgagaaccccctggtgtactgcgacggccacggctgcagcgtggccgtgcaccaggcctgctacggcatcgtgcaggtgcccaccggcccctggttctgcagaaagtgcgagagccaggagagagccgccagagtgagatgcgagctgtgcccccacaaggacggcgccctgaagagaaccgacaacggcggctgggcccacgtggtgtgcgccctgtacatccccgaggtgcagttcgccaacgtgagcaccatggagcccatcgtgctgcagagcgtgccccacgacagatacaacaagacctgctacatctgcgacgagcagggcagagagagcaaggccgccaccggcgcctgcatgacctgcaacaagcacggctgcagacaggccttccacgtgacctgcgcccagttcgccggcctgctgtgcgaggaggagggcaacggcgccgacaacgtgcagtactgcggctactgcaagtaccacttcagcaagctgaagaagagcaagagaggcagcaacagaagctacgaccagagcctgagcgacagcagcagccacagccaggacaagcaccacgagaaggagaagaagaagtacaaggagaaggacaagcacaagcagaagcacaagaagcagcccgagcccagccccgccctggtgcccagcctgaccgtgaccaccgagaagacctacaccagcaccagcaacaacagcatcagcggcagcctgaagagactggaggacaccaccgccagattcaccaacgccaacttccaggaggtgagcgcccacaccagcagcggcaaggacgtgagcgagaccagaggcagcgagggcaagggcaagaagagcagcgcccacagcagcggccagagaggcagaaagcccggcggcggcagaaaccccggcaccaccgtgagcgccgccagccccttcccccagggcagcttcagcggcacccccggcagcgtgaagagcagcagcggcagcagcgtgcagagcccccaggacttcctgagcttcaccgacagcgacctgagaaacgacagctacagccacagccagcagagcagcgccaccaaggacgtgcacaagggcgagagcggcagccaggagggcggcgtgaacagcttcagcaccctgatcggcctgcccagcaccagcgccgtgaccagccagcccaagagcttcgagaacagccccggcgacctgggcaacagcagcctgcccaccgccggctacaagagagcccagaccagcggcatcgaggaggagaccgtgaaggagaagaagagaaagggcaacaagcagagcaagcacggccccggcagacccaagggcaacaagaaccaggagaacgtgagccacctgagcgtgagcagcgccagccccaccagcagcgtggccagcgccgccggcagcatcaccagcagcagcctgcagaagagccccaccctgctgagaaacggcagcctgcagagcctgagcgtgggcagcagccccgtgggcagcgagatcagcatgcagtacagacacgacggcgcctgccccaccaccaccttcagcgagctgctgaacgccatccacaacggcatctacaacagcaacgacgtggccgtgagcttccccaacgtggtgagcggcagcggcagcagcacccccgtgagcagcagccacctgccccagcagagcagcggccacctgcagcaggtgggcgccctgagccccagcgccgtgagcagcgccgcccccgccgtggccaccacccaggccaacaccctgagcggcagcagcctgagccaggcccccagccacatgtacggcaacagaagcaacagcagcatggccgccctgatcgcccagagcgagaacaaccagaccgaccaggacctgggcgacaacagcagaaacctggtgggcagaggcagcagccccagaggcagcctgagccccagaagccccgtgagcagcctgcagatcagatacgaccagcccggcaacagcagcctggagaacctgccccccgtggccgccagcatcgagcagctgctggagagacagtggagcgagggccagcagttcctgctggagcagggcacccccagcgacatcctgggcatgctgaagagcctgcaccagctgcaggtggagaacagaagactggaggagcagatcaagaacctgaccgccaagaaggagagactgcagctgctgaacgcccagctgagcgtgcccttccccaccatcaccgccaaccccagccccagccaccagatccacaccttcagcgcccagaccgcccccaccaccgacagcctgaacagcagcaagagcccccacatcggcaacagcttcctgcccgacaacagcctgcccgtgctgaaccaggacctgaccagcagcggccagagcaccagcagcagcagcgccctgagcacccccccccccgccggccagagccccgcccagcagggcagcggcgtgagcggcgtgcagcaggtgaacggcgtgaccgtgggcgccctggccagcggcatgcagcccgtgaccagcaccatccccgccgtgagcgccgtgggcggcatcatcggcgccctgcccggcaaccagctggccatcaacggcatcgtgggcgccctgaacggcgtgatgcagacccccgtgaccatgagccagaaccccacccccctgacccacaccaccgtgccccccaacgccacccaccccatgcccgccaccctgaccaacagcgccagcggcctgggcctgctgagcgaccagcagagacagatcctgatccaccagcagcagttccagcagctgctgaacagccagcagctgacccccgtgcacagacacccccacttcacccagctgccccccacccacttcagccccagcatggagatcatgcaggtgagaaagtag

SEQ ID NO: 148356 - DNA, 3084 bp, Artificial Sequence
  derived and/or modified sequence
atggtgagcagcgacagacccgtgagcctggaggacgaggtgagccacagcatgaaggagatgatcggcggctgctgcgtgtgcagcgacgagagaggctgggccgagaaccccctggtgtactgcgacggccacggctgcagcgtggccgtgcaccaggcctgctacggcatcgtgcaggtgcccaccggcccctggttctgcagaaagtgcgagagccaggagagagccgccagagtgagatgcgagctgtgcccccacaaggacggcgccctgaagagaaccgacaacggcggctgggcccacgtggtgtgcgccctgtacatccccgaggtgcagttcgccaacgtgagcaccatggagcccatcgtgctgcagagcgtgccccacgacagatacaacaagacctgctacatctgcgacgagcagggcagagagagcaaggccgccaccggcgcctgcatgacctgcaacaagcacggctgcagacaggccttccacgtgacctgcgcccagttcgccggcctgctgtgcgaggaggagggcaacggcgccgacaacgtgcagtactgcggctactgcaagtaccacttcagcaagctgaagaagagcaagagaggcagcaacagaagctacgaccagagcctgagcgacagcagcagccacagccaggacaagcaccacgagaaggagaagaagaagtacaaggagaaggacaagcacaagcagaagcacaagaagcagcccgagcccagccccgccctggtgcccagcctgaccgtgaccaccgagaagacctacaccagcaccagcaacaacagcatcagcggcagcctgaagagactggaggacaccaccgccagattcaccaacgccaacttccaggaggtgagcgcccacaccagcagcggcaaggacgtgagcgagaccagaggcagcgagggcaagggcaagaagagcagcgcccacagcagcggccagagaggcagaaagcccggcggcggcagaaaccccggcaccaccgtgagcgccgccagccccttcccccagggcagcttcagcggcacccccggcagcgtgaagagcagcagcggcagcagcgtgcagagcccccaggacttcctgagcttcaccgacagcgacctgagaaacgacagctacagccacagccagcagagcagcgccaccaaggacgtgcacaagggcgagagcggcagccaggagggcggcgtgaacagcttcagcaccctgatcggcctgcccagcaccagcgccgtgaccagccagcccaagagcttcgagaacagccccggcgacctgggcaacagcagcctgcccaccgccggctacaagagagcccagaccagcggcatcgaggaggagaccgtgaaggagaagaagagaaagggcaacaagcagagcaagcacggccccggcagacccaagggcaacaagaaccaggagaacgtgagccacctgagcgtgagcagcgccagccccaccagcagcgtggccagcgccgccggcagcatcaccagcagcagcctgcagaagagccccaccctgctgagaaacggcagcctgcagagcctgagcgtgggcagcagccccgtgggcagcgagatcagcatgcagtacagacacgacggcgcctgccccaccaccaccttcagcgagctgctgaacgccatccacaacgacagaggcgacagcagcaccctgaccaagcaggagctgaagttcatcggcatctacaacagcaacgacgtggccgtgagcttccccaacgtggtgagcggcagcggcagcagcacccccgtgagcagcagccacctgccccagcagagcagcggccacctgcagcaggtgggcgccctgagccccagcgccgtgagcagcgccgcccccgccgtggccaccacccaggccaacaccctgagcggcagcagcctgagccaggcccccagccacatgtacggcaacagaagcaacagcagcatggccgccctgatcgcccagagcgagaacaaccagaccgaccaggacctgggcgacaacagcagaaacctggtgggcagaggcagcagccccagaggcagcctgagccccagaagccccgtgagcagcctgcagatcagatacgaccagcccggcaacagcagcctggagaacctgccccccgtggccgccagcatcgagcagctgctggagagacagtggagcgagggccagcagttcctgctggagcagggcacccccagcgacatcctgggcatgctgaagagcctgcaccagctgcaggtggagaacagaagactggaggagcagatcaagaacctgaccgccaagaaggagagactgcagctgctgaacgcccagctgagcgtgcccttccccaccatcaccgccaaccccagccccagccaccagatccacaccttcagcgcccagaccgcccccaccaccgacagcctgaacagcagcaagagcccccacatcggcaacagcttcctgcccgacaacagcctgcccgtgctgaaccaggacctgaccagcagcggccagagcaccagcagcagcagcgccctgagcacccccccccccgccggccagagccccgcccagcagggcagcggcgtgagcggcgtgcagcaggtgaacggcgtgaccgtgggcgccctggccagcggcatgcagcccgtgaccagcaccatccccgccgtgagcgccgtgggcggcatcatcggcgccctgcccggcaaccagctggccatcaacggcatcgtgggcgccctgaacggcgtgatgcagacccccgtgaccatgagccagaaccccacccccctgacccacaccaccgtgccccccaacgccacccaccccatgcccgccaccctgaccaacagcgccagcggcctgggcctgctgagcgaccagcagagacagatcctgatccaccagcagcagttccagcagctgctgaacagccagcagctgacccccgtgcacagacacccccacttcacccagctgccccccacccacttcagccccagcatggagatcatgcaggtgagaaagtag

SEQ ID NO: 148357 - DNA, 1086 bp, Artificial Sequence
  derived and/or modified sequence
gtgaccaccgagaagacctacaccagcaccagcaacaacagcatcagcggcagcctgaagagactggaggacaccaccgccagattcaccaacgccaacttccaggaggtgagcgcccacaccagcagcggcaaggacgtgagcgagaccagaggcagcgagggcaagggcaagaagagcagcgcccacagcagcggccagagaggcagaaagcccggcggcggcagaaaccccggcaccaccgtgagcgccgccagccccttcccccaggccggctacaagagagcccagaccagcggcatcgaggaggagaccgtgaaggagaagaagagaaagggcaacaagcagagcaagcacggccccggcagacccaagggcaacaagaaccaggagaacgtgagccacctgagcgtgagcagcgccagccccaccagcagcgtggccagcgccgccggcagcatcaccagcagcagcctgcagaagagccccaccctgctgagaaacggcagcctgcagagcctgagcgtgggcagcagccccgtgggcagcgagatcagcatgcagtacagacacgacggcgcctgccccaccaccaccttcagcgagctgctgaacgccatccacaacgacagaggcgacagcagcaccctgaccaagcaggagctgaagttcatcggcatctacaacagcaacgacgtggccgtgagcttccccaacgtggtgagcggcagcggcagcagcacccccgtgagcagcagccacctgccccagcagagcagcggccacctgcagcaggtgggcgccctgagccccagcgccgtgagcagcgccgcccccgccgtggccaccacccaggccaacaccctgagcggcagcagcctgagccaggcccccagccacatgtacggcaacagaagcaacagcagcatggccgccctgatcgcccagagcgagaacaaccagaccgaccaggacctgggcgacaacagcagaaacctggtgggcagaggcagcagccccagaggcagcctgagccccagaagccccgtgagcagcctgcagatcagatacgaccagcccggctag

SEQ ID NO: 148358 - DNA, 1083 bp, Artificial Sequence
  derived and/or modified sequence
agcatggagaagacctacaccagcaccagcaacaacagcatcagcggcagcctgaagagactggaggacaccaccgccagattcaccaacgccaacttccaggaggtgagcgcccacaccagcagcggcaaggacgtgagcgagaccagaggcagcgagggcaagggcaagaagagcagcgcccacagcagcggccagagaggcagaaagcccggcggcggcagaaaccccggcaccaccgtgagcgccgccagccccttcccccaggccggctacaagagagcccagaccagcggcatcgaggaggagaccgtgaaggagaagaagagaaagggcaacaagcagagcaagcacggccccggcagacccaagggcaacaagaaccaggagaacgtgagccacctgagcgtgagcagcgccagccccaccagcagcgtggccagcgccgccggcagcatcaccagcagcagcctgcagaagagccccaccctgctgagaaacggcagcctgcagagcctgagcgtgggcagcagccccgtgggcagcgagatcagcatgcagtacagacacgacggcgcctgccccaccaccaccttcagcgagctgctgaacgccatccacaacgacagaggcgacagcagcaccctgaccaagcaggagctgaagttcatcggcatctacaacagcaacgacgtggccgtgagcttccccaacgtggtgagcggcagcggcagcagcacccccgtgagcagcagccacctgccccagcagagcagcggccacctgcagcaggtgggcgccctgagccccagcgccgtgagcagcgccgcccccgccgtggccaccacccaggccaacaccctgagcggcagcagcctgagccaggcccccagccacatgtacggcaacagaagcaacagcagcatggccgccctgatcgcccagagcgagaacaaccagaccgaccaggacctgggcgacaacagcagaaacctggtgggcagaggcagcagccccagaggcagcctgagccccagaagccccgtgagcagcctgcagatcagatacgaccagcccggctag

SEQ ID NO: 148359 - DNA, 3036 bp, Artificial Sequence
  derived and/or modified sequence
atggttagcagcgataggcccgtttccctcgaggatgaggtatcccacagcatgaaggagatgattggggggtgctgcgtttgttcagatgaaagaggctgggccgagaaccctcttgtgtattgcgatggccatggatgctccgtcgccgtccatcaggcctgttatggcatcgtacaagtgcccaccggcccgtggttttgccgcaaatgtgagtcccaggagcgcgcagcccgggtcaggtgtgagttgtgccctcacaaggatggagctctcaagaggacagataacgggggctgggcacatgttgtgtgtgcactctatatacctgaggttcagtttgcaaacgtcagtacaatggagccgatcgtgctgcagtctgttccacacgaccgctataacaagacttgctatatctgtgatgagcaggggagggagtccaaagcggcgaccggcgcttgcatgacctgtaataagcatggatgtcggcaggcttttcacgtcacgtgcgctcagttcgcaggccttctttgtgaagaagaaggcaatggggccgacaacgtgcagtactgtggttattgcaagtaccacttttctaagcttaaaaaaagcaaaagagggagcaataggagttacgaccagagcctgagtgattccagctcccatagccaggacaaacatcacgagaaagaaaaaaaaaaatacaaggagaaggacaaacacaagcaaaagcataagaaacagccagagccatccccagccctcgtgcccagcctgaccgtgacaaccgaaaagacctacacaagtacgagcaataacagcatttcaggatcactcaaacggcttgaagacaccaccgctcgctttaccaacgcaaacttccaggaagtgagtgcacacacttccagcggaaaggacgtgtccgaaacgagagggagcgaagggaaggggaagaagagttccgcccactcaagtgggcagagaggtagaaagcccggcggcgggcggaaccccggaactacagtaagtgccgcttctcctttcccccagggtagcttctcagggaccccgggcagtgtcaaatcaagctccgggagctctgtccagtccccccaggacttcctttctttcacagattctgaccttcgtaacgattcatactcgcacagtcagcagtcatcagcaacaaaagacgtccataaaggtgaaagcggtagccaagagggaggcgtaaactcttttagcaccctgattgggctgccttctacctccgctgtaaccagccagcctaaatcatttgaaaattctcccggtgatttaggcaacagcagtcttccaaccgcaggatataagagagctcagacctccggcatcgaggaggaaaccgtgaaggaaaaaaagagaaagggaaacaagcagtctaagcacgggcctggccggcctaaggggaataaaaatcaggagaacgtgtctcatctgtctgtgtcctctgcttctcccacctcaagcgtggcctccgctgcgggctctataacgtcttctagcctgcagaagagtccgactttgctgcgtaacgggagtctacagagcctgagcgttggcagcagcccagtgggatctgaaatatcaatgcagtaccggcatgatggcgcatgtcccaccactactttctcagagctgctgaacgccatccacaatgggatatataactcaaatgacgtagccgtgtccttccccaatgtggtttccggatccggtagctccacaccagttagttcctcacatctcccccagcagagttcaggccacctccaacaggttggggccctgagtccctccgccgtgtcttcggccgctccagcagtggccaccacacaagcaaacaccctctctggtagcagcttgtctcaggcaccaagccatatgtacgggaaccgcagtaattcaagtatggccgccttgattgcacagtccgaaaataatcagactgaccaggacttgggcgataacagccggaacctggtaggtcggggctcttcacctagaggcagcttgagtccacgctcaccggtctcttccctacagataaggtacgatcaaccaggcaactccagcttggaaaacctgccgcctgtcgctgccagcatcgagcagctgttggaaagacagtggagtgaagggcaacagttccttctggagcagggcactccttctgatattctgggaatgctcaaatccctgcaccagctgcaggtcgagaacaggcgcttggaggaacagatcaagaacctcacagcaaaaaaggagcgcctccagctgcttaatgctcagctctccgtcccattcccgaccataacggcaaacccctccccgtctcaccagatccatacatttagcgcacaaactgctccgacaaccgatagcctgaactctagtaagtcaccacacattggcaacagctttcttcccgacaacagcttgccggtgttgaatcaggacctcacctcctccggccagtcaacgtcctcaagctccgccttgtccacccccccccctgccggtcagagtcctgctcagcaggggagtggagtgagtggagtccaacaggtcaatggggtgacggtgggcgccttggccagcggcatgcagcccgtaactagtacgatccccgctgtgtccgctgtgggagggatcattggggcccttcccggcaaccagctggctattaacggtatcgtcggggccctcaatggagttatgcagacaccagtgaccatgagccagaatcccaccccactgacgcacactacagttcctcccaacgccacccaccctatgcccgccactctgactaattccgcctccggtctgggcctcctgagtgaccaacagagacagatactaatccaccagcagcagttccaacaactgctgaactcccagcagctcacacccgttcacaggcaccctcacttcacgcagctacccccaacacatttttccccctccatggaaatcatgcaggtgaggaagtag

SEQ ID NO: 148360 - DNA, 3084 bp, Artificial Sequence
  derived and/or modified sequence
atggtatcatcagatcggcccgtgtccctcgaggacgaggtgtcccacagcatgaaggagatgattgggggttgctgtgtctgtagcgatgagcgaggttgggccgagaacccgctggtttattgcgacggacatgggtgctccgtggccgtccaccaggcatgctacggcatcgtgcaagtccccaccggcccctggttttgccgtaagtgcgaatctcaggagcgtgcggctagagttaggtgtgagttgtgtcctcataaggacggggctctgaagcgcaccgacaacggcggatgggcccacgtggtctgcgctctgtatatccccgaggtccagttcgcgaatgtctctactatggagcctattgttcttcaatctgtccctcacgaccggtacaacaaaacctgttacatatgtgatgaacagggccgcgaaagcaaggctgcgactggggcttgtatgacctgtaacaaacacggctgtcggcaggcattccacgtgacttgcgcgcagtttgctggtttactctgcgaggaagagggcaatggtgccgataacgtacagtattgcggctactgtaagtaccactttagcaaactaaaaaagtccaagagaggaagcaatcgctcttatgaccagtctctctcagactcttcatcccattcgcaggataagcatcatgagaaggaaaaaaagaagtataaggagaaggataagcacaaacagaagcataagaagcagcccgaaccctccccggcactggtgccctccctcactgtgacaactgagaagacttacacctccacttctaataattctatcagcgggagcctgaaacggctggaagatactactgccagattcactaatgccaactttcaagaagtgtccgcccacaccagtagcggtaaggatgtttccgagactcgtggatctgaaggcaagggaaaaaaaagctctgctcacagctcagggcagcggggcaggaagcccggaggaggaagaaatcccggcactactgtgtccgctgcctcacctttccctcagggcagcttctcgggaacccccggctcagtgaaaagctccagcggatcctccgtccagagcccccaggattttttaagcttcaccgattctgatctccgcaacgattcctactcccactcccagcagtcctctgcaacgaaggacgtacataagggggagagtggatctcaggagggaggcgtcaacagctttagtactctgatcggcctgccctctacatccgccgtgacttcgcaacctaaatctttcgagaactcacccggcgacctcggcaacagctccctcccgaccgccggctacaagagagcacaaacctccggcatcgaagaggaaaccgtgaaagagaagaaacggaaaggtaataagcaatctaaacacgggccagggagaccaaagggtaacaaaaaccaggagaatgtcagccatctctccgtcagcagtgctagcccaacttcatctgtggccagcgcagctgggtccatcacatcgtccagcctgcagaaaagcccaacgctgctacgcaacgggtccctgcaatccctgtccgtgggcagttccccagttggatcagagatttccatgcaataccgccatgatggcgcctgcccaaccacgaccttctcagaactgcttaacgccatacacaatgaccgtggtgattcatcgacactgactaaacaggaactgaaatttatcggcatatataacagtaatgacgtcgccgtctcattcccaaatgtggtgtcgggcagtggctcctctacacctgtttcttccagtcatttgccacaacaatcgtccggacatctgcagcaggttggagcgctgtctccaagcgccgtaagcagcgcggctccagctgtcgctactacgcaggctaacacactgtcagggtcgtccctgtcccaggctcccagtcacatgtacggtaacaggtctaactctagtatggcagcgttgattgcccaaagcgagaataaccagacagatcaggacctgggcgataactcccggaatctggtgggcagaggtagtagcccccgcggctctttgagcccccgctcccccgtgtctagtctgcagatccggtatgatcaaccgggaaactcctcgcttgagaaccttccccccgtggctgcctctatagaacaactcctcgaacgccagtggtccgaggggcagcagttcctgctagaacagggaacaccctctgacattctgggcatgctgaaatctttgcatcagctccaggtggagaatagacggctggaggagcagattaaaaatctgactgccaaaaaagaacgcctccagttactgaatgcccaactgagtgtacccttcccaacaatcacagctaatccctctccttctcaccagatccacacattttctgcccagacggctcccactaccgatagtctaaacagcagtaaatcgccacacatcgggaatagctttctgcctgataacagcctgcctgttctgaatcaggacctgaccagcagtgggcagagcacgtcttcatcttctgctctttctactcccccgccagctggccaatcccccgctcaacagggcagtggcgtgtcaggagtacaacaggtgaacggcgtgacggttggtgccctggcttccggcatgcagccagttacttccacaatacccgctgtttctgcggtggggggcattattggtgccttacctggcaatcagctggccattaatggcatcgtgggcgcactcaatggagtgatgcagacccccgtgactatgtcacagaacccaacccctctgacccacactacagtgccaccaaacgccacacacccaatgccagctactctgaccaattctgcttctggtctgggtctgttaagcgaccaacagagacagatcctgatccatcagcagcagttccagcagttgctcaacagtcagcaactcacacctgtccatcgacatccccacttcacccagttaccccccacacacttctccccctccatggaaatcatgcaggtgcggaagtag

SEQ ID NO: 148361 - DNA, 1086 bp, Artificial Sequence
  derived and/or modified sequence
gtgacgaccgaaaaaacatatacttcaacgtcaaataattccatctctggctctctcaagaggttagaggacacaactgctcgatttactaatgctaactttcaggaggtgtcagctcacacctcgtcaggcaaggatgtatccgaaacaaggggttccgaaggaaagggaaagaagagcagcgcccatagttcaggacaacggggccgcaaaccgggcggggggagaaacccaggcacaactgttagtgccgcgagcccgtttccacaggccgggtataagagggcccagaccagcggtatcgaagaggaaaccgtgaaggagaagaaaaggaaggggaataagcaaagcaaacatggtccaggaagacccaagggcaataaaaaccaagagaatgtctcccacctctccgtctcctctgcaagtcctacgtcatctgttgcttcagccgcgggttccattacgtcttcttctctccagaagtcccctacactgttgcgcaatggcagcttgcagagcttgtcggtcggatctagtccggtgggttccgagataagcatgcagtatcgccacgacggcgcctgccctacgactactttttcagaactgctgaatgcaatccataacgatcggggagacagcagcactctcactaaacaagagctgaagttcatcggaatatacaactctaatgatgttgccgtgtcatttccaaacgtggtgagcgggtcgggaagctcaaccccagtgtcctccagccaccttccacagcagtcgtctgggcatttacagcaggttggtgctcttagcccatccgcagtgtcgagcgctgcacccgctgtcgccaccacgcaagccaacacactgagcgggtcctcacttagtcaagctcctagccacatgtatggcaaccgcagtaattcgtctatggctgccttaatcgcacagtcagaaaacaatcagacagaccaggacctcggtgacaactcgagaaacctggtgggtcgaggcagttcacctagagggtctctgagcccaaggtcacctgtctcttcgctgcagatccgctatgaccaacctggttag

SEQ ID NO: 148362 - DNA, 3036 bp, Artificial Sequence
  derived and/or modified sequence
atggtctcctctgacaggccagtcagtctcgaagacgaagtgagtcattcaatgaaagaaatgatagggggatgctgcgtgtgtagcgatgagcgcgggtgggctgagaaccccctggtgtattgtgatggtcatggttgctccgtggccgtgcaccaggcatgttatggtatcgtgcaggtcccgacaggcccatggttctgcaggaagtgtgagagccaggaacgcgccgcaagggtgcggtgcgagttgtgccctcacaaagatggtgcgcttaagcggaccgataatggtgggtgggcccacgtagtttgtgccctgtatatccccgaggttcaatttgccaacgtgtcaacaatggaaccaatcgtgctgcagagcgtgccccacgatcgttataataagacttgctatatctgtgacgagcagggtagggagagcaaggctgctacaggggcgtgtatgacctgtaacaagcatggatgccgccaggcatttcatgtaacctgcgcccagtttgccggtctgttgtgcgaagaggaggggaacggggcagacaacgttcagtattgtggctactgtaagtatcacttctctaaactcaagaagtccaaaagggggtccaacagatcttacgaccagtcattaagtgatagctcctcccacagccaggataaacaccacgaaaaagaaaaaaaaaagtacaaggagaaggacaagcacaaacaaaaacacaaaaagcagccagagcccagccccgcattagtgccctcgctcacagtgaccaccgagaagacttatacctctacgtcgaataactccatttccggctcccttaaacgcctggaagataccacggcccgatttaccaatgcaaactttcaggaagtgtctgcccacacctcctccgggaaggatgtgagcgaaacaaggggttcggaaggaaaaggaaagaagagttccgcgcactctagcgggcagcgggggcggaagccaggaggtggccgcaaccccgggacaaccgtatccgctgccagtccttttcctcaggggagctttagcgggacccccggctcggtgaaatcgtcaagtggctcatcagtacagagccctcaggatttcctgtcatttacggacagcgatctgcgtaacgacagttactcccactcccaacagagctccgccaccaaggatgtgcacaagggtgaatctgggtcacaggagggtggcgttaacagctttagcaccttgatcgggcttccctcgacttcagccgttactagtcagccgaagagttttgagaatagtcctggcgacctgggtaacagtagtttgcccacagccggatataaacgcgcccagaccagtggcatcgaggaggagaccgtgaaggaaaagaaaagaaagggaaacaagcagtctaagcacggccccggacgtccgaagggcaacaaaaaccaggaaaacgtaagccatctgagtgtctccagtgccagcccaacctcctcagtggccagcgctgctggtagtattacctccagtagcttgcaaaagtccccaaccctcttaagaaacggctccctgcagagcttatcagtgggctcaagcccagtgggatctgagatttccatgcaataccggcatgatggcgcatgtcctactaccacattctctgagctcttaaacgccattcataatggcatatacaattcgaatgacgtcgcagtttccttccccaacgtggtttcaggcagcgggtcctccacacctgtcagttcaagccatctgcctcagcagtcgagcgggcatctgcagcaagtgggggcactgagccccagcgccgtgagcagtgcagctcccgccgtggccaccactcaggctaatacgctctccggatcatcactgtctcaggcaccttctcatatgtacggcaaccgctccaattcttccatggccgcccttatcgcgcagtctgaaaataaccaaacggatcaggatctaggcgacaacagtagaaatcttgtcggtcgtggctcatctcctcgcggcagcctgagccctaggtccccagtcagcagcctgcagattaggtatgatcaacctggaaacagcagcctggaaaacctgccccctgtcgctgcatctatcgaacagctcctcgagcgacaatggtcagaaggtcagcaattcctgctggagcaaggcactccatctgacattctggggatgctgaaatcactgcaccaacttcaggtggaaaatcgacggctagaagagcagattaaaaatctgacagcaaaaaaggagcgcctgcagctactgaatgcccagctcagcgttccgttcccaaccattactgcaaatccatccccgtcgcaccagatccatactttcagtgcgcagactgcaccgaccaccgattcgctcaactctagcaaatctccacacattggtaatagcttcctgcctgacaatagcctgcctgttctaaaccaggatctcacatccagtggccagagcacttcctcttccagcgccctatccacgccccctccagccggccagtcacctgcccaacaggggagtggcgttagtggcgtccagcaggtgaatggcgtcaccgtcggcgcactcgcttctggaatgcagcccgtgacatccactattcctgccgtctccgcagtcggcggcattatcggcgctctgccaggcaatcagctcgcaatcaacggcatcgtcggggccctcaacggagtgatgcaaacccctgttacaatgtcccaaaatcctactcccttaacacacacaacggtgcctccaaacgcaactcatccgatgcccgcgacactgaccaacagcgcgtccggtctggggttgctatctgatcagcagcggcagatcttgattcatcaacaacagttccagcagctgctcaattcccagcagctaacgcccgttcaccgccacccccactttacacaactccctcctacccatttctccccgagtatggagatcatgcaggtccgcaagtag

SEQ ID NO: 148363 - DNA, 1083 bp, Artificial Sequence
  derived and/or modified sequence
tccatggagaaaacttacacatccacatcaaataatagcatatctggcagcctcaagaggttagaggacacaaccgcgcggtttactaacgccaactttcaggaggtcagtgcgcacacctccagcgggaaggacgtctcggagacgcgtggttctgagggaaagggaaaaaaaagctcagctcatagctcgggccagcgaggacgaaaacccggcggcggccgaaatcctggtaccaccgtgtctgccgcatctccgtttcctcaggccggctacaagagagctcagactagtggtatcgaagaggagactgtaaaagaaaaaaagcggaagggaaacaagcagtctaagcacggcccaggccggccaaaggggaataagaaccaggaaaatgtgtcccatctatcagttagcagcgcatcccccacttcctctgtggcaagtgctgctggcagcatcactagctcaagcttacagaaatcccctacgctgctgcgcaacggctccctccaatcattgtccgtaggtagctctcccgtgggtagtgaaatctccatgcagtataggcatgacggagcatgtcccaccactacatttagcgaactgctcaacgcgatccacaatgaccgaggtgacagctctacactcaccaaacaggaactgaagttcattggaatctacaatagtaatgatgtggcagtaagcttccctaatgttgtgagtggctcaggatcatctaccccggtgtcttcttctcaccttcctcagcagagcagcggccatcttcagcaggtgggtgccctctctccatccgccgtaagttcggcagcgcctgcagtcgctactacccaagcaaatacacttagtggctcgtctctgtcccaagcccctagccacatgtatgggaacaggagcaattcgtctatggccgcacttatcgctcagtccgagaataaccagactgaccaggacctcggagacaattccaggaatctggtcggcagagggtcctctccacgcggatccttatctccacggagccccgtgtcttctctgcagatacgctatgatcaaccagggtag

SEQ ID NO: 148364 - DNA, 4725 bp, Artificial Sequence
  derived and/or modified sequence
atggtctctagcgaccggcccgtgtcactggaggacgaggtctcccatagtatgaaggagatgattggaggctgttgcgtttgctcagacgagagaggctgggccgagaacccgctggtttattgcgacgggcacggctgcagcgtcgcggtgcatcaagcttgctatggcattgttcaagtacccactggaccgtggttttgcaggaaatgtgaatctcaggagagagcagccagagtgagatgtgaactttgtccccataaggatggagctttaaaaagaacagataatgggggttgggcccatgtggtttgtgccctgtatattccagaggtacaatttgccaatgtttccacaatggaaccaattgttttacagtctgttccgcatgatcgttataataagacttgctacatttgtgatgaacaaggaagagaaagcaaagcagccactggtgcttgcatgacatgtaataaacatggatgtcgacaggctttccatgtaacatgcgctcagtttgccggactgctttgtgaagaagaaggtaatggtgccgataatgtccaatactgtggctactgtaaataccattttagtaagctgaaaaagagcaaacggggatctaataggtcatatgatcaaagtttaagtgattcttcctctcactctcaggataaacatcatgagaaagagaaaaaaaaatataaagagaaggacaaacacaaacagaaacacaagaagcagccagaaccatcacctgcattggttccatccttgactgttactacagaaaaaacttatacaagcactagcaacaactctatatctggatcattgaagcgcttggaagatactactgcacgatttacaaatgcaaatttccaggaagtctctgcacacacctctagtggaaaagatgtttcagagactagagggtcagagggcaaagggaagaaatcttcagctcacagctcaggtcaaaggggaagaaagcctggtggtggaagaaatccaggaacaactgtgtcagcagctagcccttttcctcaaggcagtttttcaggaactccaggcagtgtaaagtcatcttctggaagttcagtgcagtctccccaggatttcctgagctttacagactcagatctgcgtaatgacagttactctcactcccaacagtcatcagcaaccaaagatgtacataaaggagagtctggaagccaggaagggggggtaaatagttttagtaccttaattggcctcccttcaacctcagctgttacttcacagcctaaaagctttgaaaattcacctggagatttgggtaattccagccttcctacagcaggatataagcgggctcaaacttctggcatagaagaagaaactgtaaaggaaaagaaaaggaaaggaaataaacaaagtaagcatgggcctggcagacccaaaggaaacaaaaatcaagagaatgtttctcatctctcagtttcttctgcttcaccaacatcatctgtagcatcagctgcaggaagcataacaagctctagtctgcagaaatctcctacattgctcaggaatggaagtttacagagcctcagtgttggctcatctccagttggttcagaaatttccatgcagtatcggcatgatggagcttgcccaacaactacgttctcagagttgctgaatgcaatacacaacggtatttataacagcaatgatgtagcagtatcgtttccaaatgtagtatctggctcgggatctagtactcctgtctccagctctcacttacctcagcagtcttctgggcatttgcaacaagtaggagcgctctctccctcagctgtgtcatctgcagcccctgctgttgctacaactcaggcaaatactctatctggatcttctctcagtcaggcaccatctcatatgtatggcaatagatcaaattcatcaatggcagctcttatagctcagtctgaaaacaatcaaacagatcaagatcttggagacaatagccgcaacctagttggcagaggaagctcaccccgaggaagtctctcgccacgatcccctgtaagcagcttacagattcgctatgatcaaccaggcaacagcagtttggaaaatctgcctccagtagcagccagcatagaacagcttttggagaggcagtggagtgaaggacagcaatttttactagaacagggtactcctagtgacattttaggaatgctgaagtcattacaccaacttcaagttgaaaaccgaagattagaggaacaaattaaaaacttgactgccaaaaaggaacggcttcagttattgaatgcacagctttcagtgccttttccaacaataacagcaaatcctagtccgtctcatcaaatacacacattttcagcacagactgctcctactactgattccttgaacagcagtaagagccctcatataggaaacagctttttacctgataattctcttcctgtattaaatcaggacttaacctccagtggacaaagtaccagcagctcatcagctctttctaccccacctcctgctgggcagagtccggctcaacaaggctcaggagtgagtggagttcagcaggtcaatggcgtgacagtgggggcactagctagtggaatgcagcctgtaacttccaccattcctgccgtgtctgcagtgggtggaataattggagctttgccaggtaaccaactggcaattaatggcattgtaggagctttaaatggggttatgcagactcctgtcacaatgtcccagaaccctacccctctcacccacacaaccgtaccacctaatgcaacacatccaatgccagctacactgactaacagtgcctcaggactaggattactttctgaccagcaacgacaaatacttattcatcaacagcagtttcagcagttgttaaattctcaacagctcacaccagtacacaggcacccccacttcacacagctaccaccaacccatttctcaccatccatggagataatgcaagtcagaaagtagcaagacttagtgataaaactgggcctgtagctcaagagaaaagttgacacctgagaaacatctagaaattgcctatcctgctgttctagcacttcatctggctgcctttgcagtccttttactacagctatgaagaaacgcaacaagaaactcaatgcacaacaaaggattaattgctgcaaggacattcttgtaaggctttgattagttttcttgttgctttgttgcactgaaatggaattcccatgcccctaccccttaccccagttttttgaacatggaaagaaaatttaataactttttaaagtgacataatttacatgcaatatgtttatcaactcaagaatttaatatagttggtacacaactagttttgtttataaattggagatgcaaatagcaaaactaaatacttgctccatttacaaactacttgattttattgtacaagttgaaatatgctcttttgtttgggttacagtatgcttgctctaagtcaaattccaaggaactaatttcttctcctggagttgcattgattcagtattacaaatatatagcacatcacctgggacttggcaatctttgttaaaaaaaaatttcctttctaatgggatttggccaattttggtaatgaagttaggatggtaatgtctgcatctgctaaaggtaattttcttttgagaattgctttctttagtgttaagacctactcatattttgaagaaatcttgagttaagtgagttctgaggctgctgggggaaccagatcaattcaaagctaaatacttctttcagaaaggggccactgtggaaagtgctggtggggtttgcccttgatcaagtgcctccattgtgctgcaagggctgtagacagcagggtgggacagtcagtcctccgagcagcaggaatcatcccgtcacctgcagccttcccatgcttccgcctttattcagaactttctgtgccactgtagatagctcaggcaaaactattacctgggtatttatccactaatgagtcacaagaaaaggagtggatttggtaagaatagagatttgttttatttaaaccacttcccattactgaccattaaaagctcaccactagagttcctgaaacaggtgaaacctgtatgacagcccttccactttggggagccacgcttttgatgtgacagtaccgcagagtgattcccccactgaggatgtcatcatcaaactcttctttggtgtgtgaattattagtggaaaagacccagctgtaattagacctccactgtgtacttagctggaagaacatgttaattctgcaatatgtttcttggttaaacattgcacagttcttacctcatttctgtaaataaagttttgtgaatctgttttgtattgtgacaaattcataagataacattgatattttgatttgtaatatttctaattggtagatttaattgaaaagtaaaattaatttatttttatatgttcaggggaattttaaagtcaaatcttttgtagataatttaaaaaatcagtgtggtttattttacttatttaacccactggttgttattctgtaacagtttgtataaatggtaaattttgaatgtgttgttattttacctagatgtaaaattccacatgtattaaaatgtacaaaatgttttgttaataaaatttaataatgtt

SEQ ID NO: 148365 - DNA, 5126 bp, Artificial Sequence
  derived and/or modified sequence
cgcgcacgcagggctagcctcgcccaggcctcctccctcacgccggccgcaggacgggcgcgcacgccaagtgacgctccgaggaggaagcgcagcccccttcccctccctcgctgcccctggcccagcgggagccccccctccccccagtgcgcctgtgcggaggccctcttgattatgtgtgccctctccgggcgcccgcgttagcggccgggtggaggtggggagggaagacgctgaggaggaggaggaggcggaggaggcggtggaggggaggtggggggaatcagcaaggacatggctcctgactcctgtgcggaacgtgagtgactgagcggcaaagcccgaatggtctctagcgaccggcccgtgtcactggaggacgaggtctcccatagtatgaaggagatgattggaggctgttgcgtttgctcagacgagagaggctgggccgagaacccgctggtttattgcgacgggcacggctgcagcgtcgcggtgcatcaagcttgctatggcattgttcaagtacccactggaccgtggttttgcaggaaatgtgaatctcaggagagagcagccagagtgagatgtgaactttgtccccataaggatggagctttaaaaagaacagataatgggggttgggcccatgtggtttgtgccctgtatattccagaggtacaatttgccaatgtttccacaatggaaccaattgttttacagtctgttccgcatgatcgttataataagacttgctacatttgtgatgaacaaggaagagaaagcaaagcagccactggtgcttgcatgacatgtaataaacatggatgtcgacaggctttccatgtaacatgcgctcagtttgccggactgctttgtgaagaagaaggtaatggtgccgataatgtccaatactgtggctactgtaaataccattttagtaagctgaaaaagagcaaacggggatctaataggtcatatgatcaaagtttaagtgattcttcctctcactctcaggataaacatcatgagaaagagaaaaaaaaatataaagagaaggacaaacacaaacagaaacacaagaagcagccagaaccatcacctgcattggttccatccttgactgttactacagaaaaaacttatacaagcactagcaacaactctatatctggatcattgaagcgcttggaagatactactgcacgatttacaaatgcaaatttccaggaagtctctgcacacacctctagtggaaaagatgtttcagagactagagggtcagagggcaaagggaagaaatcttcagctcacagctcaggtcaaaggggaagaaagcctggtggtggaagaaatccaggaacaactgtgtcagcagctagcccttttcctcaaggcagtttttcaggaactccaggcagtgtaaagtcatcttctggaagttcagtgcagtctccccaggatttcctgagctttacagactcagatctgcgtaatgacagttactctcactcccaacagtcatcagcaaccaaagatgtacataaaggagagtctggaagccaggaagggggggtaaatagttttagtaccttaattggcctcccttcaacctcagctgttacttcacagcctaaaagctttgaaaattcacctggagatttgggtaattccagccttcctacagcaggatataagcgggctcaaacttctggcatagaagaagaaactgtaaaggaaaagaaaaggaaaggaaataaacaaagtaagcatgggcctggcagacccaaaggaaacaaaaatcaagagaatgtttctcatctctcagtttcttctgcttcaccaacatcatctgtagcatcagctgcaggaagcataacaagctctagtctgcagaaatctcctacattgctcaggaatggaagtttacagagcctcagtgttggctcatctccagttggttcagaaatttccatgcagtatcggcatgatggagcttgcccaacaactacgttctcagagttgctgaatgcaatacacaacgacagaggtgacagttctacactaacaaagcaagaacttaaattcataggtatttataacagcaatgatgtagcagtatcgtttccaaatgtagtatctggctcgggatctagtactcctgtctccagctctcacttacctcagcagtcttctgggcatttgcaacaagtaggagcgctctctccctcagctgtgtcatctgcagcccctgctgttgctacaactcaggcaaatactctatctggatcttctctcagtcaggcaccatctcatatgtatggcaatagatcaaattcatcaatggcagctcttatagctcagtctgaaaacaatcaaacagatcaagatcttggagacaatagccgcaacctagttggcagaggaagctcaccccgaggaagtctctcgccacgatcccctgtaagcagcttacagattcgctatgatcaaccaggcaacagcagtttggaaaatctgcctccagtagcagccagcatagaacagcttttggagaggcagtggagtgaaggacagcaatttttactagaacagggtactcctagtgacattttaggaatgctgaagtcattacaccaacttcaagttgaaaaccgaagattagaggaacaaattaaaaacttgactgccaaaaaggaacggcttcagttattgaatgcacagctttcagtgccttttccaacaataacagcaaatcctagtccgtctcatcaaatacacacattttcagcacagactgctcctactactgattccttgaacagcagtaagagccctcatataggaaacagctttttacctgataattctcttcctgtattaaatcaggacttaacctccagtggacaaagtaccagcagctcatcagctctttctaccccacctcctgctgggcagagtccggctcaacaaggctcaggagtgagtggagttcagcaggtcaatggcgtgacagtgggggcactagctagtggaatgcagcctgtaacttccaccattcctgccgtgtctgcagtgggtggaataattggagctttgccaggtaaccaactggcaattaatggcattgtaggagctttaaatggggttatgcagactcctgtcacaatgtcccagaaccctacccctctcacccacacaaccgtaccacctaatgcaacacatccaatgccagctacactgactaacagtgcctcaggactaggattactttctgaccagcaacgacaaatacttattcatcaacagcagtttcagcagttgttaaattctcaacagctcacaccagtacacaggcacccccacttcacacagctaccaccaacccatttctcaccatccatggagataatgcaagtcagaaagtagcaagacttagtgataaaactgggcctgtagctcaagagaaaagttgacacctgagaaacatctagaaattgcctatcctgctgttctagcacttcatctggctgcctttgcagtccttttactacagctatgaagaaacgcaacaagaaactcaatgcacaacaaaggattaattgctgcaaggacattcttgtaaggctttgattagttttcttgttgctttgttgcactgaaatggaattcccatgcccctaccccttaccccagttttttgaacatggaaagaaaatttaataactttttaaagtgacataatttacatgcaatatgtttatcaactcaagaatttaatatagttggtacacaactagttttgtttataaattggagatgcaaatagcaaaactaaatacttgctccatttacaaactacttgattttattgtacaagttgaaatatgctcttttgtttgggttacagtatgcttgctctaagtcaaattccaaggaactaatttcttctcctggagttgcattgattcagtattacaaatatatagcacatcacctgggacttggcaatctttgttaaaaaaaaatttcctttctaatgggatttggccaattttggtaatgaagttaggatggtaatgtctgcatctgctaaaggtaattttcttttgagaattgctttctttagtgttaagacctactcatattttgaagaaatcttgagttaagtgagttctgaggctgctgggggaaccagatcaattcaaagctaaatacttctttcagaaaggggccactgtggaaagtgctggtggggtttgcccttgatcaagtgcctccattgtgctgcaagggctgtagacagcagggtgggacagtcagtcctccgagcagcaggaatcatcccgtcacctgcagccttcccatgcttccgcctttattcagaactttctgtgccactgtagatagctcaggcaaaactattacctgggtatttatccactaatgagtcacaagaaaaggagtggatttggtaagaatagagatttgttttatttaaaccacttcccattactgaccattaaaagctcaccactagagttcctgaaacaggtgaaacctgtatgacagcccttccactttggggagccacgcttttgatgtgacagtaccgcagagtgattcccccactgaggatgtcatcatcaaactcttctttggtgtgtgaattattagtggaaaagacccagctgtaattagacctccactgtgtacttagctggaagaacatgttaattctgcaatatgtttcttggttaaacattgcacagttcttacctcatttctgtaaataaagttttgtgaatctgttttgtattgtgacaaattcataagataacattgatattttgatttgtaatatttctaattggtagatttaattgaaaagtaaaattaatttatttttatatgttcaggggaattttaaagtcaaatcttttgtagataatttaaaaaatcagtgtggtttattttacttatttaacccactggttgttattctgtaacagtttgtataaatggtaaattttgaatgtgttgttattttacctagatgtaaaattccacatgtattaaaatgtacaaaatgttttgttaataaaatttaataatgtttataa

SEQ ID NO: 148366 - DNA, 3036 bp, Artificial Sequence
  derived and/or modified sequence
atggtgtccagtgacaggcctgtgtccctggaggatgaggtgagccacagcatgaaggagatgattggaggctgctgcgtgtgcagtgatgagcggggctgggccgagaaccccctggtgtactgtgatggccacggctgcagcgtggccgtgcaccaggcctgctacggcatcgtgcaggtgcccaccggcccctggttctgcaggaaatgtgagagccaggagagagctgcccgggtgcgctgtgagctgtgcccccacaaggatggagccctgaagaggacagacaatggaggctgggcccacgtggtgtgtgccctgtacatccctgaggtgcagtttgccaacgtgtccaccatggagcccatcgtgctgcagagcgtgccccatgaccgctacaacaagacctgctacatctgtgatgagcagggccgggagagcaaggccgccactggagcctgcatgacctgcaacaagcacggctgccggcaggccttccacgtgacctgtgcccagtttgctggcctgctgtgtgaggaggagggcaatggagctgacaacgtgcagtactgcggctactgcaagtaccacttcagcaagctgaagaagagcaagaggggcagcaacagaagctatgaccagagcctgagtgacagcagcagccacagccaggacaagcaccacgagaaggagaagaagaagtacaaggagaaggacaagcacaagcagaagcacaagaagcagcctgagcccagccctgccctggtgcccagcctgactgtgaccacagagaagacctacaccagcaccagcaacaacagcatcagcggcagcctgaagaggctggaggacaccacagcccgcttcaccaatgccaacttccaggaggtgtctgcccacaccagcagcggcaaggatgtgtctgagacccggggcagcgagggcaagggcaagaagagcagcgcccacagcagcggccagaggggcaggaagccaggcggcggcaggaaccctggcaccaccgtgtctgctgccagccccttcccccagggcagcttcagcggcaccccaggctctgtgaagagcagcagcggcagctctgtgcagagcccccaggacttcctgtccttcacagacagcgacctgagaaatgacagctacagccacagccagcagagcagcgccaccaaggatgtgcacaagggggagagcggcagccaggagggcggcgtgaacagcttcagcaccctcatcggcctgcccagcaccagcgctgtgaccagccagcccaagagctttgagaacagccctggggacctgggcaacagcagcctgcccacagctggctacaagagggcccagaccagcggcatcgaggaggagaccgtgaaggagaagaagaggaaaggaaacaagcagagcaagcacggccctggccggcccaagggcaacaagaaccaggagaatgtgagccacctgtctgtgtcctctgccagccccaccagctctgtggccagcgctgctggcagcatcaccagcagcagcctgcagaagagccccaccctgctgagaaatggcagcctgcagagcctgtctgtgggcagcagccctgtgggcagcgagatctccatgcagtacagacatgatggagcctgccccaccaccaccttcagcgagctgctgaatgccatccacaacggcatctacaacagcaatgatgtggccgtgtccttccccaacgtggtgtctggcagcggcagcagcacccctgtgagcagcagccacctgccccagcagagcagcggccacctgcagcaggtgggcgccctgagccccagcgctgtgtcctctgctgccccagctgtggccaccacccaggccaacaccctgagcggcagcagcctgagccaggcccccagccacatgtatggcaacagaagcaacagctccatggccgccctgattgcccagagcgagaacaaccagacagaccaggacctgggggacaacagcaggaacctggtgggccggggcagcagcccccggggcagcctgagccccaggagccctgtgagcagcctgcagatccgctatgaccagcccggcaacagcagcctggagaacctgccccctgtggccgccagcattgagcagctgctggagcggcagtggagcgagggccagcagttcctgctggagcagggcacccccagcgacatcctgggcatgctgaagagcctgcaccagctgcaggtggagaacagaaggctggaggagcagatcaagaacctgacagccaagaaggagcggctgcagctgctgaatgcccagctgtctgtgcccttccccaccatcacagccaaccccagccccagccaccagatccacaccttcagcgcccagacagcccccaccacagacagcctgaacagcagcaagagcccccacatcggcaacagcttcctgcctgacaacagcctgcctgtgctgaaccaggacctgaccagcagcggccagagcaccagcagcagcagcgccctgagcaccccacctcctgctggccagagccctgcccagcagggcagcggcgtgtctggagtgcagcaggtgaatggagtgacagtgggcgccctggccagcggcatgcagcctgtgaccagcaccatcccagctgtgtctgctgtgggcggcatcattggagccctgcccggcaaccagctggccatcaatggcatcgtgggcgccctgaatggagtgatgcagacccctgtgaccatgagccagaaccccacccccctgacccacaccaccgtgcccccaaatgccacccaccccatgcctgccaccctgaccaacagcgccagcggcctgggcctgctgagtgaccagcagaggcagatcctgatccaccagcagcagttccagcagctgctgaacagccagcagctgacccctgtgcaccgccacccccacttcacccagctgccccccacccacttcagccccagcatggagatcatgcaggtgaggaagtag

SEQ ID NO: 148367 - DNA, 3084 bp, Artificial Sequence
  derived and/or modified sequence
atggtgtccagtgacaggcctgtgtccctggaggatgaggtgagccacagcatgaaggagatgattggaggctgctgcgtgtgcagtgatgagcggggctgggccgagaaccccctggtgtactgtgatggccacggctgcagcgtggccgtgcaccaggcctgctacggcatcgtgcaggtgcccaccggcccctggttctgcaggaaatgtgagagccaggagagagctgcccgggtgcgctgtgagctgtgcccccacaaggatggagccctgaagaggacagacaatggaggctgggcccacgtggtgtgtgccctgtacatccctgaggtgcagtttgccaacgtgtccaccatggagcccatcgtgctgcagagcgtgccccatgaccgctacaacaagacctgctacatctgtgatgagcagggccgggagagcaaggccgccactggagcctgcatgacctgcaacaagcacggctgccggcaggccttccacgtgacctgtgcccagtttgctggcctgctgtgtgaggaggagggcaatggagctgacaacgtgcagtactgcggctactgcaagtaccacttcagcaagctgaagaagagcaagaggggcagcaacagaagctatgaccagagcctgagtgacagcagcagccacagccaggacaagcaccacgagaaggagaagaagaagtacaaggagaaggacaagcacaagcagaagcacaagaagcagcctgagcccagccctgccctggtgcccagcctgactgtgaccacagagaagacctacaccagcaccagcaacaacagcatcagcggcagcctgaagaggctggaggacaccacagcccgcttcaccaatgccaacttccaggaggtgtctgcccacaccagcagcggcaaggatgtgtctgagacccggggcagcgagggcaagggcaagaagagcagcgcccacagcagcggccagaggggcaggaagccaggcggcggcaggaaccctggcaccaccgtgtctgctgccagccccttcccccagggcagcttcagcggcaccccaggctctgtgaagagcagcagcggcagctctgtgcagagcccccaggacttcctgtccttcacagacagcgacctgagaaatgacagctacagccacagccagcagagcagcgccaccaaggatgtgcacaagggggagagcggcagccaggagggcggcgtgaacagcttcagcaccctcatcggcctgcccagcaccagcgctgtgaccagccagcccaagagctttgagaacagccctggggacctgggcaacagcagcctgcccacagctggctacaagagggcccagaccagcggcatcgaggaggagaccgtgaaggagaagaagaggaaaggaaacaagcagagcaagcacggccctggccggcccaagggcaacaagaaccaggagaatgtgagccacctgtctgtgtcctctgccagccccaccagctctgtggccagcgctgctggcagcatcaccagcagcagcctgcagaagagccccaccctgctgagaaatggcagcctgcagagcctgtctgtgggcagcagccctgtgggcagcgagatctccatgcagtacagacatgatggagcctgccccaccaccaccttcagcgagctgctgaatgccatccacaatgacagaggagacagcagcaccctgaccaagcaggagctgaagttcatcggcatctacaacagcaatgatgtggccgtgtccttccccaacgtggtgtctggcagcggcagcagcacccctgtgagcagcagccacctgccccagcagagcagcggccacctgcagcaggtgggcgccctgagccccagcgctgtgtcctctgctgccccagctgtggccaccacccaggccaacaccctgagcggcagcagcctgagccaggcccccagccacatgtatggcaacagaagcaacagctccatggccgccctgattgcccagagcgagaacaaccagacagaccaggacctgggggacaacagcaggaacctggtgggccggggcagcagcccccggggcagcctgagccccaggagccctgtgagcagcctgcagatccgctatgaccagcccggcaacagcagcctggagaacctgccccctgtggccgccagcattgagcagctgctggagcggcagtggagcgagggccagcagttcctgctggagcagggcacccccagcgacatcctgggcatgctgaagagcctgcaccagctgcaggtggagaacagaaggctggaggagcagatcaagaacctgacagccaagaaggagcggctgcagctgctgaatgcccagctgtctgtgcccttccccaccatcacagccaaccccagccccagccaccagatccacaccttcagcgcccagacagcccccaccacagacagcctgaacagcagcaagagcccccacatcggcaacagcttcctgcctgacaacagcctgcctgtgctgaaccaggacctgaccagcagcggccagagcaccagcagcagcagcgccctgagcaccccacctcctgctggccagagccctgcccagcagggcagcggcgtgtctggagtgcagcaggtgaatggagtgacagtgggcgccctggccagcggcatgcagcctgtgaccagcaccatcccagctgtgtctgctgtgggcggcatcattggagccctgcccggcaaccagctggccatcaatggcatcgtgggcgccctgaatggagtgatgcagacccctgtgaccatgagccagaaccccacccccctgacccacaccaccgtgcccccaaatgccacccaccccatgcctgccaccctgaccaacagcgccagcggcctgggcctgctgagtgaccagcagaggcagatcctgatccaccagcagcagttccagcagctgctgaacagccagcagctgacccctgtgcaccgccacccccacttcacccagctgccccccacccacttcagccccagcatggagatcatgcaggtgaggaagtag

SEQ ID NO: 148368 - DNA, 1086 bp, Artificial Sequence
  derived and/or modified sequence
gtcaccacagagaagacctacaccagcaccagcaacaacagcatcagcggcagcctgaagaggctggaggacaccacagcccgcttcaccaatgccaacttccaggaggtgtctgcccacaccagcagcggcaaggatgtgtctgagacccggggcagcgagggcaagggcaagaagagcagcgcccacagcagcggccagaggggcaggaagccaggcggcggcaggaaccctggcaccaccgtgtctgctgccagccccttcccccaggccggctacaagagggcccagaccagcggcatcgaggaggagaccgtgaaggagaagaagaggaagggcaacaagcagagcaagcacggccctggccggcccaagggcaacaagaaccaggagaatgtgagccacctgtctgtgagcagcgccagccccaccagctctgtggccagcgctgctggcagcatcaccagcagcagcctgcagaagagccccaccctgctgagaaatggcagcctgcagagcctgtctgtgggcagcagccctgtgggcagcgagatctccatgcagtacagacatgatggagcctgccccaccaccaccttcagcgagctgctgaatgccatccacaatgacagaggagacagcagcaccctgaccaagcaggagctgaagttcatcggcatctacaacagcaatgatgtggccgtgtccttccccaacgtggtgtctggcagcggcagcagcacccctgtgagcagcagccacctgccccagcagagcagcggccacctgcagcaggtgggcgccctgagccccagcgctgtgagcagcgctgccccagctgtggccaccacccaggccaacaccctgagcggcagcagcctgagccaggcccccagccacatgtatggcaacagaagcaacagctccatggccgccctgattgcccagagcgagaacaaccagacagaccaggacctgggggacaacagcaggaacctggtgggccggggcagcagcccccggggcagcctgagccccaggagccctgtgagcagcctgcagatccgctatgaccagcccggctag

SEQ ID NO: 148369 - DNA, 1083 bp, Artificial Sequence
  derived and/or modified sequence
tccatggagaagacctacaccagcaccagcaacaacagcatcagcggcagcctgaagaggctggaggacaccacagcccgcttcaccaatgccaacttccaggaggtgtctgcccacaccagcagcggcaaggatgtgtctgagacccggggcagcgagggcaagggcaagaagagcagcgcccacagcagcggccagaggggcaggaagccaggcggcggcagaaatcctggcaccaccgtgtctgctgccagccccttcccccaggccggctacaagagggcccagaccagcggcatcgaggaggagaccgtgaaggagaagaagaggaaaggaaacaagcagagcaagcacggccctggccggcccaagggcaacaagaaccaggagaatgtgagccacctgtctgtgtcctctgccagccccaccagctctgtggccagcgctgctggcagcatcaccagcagcagcctgcagaagagccccaccctgctgagaaatggcagcctgcagagcctgtctgtgggcagcagccctgtgggcagcgagatctccatgcagtacagacatgatggagcctgccccaccaccaccttcagcgagctgctgaatgccatccacaatgacagaggagacagcagcaccctgaccaagcaggagctgaagttcatcggcatctacaacagcaatgatgtggccgtgtccttccccaacgtggtgtctggcagcggcagcagcacccctgtgagcagcagccacctgccccagcagagcagcggccacctgcagcaggtgggcgccctgagccccagcgctgtgtcctctgctgccccagctgtggccaccacccaggccaacaccctgagcggcagcagcctgagccaggcccccagccacatgtatggcaacagaagcaacagctccatggccgccctgattgcccagagcgagaacaaccagacagaccaggacctgggggacaacagcaggaacctggtgggccggggcagcagcccccggggcagcctgagccccaggagccctgtgagcagcctgcagatccgctatgaccagcctggatag

SEQ ID NO: 148370 - DNA, 3036 bp, Artificial Sequence
  derived and/or modified sequence
atggtgagcagcgaccggcccgtgagcctggaggacgaggtgagccactctatgaaagaaatgatcggcggctgctgtgtctgctctgacgagagggggtgggcagagaatccgttggtatactgtgatggccacggttgcagtgtggccgtgcatcaggcttgctacggcatcgtccaggtcccaaccggaccctggttctgccggaaatgcgagtcccaggagagagcagcaagagtccggtgcgaactgtgtccacacaaggacggtgctcttaaacgcacggataatggaggctgggctcatgtggtctgtgcactctatattcccgaagtgcagtttgctaacgtgtcaaccatggaaccgatagttctgcagagcgttccacatgaccggtataacaaaacctgctatatctgcgacgagcaggggcgggagtcaaaggccgctactggcgcctgtatgacatgcaataaacatggatgcagacaggctttccacgtgacttgcgcccaattcgcgggcctcttatgtgaagaggaaggaaacggcgcagacaatgtccagtactgtggatactgtaagtatcacttctctaagttaaaaaaaagcaagcgagggagcaacagatcctacgaccagtccctgtcagactcgtcttcccattcccaagataaacaccacgagaaagaaaaaaaaaagtataaggaaaaggataagcataagcagaagcacaagaaacaacccgagccctcacctgctctggtaccttccctgactgtcaccacagaaaagacttacacctctacttcaaataactccatctccggtagccttaagcgcctggaggatacgactgctagatttacaaatgcaaatttccaggaggtgtcagcccatacctccagcggcaaagacgtttctgagaccagggggtcagaaggtaaagggaaaaagagctcagcccatagtagtggccaaagagggcgaaagccgggcggcggaagaaatcccgggactacagtcagcgcagctagtccatttccccagggctccttcagtggcaccccgggctcagttaagtctagttccggcagcagcgtacagtcaccccaggatttcctgagtttcacggactcagaccttaggaacgactcctattcccactcccagcagagcagtgccactaaggacgtgcataaaggagagtctggatcccaagaagggggcgtgaactctttctcaacccttatcggcttgccaagcactagtgccgtcactagccaaccaaagagcttcgaaaacagtccaggtgacctcggcaactcgtcgctgcccaccgctggttataagagggcgcagacctccggtatcgaggaggaaactgtcaaagagaagaagcgtaagggcaacaaacagtcaaaacacggtcctggcagacctaaaggtaacaagaatcaggagaatgtaagtcatctgagcgtttctagtgcgagtcctaccagttccgtggccagtgctgctggctcgatcacttccagctctttgcagaagtcgcccactcttctacgcaatgggtcattgcagagtctgagcgtgggaagcagcccagtggggagcgaaatttcaatgcagtaccgacacgatggcgcatgccctaccaccaccttctcagaactgctgaatgctatccacaatggcatctacaactcaaatgatgttgctgtctcgttcccgaatgtggtcagtggctccgggagctccacccctgtgtcctcctctcatctgccacaacagtcatctggccatttacagcaggtgggagctctctcaccttcagccgtgtcgagcgctgcccctgctgtggcaactacacaagctaataccctgtcaggaagtagcttgtcgcaggctccttcccatatgtacgggaatcgttccaattctagcatggccgccttgattgcacaatctgaaaacaatcagacagatcaggaccttggagataactctagaaacctcgtggggcgcgggagctctccccggggatccttgtcacccagaagccctgttagttctctccagatccggtacgaccagccagggaattcttctttggaaaacttgcctccggttgctgcatcaatagaacagctgttagagcggcagtggagtgaaggccaacagttcctcttagagcaaggaacccccagcgacatcctcggtatgctgaagtccctgcatcagcttcaagtcgagaatcggaggctggaggagcagattaagaacctgacagccaagaaggagcgactccagctgctcaacgctcagctgagcgtgcccttccccactatcacggctaacccctccccgagtcatcagatacatactttctccgcacagacagcccctactacagacagcctcaattccagtaagtctccccacattggcaattcatttctgccagataactccctacccgtcctcaatcaagatcttaccagcagcggacaaagtacgtcctcctcctccgcgctgtcaaccccaccgccagccgggcaatccccagcccaacagggaagtggagtctcaggcgtccaacaggtgaatggcgtgaccgtcggagctctagcatccggcatgcagcctgtgacctccacgatcccggcagtcagtgccgtggggggcattatcggggcactgcctggaaatcagctggctattaatggtatcgtcggggccctgaatggcgtgatgcagacccccgttacaatgtcccagaatcccacccctctgacgcataccactgtccctcccaacgctactcacccaatgcctgctaccttaactaactctgccagcggcttgggcctcttaagcgatcagcagaggcagattttaatccaccagcaacagtttcagcagctactgaatagccagcagctcacacctgttcatagacatccccattttacacaattaccaccgactcatttttcaccttccatggagatcatgcaggtccggaagtag

SEQ ID NO: 148371 - DNA, 3084 bp, Artificial Sequence
  derived and/or modified sequence
atggtgagcagcgaccggcccgtgagcctggaggacgaggtgagccactcgatgaaagaaatgatcggaggctgttgcgtgtgctccgatgagaggggttgggccgaaaacccccttgtatactgcgatggccacgggtgctccgtcgccgtgcaccaagcgtgttatggaatcgtgcaggtcccgactggtccttggttctgcaggaagtgcgagagccaggagcgtgctgcccgggtgcggtgtgaattgtgtccgcacaaggatggcgctttaaagaggaccgacaatgggggatgggcccacgtggtatgcgccctgtatatacccgaggtgcagttcgccaatgtttctaccatggagccaatcgtgctgcagagtgtcccgcatgatagatacaacaagacctgctatatttgtgacgaacaaggaagggagtctaaagcggcaacaggggcctgtatgacatgcaataaacacggttgtcgacaggccttccatgtgacttgtgcccaatttgcagggctcctgtgcgaggaagagggcaacggggctgataacgtgcagtattgcggatattgcaagtaccatttttctaagctaaaaaagtctaagcgcggttccaatcgctcttatgaccagagcctgagcgactcgagtagtcacagccaagataaacatcacgagaaggagaagaaaaagtataaagaaaaagataagcacaagcagaaacacaagaagcagcccgagccaagccccgcactcgtcccttcgctcacagtaactactgagaaaacgtataccagcactagcaataactccataagcggctctcttaagcggctcgaggatacaacagctcgattcactaacgccaatttccaggaagttagcgctcacactagttccggaaaagacgtcagtgaaacgagaggcagcgaaggcaaaggaaagaagtcttccgcgcacagttccggccaacgtggtaggaaaccgggcggtggtcggaatcctggcaccacagtctctgccgcctccccattcccccagggatccttttccggcacccccggatcggtgaaatctagcagtggctcttctgtgcagtctccacaagacttcctcagtttcaccgattctgatttgcggaatgatagctacagccatagtcagcagagctctgccaccaaagacgttcacaagggagaatcagggtcccaggagggtggtgtaaactctttctctaccctgatagggctacccagcaccagtgcagtcacttcacagcccaagtcctttgagaattcaccgggagatctcggcaactcatcattgccgacagcagggtataaaagagcgcagaccagcggtatcgaggaagaaactgtaaaggagaaaaaacggaagggtaataaacagtcgaaacatggcccgggaaggccaaagggcaataaaaaccaggagaatgtcagtcatctgtctgtcagcagcgcatcacccacgtctagtgtagcatcggctgcaggtagtatcacatcgagctctctccaaaagtctcctaccctacttcgcaatggaagtctgcagtccctgtcagttggatctagcccagttggtagcgagatatcaatgcagtaccgccacgacggtgcctgtcctaccaccacatttagcgagctgttgaatgcaatccacaatgataggggagacagctcaaccctgacgaagcaagaactgaagttcatcggaatttataacagcaacgatgtggccgtgtcattccctaatgtggtgagtggatcaggaagttccactcctgtgtccagcagccatcttccacagcagagcagtggccacttgcagcaggtgggagccctctcaccctcagctgtaagcagtgctgctcccgcagtcgccacaacgcaggctaacaccctctccggatcttccttatctcaagcacctagtcacatgtacgggaatagatctaactccagcatggccgccctaattgcccagagcgaaaacaaccaaacggatcaggatctaggggataacagtcgaaatctggtcggcagggggtcatctccccggggctcactctccccccggtcacctgtgagctctttgcagataaggtacgatcaacccggcaattccagcttggaaaatctacctcccgtcgctgccagcatcgagcaactgctggaacggcagtggtcggagggacagcagttccttttggaacaaggcacgcctagtgatattttaggtatgctaaagtcactccaccagctacaagtcgaaaaccgacgactcgaagagcaaattaagaatctaacagccaaaaaggagagactgcaactcttgaacgcccagttgtctgttccgttccccactatcacagccaatccaagtccttcgcaccagatacacacattttcggcccagacagctccaaccaccgattccctgaattctagcaaatctcctcatattgggaactcattcctccccgataatagtctccctgtgcttaatcaggatttgacttcttcgggtcagagtacctctagttcatctgcgctgagtactcccccacccgccgggcagtctcccgcacaacagggcagtggagtgtcaggagtccaacaggtgaacggcgtgacagtcggtgccctggcaagcgggatgcagcccgtcacttctactatccctgctgtgtcggccgtgggcggaatcatcggggcgctgcccggaaatcaactggcaattaacgggatcgtcggagcactgaatggcgtgatgcagacccctgtgaccatgtctcagaaccctactccgctcacacataccactgtgcctcccaacgcaacccaccccatgcctgcaacactgacaaatagcgcttcagggcttgggctcctatccgatcagcaacgccaaatcttgattcatcagcagcagtttcagcaactcctgaactctcaacaactgactccagtccacaggcatccacactttacacagctgcccccaacacatttttctccctccatggaaataatgcaggtccgcaagtag

SEQ ID NO: 148372 - DNA, 1086 bp, Artificial Sequence
  derived and/or modified sequence
gtgaccaccgagaagacctacaccagcaccagcaacaacagcatctcaggtagcctgaagagattggaggacacaacagcgcggttcacaaatgccaattttcaggaggtgagtgcacataccagttctgggaaggacgtatcagaaactcgtggcagcgagggcaagggcaagaagagctctgctcattccagcggacagcgagggcgaaaacccggtgggggcaggaatcctggaacaacagtctctgcagcctcccctttccctcaggccggatacaaacgagcacagacgtcgggcattgaggaagaaacagtcaaagaaaaaaaacggaaaggcaataagcagagcaagcacggcccggggagacccaaaggaaacaagaatcaggagaacgtgagccacctgtccgttagcagcgcaagtcccacatctagtgtggcttctgcagcaggcagtataacaagctcttccctgcaaaagtccccaactctgttgagaaacggaagtctccaaagtctgtcagtggggagctcaccagtgggctccgaaataagcatgcagtataggcacgacggcgcctgtccaacaaccactttttctgaactcctgaacgctatacataatgatcggggcgactcaagtacactcactaagcaggagctcaagttcatcggcatttacaactctaatgacgtagctgtgtcattccccaacgtggtatcgggaagtggatcatccactccggtgagttcaagccacttgccccagcagagttccgggcacctgcaacaggtaggagccctttcaccttcagcagtctccagtgccgcacctgccgtcgccactacccaggctaacactctgagtgggtcatcactgtcacaggctccatctcacatgtacgggaacaggtcaaactctagtatggcagcgctcattgcccagagtgagaataaccagaccgaccaagatttgggggataatagccgcaacctggtaggccgtgggtcatcgccccgggggtctttgtctcccagatcccccgtgtcctcacttcaaattcggtatgaccagccgggatag

SEQ ID NO: 148373 - DNA, 3036 bp, Artificial Sequence
  derived and/or modified sequence
atggtgagcagcgaccggcccgtgagcctggaggacgaggtgagccattctatgaaagagatgattggagggtgttgcgtgtgcagcgacgagcggggttgggcggagaacccattagtctattgcgacggccacggctgttccgtggccgtgcatcaggcctgctacggcatagtacaggttcccacgggcccttggttctgccgcaaatgcgaaagccaggagcgtgccgccagggtgcggtgcgagctgtgtccccacaaggatggggctctgaagagaacagacaacggtggctgggcccatgtggtctgtgctctgtacattccagaagtccagttcgccaacgtttctactatggagcccatcgttctgcagagcgtgcctcacgacagatacaacaagacctgctacatttgtgatgagcaggggcgggaatctaaagcagcaaccggagcatgcatgacttgcaacaagcacggatgcaggcaggccttccacgtcacatgtgcacagtttgctggcctcctttgcgaggaggagggaaacggggccgacaatgtgcagtattgcggatactgcaaataccacttctcaaagctaaagaagtccaaacgaggtagtaatcgtagctatgaccagagcctctccgactcctcttctcactctcaagataaacaccatgagaaagaaaagaagaaatataaggaaaaggacaaacacaaacagaaacacaaaaagcaacccgaacctagtccggctctagtcccctcactgactgtcactactgaaaagacctatacctctacctccaataactcaatctcgggttctctaaagagattggaggatacgactgcccggttcacgaatgctaatttccaggaggtctctgctcacacctcaagcgggaaggacgttagcgagactaggggctccgagggtaaaggaaaaaaatcttctgctcatagcagcgggcagagagggcgcaaacccggtggaggccgcaatcctggtaccaccgtttccgctgcttcccccttccctcagggatcgttcagcggcacccctgggtctgttaaaagcagttctggtagcagtgtacagtcccctcaggacttcctgagcttcaccgatagcgacctgcggaatgatagctattcacatagccaacagtcctccgcaacaaaagatgtgcacaagggagagagcggaagtcaggaagggggagtcaatagcttttctaccctgataggactgccatcaacgtcggccgtcacctcccaacctaaaagttttgagaattcacctggcgaccttgggaatagttcattgccaactgctggctataagagagcccagacatccgggattgaagaagaaactgtcaaggaaaaaaaacgcaagggcaataagcaatcgaaacacggtcccggtagaccgaagggaaataaaaatcaggagaacgtctcacatctcagcgtgagtagcgcatccccaacatcctcagtagcctccgctgcgggttccatcacgagcagctcgctgcagaagtcacccaccctccttcggaacggctctctgcagtccttgtctgtcggctctagtcctgtaggctctgagatcagtatgcagtacagacatgatggggcttgccctactacaacattctcagagctgctgaatgctatccataatggcatttacaacagtaacgacgtagcagtgagcttcccgaatgtggtgagcggatccggatcctctacaccagtaagcagctctcacctcccccagcagtccagtgggcacctgcagcaggtgggcgccttatctcctagtgcggtttcttccgctgcccctgccgtggctactacacaggctaacacgctgtcgggttcttctctgagccaggcaccaagtcatatgtacgggaaccggtctaactccagtatggcagccctgattgctcaaagtgagaataaccagacggaccaggatctcggcgataacagtcggaatctcgtcggccgcggctcttcccctagaggttctttgagtccgaggagccctgtttctagcctgcagattcgctacgatcaaccagggaattcctctctggagaatctcccaccggtggccgcaagcatcgaacagcttctggagcgccagtggtcggagggccagcagttcctgttagaacagggcacaccttccgatattcttgggatgttaaaatccctgcatcagctccaggtggagaacaggcgcctggaggagcagatcaaaaacttaactgctaagaaggaacggctgcagctgctcaatgctcagctgtctgtgccgtttccgacaatcaccgccaatcccagcccttcccatcaaatccacacctttagcgcacagacggcccccactaccgattccctgaacagctcaaagtccccccacatcgggaattctttcctaccagataacagtctgccagtgctcaaccaggatcttaccagcagtggacagagcacatctagtagttcggccctctctactcccccacctgccggtcagtcgccggctcagcaaggaagtggcgtgagcggtgtgcagcaggtaaatggagttactgttggggctctggcatcaggaatgcaacctgtaacctctacaattcctgcagtcagcgctgtgggaggaatcatcggggctctcccaggcaatcagcttgccatcaatggtatcgttggtgctctaaatggagtcatgcagactccagtcactatgtctcagaacccaacccccctgacacacacaaccgtccctcccaatgcgacacaccctatgcctgccaccctgacgaattccgcatcagggctgggcctgctttctgaccagcagcgccagatcctgatacatcaacagcagtttcagcagctgcttaatagtcagcagctcacacctgtacataggcatccgcacttcacccaacttccccccacgcacttcagcccaagtatggagattatgcaggtgcggaaatag

SEQ ID NO: 148374 - DNA, 1083 bp, Artificial Sequence
  derived and/or modified sequence
agcatggagaagacctacaccagcaccagcaacaacagcatcagcggttccctgaaaagactggaggatacaactgctaggttcactaacgcaaattttcaggaagtgagcgcccacacttcctcagggaaagacgtgagcgagactcgaggcagcgaagggaaaggcaagaaatctagcgcgcactcttcgggacagcgtggaagaaaacccgggggcggccggaacccaggcacaaccgttagtgcagctagtccttttccccaggcaggctataagcgcgcccagacatctggtatcgaggaggagactgttaaggagaaaaagcgtaaggggaataaacagagcaagcacgggcctggccgtcccaaaggcaataaaaaccaagagaacgtgtcacatctctctgtctcgagcgcgagcccaactagctctgtcgctagtgccgccggctccatcacctcaagcagcctgcagaaatcacccaccttgctcaggaacggttcgctccagtccctctccgtcggctctagccccgtggggtccgagatttcaatgcagtaccgccacgatggagcttgccctacgaccacattttccgaactgctgaacgctatacataacgacagaggcgacagttccacattgaccaagcaagaactgaagttcatcggcatatacaactctaacgatgtcgctgttagctttcctaatgtagtgtctgggtcaggaagctctactccagtgagtagcagtcatctgcctcagcagtcatcaggccatcttcagcaggtgggtgccctgtccccatcggccgttagttctgccgcgcccgcggtggctactacccaggccaacacactgtcaggctcctctctcagtcaggccccatcacacatgtatgggaatcggtcgaattcgagtatggcggccctgatcgctcagtccgagaacaatcagacagatcaggacctcggagataattctcgcaacctggtcggacgcggaagctcaccacgtgggtcgctgtcaccgaggagtccggtctctagcctgcagatcagatatgaccagcccggttag

SEQ ID NO: 148375 - DNA, 3036 bp, Artificial Sequence
  derived and/or modified sequence
atggtgagttcggacagacccgtgtccctggaagacgaagtatctcactctatgaaggagatgatcggagggtgttgcgtgtgcagtgatgagcgaggatgggctgaaaaccccctcgtctactgcgacggccatggctgcagtgtggcggttcaccaagcatgttatgggatcgtacaggtgcctacaggcccatggttctgcaggaaatgcgaatcccaggagagggccgcaagagttagatgtgagctgtgccctcacaaggacggagccctgaagagaacagacaacggaggctgggcccacgtcgtatgcgccctctacatacccgaagtccagttcgcaaacgtgagtacaatggagccaatcgttttgcagagtgtgccccatgaccgctacaataaaacctgctacatatgtgatgagcagggcagagaatctaaggccgctactggagcttgcatgacttgtaacaagcatgggtgcaggcaagccttccacgtgacatgtgcccaatttgccggacttttgtgcgaagaagaaggaaacggagctgataatgtgcagtactgcggatactgtaaatatcatttttctaagttgaagaagtcaaagcgtggttctaatcgcagctatgatcagagcctatctgattcctcctcccatagccaagataaacatcatgagaaagagaagaagaagtataaggagaaggacaaacacaagcagaagcataagaaacaaccagaaccaagccccgctcttgtacccagcctcaccgtcactaccgaaaagacgtacacatctacctccaataattctatatcaggcagtttgaagcggcttgaggacacaacagccagatttacgaacgcaaattttcaggaagttagcgcacatacatcctccggtaaggatgtgtccgaaacacggggatccgagggaaaagggaagaaatcctcagcccacagctctggccaacgcggacggaagcccggtggtggtaggaatcctggcaccaccgtcagcgccgcaagtccttttccccaggggtccttttctgggactccgggatctgtaaagtcttctagtggttccagcgtgcagagccctcaggactttttatcgtttaccgacagcgaccttaggaacgactcgtactcacacagccagcagtcttctgctaccaaagatgtgcataaaggagaatctggcagccaggagggcggtgttaacagcttcagcacgttaatcggcctgccctctacaagcgctgtaaccagccagccgaaaagctttgagaacagtcccggtgatctgggaaatagcagcctgcctacagctggctataagagggctcaaacttcaggcatcgaagaagagaccgtaaaagagaaaaagagaaagggcaataaacagagtaaacacggaccgggtaggccaaaggggaacaaaaatcaggaaaacgtatcgcatctctctgtgagtagtgcgagcccaaccagcagcgtggcttcagcagcgggatcaattaccagctcatctctgcagaagtcccctacactcttacgaaatgggtcgctccagagtttatcagtgggtagctcccccgtgggatctgagatatctatgcagtatagacatgacggcgcttgccccactacaaccttttcagagctgctcaatgctattcataatggaatctacaactctaacgacgtcgctgtctcgttccctaacgtggtgtctgggagtggttcctcgaccccagtgagctctagccacctgcctcagcaaagctcagggcatctgcagcaggttggcgctctgtcacctagcgctgtgtccagtgcggcaccagcggtcgctaccacccaggccaataccctcagcggctcatcactctctcaggctcccagccacatgtatggcaaccgttcaaattcttctatggccgcactgatcgcacagtctgaaaataaccaaaccgatcaggacctgggtgataattctagaaatctggttggtcggggatccagcccgagaggatccctgagccccaggagccccgtgagtagtctgcagattcgctacgaccagcccggtaatagctccttagaaaatctacctcctgtggccgcttctatcgagcagctccttgaaaggcagtggtctgaagggcagcagtttcttctggagcagggtacccccagcgatattcttggaatgttgaagtccctccatcagctgcaagttgaaaaccgccgactagaagagcaaattaagaacctgactgccaaaaaggaaagactccagctgctcaatgcccagctgtcagtgcctttccccactatcactgccaatccaagcccctctcaccagatacacacatttagtgctcaaacagctcctacaactgattctctcaactcaagcaagtccccacatattgggaactcctttctgccagacaatagccttcctgtcttaaatcaagatttaacatcttcaggccaatccacgtcaagttccagcgctctcagtacgccacctccagctggccagtcaccggctcaacaagggtccggcgtgagcggtgtccaacaagtgaacggagtaacggtaggggctttggcctccgggatgcagcctgtgacctccactatcccagcagtaagtgctgtaggcggtatcattggggcactacctgggaatcagttggctatcaacggcattgtaggagccctaaacggtgttatgcagacaccagttaccatgtcgcagaaccctactccactgactcacacaacagtaccacctaatgccactcatcccatgcccgctacactcacaaatagcgcatctggcctcgggctcctgtccgaccagcagcgtcaaatcctcatacaccagcagcagttccagcagctgctgaatagtcagcagttgacgcccgttcatcgccatcctcacttcactcagcttccccctactcacttttctccaagcatggagattatgcaggtaagaaaatag

SEQ ID NO: 148376 - DNA, 3084 bp, Artificial Sequence
  derived and/or modified sequence
atggtgtcaagtgatcgccctgtgtcattggaggacgaggtctctcattccatgaaagaaatgatcggcggatgttgcgtatgtagtgatgagaggggatgggccgagaatccgctagtgtactgtgatggtcatgggtgtagcgttgctgtgcaccaggcttgctatgggatagtgcaggtgcccaccggcccttggttttgcagaaagtgcgaaagccaggagagggctgctcgcgttaggtgtgaattatgcccacacaaggacggggctcttaagagaacagacaacggtggctgggcacatgttgtttgtgccctttatattcccgaagtacagtttgccaacgtgagtacgatggagcccatagtgctgcagtccgttcctcacgataggtacaataagacctgttacatttgcgatgagcaagggagggaaagcaaagcagctaccggggcatgtatgacctgcaataagcatggatgcagacaagcctttcacgtcacatgtgcccagttcgctgggttgttatgcgaggaggaggggaacggtgccgacaatgtgcagtactgcggatactgcaagtatcacttctctaagctgaagaaatcgaaaaggggttcaaaccgctcctacgaccagagcctgagtgatagcagttcccattcgcaagacaaacatcacgaaaaggagaagaaaaaatacaaagagaaggataagcataaacagaaacacaaaaagcagccagaacctagcccagccttggtgccatctttgacggtgacaacagaaaagacgtataccagcaccagtaacaactccatctctggctctttgaaaagactggaggataccactgctcggttcacaaatgctaatttccaggaggtcagcgcgcacactagtagtggaaaagacgtgtcggaaacaagagggtctgaaggcaagggcaagaaaagttccgcccacagcagtggacagagaggcaggaagccagggggagggagaaacccgggaacgactgtcagcgcagcgagtccttttccccagggctccttcagcggtaccccaggaagtgtgaagtccagctccggttccagcgttcagagcccgcaggattttctgagttttacagactccgatctccgtaatgacagctatagtcacagccagcagagctctgccaccaaagacgtgcataaaggggagtccgggtcacaggagggtggcgtcaatagtttcagtacattaataggattgccatctacatccgcggttacttctcagccaaaatcttttgaaaattccccaggagatctgggtaactcttccctgcccacagccggatataagcgcgcacagacaagcggaatcgaggaggagaccgtgaaagaaaaaaaaagaaaaggcaacaagcagagcaagcatggaccaggtagacctaagggaaacaagaaccaggagaacgtgtcccacctgtctgtgtcctctgctagccctacaagctccgtggcgtctgcagctggcagtataacatcttcctccctccaaaagagccctacactgctgaggaatggaagtctgcagtctttgagtgtcggatcttcacctgtcggttctgagattagtatgcagtacaggcacgatggggcttgtcctactaccacattctccgaactcttgaacgctattcataacgatcgcggagattcctccacactcactaagcaagaactcaagttcataggcatctataatagcaacgacgtggccgttagcttccctaacgtggttagcggcagcgggtcttccacgccagtgagctcctcccacttgcctcaacagagctcgggacatctacagcaggtgggggcactcagcccctctgcggtgagttctgctgcgccagcagtagcaacgactcaggcaaatacactctccggttcttccctgtcgcaggcgccttcccacatgtacggcaaccgatccaactccagcatggccgcattaattgcccagagtgagaacaatcagactgaccaagacctcggcgataatagcaggaacttagttggtagaggcagtagtcccagagggtcccttagccctcgctcccctgttagttctcttcagattcggtacgatcagcctggcaactcttccctcgaaaacctacccccagttgcagcttcaatcgagcagttacttgagcgacagtggtcagaaggtcagcaatttcttctcgaacagggaaccccgtcggacattctggggatgctcaagtcattgcaccagctgcaggtagagaatcggagactcgaggaacagattaaaaaccttaccgccaaaaaagaacgccttcagcttctgaacgcgcagctgtcagtcccgttccctacgattacggcgaatccctcgccctcccaccagatccatacttttagcgcccagacagctcccacaactgacagcctgaacagcagcaaatctcctcacattggtaattcttttttgcctgacaattccctcccggttctcaaccaagacttaacatcctccggacagtcaacctcatcctccagcgccctgtcaaccccgcctccagctggccagtccccagcccaacagggctcaggggtgtccggagtccagcaggtgaacggtgtcacggtgggcgcactcgcttccggtatgcagccagttacttccaccattcccgctgtttctgctgtgggtggcatcattggagcactcccaggcaatcagttagctatcaatgggatagtgggtgcgctaaacggggtaatgcagacgcctgtgaccatgtcacagaatccgacgccactgactcataccacagtgcccccaaatgccacgcatccaatgcccgctaccctgactaactctgcatccggcctgggcctgctttcagaccagcagcgacagatcctcatccaccagcagcaatttcagcaactgctcaactctcagcaactcactcccgtacaccgacatcctcacttcacgcagttgcctcccacccacttcagccccagtatggaaatcatgcaggttagaaagtag

SEQ ID NO: 148377 - DNA, 1086 bp, Artificial Sequence
  derived and/or modified sequence
gtaacaactgaaaagacctataccagcactagcaataactcaatctcgggcagtctaaagagactcgaagataccactgctaggttcacaaatgcaaactttcaggaggtgagcgcccatacctcctccggtaaggatgtgagcgagacgaggggcagcgaaggcaaggggaagaagagtagtgcacattcgtctggacagagaggtcgcaagccaggaggcggacgcaaccctgggacaacagtctctgctgctagcccatttccccaagctgggtacaagcgtgcgcaaacatcaggaattgaggaggaaacggtcaaggagaagaagcgaaagggcaataagcaatcaaagcacgggcctggcagacctaagggcaataagaaccaggaaaatgtcagtcacttgtccgtgagttctgcaagccccacctcgtctgtagcctctgctgcaggcagcatcacatcttccagtttgcaaaagtcccccactctcttacgcaacggctctctgcagagtctgagcgttggatctagcccagtaggtagcgaaatatcaatgcagtacaggcacgatggggcatgccctacgactacatttagcgaactgctcaacgctatccataatgaccgcggagattcaagcacactaaccaagcaggagctcaagtttattggaatctacaattcaaatgatgtggccgtgtcatttcctaacgtagtgtcagggtctggttcttctacacctgtgtcttcttcccacctgccccagcaatcctcaggccacctccagcaggtgggggcacttagccccagtgcggtgtcctctgccgctcccgcagttgccaccacacaggcaaacaccctgagtggcagttcattgagccaggctccgtctcacatgtatggaaaccgcagtaattcatccatggctgctctcatcgcccagtctgaaaacaaccagacagaccaggatctgggtgacaactctcggaatcttgtggggagggggagctctccacgtggcagcctctctcctagatctcccgtgagctccctgcagatccgatacgatcagccagggtag

SEQ ID NO: 148378 - DNA, 3036 bp, Artificial Sequence
  derived and/or modified sequence
atggtctcctcagatagaccagtgagcctcgaagatgaagtcagtcactcaatgaaggagatgatcggaggatgttgcgtgtgcagtgacgaacgaggctgggctgaaaacccactggtgtattgtgatgggcacggttgcagcgtggcagttcaccaagcttgttatgggatcgttcaggttcccactgggccttggttctgccggaagtgcgagtcacaggagagggcagcacgcgttcgctgcgagctttgtccgcacaaagacggagcactgaaacgcacagataacggcggatgggcgcacgtcgtctgtgccctgtatatccctgaggtgcagtttgcaaatgtgagcacaatggagcccatagttcttcaatcggtgccacatgaccgatataacaagacttgctatatctgcgacgagcaagggagagagtcaaaggccgctacaggtgcatgtatgacatgtaataagcatgggtgtcggcaggcctttcacgtaacttgcgcgcaattcgccggactgctgtgcgaggaggaaggcaacggagctgacaatgtacagtactgtggatactgtaagtatcactttagcaagctgaagaaaagcaagcgcggatctaataggtcatacgatcagagccttagcgactcctccagccactcccaggacaaacaccacgagaaggaaaaaaaaaaatataaggaaaaggataagcataagcagaaacacaaaaagcagcctgagccctctcccgctctggtgccatctctgaccgtaactaccgagaaaacatatacgtcaactagtaataactccatatcaggcagcctgaaaaggttagaagataccaccgcaaggttcactaatgccaactttcaggaggtatcagcacatacctcatctggtaaggatgtatcggagacaaggggttcagagggcaaaggaaagaagtcgtcagcacatagctcaggccagagaggtcggaaacctggtggaggacgcaatccaggtaccaccgttagcgctgcctcacctttccctcagggatccttctcagggacacccggatcagtaaagtcctcgagtggctctagcgtccagagcccacaggatttcctgagcttcacagacagcgacctcaggaatgacagttactcacattctcagcagtcatccgctacgaaagacgtgcataaaggcgagtccgggtctcaggaaggaggggtgaactctttttcaactctaatcgggctccctagtacttcagctgtaacaagccagccaaaaagctttgagaacagcccaggggacctggggaattcctcactgcctacagctggctacaagcgcgctcagactagcggaattgaagaagagacagtgaaggagaaaaaacggaaaggaaataagcagtcgaagcacggcccaggtcggccaaagggaaataagaatcaagagaatgtgtcacacctgtcagtctctagtgcatctcctacaagttcagtcgctagtgctgccggatctatcaccagtagtagcttacagaaatcacctactttgcttagaaacggcagtctgcagagtctgagcgtgggctcctcaccagttggctctgagattagcatgcagtaccgacatgacggagcctgccccaccactacattttccgaattgctgaatgccatccacaacggaatctataattctaatgatgtagccgtgtcctttcctaatgtagtgtccgggtccggctccagcacccccgtttcttctagtcatctcccccagcaatcttctggtcatctgcagcaggttggggcacttagtccctctgccgtttccagcgccgctcccgcagtggctacaacccaggctaacacactgagtggcagctcgctctctcaagctccaagtcacatgtacgggaacaggagtaacagctctatggctgcgctgatcgcgcagagcgagaacaatcagaccgaccaggatctgggcgataatagccggaatctcgttggcaggggctcttcacctcggggatcactttcccctcgctccccagtgtcatcgctgcagattcggtatgatcagcccggaaacagtagcctagagaaccttcctcccgtcgcagcttctatcgagcagctgctggaacgacagtggtctgagggccagcaattccttttagagcagggcaccccgtccgacatcttggggatgttgaagagcctgcaccagcttcaggttgagaatcgcagactcgaagaacaaataaagaaccttacagctaagaaggaacgcctgcagcttctcaacgcacagctgtctgtaccttttcccacaattactgccaacccatcaccatcccatcagatccataccttttctgcccagacagccccaaccaccgatagcctcaactcatccaagagcccccatattggcaactctttcctgcccgataattcacttccggtgctgaatcaggatctgactagttccggccagtctacctccagcagcagtgcactctctactcctccaccagccggtcagagtccagcccagcagggctctggggttagtggagtgcaacaggtgaatggcgtgacagtgggagccctggcctccgggatgcagcccgtaacttctacgattccggcagtctcagccgttggaggtatcataggcgctctgccgggtaaccagcttgcaattaacggcatcgttggtgccctgaacggcgtcatgcagacgcctgtgaccatgtctcagaatcctacccccctcacccataccactgttccccctaacgcgacgcacccaatgcctgccaccctcacaaattccgcctcgggcctgggtcttctgtcagaccagcagcgacagattctgatccatcagcagcagttccagcaactactgaactctcaacaactgacacccgtgcacagacacccacactttacccagctgccaccaacccacttctccccaagtatggagatcatgcaggtgcgcaagtag

SEQ ID NO: 148379 - DNA, 1083 bp, Artificial Sequence
  derived and/or modified sequence
tccatggaaaagacgtacactagtaccagcaacaattccatctctggctcactgaagcgacttgaagatacaaccgcacggttcaccaatgcaaactttcaggaggtaagtgcccataccagcagcggcaaggacgtctcagagacaagaggaagcgaaggcaaaggaaagaagtcttctgcacatagttcaggacaacgcggtaggaagcccggtggcggacggaatccagggactactgtatcagcagcttctcctttcccgcaggccggttataagcgggctcagactagtgggatcgaagaggagacagtcaaagagaagaagcgcaagggaaataaacaatctaaacacgggcctggacggccaaaggggaataaaaaccaggaaaatgtgagccacctgagtgtctcttcagcgtcccctacatcttccgtagcatccgcggctgggtctataaccagcagctcactgcagaagtcccctacattgttgaggaatggatcacttcagagtttatcagtgggtagtagccctgtggggtctgagattagcatgcaatataggcacgacggtgcctgcccaaccaccacgttttccgaactcctgaatgccatccacaacgatcgcggagacagctccaccctgaccaagcaagagctgaagttcattggcatttacaattcaaacgatgtcgcggtttctttccctaacgtggtgtctggtagcggttcctccacccctgtgagctcctcgcacttaccgcagcagtcctccggacacctccaacaggtgggcgctctgagcccctccgccgtctctagtgcagcacctgctgtagccacaacccaggcaaacacactgtctgggtcgagcctgtcgcaggcaccctcgcacatgtacggcaacagaagcaactcttctatggctgccctgatagcccaatcggaaaacaaccagactgatcaggatcttggcgacaacagcaggaacttggtggggagaggatcatcccccagagggtccctgtctccgaggtcgcctgtgtcctcacttcaaattcgctacgatcaacctggctag

SEQ ID NO: 148380 - DNA, 1085 bp, Artificial Sequence
  derived and/or modified sequence
gttactacagaaaaaacttatacaagcactagcaacaactctatatctggatcattgaagcgcttggaagatactactgcacgatttacaaatgcaaatttccaggaagtctctgcacacacctctagtggaaaagatgtttcagagactagagggtcagagggcaaagggaagaaatcttcagctcacagctcaggtcaaaggggaagaaagcctggtggtggaagaaatccaggaacaactgtgtcagcagctagcccttttcctcaagcaggatataagcgggctcaaacttctggcatagaagaagaaactgtaaaggaaaagaaaaggaaaggaaataaacaaagtaagcatgggcctggcagacccaaaggaaacaaaaatcaagagaatgtttctcatctctcagtttcttctgcttcaccaacatcatctgtagcatcagctgcaggaagcataacaagctctagtctgcagaaatctcctacattgctcaggaatggaagtttacagagcctcagtgttggctcatctccagttggttcagaaatttccatgcagtatcggcatgatggagcttgcccaacaactacgttctcagagttgctgaatgcaatacacaacgacagaggtgacagttctacactaacaaagcaagaacttaaattcataggtatttataacagcaatgatgtagcagtatcgtttccaaatgtagtatctggctcgggatctagtactcctgtctccagctctcacttacctcagcagtcttctgggcatttgcaacaagtaggagcgctctctccctcagctgtgtcatctgcagcccctgctgttgctacaactcaggcaaatactctatctggatcttctctcagtcaggcaccatctcatatgtatggcaatagatcaaattcatcaatggcagctcttatagctcagtctgaaaacaatcaaacagatcaagatcttggagacaatagccgcaacctagttggcagaggaagctcaccccgaggaagtctctcgccacgatcccctgtaagcagcttacagattcgctatgatcaaccaggcaa

SEQ ID NO: 148381 - DNA, 5073 bp, Artificial Sequence
  derived and/or modified sequence
cgcgcacgcagggctagcctcgcccaggcctcctccctcacgccggccgcaggacgggcgcgcacgccaagtgacgctccgaggaggaagcgcagcccccttcccctccctcgctgcccctggcccagcgggagccccccctccccccagtgcgcctgtgcggaggccctcttgattatgtgtgccctctccgggcgcccgcgttagcggccgggtggaggtggggagggaagacgctgaggaggaggaggaggcggaggaggcggtggaggggaggtggggggaatcagcaaggacatggctcctgactcctgtgcggaacgtgagtgactgagcggcaaagcccgaatggtctctagcgaccggcccgtgtcactggaggacgaggtctcccatagtatgaaggagatgattggaggctgttgcgtttgctcagacgagagaggctgggccgagaacccgctggtttattgcgacgggcacggctgcagcgtcgcggtgcatcaagcttgctatggcattgttcaagtacccactggaccgtggttttgcaggaaatgtgaatctcaggagagagcagccagagtgagatgtgaactttgtccccataaggatggagctttaaaaagaacagataatgggggttgggcccatgtggtttgtgccctgtatattccagaggtacaatttgccaatgtttccacaatggaaccaattgttttacagtctgttccgcatgatcgttataataagacttgctacatttgtgatgaacaaggaagagaaagcaaagcagccactggtgcttgcatgacatgtaataaacatggatgtcgacaggctttccatgtaacatgcgctcagtttgccggactgctttgtgaagaagaaggtaatggtgccgataatgtccaatactgtggctactgtaaataccattttagtaagctgaaaaagagcaaacggggatctaataggtcatatgatcaaagtttaagtgattcttcctctcactctcaggataaacatcatgagaaagagaaaaaaaaatataaagagaaggacaaacacaaacagaaacacaagaagcagccagaaccatcacctgcattggttccatccttgactgttactacagaaaaaacttatacaagcactagcaacaactctatatctggatcattgaagcgcttggaagatactactgcacgatttacaaatgcaaatttccaggaagtctctgcacacacctctagtggaaaagatgtttcagagactagagggtcagagggcaaagggaagaaatcttcagctcacagctcaggtcaaaggggaagaaagcctggtggtggaagaaatccaggaacaactgtgtcagcagctagcccttttcctcaaggcagtttttcaggaactccaggcagtgtaaagtcatcttctggaagttcagtgcagtctccccaggatttcctgagctttacagactcagatctgcgtaatgacagttactctcactcccaacagtcatcagcaaccaaagatgtacataaaggagagtctggaagccaggaagggggggtaaatagttttagtaccttaattggcctcccttcaacctcagctgttacttcacagcctaaaagctttgaaaattcacctggagatttgggtaattccagccttcctacagcaggatataagcgggctcaaacttctggcatagaagaagaaactgtaaaggaaaagaaaaggaaaggaaataaacaaagtaagcatgggcctggcagacccaaaggaaacaaaaatcaagagaatgtttctcatctctcagtttcttctgcttcaccaacatcatctgtagcatcagctgcaggaagcataacaagctctagtctgcagaaatctcctacattgctcaggaatggaagtttacagagcctcagtgttggctcatctccagttggttcagaaatttccatgcagtatcggcatgatggagcttgcccaacaactacgttctcagagttgctgaatgcaatacacaacggtatttataacagcaatgatgtagcagtatcgtttccaaatgtagtatctggctcgggatctagtactcctgtctccagctctcacttacctcagcagtcttctgggcatttgcaacaagtaggagcgctctctccctcagctgtgtcatctgcagcccctgctgttgctacaactcaggcaaatactctatctggatcttctctcagtcaggcaccatctcatatgtatggcaatagatcaaattcatcaatggcagctcttatagctcagtctgaaaacaatcaaacagatcaagatcttggagacaatagccgcaacctagttggcagaggaagctcaccccgaggaagtctctcgccacgatcccctgtaagcagcttacagattcgctatgatcaaccaggcaacagcagtttggaaaatctgcctccagtagcagccagcatagaacagcttttggagaggcagtggagtgaaggacagcaatttttactagaacagggtactcctagtgacattttaggaatgctgaagtcattacaccaacttcaagttgaaaaccgaagattagaggaacaaattaaaaacttgactgccaaaaaggaacggcttcagttattgaatgcacagctttcagtgccttttccaacaataacagcaaatcctagtccgtctcatcaaatacacacattttcagcacagactgctcctactactgattccttgaacagcagtaagagccctcatataggaaacagctttttacctgataattctcttcctgtattaaatcaggacttaacctccagtggacaaagtaccagcagctcatcagctctttctaccccacctcctgctgggcagagtccggctcaacaaggctcaggagtgagtggagttcagcaggtcaatggcgtgacagtgggggcactagctagtggaatgcagcctgtaacttccaccattcctgccgtgtctgcagtgggtggaataattggagctttgccaggtaaccaactggcaattaatggcattgtaggagctttaaatggggttatgcagactcctgtcacaatgtcccagaaccctacccctctcacccacacaaccgtaccacctaatgcaacacatccaatgccagctacactgactaacagtgcctcaggactaggattactttctgaccagcaacgacaaatacttattcatcaacagcagtttcagcagttgttaaattctcaacagctcacaccagtacacaggcacccccacttcacacagctaccaccaacccatttctcaccatccatggagataatgcaagtcagaaagtagcaagacttagtgataaaactgggcctgtagctcaagagaaaagttgacacctgagaaacatctagaaattgcctatcctgctgttctagcacttcatctggctgcctttgcagtccttttactacagctatgaagaaacgcaacaagaaactcaatgcacaacaaaggattaattgctgcaaggacattcttgtaaggctttgattagttttcttgttgctttgttgcactgaaatggaattcccatgcccctaccccttaccccagttttttgaacatggaaagaaaatttaataactttttaaagtgacataatttacatgcaatatgtttatcaactcaagaatttaatatagttggtacacaactagttttgtttataaattggagatgcaaatagcaaaactaaatacttgctccatttacaaactacttgattttattgtacaagttgaaatatgctcttttgtttgggttacagtatgcttgctctaagtcaaattccaaggaactaatttcttctcctggagttgcattgattcagtattacaaatatatagcacatcacctgggacttggcaatctttgttaaaaaaaaatttcctttctaatgggatttggccaattttggtaatgaagttaggatggtaatgtctgcatctgctaaaggtaattttcttttgagaattgctttctttagtgttaagacctactcatattttgaagaaatcttgagttaagtgagttctgaggctgctgggggaaccagatcaattcaaagctaaatacttctttcagaaaggggccactgtggaaagtgctggtggggtttgcccttgatcaagtgcctccattgtgctgcaagggctgtagacagcagggtgggacagtcagtcctccgagcagcaggaatcatcccgtcacctgcagccttcccatgcttccgcctttattcagaactttctgtgccactgtagatagctcaggcaaaactattacctgggtatttatccactaatgagtcacaagaaaaggagtggatttggtaagaatagagatttgttttatttaaaccacttcccattactgaccattaaaagctcaccactagagttcctgaaacaggtgaaacctgtatgacagcccttccactttggggagccacgcttttgatgtgacagtaccgcagagtgattcccccactgaggatgtcatcatcaaactcttctttggtgtgtgaattattagtggaaaagacccagctgtaattagacctccactgtgtacttagctggaagaacatgttaattctgcaatatgtttcttggttaaacattgcacagttcttacctcatttctgtaaataaagttttgtgaatctgttttgtattgtgacaaattcataagataacattgatattttgatttgtaatatttctaattggtagatttaattgaaaagtaaaattaatttatttttatatgttcaggggaattttaaagtcaaatcttttgtagataatttaaaaaatcagtgtggtttattttacttatttaacccactggttgttattctgtaacagtttgtataaatggtaaattttgaatgtgttgttattttacctagatgtaaaattccacatgtattaaaatgtacaaaatgttttgttaataaaatttaataatgtt

SEQ ID NO: 148382 - protein, 115 aa, Artificial Sequence
  derived and/or modified sequence
MSYKPNLAAHMPAAALNAAGSVHSPSTSMATSSQYRQLLSDYGPPSLGYTQGTGNSQVPQSKYAELLAIIEELGKEIRPTYAGSKSAMERLKRGIIHARGLVRECLAETERNARS

SEQ ID NO: 148383 - DNA, 348 bp, Artificial Sequence
  derived and/or modified sequence
atgagctacaagcccaacctggccgcccacatgcccgccgccgccctgaacgccgccggcagcgtgcacagccccagcaccagcatggccaccagcagccagtacagacagctgctgagcgactacggcccccccagcctgggctacacccagggcaccggcaacagccaggtgccccagagcaagtacgccgagctgctggccatcatcgaggagctgggcaaggagatcagacccacctacgccggcagcaagagcgccatggagagactgaagagaggcatcatccacgccagaggcctggtgagagagtgcctggccgagaccgagagaaacgccagaagctag

SEQ ID NO: 148384 - DNA, 1625 bp, Artificial Sequence
  derived and/or modified sequence
gcccccaccatcaaggggaagaaagtgctcttcggattccggttcgccctggcctcccgcagccgccgcgggaccggcccccagcacacccccggggcgccgggcgcggggcagccgcccggacgcgcgcgggcctcaggcgccgccgggaccccagccccccaaactttggcaagttgcgggcgccgagcgcacccggaggcgcggggcgcggccgcaggcggagccgccccctgacgccgggccgccccctcccggccccggccgccccgccggctccgcggaaagtttgcggccgcccctgcgccgcacccggggcctgggtgagactgcggcggcggcagggcgcggacggccatatttgccggcgcggcccgagccgccgacaacaaaaagtgcgcgggcgctcggcgggcgctcggacgggcgcggggctgcagcgctaccgcccggcctcgccgccgccgccgccgccctcgcggcctggccccgccgcgcccggcgcgcccgccgcccggggggatgtcttacaaaccgaacttggccgcgcacatgcccgccgccgccctcaacgccgctgggagtgtccactcgccttccaccagcatggcaacgtcttcacagtaccgccagctgctcagtgactacgggccaccgtccctaggctacacccagggaactgggaacagccaggtgccccaaagcaaatacgcggagctgctggccatcattgaagagctggggaaggagatcagacccacgtacgcagggagcaagagtgccatggagaggctgaagcgcggcatcattcacgctagaggactggttcgggagtgcttggcagaaacggaacggaatgccagatcctagctgccttgttggttttgaaggatttccatctttttacaagatgagaagttacagttcatctcccctgttcagatgaaacccttgttttcaaaatggttacagtttcgtttttcctcccatggttcacttggctctgaacctacagtctcaaagattgagaaaagattttgcagttaattaggatttgcattttaagtagttaggaactgcccaggttttttttgttttttaagcattgatttaaaagatgcacggaaagttatcttacagcaaactgtagtttgcctccaagacaccattgtctccctttaatcttctcttttgtatacatttgttacccatggtgttctttgttccttttcataagctaataccactgtagggattttgttttgaacgcatattgacagcacgctttacttagtagccggttcccatttgccatacaatgtaggttctgcttaatgtaacttcttttttgcttaagcatttgcatgactattagtgcttcaaagtcaatttttaaaaatgcacaagttataaatacagaagaaagagcaacccaccaaacctaacaaggacccccgaacactttcatactaagactgtaagtagatctcagttctgcgtttattgtaagttgataaaaacatctggaagaaaatgactaaaactgtttgcatctttgtatgtatttattacttgatgtaataaagcttattttcattaacaatttgtattaaaatgtgggttcc

SEQ ID NO: 148385 - DNA, 348 bp, Artificial Sequence
  derived and/or modified sequence
atgtcttacaagcccaatctggcagctcacatgccagctgcggctctgaacgccgctggtagcgtacactccccaagtacatcgatggccactagttctcagtacaggcagctgctctcagattatggtccaccttccctagggtatactcagggaaccggaaactcacaggtgcctcagtcaaagtacgcggagctgctggccataatcgaagagctcggcaaagaaatccgaccaacgtacgcaggctccaaatcagctatggaaaggttgaagagaggcattatccatgcccgagggctcgtgcgagagtgtctagcagaaacggaaagaaacgcccgcagctag

SEQ ID NO: 148386 - DNA, 348 bp, Artificial Sequence
  derived and/or modified sequence
atgagctacaagcccaacctggccgcccacatgcctgctgctgccctgaatgctgctggctctgtgcacagccccagcacctccatggccaccagcagccagtaccggcagctgctgagtgactatggcccccccagcctgggctacacccagggcactggaaacagccaggtgccccagagcaaatatgcagagctgctggccatcatcgaggagctgggcaaggagatccggcccacctacgccggcagcaagagcgccatggagcggctgaagaggggcatcatccacgcccggggcctggtgcgggagtgcctggccgagacagaaagaaatgcccggagctag

SEQ ID NO: 148387 - DNA, 348 bp, Artificial Sequence
  derived and/or modified sequence
atgagctacaagcccaacctggccgcccacatgcccgccgccgccttgaatgctgcgggatcggtgcactctccatccacgtctatggccacttcttctcagtaccgccagctcctgtctgactatggtcccccaagcttaggatatactcaaggtacaggaaactcccaggttccacagagcaaatatgcagagctgctcgcaattatcgaagaattgggtaaggagatcagacccacatacgccgggtcaaaaagtgctatggagaggctgaagcgagggattatccacgcccgtggtttggtgcgggagtgtttagccgagactgagaggaatgcccgctcctag

SEQ ID NO: 148388 - DNA, 348 bp, Artificial Sequence
  derived and/or modified sequence
atgtcatacaagccgaacttggctgctcatatgcctgcagctgcactgaacgcagctggatccgtgcatagcccttccactagcatggccactagtagtcagtaccgccagctcctcagcgactatggcccaccaagcttaggctacacccagggaaccggcaactctcaggttccacagtccaagtatgcagaacttctcgccattattgaggaactggggaaggaaattcgccctacatacgccggatcaaagagtgctatggaacgcctcaagcggggtataatccacgccagaggactcgtgcgggagtgccttgccgaaaccgaaaggaatgccagatcctag

SEQ ID NO: 148389 - protein, 306 aa, Artificial Sequence
  derived and/or modified sequence
MAAAAAAAAAAGAAGGRGSGPGRRRHLVPGAGGEAGEGAPGGAGDYGNGLESEELEPEELLLEPEPEPEPEEEPPRPRAPPGAPGPGPGSGAPGSQEEEEEPGLVEGDPGDGAIEDPELEAIKARVREMEEEAEKLKELQNEVEKQMNMSPPPGNAGPVIMSIEEKMEADARSIYVGNVDYGATAEELEAHFHGCGSVNRVTILCDKFSGHPKGFAYIEFSDKESVRTSLALDESLFRGRQIKVIPKRTNRPGISTTDRGFPRARYRARTTNYNSSRSRFYSGFNSRPRGRVYRGRARATSWYSPY

SEQ ID NO: 148390 - protein, 296 aa, Artificial Sequence
  derived and/or modified sequence
MAAAAAAAAAAGAAGGRGSGPGRRRHLVPGAGGEAGEGAPGGAGDYGNGLESEELEPEELLLEPEPEPEPEEEPPRPRAPPGAPGPGPGSGAPGSQEEEEEPGLVEGDPGDGAIEDPELEAIKARVREMEEEAEKLKELQNEVEKQMNMSPPPGNAGPVIMSIEEKMEADARSIYVGNVDYGATAEELEAHFHGCGSVNRVTILCDKFSGHPKGFAYIEFSDKESVRTSLALDESLFRGRQIKVIPKRTNRPGISTTDRGFPRARYRARTTNYNSSRSRFYSGFNSRPRGRVYRSG

SEQ ID NO: 148391 - DNA, 921 bp, Artificial Sequence
  derived and/or modified sequence
atggccgcggctgctgccgccgcggccgctgcaggagccgcaggtggtagagggtcaggaccaggccggcggcgacatcttgtcccaggtgctggaggagaggccggcgagggtgcccctggtggggccggagattatggcaacggcttagagtccgaggagttggaacctgaagagctgctgctggaacccgagccagagcccgaaccagaggaggaaccgccacgtccacgggcacctcccggagcacctggacccggacctggtagcggcgcgcccggatcccaggaagaggaagaagaacccggactcgttgaaggcgacccgggagacggcgcgatcgaagatcccgagctcgaggcaatcaaagctcgagttagagaaatggaggaagaggctgagaagttaaaagagctccaaaatgaggtagagaagcaaatgaatatgagtcctccccctgggaatgctggtcccgtgatcatgagcattgaggaaaagatggaggccgacgcgcggagcatttacgtgggcaatgtcgactatggcgcaacagcagaggagttggaggctcattttcacgggtgtggatcagtcaatagagtcaccatactctgtgacaaattttccggccatccaaaagggttcgcttatattgaattctcagataaagagagcgtgaggaccagcctggcgttagacgagtccctgttccgaggccggcagatcaaagtcatcccaaagagaaccaaccggccaggaatttccacaacagatagaggcttcccacgagcacggtaccgcgcaaggacgacaaactataacagcagtcggagtcgtttctacagcggatttaatagcagaccacgaggacgggtgtacaggggtcgagcgagagccacatcatggtacagtccttactag

SEQ ID NO: 148392 - DNA, 891 bp, Artificial Sequence
  derived and/or modified sequence
atggccgctgccgccgccgccgcagcggcggccggggccgctggaggacggggaagcggcccagggcgcagacgccacctggtgcccggggccggaggggaggccggcgaaggggctcccggtggagctggagattatggcaatgggcttgagagtgaggaactggagccggaggagttgcttcttgagccagagccagagcctgagcctgaggaggagccccccagaccaagagctcctccaggcgccccaggtcccggccctggaagtggtgcacccgggagccaggaagaagaggaggaacctgggttagtagaaggggatccaggggatggcgcgatcgaggatcctgaactggaagctataaaagctagagtgcgtgaaatggaggaagaggctgaaaagctgaaagagcttcaaaacgaggtcgagaagcaaatgaacatgtcccctcccccgggaaatgccggccctgtaataatgtccattgaggaaaagatggaggcggacgcacggtccatttacgtgggtaatgtggactatggggcaacagcggaggagcttgaagcccattttcacggctgcgggagtgtgaacagagtcacaatactgtgtgacaaattcagcggtcacccaaaggggtttgcttatatcgagttctccgacaaagaatccgtgcgtacatctttggctctggacgagtccctgtttagaggacgccaaattaaggtgattcctaagcgaactaaccggccaggcatatctactacagacagaggctttccccgcgcgaggtatagagctcggactacaaattacaattcatccagaagccggttttactccggcttcaacagccggccccggggcagagtttatagaagcggatag

SEQ ID NO: 148393 - DNA, 921 bp, Artificial Sequence
  derived and/or modified sequence
atggctgctgctgctgctgctgctgctgctgctggagctgctgggggccggggcagcggccctggaagaagaagacacctggtgcctggagctggaggagaggccggggagggcgcccctgggggcgctggggactatggaaatggcctggagagcgaggagctggagcctgaggagctgctgctggagcctgagcctgagcctgagcctgaggaggagcccccccggccccgggcccctcctggggcccctggccctggccctggcagcggggcccctggcagccaggaggaggaggaggagcccggcctggtggagggggaccctggagatggagccattgaagatcctgagctggaggccatcaaggcccgggtgcgggagatggaggaggaggccgagaagctgaaggagctgcagaatgaggtggagaagcagatgaacatgagccccccacctggaaatgccggccctgtgatcatgagcattgaggagaagatggaggctgatgcccggagcatctacgtgggcaatgtggactatggagccacagctgaggagctggaggcccacttccacggctgcggctctgtgaacagagtgaccatcctgtgtgacaagttcagcggccaccccaagggctttgcctacatcgagttcagtgacaaggagagcgtgaggaccagcctggccctggatgagagcctcttccggggccggcagatcaaggtgatccccaagaggaccaaccggcccggcatcagcaccacagaccggggcttcccccgggcccgctaccgggcccggaccaccaactacaacagcagccgcagccgcttctacagcggcttcaacagccggccccggggccgggtgtaccggggccgggcccgggccacctcctggtacagcccctactag

SEQ ID NO: 148394 - DNA, 891 bp, Artificial Sequence
  derived and/or modified sequence
atggctgctgctgctgctgctgctgctgctgctggagctgctgggggccggggcagcggccctggaagaagaagacacctggtgcctggagctggaggagaggccggggagggcgcccctgggggcgctggggactatggaaatggcctggagagcgaggagctggagcctgaggagctgctgctggagcctgagcctgagcctgagcctgaggaggagcccccccggccccgggcccctcctggggcccctggccctggccctggcagcggggcccctggcagccaggaggaggaggaggagcccggcctggtggagggggaccctggagatggagccattgaagatcctgagctggaggccatcaaggcccgggtgcgggagatggaggaggaggccgagaagctgaaggagctgcagaatgaggtggagaagcagatgaacatgagccccccacctggaaatgccggccctgtgatcatgagcattgaggagaagatggaggctgatgcccggagcatctacgtgggcaatgtggactatggagccacagctgaggagctggaggcccacttccacggctgcggctctgtgaacagagtgaccatcctgtgtgacaagttcagcggccaccccaagggctttgcctacatcgagttcagtgacaaggagagcgtgaggaccagcctggccctggatgagagcctcttccggggccggcagatcaaggtgatccccaagaggaccaaccggcccggcatcagcaccacagaccggggcttcccccgggcccgctaccgggcccggaccaccaactacaacagcagccgcagccgcttctacagcggcttcaacagccggccccggggccgggtgtacagaagtggatag

SEQ ID NO: 148395 - DNA, 921 bp, Artificial Sequence
  derived and/or modified sequence
atggccgccgccgccgccgccgccgccgccgccggcgccgccggcgggcgtggcagcggccccgggcggaggcgacacctagtacctggtgctggcggggaggcaggcgagggggcccccggcggggctggagactatggaaacggcctggaatcggaggaactggagcctgaggagctcctcctggaacctgaaccggaacccgaacccgaagaagagccccctaggccgagggccccccccggggcaccagggccagggcccgggtccggagcccctggaagccaagaggaggaggaggagccaggactggtggagggagatcccggcgatggcgcaatagaagaccccgagctagaggccatcaaggcgagggtgcgcgaaatggaagaggaggctgagaagcttaaggagctccagaacgaagtggagaagcagatgaacatgtcccccccccctggtaacgcagggcccgtgataatgtccatcgaagaaaagatggaagcggacgcacgcagcatttacgtgggaaacgtagactacggggccacagccgaggaactagaggcacattttcacggctgcggtagcgtgaatcgggtcactattctttgcgacaagttctcaggccacccgaagggatttgcttatatcgaattttccgacaaggaaagtgttcggacttcactggctctggatgagtcactgtttagaggcaggcaaattaaggtgattcctaagcgcaccaaccgtcccgggatatctaccacagaccgcgggtttcctcgtgcccggtacagagcacgtactaccaactacaattcctctcgctcaagattttactcaggattcaactcccggccccgcggtcgggtatacaggggccgggcccgcgccacatcttggtacagtccttattag

SEQ ID NO: 148396 - DNA, 891 bp, Artificial Sequence
  derived and/or modified sequence
atggccgccgccgccgccgccgccgccgccgccggcgccgccggcggccggggcagcggccctggaagacgccgccacttggtccccggggctggaggggaagcaggagaaggcgctccaggcggtgctggtgactatggcaatggtctcgaaagcgaagagctggaacccgaggaactactgttagagccagagccagagccagagccggaggaggagcctccacggccaagggccccccccggagcaccgggaccaggccctggatctggggccccgggatctcaggaagaagaagaggaacccggtctcgtggaaggagaccctggtgatggagccatagaagaccccgagctcgaggccatcaaagcgagagtgcgggaaatggaagaggaagcggagaaactaaaggagctgcaaaacgaggtagagaagcaaatgaacatgtctcctcctcctggtaatgccggccccgtcatcatgtctattgaagaaaagatggaggccgacgcaaggtcaatctacgtgggcaacgtggattacggagcaacagcagaagaactggaggctcactttcacggctgtggcagcgtgaaccgagttactatcctgtgtgataagttttctggacaccccaagggcttcgcctatatcgagttcagtgataaggaaagcgttagaacctcactcgcactagacgaatctttatttaggggaaggcagatcaaagtaatccctaaaaggaccaatagacccggaatcagcaccactgacagagggtttcctcgggctaggtatcgagctcgtacgactaattacaacagctcccgctcacgattttactcaggatttaattcgcgccctcgaggacgtgtttaccgatcaggatag

SEQ ID NO: 148397 - DNA, 921 bp, Artificial Sequence
  derived and/or modified sequence
atggccgcagcagcggctgccgcagcagcagccggagccgctggcggacggggatctggccctggacgccgacgccatttggtgcctggtgctggcggagaggctggggagggggctcccggtggagctggagactacggcaacggactcgagtccgaagaactggagcctgaagaattgctgctggagcctgagccggagcccgagccggaggaagaaccccctcgccctagggcccctccaggggctcccggacctggccctggctcaggagcaccgggtagccaggaggaggaggaagagcccggattagtggagggcgacccaggagacggggcaatcgaagaccccgaattggaagcaatcaaagccagagtgagagagatggaagaggaggctgagaaactcaaggaactgcaaaatgaggtggagaaacagatgaatatgtctcctcccccaggcaatgccggacccgtaataatgtcgatcgaggaaaagatggaagccgacgcccgatcaatatacgttggtaacgtggattacggggcaactgccgaggagttggaagcccacttccacggctgtgggagtgtgaacagagtaactattctgtgtgacaagttttctggccatcccaagggcttcgcatacatcgagttttctgataaggagtcagttcgaacctcactagctctcgacgaatcactttttagagggagacaaatcaaagtaatccccaagaggaccaaccggcctggcattagtaccactgaccgcggattccctcgcgctagataccgagctagaacaaccaactacaattccagccggagcaggttctactcaggcttcaacagtaggcccagaggcagagtttaccggggtagagccagagctacgtcttggtacagtccctattag

SEQ ID NO: 148398 - DNA, 2001 bp, Artificial Sequence
  derived and/or modified sequence
cgggatttgagaatttggcgcagtgccccgccttagaggtggggccttatttgattgccaagtaatattccccaatggagtactagctcatggtgacgggcaggcagcttgactaatgagtcctcggcgtggccggcgcagctctccaatcgccgggcggcgggccccagtctgagcggcgatggcggcggcggcggcggcggcagcagcagcgggggctgcgggcggtcggggctccgggccggggcggcggcgccatcttgtgcccggggccggtggggaggccggggagggggccccggggggcgcaggggactacgggaacggcctggagtctgaggaactggagcctgaggagctgctgctggagcccgagccggagcccgagcccgaagaggagccgccccggccccgcgcccccccgggagctccgggccctgggcctggttcgggagcccccggcagccaagaggaggaggaggagccgggactggtcgagggtgacccgggggacggcgccattgaggacccggagctggaagctatcaaagctcgagtcagggagatggaggaagaagctgagaagctaaaggagctacagaacgaggtagagaagcagatgaatatgagtccacctccaggcaatgctggcccggtgatcatgtccattgaggagaagatggaggctgatgcccgttccatctatgttggcaatgtggactatggtgcaacagcagaagagctggaagctcactttcatggctgtggttcagtcaaccgtgttaccatactgtgtgacaaatttagtggccatcccaaagggtttgcgtatatagagttctcagacaaagagtcagtgaggacttccttggccttagatgagtccctatttagaggaaggcaaatcaaggtgatcccaaaacgaaccaacagaccaggcatcagcacaacagaccggggttttccacgagcccgctaccgcgcccggaccaccaactacaacagctcccgctctcgattctacagtggttttaacagcaggccccggggtcgcgtctacaggggccgggctagagcgacatcatggtattccccttactaaaaaaagtgtgtattaggaggagagagaggaaaaaaagaggaaagaaggaaaaaaaaaagaattaaaaaaaaaaaaaagaaaaacagaagatgaccttgatggaaaaaaaatattttttaaaaaaaagatatactgtggaaggggggagaatcccataactaactgctgaggagggacctgctttggggagtaggggaaggcccagggagtggggcagggggctgcttattcactctggggattcgccatggacacgtctcaactgcgcaagctgctgcccatgtttccctgccccacttcacccccttgggggctgctcaagggtaggtgggcgtgggtggtaggaggtttttttttttacccagggctctggaaggacaccaaactgttctgcttgttaccttccctccgtcttctcctcgcctttcacagtcccctcctgcctgctcctgtccagccaggtctaccacccaccccacccctcttctccggctccctgcccctccagattgcctggtgatctattttgtttccttttgtgtttctttttctgttttgagtgtctttctttgcaggtttctgtagccggaagatctccgttccgctcccagcggctccagtgtaaattccccttccccctggggaaatgcactaccttgttttggggggtttaggggtgtttttgtttttcagttgttttgtttttttgttttttttttttttcctttgccttttttcccttttatttggagggaatgggaggaagtgggaacagggaggtgggaggtggattttgtttatttttttagctcatttccaggggtgggaatttttttttaatatgtgtcatgaataaagttgtttttgaaaataaaaattgtttggccttttgggtgtaa

SEQ ID NO: 148399 - DNA, 2768 bp, Artificial Sequence
  derived and/or modified sequence
agtctgagcggcgatggcggcggcggcggcggcggcagcagcagcgggggctgcgggcggtcggggctccgggccggggcggcggcgccatcttgtgcccggggccggtggggaggccggggagggggccccggggggcgcaggggactacgggaacggcctggagtctgaggaactggagcctgaggagctgctgctggagcccgagccggagcccgagcccgaagaggagccgccccggccccgcgcccccccgggagctccgggccctgggcctggttcgggagcccccggcagccaagaggaggaggaggagccgggactggtcgagggtgacccgggggacggcgccattgaggacccggagctggaagctatcaaagctcgagtcagggagatggaggaagaagctgagaagctaaaggagctacagaacgaggtagagaagcagatgaatatgagtccacctccaggcaatgctggcccggtgatcatgtccattgaggagaagatggaggctgatgcccgttccatctatgttggcaatgtggactatggtgcaacagcagaagagctggaagctcactttcatggctgtggttcagtcaaccgtgttaccatactgtgtgacaaatttagtggccatcccaaagggtttgcgtatatagagttctcagacaaagagtcagtgaggacttccttggccttagatgagtccctatttagaggaaggcaaatcaaggtgatcccaaaacgaaccaacagaccaggcatcagcacaacagaccggggttttccacgagcccgctaccgcgcccggaccaccaactacaacagctcccgctctcgattctacagtggttttaacagcaggccccggggtcgcgtctacaggtcaggatagatgggctgctcctctttcccccgcctcccgtgagccccgtatgcttcctcctctctggtctgaggaacctccctccccccacccctccccgtggtcttcaggaactttgtctcctgcctgtgcaggttgaggaaggtagttgcaggccaggccagaaggccagcctcatcatcttttctgcagtagaaattggtgataagggctgcatccctcccttggttcaaagaggcttccacccccagccttttttttcttgggagttggtggcatttgaaggtgtttgcggacaaaactgggaggaacagggcctccaggcagtgaaagcactgcttggacatttgttacttttttcggagttagggagggattgaagactgaacctcccttggaagaataccagaggctagctagttgatcctccccaacagccttgtgggaggattttgagatacttattctttatttgagccagtcttgcaaggttaacttctcactgggcctagtgtggtgcccaggtttttgccttgcttcacttctgtctctacatttaaatagacgggttaggcatataaaccttggcttttcataagctctacctgcctatccccaggagttagggaggatctatttgtgatggcctagggtttaagagctgtggaggactgaaaactggataaaaagggggtccttttccttgcccctgtctctcactcagatgcgcttctttttcgccactgtttggcagttttctgttaagcccccctccccctgccccagttctccaggtgcgttactatttctgggatcatggggtcagttttaggacacttgaacacttcttttccccccttcccttcacagtaactggggcaggggcctacggggaggggcttgtactgaactatctagtgatcacgttaacacctaactctccttctttcttccaggggccgggctagagcgacatcatggtattccccttactaaaaaaagtgtgtattaggaggagagagaggaaaaaaagaggaaagaaggaaaaaaaaaagaattaaaaaaaaaaaaaagaaaaacagaagatgaccttgatggaaaaaaaatattttttaaaaaaaagatatactgtggaaggggggagaatcccataactaactgctgaggagggacctgctttggggagtaggggaaggcccagggagtggggcagggggctgcttattcactctggggattcgccatggacacgtctcaactgcgcaagctgctgcccatgtttccctgccccacttcacccccttgggggctgctcaagggtaggtgggcgtgggtggtaggaggtttttttttttacccagggctctggaaggacaccaaactgttctgcttgttaccttccctccgtcttctcctcgcctttcacagtcccctcctgcctgctcctgtccagccaggtctaccacccaccccacccctcttctccggctccctgcccctccagattgcctggtgatctattttgtttccttttgtgtttctttttctgttttgagtgtctttctttgcaggtttctgtagccggaagatctccgttccgctcccagcggctccagtgtaaattccccttccccctggggaaatgcactaccttgttttggggggtttaggggtgtttttgtttttcagttgttttgtttttttgttttttttttttttcctttgccttttttcccttttatttggagggaatgggaggaagtgggaacagggaggtgggaggtggattttgtttatttttttagctcatttccaggggtgggaatttttttttaatatgtgtcatgaataaagttgtttttgaaaataaaaa

SEQ ID NO: 148400 - DNA, 891 bp, Artificial Sequence
  derived and/or modified sequence
atggcagctgccgcagcagccgcagcagcggctggggcagcgggaggcaggggatctggcccaggcaggaggcgtcatctggtgccaggcgctggaggagaggcaggagagggagcccctgggggtgccggagactacggcaatggattagagagcgaggagctggagccagaagagttactgctggaacctgagccagagccagagcctgaagaggaacctccccgacctagagcccctcctggcgcacctggcccaggacctgggagcggtgccccagggagtcaagaggaagaagaagagccgggtctagtggagggggatccaggcgatggcgctattgaggaccccgagctagaagcgattaaggccagagtgagagagatggaggaagaggccgagaaactgaaagagctgcaaaatgaggttgaaaagcagatgaatatgagcccccctccaggaaacgcaggccctgtgatcatgtccatcgaagagaagatggaagctgatgccagaagcatatatgtagggaacgtggactatggggcaaccgctgaagaacttgaggctcacttccatggttgtgggtccgtaaacagggtgacaattctttgcgataaatttagtggccacccgaaggggttcgcctacattgagttctccgataaagagtccgtgcggactagtctggctctggacgagagccttttccggggacgtcagatcaaagttatccccaagcgtactaaccggcctgggatttccaccacagatcgcggttttcctcgggctcggtatagagccaggactactaattacaattctagccgatcaagattctattcgggctttaactcaagacctcgtggccgtgtgtatcgttcggggtag

SEQ ID NO: 148401 - DNA, 921 bp, Artificial Sequence
  derived and/or modified sequence
atggccgccgccgccgccgccgccgccgccgccggcgccgccggcggcagaggcagcggccccggcagaagaagacacctggtgcccggcgccggcggcgaggccggcgagggcgcccccggcggcgccggcgactacggcaacggcctggagagcgaggagctggagcccgaggagctgctgctggagcccgagcccgagcccgagcccgaggaggagccccccagacccagagccccccccggcgcccccggccccggccccggcagcggcgcccccggcagccaggaggaggaggaggagcccggcctggtggagggcgaccccggcgacggcgccatcgaggaccccgagctggaggccatcaaggccagagtgagagagatggaggaggaggccgagaagctgaaggagctgcagaacgaggtggagaagcagatgaacatgagccccccccccggcaacgccggccccgtgatcatgagcatcgaggagaagatggaggccgacgccagaagcatctacgtgggcaacgtggactacggcgccaccgccgaggagctggaggcccacttccacggctgcggcagcgtgaacagagtgaccatcctgtgcgacaagttcagcggccaccccaagggcttcgcctacatcgagttcagcgacaaggagagcgtgagaaccagcctggccctggacgagagcctgttcagaggcagacagatcaaggtgatccccaagagaaccaacagacccggcatcagcaccaccgacagaggcttccccagagccagatacagagccagaaccaccaactacaacagcagcagaagcagattctacagcggcttcaacagcagacccagaggcagagtgtacagaggcagagccagagccaccagctggtacagcccctactag

SEQ ID NO: 148402 - DNA, 891 bp, Artificial Sequence
  derived and/or modified sequence
atggccgccgccgccgccgccgccgccgccgccggcgccgccggcggcagaggcagcggccccggcagaagaagacacctggtgcccggcgccggcggcgaggccggcgagggcgcccccggcggcgccggcgactacggcaacggcctggagagcgaggagctggagcccgaggagctgctgctggagcccgagcccgagcccgagcccgaggaggagccccccagacccagagccccccccggcgcccccggccccggccccggcagcggcgcccccggcagccaggaggaggaggaggagcccggcctggtggagggcgaccccggcgacggcgccatcgaggaccccgagctggaggccatcaaggccagagtgagagagatggaggaggaggccgagaagctgaaggagctgcagaacgaggtggagaagcagatgaacatgagccccccccccggcaacgccggccccgtgatcatgagcatcgaggagaagatggaggccgacgccagaagcatctacgtgggcaacgtggactacggcgccaccgccgaggagctggaggcccacttccacggctgcggcagcgtgaacagagtgaccatcctgtgcgacaagttcagcggccaccccaagggcttcgcctacatcgagttcagcgacaaggagagcgtgagaaccagcctggccctggacgagagcctgttcagaggcagacagatcaaggtgatccccaagagaaccaacagacccggcatcagcaccaccgacagaggcttccccagagccagatacagagccagaaccaccaactacaacagcagcagaagcagattctacagcggcttcaacagcagacccagaggcagagtgtacagaagcggctag

SEQ ID NO: 148403 - protein, 576 aa, Artificial Sequence
  derived and/or modified sequence
MAASETVRLRLQFDYPPPATPHCTAFWLLVDLNRCRVVTDLISLIRQRFGFSSGAFLGLYLEGGLLPPAESARLVRDNDCLRVKLEERGVAENSVVISNGDINLSLRKAKKRAFQLEEGEETEPDCKYSKKHWKSRENNNNNEKVLDLEPKAVTDQTVSKKNKRKNKATCGTVGDDNEEAKRKSPKKKEKCEYKKKAKNPKSPKVQAVKDWANQRCSSPKGSARNSLVKAKRKGSVSVCSKESPSSSSESESCDESISDGPSKVTLEARNSSEKLPTELSKEEPSTKNTTADKLAIKLGFSLTPSKGKTSGTTSSSSDSSAESDDQCLMSSSTPECAAGFLKTVGLFAGRGRPGPGLSSQTAGAAGWRRSGSNGGGQAPGASPSVSLPASLGRGWGREENLFSWKGAKGRGMRGRGRGRGHPVSCVVNRSTDNQRQQQLNDVVKNSSTIIQNPVETPKKDYSLLPLLAAAPQVGEKIAFKLLELTSSYSPDVSDYKEGRILSHNPETQQVDIEILSSLPALREPGKFDLVYHNENGAEVVEYAVTQESKITVFWKELIDPRLIIESPSNTSSTEPA

SEQ ID NO: 148404 - DNA, 1731 bp, Artificial Sequence
  derived and/or modified sequence
atggccgcctctgaaactgtccggctgagactgcaatttgattaccccccccctgccacacctcactgcacagcattctggctcctggtcgacctgaacaggtgcagagtcgtgacggacctgatctccttgatcagacagagattcggctttagctctggcgctttcttgggactgtacctcgagggcggtctgctccctccagcagaaagcgcccggttggtgcgtgacaatgattgcttgagagttaaattagaggagcggggcgtcgccgaaaattccgtggtcatctctaatggcgatattaatttaagtttgcgcaaagccaagaagagggcctttcaattagaggagggtgaagagaccgaacccgactgcaaatacagcaaaaagcattggaaatcgcgcgagaacaataataataacgagaaggtgctggaccttgagcccaaggctgtcacagaccagactgtgtccaaaaaaaataagcggaagaacaaggcaacctgcgggactgttggagacgacaacgaggaagctaaaagaaagtctcccaagaaaaaggagaaatgcgaatacaaaaaaaaggcgaagaatccaaaatcacctaaagtacaggcagtgaaagactgggcaaatcaaagatgctcctcccctaagggaagcgcaaggaattcactggtgaaagctaaaagaaaggggtcggtctcagtatgctctaaagagtctcctagcagttccagtgagagcgaaagctgtgacgagtccatctctgatggaccttcaaaagtgaccttagaggctaggaactcgagtgagaaattacctacagagttgagcaaggaggagccgtctactaagaatacaaccgccgataagctggctatcaagctcggcttctcactaacaccatccaaggggaagacctctggaaccacttcatcatcgagtgatagtagcgccgagtctgacgatcaatgtctgatgagcagctcaactcccgaatgcgccgctggattcctgaaaacagtcgggctcttcgcgggccgcggccgcccgggccctggcctcagcagccagaccgccggagcagcgggctggagacggagtggctcaaacggcggcggccaagcccctggggctagtccatccgtatctctgccggcctctttgggtcgagggtggggtagggaggagaatctgttttcctggaaaggagccaagggaaggggcatgcgggggagagggagaggtagagggcacccagtgtcctgcgttgtgaacaggagtactgacaaccaaagacagcaacagttaaacgatgttgtgaagaacagttcaacgatcattcaaaaccccgtggagacgccaaagaaggactactcccttctccccctgctagctgccgcgccacaggtcggggagaagatagcctttaagttgctggaactgacttcaagctactcccctgacgtttctgattacaaggaaggcagaattttgagccataacccagaaacccagcaagttgatatcgagatcttgtcatctttgccggccctcagagagccaggtaagtttgatctggtctaccacaacgaaaacggtgccgaagtcgttgaatatgcggtcacgcaggagagcaaaatcactgtattctggaaagagctgatcgaccctcgattgatcatcgaatcaccaagcaacacgtcttccaccgagcctgcctag

SEQ ID NO: 148405 - DNA, 1731 bp, Artificial Sequence
  derived and/or modified sequence
atggccgccagcgagaccgtgcggctgcggctgcagtttgactacccacctccagccaccccccactgcacagccttctggctgctggtggacctgaaccgctgccgggtggtgacagacctgatcagcctcatccggcagagatttggcttcagcagcggggccttcctgggcctgtacctggagggcggcctgctgcccccagctgagagcgcccggctggtgcgggacaatgactgcctgcgggtgaagctggaggagcggggcgtggccgagaacagcgtggtgatcagcaatggagacatcaacctgagcctgaggaaggccaagaagagggccttccagctggaggagggggaggagacagagccagactgcaagtacagcaagaagcactggaagagccgggagaacaacaacaacaatgagaaggtgctggacctggagcccaaggctgtgacagaccagacagtgtccaagaagaacaagaggaagaacaaggccacctgtggcaccgtgggagatgacaatgaggaggccaagaggaagagccccaagaagaaggagaagtgtgagtacaagaagaaggccaagaaccccaagagccccaaggtgcaggccgtgaaggactgggccaaccagcgctgcagcagccccaagggcagcgccaggaacagcctggtgaaggccaagaggaaaggatctgtgtctgtgtgcagcaaggagagccccagcagcagcagcgagagcgagagctgtgatgagagcatcagtgatggccccagcaaggtgaccctggaggccaggaacagcagcgagaagctgcccacagagctgagcaaggaggagcccagcaccaagaacaccacagctgacaagctggccatcaagctgggcttcagcctgacccccagcaagggcaagaccagcggcaccaccagcagcagcagtgacagcagcgctgagagtgatgaccagtgcctgatgagcagcagcaccccagaatgtgccgccggcttcctgaagacagtgggcctgtttgctggccggggccggcccggccctggcctgagcagccagacagctggagctgctggctggaggaggagcggcagcaatggaggcggccaggcccctggggccagccccagcgtgtccctgcctgccagcctgggccggggctggggccgggaggagaacctcttctcctggaagggggccaagggccggggcatgaggggccggggccggggccggggccaccctgtgtcctgtgtggtgaacagaagcacagacaaccagaggcagcagcagctgaatgatgtggtgaagaacagcagcaccatcatccagaaccctgtggagacccccaagaaggactacagcctgctgcccctgctggccgccgccccccaggtgggggagaagatcgccttcaagctgctggagctgaccagcagctacagcccagatgtgtctgactacaaggagggccgcatcctgagccacaaccctgagacccagcaggtggacatcgagatcctgagcagcctgcctgccctgcgggagcccgggaagtttgacctggtgtaccacaatgaaaatggagctgaggtggtggagtatgctgtgacccaggagagcaagatcaccgtcttctggaaggagctgattgaccccaggctcatcatcgagagccccagcaacaccagcagcacagagcccgcctag

SEQ ID NO: 148406 - DNA, 1731 bp, Artificial Sequence
  derived and/or modified sequence
atggccgccagcgagaccgtgcggctgcggctgcagttcgactacccacccccagcaacaccccactgcactgcgttttggctgctggtagatctgaaccggtgtagagtagtgactgatctgatcagtttgattcgccagcgtttcggattttccagtggcgccttcttgggactgtacctggagggaggcctgctgccgcccgcagaaagcgcaaggctggtaagagacaatgactgcctacgggtgaagctcgaggagagaggcgttgctgagaacagcgtggtgatcagtaatggcgatattaacctatctctgcggaaagctaaaaaaagggcctttcagctagaggagggagaagagaccgagcctgattgcaaatactctaaaaagcactggaaatcaagagagaataataataacaacgagaaggtgctggatctggaacctaaggcggttacggatcagactgtctccaaaaagaataaacgaaagaataaagctacttgcggtaccgtgggtgacgacaatgaggaggccaagaggaagagcccgaaaaagaaggagaaatgtgaatacaaaaagaaggccaagaaccctaaatccccgaaggtgcaggcagttaaagattgggccaatcaacgctgttcttctccaaaagggtccgcccgcaactccctcgtaaaggcgaagcgaaaagggagcgtgtctgtgtgtagcaaggagtctccgtctagctcttctgagtctgagtcttgcgatgagtctataagtgacgggccctcgaaggttacattggaagcgagaaattcgagcgaaaagctgcccaccgagctctctaaagaagagcccagcacaaagaataccaccgctgacaagctggcaattaaattgggatttagcctgacaccaagcaaaggtaaaaccagcggcactacctcttctagtagcgactccagtgctgaatcagacgatcagtgtcttatgtcatcctcgacacccgaatgcgcagcgggattcctgaagaccgtggggttgttcgctggccgcggccgtcccgggccaggcttgagctcccaaaccgccggtgccgcaggctggcgcagatctggttccaatggcggtggacaagcccccggagcttccccttctgtcagcctgcccgcctctctcggccggggctgggggcgcgaagaaaacctcttctcctggaagggggcaaaagggcggggaatgcgcgggcggggacggggaaggggtcaccctgtatcttgtgtggtgaaccggtctaccgataatcagagacaacaacagttgaacgacgtggtcaaaaactcctccaccattatccaaaacccagtggagacccccaagaaagattactccctcctgcccttgctcgcagccgcccctcaggtgggagagaagatcgccttcaaactcctcgaacttacttccagctatagccccgacgtcagcgattacaaggagggacggatcctttcccataaccccgagacccaacaggtggatattgagattctctctagtttgccggcccttagagagccaggcaagtttgatctcgtttatcacaatgagaacggagccgaggtggtggagtacgcagtgactcaagaaagcaaaattacggtgttttggaaggagcttattgaccctagactgattatcgagtctccatccaacacatccagcacagagccagcctag

SEQ ID NO: 148407 - DNA, 1731 bp, Artificial Sequence
  derived and/or modified sequence
atggctgctagtgagaccgtgagactgcgcttacaatttgattacccaccgccagccacgcctcactgcactgctttctggcttctggtggatctcaacagatgccgggttgtgacggacctgatatctctcatacgacaaaggtttggctttagctctggggcattcctcggtctttacctcgagggcggacttctacctcccgcagaaagtgccagactcgtgagagataatgactgccttcgcgtgaagctggaagagaggggagtggcggaaaactctgttgttataagtaacggggacattaatctgtcactgcggaaagcaaaaaagcgggcattccagctagaagagggggaggagaccgagcccgactgtaagtattccaagaaacactggaagtcccgcgaaaacaacaataacaacgagaaagtcttggatcttgaacccaaggcagttactgaccagacagtttctaagaagaacaagcggaaaaacaaagctacttgcggtacagttggggatgacaacgaagaggccaaaagaaaaagtccaaagaagaaggagaagtgtgaatataagaagaaggccaaaaacccgaaaagccccaaggtgcaggcggttaaggactgggctaatcagcgctgtagctcgcctaaaggatcagcccgtaatagcttggtcaaggctaagcgcaagggctctgtgagtgtgtgcagtaaggagtccccttctagctcttcagaaagcgagtcgtgcgacgagtctatctctgatggcccatcgaaagtcactctggaagctcgaaacagtagcgagaagctcccaactgaactatccaaggaggagccctccactaagaatactactgcggacaaactggcaataaagcttgggtttagtcttactccctctaaaggaaaaacttctggcacaacctctagttccagcgattccagtgccgagtccgacgatcagtgcctcatgagcagcagcacaccagaatgcgccgctggtttcctgaagacggtcggtctgttcgccggaaggggccgtcccggtcccggtctatcatcccagaccgcaggcgctgccggttggcggaggagcggctccaatggcggtggccaggctccgggtgcctcacctagcgtatccctgccagcgagtttgggaagggggtggggcagagaggaaaatctgtttagctggaaaggggctaagggcagaggaatgcggggtaggggccgtggccgtggacatccggtctcttgcgtcgtcaatcgcagcactgacaatcaaagacagcaacagctcaacgacgtagtgaaaaattctagcacaataatccagaatcctgtggagacgccaaagaaggactatagcctattacctctcctcgcagcagcccctcaggtgggggagaagatcgcttttaagctcctcgaacttacgagcagctactccccagacgtcagcgactataaggaaggccgaatcctaagccataaccctgagacacaacaggtggatatcgagatactgagctcattgccagccttaagagaacccggtaaatttgacctggtctaccataacgagaacggtgctgaggtcgttgaatatgccgtgacgcaagaatctaaaattacggtgttctggaaagaattgatcgaccccaggcttatcatagaatctccgagtaatacgtcaagtaccgaacccgcatag

SEQ ID NO: 148408 - DNA, 2631 bp, Artificial Sequence
  derived and/or modified sequence
atctctcggcttccgttgagcaccaagcaagatggcagcttccgagacggttaggctacggcttcaatttgattacccgccgccagctaccccgcactgtacggccttctggcttctggtcgacttgaacagatgccgagtcgtcacagatctcattagtctcatccgccagcgcttcggcttcagttctggggccttcctaggcctctacctggagggggggctcttgccccccgccgagagcgcgcgccttgtgagagacaacgactgcctcagagttaaattagaagagagaggagttgctgagaattctgtagtcatcagtaatggtgacattaatttatctcttagaaaagcaaagaagcgggcatttcagttagaggagggtgaagaaactgaaccagattgcaaatattcaaagaagcattggaagagtcgagagaacaataacaataatgagaaggtcttggatctggaaccaaaagctgtcacagatcagactgtcagcaaaaaaaacaagagaaaaaataaagcaacctgtggcacagtgggtgatgataacgaagaggccaaaagaaaatcaccaaagaaaaaggagaaatgtgaatataaaaaaaaggctaagaatcccaagtctccgaaagtacaggcagtgaaagactgggccaatcagagatgtagttctccaaaaggttctgctagaaacagccttgttaaagccaaaaggaaaggtagtgtaagcgtttgctcaaaagagagtcccagttcctcctcggagtctgaatcttgtgatgaatctatcagtgatggtcccagcaaagtcactttggaggccagaaattcctcagagaaattaccaactgagttatcaaaggaagaaccctctaccaaaaatacaactgcagacaaactggctataaaacttggctttagccttacccccagcaagggcaagacctctggaacaacatcttccagttcagactctagtgcagagtcagacgaccaatgcttgatgtcatcgagcaccccggagtgtgctgcgggtttcttaaagacagtaggcctttttgcaggaagaggtcgtccaggcccagggctgtcatcacagactgcaggtgctgctggatggaggcgttctggctcaaatggtggtggacaggctcctggtgcttctcccagtgtgtctctccctgctagtttaggaagaggatggggtagagaagagaaccttttttcttggaagggagctaagggacggggcatgcgggggagaggtcgaggacgagggcatcctgtttcctgtgttgtaaatagaagcactgacaaccagaggcaacagcaattaaatgacgtggtaaaaaattcatctactattatccagaatccagtagagacacccaagaaggactatagtctgttaccactgttagcagctgcccctcaagttggagaaaagattgcatttaagcttttggagctaacatccagttactctcctgatgtctctgactacaaggaaggaagaatattaagccacaatccagagacccagcaagtagatatagaaattctttcatccttacctgccttgagagaacctgggaaatttgatttagtttatcacaatgaaaatggagccgaggtagtggagtacgctgtgacacaggagagcaagatcactgtattttggaaagagttgattgacccaagactgattattgaatctccaagtaacacatcaagtacagaacctgcctgagtatgacctctccaccttatagtttatgaatgtcttgtttgtgaaagtgactataacccaaacttttttttttttttaaagaggatttggaagttgtatggatttttttgttatcttcactttactgcataggaaacaatctacctcatcatttaaaatgacatgggtgtcggttttgtagatctttggtttttttgtcaggtttaatttcagttaacaaaatgtaaaacatgacattccctgcagatattgttgtataccagtatggtttcttctctttctttaaatgtttttggccatcaagtagcagtcgtcagtaggagtttataataccaagaatgtgctgcgtatcttgtctcaataagttttaagtaacatttaaaaatattaaagcatgttatttgacctaattttttagcatttgagttgttccattaaatggagcatcttgtaaatttcaagtattttatacttgcaattgttaagagttaacaggtagttggatttgtcgcagacaatgagttaaggaatcctttcacgtttttcccaactttaaaattaaggattctcaggtccctgtgtagagcagtgaaaataagatgtgcgtatgtgtgtgtatgcctggagaattggtgtttcacttcagtgagaggattggctgtgagcttcagaccaggaaatgtgtcatcttgccaggcacctggctgagtgtgctggagtgaggatcttgaacagaaacttccttttctgttattattcactacgaagctaaaatggccaaatatataccgtgaaaattggtttcatttaacaaaagatcagatccctccttcagctgtacacatttttaaataaaatcatattgaact

SEQ ID NO: 148409 - DNA, 1731 bp, Artificial Sequence
  derived and/or modified sequence
atggccgccagcgagaccgtgagactgagactgcagttcgactaccccccccccgccaccccccactgcaccgccttctggctgctggtggacctgaacagatgcagagtggtgaccgacctgatcagcctgatcagacagagattcggcttcagcagcggcgccttcctgggcctgtacctggagggcggcctgctgccccccgccgagagcgccagactggtgagagacaacgactgcctgagagtgaagctggaggagagaggcgtggccgagaacagcgtggtgatcagcaacggcgacatcaacctgagcctgagaaaggccaagaagagagccttccagctggaggagggcgaggagaccgagcccgactgcaagtacagcaagaagcactggaagagcagagagaacaacaacaacaacgagaaggtgctggacctggagcccaaggccgtgaccgaccagaccgtgagcaagaagaacaagagaaagaacaaggccacctgcggcaccgtgggcgacgacaacgaggaggccaagagaaagagccccaagaagaaggagaagtgcgagtacaagaagaaggccaagaaccccaagagccccaaggtgcaggccgtgaaggactgggccaaccagagatgcagcagccccaagggcagcgccagaaacagcctggtgaaggccaagagaaagggcagcgtgagcgtgtgcagcaaggagagccccagcagcagcagcgagagcgagagctgcgacgagagcatcagcgacggccccagcaaggtgaccctggaggccagaaacagcagcgagaagctgcccaccgagctgagcaaggaggagcccagcaccaagaacaccaccgccgacaagctggccatcaagctgggcttcagcctgacccccagcaagggcaagaccagcggcaccaccagcagcagcagcgacagcagcgccgagagcgacgaccagtgcctgatgagcagcagcacccccgagtgcgccgccggcttcctgaagaccgtgggcctgttcgccggcagaggcagacccggccccggcctgagcagccagaccgccggcgccgccggctggagaagaagcggcagcaacggcggcggccaggcccccggcgccagccccagcgtgagcctgcccgccagcctgggcagaggctggggcagagaggagaacctgttcagctggaagggcgccaagggcagaggcatgagaggcagaggcagaggcagaggccaccccgtgagctgcgtggtgaacagaagcaccgacaaccagagacagcagcagctgaacgacgtggtgaagaacagcagcaccatcatccagaaccccgtggagacccccaagaaggactacagcctgctgcccctgctggccgccgccccccaggtgggcgagaagatcgccttcaagctgctggagctgaccagcagctacagccccgacgtgagcgactacaaggagggcagaatcctgagccacaaccccgagacccagcaggtggacatcgagatcctgagcagcctgcccgccctgagagagcccggcaagttcgacctggtgtaccacaacgagaacggcgccgaggtggtggagtacgccgtgacccaggagagcaagatcaccgtgttctggaaggagctgatcgaccccagactgatcatcgagagccccagcaacaccagcagcaccgagcccgcctag

SEQ ID NO: 148410 - protein, 1201 aa, Artificial Sequence
  derived and/or modified sequence
MALGTTLRASLLLLGLLTEGLAQLAIPASVPRGFWALPENLTVVEGASVELRCGVSTPGSAVQWAKDGLLLGPDPRIPGFPRYRLEGDPARGEFHLHIEACDLSDDAEYECQVGRSEMGPELVSPRVILSILVPPKLLLLTPEAGTMVTWVAGQEYVVNCVSGDAKPAPDITILLSGQTISDISANVNEGSQQKLFTVEATARVTPRSSDNRQLLVCEASSPALEAPIKASFTVNVLFPPGPPVIEWPGLDEGHVRAGQSLELPCVARGGNPLATLQWLKNGQPVSTAWGTEHTQAVARSVLVMTVRPEDHGAQLSCEAHNSVSAGTQEHGITLQVTFPPSAIIILGSASQTENKNVTLSCVSKSSRPRVLLRWWLGWRQLLPMEETVMDGLHGGHISMSNLTFLARREDNGLTLTCEAFSEAFTKETFKKSLILNVKYPAQKLWIEGPPEGQKLRAGTRVRLVCLAIGGNPEPSLMWYKDSRTVTESRLPQESRRVHLGSVEKSGSTFSRELVLVTGPSDNQAKFTCKAGQLSASTQLAVQFPPTNVTILANASALRPGDALNLTCVSVSSNPPVNLSWDKEGERLEGVAAPPRRAPFKGSAAARSVLLQVSSRDHGQRVTCRAHSAELRETVSSFYRLNVLYRPEFLGEQVLVVTAVEQGEALLPVSVSANPAPEAFNWTFRGYRLSPAGGPRHRILSSGALHLWNVTRADDGLYQLHCQNSEGTAEARLRLDVHYAPTIRALQDPTEVNVGGSVDIVCTVDANPILPGMFNWERLGEDEEDQSLDDMEKISRGPTGRLRIHHAKLAQAGAYQCIVDNGVAPPARRLLRLVVRFAPQVEHPTPLTKVAAAGDSTSSATLHCRARGVPNIVFTWTKNGVPLDLQDPRYTEHTYHQGGVHSSLLTIANVSAAQDYALFTCTATNALGSDQTNIQLVSISRPDPPSGLKVVSLTPHSVGLEWKPGFDGGLPQRFCIRYEALGTPGFHYVDVVPPQATTFTLTGLQPSTRYRVWLLASNALGDSGLADKGTQLPITTPGLHQPSGEPEDQLPTEPPSGISEKTEAGSEEDRVRNEYEESQWTGERDTQSSTVSTTEAEPYYRSLRDFSPQLPPTQEEVSYSRGFTGEDEDMAFPGHLYDEVERTYPPSGAWGPLYDEVQMGPWDLHWPEDTYQDPRGIYDQVAGDLDTLEPDSLPFELRGHLV

SEQ ID NO: 148411 - protein, 1241 aa, Artificial Sequence
  derived and/or modified sequence
MALGTTLRASLLLLGLLTEGLAQLAIPASVPRGFWALPENLTVVEGASVELRCGVSTPGSAVQWAKDGLLLGPDPRIPGFPRYRLEGDPARGEFHLHIEACDLSDDAEYECQVGRSEMGPELVSPRVILSILVPPKLLLLTPEAGTMVTWVAGQEYVVNCVSGDAKPAPDITILLSGQTISDISANVNEGSQQKLFTVEATARVTPRSSDNRQLLVCEASSPALEAPIKASFTVNVLFPPGPPVIEWPGLDEGHVRAGQSLELPCVARGGNPLATLQWLKNGQPVSTAWGTEHTQAVARSVLVMTVRPEDHGAQLSCEAHNSVSAGTQEHGITLQVTFPPSAIIILGSASQTENKNVTLSCVSKSSRPRVLLRWWLGWRQLLPMEETVMDGLHGGHISMSNLTFLARREDNGLTLTCEAFSEAFTKETFKKSLILNVKYPAQKLWIEGPPEGQKLRAGTRVRLVCLAIGGNPEPSLMWYKDSRTVTESRLPQESRRVHLGSVEKSGSTFSRELVLVTGPSDNQAKFTCKAGQLSASTQLAVQFPPTNVTILANASALRPGDALNLTCVSVSSNPPVNLSWDKEGERLEGVAAPPRRAPFKGSAAARSVLLQVSSRDHGQRVTCRAHSAELRETVSSFYRLNVLYRPEFLGEQVLVVTAVEQGEALLPVSVSANPAPEAFNWTFRGYRLSPAGGPRHRILSSGALHLWNVTRADDGLYQLHCQNSEGTAEARLRLDVHYAPTIRALQDPTEVNVGGSVDIVCTVDANPILPGMFNWERLGEDEEDQSLDDMEKISRGPTGRLRIHHAKLAQAGAYQCIVDNGVAPPARRLLRLVVRFAPQVEHPTPLTKVAAAGDSTSSATLHCRARGVPNIVFTWTKNGVPLDLQDPRYTEHTYHQGGVHSSLLTIANVSAAQDYALFTCTATNALGSDQTNIQLVSISRPDPPSGLKVVSLTPHSVGLEWKPGFDGGLPQRFCIRYEALGTPGFHYVDVVPPQATTFTLTGLQPSTRYRVWLLASNALGDSGLADKGTQLPITTPGLHQPSGEPEDQLPTEPPSGPSGLPLLPVLFALGGLLLLSNASCVGGVLWQRRLRRLAEGISEKTEAGSEEDRVRNEYEESQWTGERDTQSSTVSTTEAEPYYRSLRDFSPQLPPTQEEVSYSRGFTGEDEDMAFPGHLYDEVERTYPPSGAWGPLYDEVQMGPWDLHWPEDTYQDPRGIYDQVAGDLDTLEPDSLPFELRGHLV

SEQ ID NO: 148412 - DNA, 3606 bp, Artificial Sequence
  derived and/or modified sequence
atggcactgggcacaaccctgcgcgcaagcctgttattactgggtttgttaacggagggcctcgcccagcttgctatccccgcctcggtgccacggggattctgggcactgccagagaacctgaccgtggtggaaggcgcgagcgttgagttgcggtgcggggtgtctacccccggatctgccgttcagtgggccaaggacggtctgctgctcggaccggatccgcgcataccaggattcccccgctaccggctcgaaggcgacccagctcgaggagagtttcatctccacatcgaagcatgtgatttgagcgatgacgctgaatatgagtgtcaggtggggcggagcgagatgggccccgagctggtcagtcctagggtcattctgtccattctggtaccacccaagctactgctgttgacgcccgaggcagggaccatggtgacctgggtggcagggcaggaatatgttgtgaattgcgtgtccggagatgctaagccagcccccgacatcacaattctgctgtccggtcaaaccatttcagacatctcagccaatgtgaatgaaggtagtcagcagaagctgttcactgtcgaagctaccgctcgagtgacccctcggagctcggataatagacagctgctggtttgcgaagcatcaagccctgccttggaggcacctatcaaagcttcgttcaccgttaatgtattgttcccaccggggcccccagtgattgagtggccagggctggatgagggacacgttcgcgccggccagtctctagaattgccttgtgtggcacggggcggcaatccacttgctacactccagtggttgaaaaacggacagccggtgtccaccgcgtggggcacagagcacacccaggccgtggctcgatcagtgctcgtgatgacggttagaccagaggatcatggggcccaactgtcttgtgaagcacacaactcagtgtctgccgggacccaggagcatggaattactttacaggtaacttttcctccctcggctatcattatcctgggctcggcgagccagacagagaacaagaacgtaacactgagctgcgtgtcaaagtccagtagaccaagggtgctgctgaggtggtggctgggttggcgccagctgctgccaatggaggagactgtgatggatgggctccacggcggccatatttcgatgagtaatttaacattccttgcacgacgggaagataatggactgacactaacttgcgaagcgttctcggaggccttcacaaaagaaacatttaagaagagcctcatcctgaacgtgaaatacccggcacaaaaactctggatcgagggaccaccagaagggcaaaaactccgagctggaaccagagtcaggttagtttgtttggcaattgggggcaatcccgaaccctctctgatgtggtacaaagactcacggactgttaccgagtccagacttccgcaggaaagccgaagagttcacctgggtagtgtggagaagtctgggagcacctttagtcgagagctggtgctggttacagggcctagtgacaaccaagctaagtttacctgtaaagctggtcagctgtctgcgtcgacccagctcgccgtgcagttccccccaactaacgtcacaattttggcaaacgccagcgcattgaggccaggcgacgccctgaatctgacgtgtgttagcgtgtctagtaacccgcccgtgaacctctcctgggataaagagggcgagagactggagggggttgcagccccacccaggagggccccctttaagggtagcgctgccgcccggtctgtccttctgcaggtatcctcacgagatcatgggcagagagttacatgccgggcacattctgcagaattgagagagacagtcagctctttttatcgcctcaacgtgctgtaccggccggagtttctgggtgaacaggtcctggtggtgacagcagttgaacagggcgaggctcttctccccgttagtgtctccgccaaccctgcccccgaggcattcaactggacatttcgaggctacagactgagccccgctggcgggccacggcatcgtattctgtcgtcaggagcattgcatctatggaacgttacacgcgctgatgacggcctgtatcagttacattgtcagaactcagagggaacagctgaggcaaggctaagactcgacgtgcattatgcgccaacgattcgcgcacttcaggatcccactgaggtcaacgtaggcgggtctgtggatattgtatgtaccgtggacgcgaaccccattttacccggaatgtttaactgggagcgcctcggcgaggacgaagaggatcaatcattggacgatatggagaagatttcccgggggcccactgggaggttgcgaattcatcatgcgaaactcgcgcaggctggcgcttatcagtgcattgtggataatggtgttgcccctcctgctagacggctcttgcgccttgtggttcgctttgcaccccaggtcgaacatccaacccccctcactaaagtggccgcagcaggcgatagcacaagcagcgccactctccattgtcgcgcccgaggcgtgcctaatatcgtgttcacatggacaaagaatggcgtgcctctcgaccttcaggatccgcgctacactgagcatacttatcatcaaggaggggtgcactcctctttactgactattgcaaacgtctcagccgcccaggactacgccctttttacttgcactgcgacgaatgcactagggagtgatcaaacgaatattcaactggtttcaatctcaagaccggaccccccatctggacttaaggtggtatctcttacgccacactcggtgggactcgagtggaaacccggtttcgatggcggcctgcctcagaggttctgtatccgctacgaggcgctcggtactccagggttccattatgtcgacgtggtgcctcctcaggctacaacctttaccctgaccggcctgcagccaagcactaggtaccgcgtgtggctgctggcgtccaatgcactgggtgacagcggtcttgctgataagggcacacagttaccaattactacccccgggctccaccaaccctctggagaaccagaagaccagcttcctacagagcccccctcaggcattagtgagaaaaccgaggccggaagtgaggaggatcgcgttaggaacgaatacgaggagtcccaatggacaggggagagggacacccagagcagtaccgtctctacaacagaggccgagccttattacaggagtttgagagacttcagtccacagctcccgcccacgcaggaggaggtttcttattcccgagggttcacgggagaggacgaagacatggccttcccaggccatctatacgacgaggttgaacgcacgtaccctccttccggcgcctgggggcctttgtatgacgaagtccagatgggcccctgggacctgcattggccggaagatacttatcaggaccccagggggatttacgatcaagtcgcgggcgacttagatacactagaacctgacagcctgccttttgaattgcggggccatctggtgtag

SEQ ID NO: 148413 - DNA, 3726 bp, Artificial Sequence
  derived and/or modified sequence
atggcactcgggacgactttgagggccagtctgctgctcttgggactacttaccgagggactggcgcagctggcaatacctgcttccgtgcctcggggattctgggccctacccgaaaatctgactgtagtcgagggcgcctctgtggagcttcgttgtggggtgtctacaccaggatccgccgtccagtgggcgaaagatggcttattgctgggtcccgaccccagaatacccgggttcccaaggtatagactcgaaggggatcctgcacgcggtgagtttcaccttcacatagaggcctgtgatttatccgatgatgcagagtacgaatgtcaggtcggccggagtgaaatgggccctgaacttgttagcccaagggtgatcttatcgattctggttcctcccaaactgctgttacttactccggaggccgggacgatggtgacttgggtggctgggcaagagtatgtggtgaactgtgtgagcggagacgctaagcccgcacccgatattaccatcctcctcagcggccagaccatctcagacatcagcgccaatgtgaacgaaggaagccagcagaagttattcactgttgaggcgacagccagagtcacaccacgttccagtgacaataggcagctcctggtgtgcgaagcttctagtccggcccttgaggctcccattaaggccagttttaccgtcaatgtgctttttccgcctggaccgccagttatcgaatggccagggctggacgagggacacgtgagggccggccagtcgctggagctcccttgtgtagcacgtgggggaaatcccctggccacactccaatggcttaagaatggacagccagtgtccactgcgtggggcactgagcacacccaagccgtcgcgcgctccgtactcgtcatgacagtgagaccggaagatcatggggcacagctttcttgcgaagcccacaactccgtgagcgcagggacacaagagcacggcatcacccttcaggtcacttttccaccaagcgccataattatactcggcagcgcctctcagacggagaacaagaatgtaacactgagttgtgtttcaaaatcatctcggccacgggtgttgcttagatggtggctgggatggcggcaattgcttcccatggaggagactgtgatggatggactacacggagggcacataagcatgtcaaacttaacctttctggcccgtagagaggataacggccttacccttacatgtgaggccttctccgaggcgttcaccaaagagacctttaagaagtccctgatcctgaacgtgaaataccccgcgcaaaagctttggatcgaaggaccccctgaggggcagaaattaagagcaggaaccagagttcgtttggtgtgcttggcaattggcggcaacccagagccatcattaatgtggtataaggactctcgcaccgttactgagagcagacttccacaagagtcaagaagggttcatctcggatcagtggaaaagtccggtagtaccttttcacgtgagcttgtcctcgtcaccggccctagcgataatcaggccaaattcacctgtaaagctggtcagctgtccgctagcactcagctggctgtacagttcccccccacaaatgtgaccattcttgccaacgccagcgcgcttcggcctggagacgccctgaaccttacatgtgtgtcggtttcctctaatccccctgtgaacctttcctgggacaaggagggtgagcgcctcgaaggagtcgctgctcccccaaggagagctccatttaaagggtcagcagcagcacgaagcgtcctgttacaggtgtcgagtcgggatcacgggcagagggtgacatgtcgcgctcactctgccgaattgagagagaccgtgtcatcattttaccgactgaatgtcctttatcggcccgagttcttgggagagcaagtacttgtcgtgacggccgttgaacaaggggaggcactgctgccagtcagcgtgtcagcgaacccggccccagaagcttttaactggactttcagaggttatcgactgtcccccgctggagggcctaggcacaggattctgtcatcaggtgccctgcatctctggaacgtgacgagagctgatgacggcttgtaccagttacattgccagaacagtgagggcactgctgaagctaggttacgcctcgatgtgcattatgcccccaccatccgggcactccaagatcccaccgaagtaaatgtggggggctctgtggacatcgtttgcaccgtagacgctaaccccatactgcccgggatgttcaactgggagcgcctcggggaagatgaggaagaccagagtttagacgatatggaaaagatttctagagggcccacaggtaggttgaggattcaccacgcgaaactggctcaggccggcgcctaccagtgtatcgtggataacggtgtggcaccgcccgcacgcagactcctgcgcctggtggtaagattcgctcctcaagttgagcatcctactcccctcaccaaggtcgccgctgcaggggattccacgtcatctgcaactttgcattgtcgagctcgaggtgtccccaatatcgtattcacctggaccaagaatggcgtgccgctggacctgcaggacccacggtacacagagcatacgtatcatcagggcggggtgcactcgtctttacttactattgccaacgtaagtgcggcccaggattacgcgttattcacatgtaccgctaccaacgcgctcggctccgaccagaccaatattcagcttgtgtccatttcccgccccgatcctccatccgggctgaaggtggtgtctctcaccccccatagtgtgggcctggaatggaaacccggctttgacggggggctaccccagagattctgcatccgttacgaagcgctgggaactccagggtttcactatgtggatgtggtcccaccccaggccaccacttttaccctcaccggcctgcagccatctaccaggtatagggtgtggctcctggccagtaatgcgctcggcgactctggcctggcagacaagggtactcagctgccgatcactactcctggacttcaccaaccttctggagaaccagaagatcagcttccgaccgaacctccaagcgggccctccggcctgccactccttcccgttctcttcgcgttaggcggactgctgctcttatctaatgcatcctgtgtggggggtgtgctctggcagagaaggctaagaaggcttgctgaagggatttctgagaaaacggaggcaggaagcgaggaggatagagtgcgaaatgaatacgaagagtcccagtggacaggcgaaagagatactcaatctagtaccgtgtctaccactgaagcagagccttactatagatcccttcgcgatttctcaccacagttacctccaacgcaggaggaggttagctactctcgcggctttacgggtgaggatgaggatatggctttccccgggcatctttacgacgaggtggagagaacttatccgcctagcggcgcttggggaccgttgtacgatgaggtccagatgggtccttgggatctccactggccagaagatacatatcaggatcccagaggaatttatgaccaggtggctggagatctggacactttggaacctgattcgctgcccttcgagctgaggggtcaccttgtctag

SEQ ID NO: 148414 - DNA, 3606 bp, Artificial Sequence
  derived and/or modified sequence
atggccctgggcaccaccctgcgggccagcctgctgctgctgggcctgctgacagagggcctggcccagctggccatcccagcctctgtgccccggggcttctgggccctgcctgagaacctgactgtggtggagggcgcctctgtggagctgcgctgtggggtgtccaccccaggcagcgctgtgcagtgggccaaggatggcctgctgctgggccctgacccccgcatccctggcttcccccgctaccgcctggagggggaccctgcccggggggagttccacctgcacatcgaggcctgtgacctgagtgatgatgctgaatatgagtgccaggtgggccgctctgagatgggccctgagctggtgagccccagggtcatcctgagcatcctggtgccccccaagctgctgctgctgaccccagaggccggcaccatggtgacctgggtggccggccaggagtatgtggtgaactgtgtgtctggagatgccaagccagccccagacatcaccatcctgctgagcggccagaccatcagtgacatcagcgccaacgtgaatgaaggcagccagcagaagctgttcaccgtggaggccacagcccgggtgacccccaggagcagtgacaaccggcagctgctggtgtgtgaggccagcagccctgccctggaggcccccatcaaggccagcttcaccgtgaatgtgctcttccccccaggcccccctgtgattgagtggccaggcctggatgagggccacgtgcgggccggccagagcctggagctgccctgtgtggcccggggcggcaaccccctggccaccctgcagtggctgaagaatggccagcctgtgtccacagcctggggcacagagcacacccaggccgtggcccggtctgtgctggtgatgacagtgcggccagaagatcatggagcccagctgagctgtgaggcccacaacagcgtgtctgctggcacccaggagcacggcatcaccctgcaggtgaccttccccccatctgccatcatcatcctgggcagcgccagccagacagagaacaagaatgtgaccctgagctgtgtgtccaagagcagccggccccgggtgctgctgcgctggtggctgggctggaggcagctgctgcccatggaggagaccgtgatggatggcctgcatggaggccacatctccatgagcaacctgaccttcctggccaggagagaagataatggcctgaccctgacctgtgaggccttcagcgaggccttcaccaaggagaccttcaagaagagcctcatcctgaatgtgaagtacccagcccagaagctgtggattgagggccccccagagggccagaagctgcgggccggcaccagggtgcggctggtgtgcctggccatcggcggcaaccctgagcccagcctgatgtggtacaaggacagcaggacagtgacagagagccggctgccccaggagagcagaagagtgcacctgggctctgtggagaagagcggcagcaccttcagccgggagctggtgctggtgacaggccccagcgacaaccaggccaagttcacctgcaaggccggccagctgagcgccagcacccagctggccgtgcagttcccccccaccaacgtgaccatcctggccaatgccagcgccctgcggcctggagatgccctgaacctgacctgtgtgtctgtgagcagcaacccccctgtgaacctgtcctgggacaaggagggggagcggctggagggcgtggccgcccccccaagaagagcccccttcaagggcagcgctgctgcccggtctgtgctgctgcaggtgagcagccgggaccacggccagagggtgacctgccgggcccacagcgctgagctgcgggagaccgtgagcagcttctaccgcctgaatgtgctgtacagacctgagttcctgggggagcaggtgctggtggtgacagctgtggagcagggcgaggccctgctgcctgtgtctgtgtctgccaacccagcccctgaggccttcaactggaccttccggggctaccgcctgagccctgctgggggccccaggcaccgcatcctgagcagcggggccctgcacctgtggaatgtgaccagggcagatgatggcctgtaccagctgcactgccagaacagcgagggcacagctgaggcccggctgcggctggatgtgcactacgcccccaccatccgggccctgcaggaccccacagaggtgaatgtgggcggctctgtggacatcgtgtgcaccgtggatgccaaccccatcctgcccggcatgttcaactgggagcggctgggggaggatgaggaggaccagagcctggatgacatggagaagatcagccggggccccaccggccgcctgcgcatccaccacgccaagctggcccaggccggggcctaccagtgcatcgtggacaacggggtggcccccccagcccggcggctgctgcggctggtggtgcgctttgccccccaggtggagcaccccacccccctgaccaaggtggccgccgccggggacagcaccagcagcgccaccctgcactgccgggcccggggcgtgcccaacatcgtgttcacctggaccaagaatggagtgcccctggacctgcaggacccccgctacacagagcacacctaccaccagggcggcgtgcacagcagcctgctgaccatcgccaacgtgtctgctgcccaggactatgccctcttcacctgcacagccaccaatgccctgggcagtgaccagaccaacatccagctggtgtccatcagcaggccagaccccccatctggcctgaaggtggtgtccctgaccccccacagcgtgggcctggagtggaagccaggctttgatggcggcctgccccagcgcttctgcatccgctatgaggccctgggcaccccaggcttccactacgtggatgtggtgcccccccaggccaccaccttcaccctgaccggcctgcagcccagcacccgctacagagtgtggctgctggccagcaatgccctgggggacagcggcctggccgacaagggcacccagctgcccatcaccaccccaggcctgcaccagcccagcggggagcctgaggaccagctgcccacagagcccccatctggcatcagcgagaagacagaagctggctctgaagaagatagagtgagaaatgaatatgaggagagccagtggacaggagagcgggacacccagagcagcacagtgtccaccacagaagctgagccctactaccgcagcctgcgggacttcagcccccagctgccccccacccaggaggaggtgtcctacagccggggcttcaccggagaagatgaggacatggccttccctggccacctgtatgatgaggtggagaggacctacccacccagcggggcctggggccccctgtatgatgaggtgcagatgggcccctgggacctgcactggccagaggacacctaccaggacccccggggcatctatgaccaggtggccggggacctggacaccctggagccagacagcctgccctttgagctgcggggccacctggtgtag

SEQ ID NO: 148415 - DNA, 3726 bp, Artificial Sequence
  derived and/or modified sequence
atggccctgggcaccaccctgcgggccagcctgctgctgctgggcctgctgacagagggcctggcccagctggccatcccagcctctgtgccccggggcttctgggccctgcctgagaacctgactgtggtggagggcgcctctgtggagctgcgctgtggggtgtccaccccaggcagcgctgtgcagtgggccaaggatggcctgctgctgggccctgacccccgcatccctggcttcccccgctaccgcctggagggggaccctgcccggggggagttccacctgcacatcgaggcctgtgacctgagtgatgatgctgaatatgagtgccaggtgggccgctctgagatgggccctgagctggtgagccccagggtcatcctgagcatcctggtgccccccaagctgctgctgctgaccccagaggccggcaccatggtgacctgggtggccggccaggagtatgtggtgaactgtgtgtctggagatgccaagccagccccagacatcaccatcctgctgagcggccagaccatcagtgacatcagcgccaacgtgaatgaaggcagccagcagaagctgttcaccgtggaggccacagcccgggtgacccccaggagcagtgacaaccggcagctgctggtgtgtgaggccagcagccctgccctggaggcccccatcaaggccagcttcaccgtgaatgtgctcttccccccaggcccccctgtgattgagtggccaggcctggatgagggccacgtgcgggccggccagagcctggagctgccctgtgtggcccggggcggcaaccccctggccaccctgcagtggctgaagaatggccagcctgtgtccacagcctggggcacagagcacacccaggccgtggcccggtctgtgctggtgatgacagtgcggccagaagatcatggagcccagctgagctgtgaggcccacaacagcgtgtctgctggcacccaggagcacggcatcaccctgcaggtgaccttccccccatctgccatcatcatcctgggcagcgccagccagacagagaacaagaatgtgaccctgagctgtgtgtccaagagcagccggccccgggtgctgctgcgctggtggctgggctggaggcagctgctgcccatggaggagaccgtgatggatggcctgcatggaggccacatctccatgagcaacctgaccttcctggccaggagagaagataatggcctgaccctgacctgtgaggccttcagcgaggccttcaccaaggagaccttcaagaagagcctcatcctgaatgtgaagtacccagcccagaagctgtggattgagggccccccagagggccagaagctgcgggccggcaccagggtgcggctggtgtgcctggccatcggcggcaaccctgagcccagcctgatgtggtacaaggacagcaggacagtgacagagagccggctgccccaggagagcagaagagtgcacctgggctctgtggagaagagcggcagcaccttcagccgggagctggtgctggtgacaggccccagcgacaaccaggccaagttcacctgcaaggccggccagctgagcgccagcacccagctggccgtgcagttcccccccaccaacgtgaccatcctggccaatgccagcgccctgcggcctggagatgccctgaacctgacctgtgtgtctgtgagcagcaacccccctgtgaacctgtcctgggacaaggagggggagcggctggagggcgtggccgcccccccaagaagagcccccttcaagggcagcgctgctgcccggtctgtgctgctgcaggtgagcagccgggaccacggccagagggtgacctgccgggcccacagcgctgagctgcgggagaccgtgagcagcttctaccgcctgaatgtgctgtacagacctgagttcctgggggagcaggtgctggtggtgacagctgtggagcagggcgaggccctgctgcctgtgtctgtgtctgccaacccagcccctgaggccttcaactggaccttccggggctaccgcctgagccctgctgggggccccaggcaccgcatcctgagcagcggggccctgcacctgtggaatgtgaccagggcagatgatggcctgtaccagctgcactgccagaacagcgagggcacagctgaggcccggctgcggctggatgtgcactacgcccccaccatccgggccctgcaggaccccacagaggtgaatgtgggcggctctgtggacatcgtgtgcaccgtggatgccaaccccatcctgcccggcatgttcaactgggagcggctgggggaggatgaggaggaccagagcctggatgacatggagaagatcagccggggccccaccggccgcctgcgcatccaccacgccaagctggcccaggccggggcctaccagtgcatcgtggacaacggggtggcccccccagcccggcggctgctgcggctggtggtgcgctttgccccccaggtggagcaccccacccccctgaccaaggtggccgccgccggggacagcaccagcagcgccaccctgcactgccgggcccggggcgtgcccaacatcgtgttcacctggaccaagaatggagtgcccctggacctgcaggacccccgctacacagagcacacctaccaccagggcggcgtgcacagcagcctgctgaccatcgccaacgtgtctgctgcccaggactatgccctcttcacctgcacagccaccaatgccctgggcagtgaccagaccaacatccagctggtgtccatcagcaggccagaccccccatctggcctgaaggtggtgtccctgaccccccacagcgtgggcctggagtggaagccaggctttgatggcggcctgccccagcgcttctgcatccgctatgaggccctgggcaccccaggcttccactacgtggatgtggtgcccccccaggccaccaccttcaccctgaccggcctgcagcccagcacccgctacagagtgtggctgctggccagcaatgccctgggggacagcggcctggccgacaagggcacccagctgcccatcaccaccccaggcctgcaccagcccagcggggagcctgaggaccagctgcccacagagcccccatctggccccagcggcctgcccctgctgcctgtgctgtttgccctgggcggcctgctgctgctgagcaatgccagctgtgtgggcggcgtgctgtggcagaggcggctgcggcggctggccgagggcatcagcgagaagacagaagctggctctgaagaagatagagtgagaaatgaatatgaggagagccagtggacaggagagcgggacacccagagcagcacagtgtccaccacagaagctgagccctactaccgcagcctgcgggacttcagcccccagctgccccccacccaggaggaggtgtcctacagccggggcttcaccggagaagatgaggacatggccttccctggccacctgtatgatgaggtggagaggacctacccacccagcggggcctggggccccctgtatgatgaggtgcagatgggcccctgggacctgcactggccagaggacacctaccaggacccccggggcatctatgaccaggtggccggggacctggacaccctggagccagacagcctgccctttgagctgcggggccacctggtgtag

SEQ ID NO: 148416 - DNA, 3606 bp, Artificial Sequence
  derived and/or modified sequence
atggccctgggcaccaccctgcgggccagcctgctgctgctgggccttctgacggaaggtcttgctcaattagccattcctgccagtgtcccaagaggcttctgggctctgccggagaacctgactgtcgttgaaggcgcttcagtggaacttcggtgtggcgtttcgacacctggatctgccgtgcaatgggctaaagacgggctgctgctgggcccagaccccaggatcccaggctttccgcggtacagattggagggggatcctgcacggggcgagtttcatttgcacatagaagcctgtgacttgagcgatgatgctgagtacgagtgtcaagttggacgtagcgagatgggacccgagctggtatccccaagggtgatcctcagtattcttgttcccccgaaactgctgctgctgacacctgaggctggcaccatggtaacatgggtggctggacaggagtatgtggtgaactgtgtttcgggcgatgcaaaacccgcccctgacattactattcttctctcaggtcagacaatcagtgatatcagcgccaatgtcaacgaaggtagccagcaaaagttgttcacagtggaggcaacggctagagtgactcccaggtcaagcgacaaccggcagctgttggtatgcgaagccagcagccccgcgctcgaagctcctattaaagcatcctttacagtgaacgtgctgtttcctccagggcctcccgtaatcgagtggcctggactcgacgaggggcacgtaagggcaggccagtctctggaactcccgtgtgttgcacgaggtggaaaccctctcgccacactccagtggttgaagaacggacagcccgtgagcaccgcctgggggacagagcatacccaagcagtggcaagaagcgtcctggtgatgaccgtccgtcccgaggatcacggagcacagctctcctgcgaggctcacaatagcgttagtgcgggaacgcaggaacatggaatcacactgcaggtcaccttccccccatctgctattatcatactgggcagtgccagtcaaacggagaacaagaatgtgactttgtcatgcgtctcgaagtcttctcgcccacgcgtgcttctccgatggtggttgggatggagacagctgctgcctatggaggagaccgtaatggatgggttacacggtggccatatctccatgagcaatctcacctttctagcccggagagaggacaacgggctgaccctgacgtgtgaagcgttttccgaagctttcaccaaggagacctttaagaagagccttattctcaatgtcaaatacccagcccagaagctgtggatcgagggtccaccagaagggcagaaattgagagccggcaccagagtacgacttgtatgcctggccatcggtggcaatccggaaccgagcttgatgtggtacaaagattccaggactgtcactgaatcacgactgcctcaagaaagtcggagggtacacctgggctctgttgaaaagagtggaagtacattcagccgggagctcgttttggtcacaggcccttcagacaaccaggctaagttcacctgtaaggccgggcaactgagtgcaagcactcagctggccgttcagttcccccctacaaacgtcaccatcctcgctaacgcctctgccttgcgacctggagacgccctgaacttgacctgtgtgagtgtttcatccaacccccccgtgaacctgagttgggacaaggagggagagcggctggagggggtggccgcacctccccggcgcgctccttttaaaggctctgcagcagcgagatccgtactgctccaggtgtcctccagagatcatgggcagcgagtcacttgccgggcacacagtgccgaactccgggagaccgtctcttcattttaccgcctgaacgtgctgtaccgaccggagttcctcggggagcaagtccttgtggtgaccgcagtcgaacagggtgaagccctactgcctgtttctgtgtctgctaaccccgcccctgaagcttttaactggacttttcggggatatcgcctgagccctgccgggggcccaaggcatcggatcttgtccagcggagctcttcacctttggaacgttacacgcgccgatgatgggttgtaccagctccactgtcaaaatagtgagggcaccgcggaagcacgcttgcgcctggacgttcattatgcccccaccattcgtgctcttcaggatccaacagaggtcaatgtggggggcagcgtcgatatcgtgtgcacggtggatgctaatccaattttaccaggcatgtttaactgggagcggttaggtgaggatgaggaggaccagtctttagatgacatggagaagatctccagaggtccaacaggacgactccgtattcaccatgcaaaactggctcaggcaggggcgtaccaatgtatagtcgacaacggggtcgccccccctgcccgcagactgctgcgactggttgtacggtttgctccccaggttgaacacccaactccactgactaaggtggctgcagccggcgactctacctcaagcgcgactctgcattgtcgggctaggggcgttccaaatatcgttttcacctggactaaaaacggggtacccctggatttgcaggacccaaggtacacagaacacacctatcaccaaggtggcgtgcactcctctctacttacaatagctaatgtatccgctgcccaggattatgcgttgttcacctgtactgccactaatgctctgggctctgatcagacaaacatccaactagtctccatctcccgccccgacccaccttcagggctgaaagtggtgtcactgacgccacacagtgtgggactagagtggaagcccggctttgatgggggactgcctcagaggttctgtataagatatgaggctctggggacccccggcttccactacgtggacgtcgtccctccccaggccacaacctttaccttgacgggcttacaacctagcacacggtaccgggtatggctactggcctctaacgccttgggtgatagcggcttggctgacaagggcacccagttgcccataacgacccctggcctgcatcagccttcaggagagccagaagatcaacttcctaccgagccaccatcaggtatatcggaaaaaactgaggctgggtccgaagaggatagagttagaaacgagtatgaagaatcgcagtggactggggaacgcgacacccaaagcagcacagtctcaacaaccgaggcggagccttattaccgcagtctgagagatttttctcctcaactccctcccacacaggaggaagtcagttactcaaggggctttacgggcgaggatgaggatatggcctttcccggccacctttacgacgaggttgaacgcacatatccaccgtcgggggcctggggtcccctctatgatgaggtgcagatggggccctgggatctgcattggcctgaagatacctatcaggatccacgagggatttacgatcaagtcgctggggacttagacacacttgagccagattctctgcccttcgagctgagggggcacctggtgtag

SEQ ID NO: 148417 - DNA, 3726 bp, Artificial Sequence
  derived and/or modified sequence
atggccctgggcaccaccctgcgggccagcctgctgctgctgggcctcttgaccgaggggttagcccaacttgcgatccccgcatcggttccaagaggtttttgggctttgccggagaacctgaccgtggttgaaggtgcctccgttgaacttcgctgcggtgtatctacgccaggaagcgccgtgcaatgggccaaggacggacttctccttggccccgaccctagaatccccgggttcccccgctaccggctggaaggagatcctgcccgcggagaatttcacttgcatatcgaggcttgcgacctttctgatgacgccgagtacgagtgccaggtcggccgcagcgagatgggcccagagctggtgagcccccgcgtcatactgagcattcttgtacctcctaagctcttactgttaactccagaagccgggaccatggtaacatgggtagccggccaagagtacgtggttaattgtgtgtcgggcgatgcaaagccagcgcccgacattacaattctgctctcaggtcagaccatttccgatataagcgctaacgtgaacgagggatcacaacaaaaactgttcacggtagaagctaccgctcgggtgacaccgcgctcttctgacaacaggcagcttctcgtgtgtgaggcctcctctcccgctctcgaagctccaatcaaagcctctttcacggttaacgtactgttccccccgggccccccggttattgagtggcccggactggatgagggacatgtgagggccggacaatctctggagctgccctgtgtggcccgaggaggcaatccccttgctaccctccagtggctgaagaacggacaacctgtttctactgcctggggcaccgagcacactcaggccgtggctagaagtgtgctggttatgactgtgagacccgaggaccatggagcccagctgtcctgtgaagcacacaattcagttagcgccggcacacaggaacatggaatcacactccaggtcactttcccaccttccgctatcatcattctggggagcgctagccagactgagaataagaacgtcactctctcttgcgttagcaaatcttctagacctcgcgtccttctccggtggtggttgggctggcgccagttactccccatggaagaaaccgtgatggacgggcttcacggaggacacattagcatgagcaacctcacttttctggcccggcgggaggacaatggcctgactttaacctgcgaagctttttccgaagcgtttacaaaggaaaccttcaagaaaagcctgatactgaatgttaagtatcccgcccagaagctgtggattgaggggccaccagaaggccaaaagctgagggcaggaacaagagtgcgcctggtatgtcttgccatcggaggaaaccccgagccaagcttaatgtggtataaggattcacgaaccgttacagagagcagactgccgcaggagagccggagagtgcaccttgggagcgtggaaaagtctgggtcaacctttagccgcgagctcgtcctggtgactggccctagcgacaatcaggctaaattcacttgcaaagcaggccaactttcagcatcaacgcagctcgctgtgcagttcccccccactaatgtaactatccttgccaacgcatcagcattgagacccggcgacgcattgaatctgacctgcgtgtcagtgagctctaatcctcccgtgaacctcagttgggacaaggagggagaaagactggaaggggtggctgctccacctcggcgcgcgcctttcaaaggctctgcagcagcacggagcgtgttgcttcaggtttcctcccgcgaccacggacagcgagtcacttgcagagctcactcggctgagctgcgagagaccgtctcttctttctaccgcctgaatgtgctgtacagacctgaattccttggggaacaagtcctggtggtgaccgccgttgagcaaggcgaggccctcttaccagtgtcagtgtcagctaaccctgcacctgaagcttttaactggaccttcaggggctaccggttatcaccagccggaggcccgcggcataggattttgtcctccggcgctttacacctctggaatgtgactagggctgatgatggtctgtatcaactgcactgtcagaacagcgaaggcactgccgaggccagactgcgcctggacgtgcactacgcgccaactatccgggccctgcaggatccaactgaggtgaatgtcggcggcagcgtagacatagtgtgcactgtagatgctaaccccattttaccgggcatgttcaactgggagcgtctcggcgaggatgaagaggaccagtctctggacgatatggagaagatttcacggggccccacaggcagactgcgcattcatcacgccaagctggctcaggctggggcataccagtgcattgttgacaatggggttgcgccaccagctcgcagactcctgcgactggtcgtcagattcgccccccaagtggagcaccccacccccctgactaaggtagcagccgcaggagacagcacttcctctgccaccctccactgtagggcccgcggcgtgcctaacatcgtgttcacctggacaaagaatggcgtccccttggaccttcaggaccctaggtatactgagcacacatatcatcagggtggggtgcactccagcctactgaccatagcaaatgtaagtgcagctcaggattatgccctattcacctgcaccgccacgaatgctttgggctcagatcagacaaatattcagctggtgtcgattagcagacccgaccccccttccggcttgaaggtcgtgtcattaactcctcacagcgtcggtctcgagtggaaacctggcttcgatggaggcctgccacagcgcttttgcataaggtacgaagctcttggaacaccaggtttccattatgttgatgttgtccctccacaggcgacaacttttaccctcaccggcctgcagccttcaacccggtacagagtgtggcttttggccagcaacgcattaggtgatagtgggcttgcagataagggcacccagctgcctattacaaccccagggctgcatcagcctagcggagagcccgaggatcaactgccaacagagccaccttccgggccttccgggctcccactgctgcctgttctgtttgccctgggtgggttgctactcttgtcaaacgcctcttgcgtgggcggggtcctatggcagcgacgcctgagacgcctggctgaagggatctcagagaagacggaggctggctccgaggaagatagagtgcgcaacgaatacgaggagagccagtggacaggggaacgcgatacgcaaagtagtaccgtcagcactaccgaggccgaaccttattatcgctcactgagagacttctccccccaattgccccccacgcaggaagaggtcagttattcccggggatttacaggggaggatgaagatatggccttccccggccatttgtacgacgaagtggagcggacctaccccccatcaggtgcttggggcccgctttacgacgaggtccaaatgggaccctgggatctgcattggcctgaagatacttaccaggacccccggggaatctatgaccaagttgctggggaccttgacaccctcgagccagactcactgcctttcgagttgcgggggcacctggtatag

SEQ ID NO: 148418 - DNA, 4895 bp, Artificial Sequence
  derived and/or modified sequence
aggggaagaggaaaacgagaaagggaggagagtaacggaaagagataaaaaagaaaagcaggtggcagagacacacagagagggacccagagaaagccagacagacgcaggtggctggcagcgggcgctgtgggggtcacagtagggggacctgtgatggccctggggacgacgctcagggcttctctcctgctcctggggctgctgactgaaggcctggcgcagttggcgattcctgcctccgttccccggggcttctgggccctgcctgaaaacctgacggtggtggagggggcctcagtggagctgcgttgtggggtcagcacccctggcagtgcggtgcaatgggccaaagatgggctgctcctgggccccgaccccaggatcccaggcttcccgaggtaccgcctggaaggggaccctgctagaggtgaattccacctgcacatcgaggcctgtgacctcagcgatgacgcggagtatgagtgccaggtcggccgctctgagatggggcccgagctcgtgtctcccagagtgatcctctccatcctggttcctcccaagctgctcctgctgaccccagaggcaggcaccatggtcacctgggtagctgggcaggagtacgtggtcaactgtgtgtctggggacgcgaagccagcacctgacatcaccattctcctgagtggacagacaatatctgacatctctgcaaacgtgaacgagggctcccagcagaaactcttcactgtggaggccacagccagggtgacaccccggagctcagataataggcagttgctggtctgtgaggcgtctagcccagcactggaggcccccatcaaggcctcattcaccgtgaatgttctgttccctccaggaccccctgtcatcgagtggccaggcctggatgaggggcacgtgcgggcaggacagagcttggagctgccgtgcgtggcccgagggggtaatcccttagccacactgcagtggctgaagaatggccagccggtgtccacagcgtggggcacagagcacacccaggcggtggcccgcagtgtgctggtgatgaccgtgaggccagaagaccatggagcgcagctcagctgcgaggcccacaacagcgtgtctgcagggacccaggagcacggcatcacactgcaggtcacctttccccctagtgccattattatcttgggatctgcatcccagactgagaacaagaacgtgacactctcctgtgtcagcaagtccagtcgcccgcgggttctgctacgatggtggctgggctggcggcagctgctgcccatggaggagacagtcatggatggactgcatggcggtcacatctccatgtccaacctgacattcctggcgcggcgggaggacaacggtctgaccctcacatgtgaggccttcagtgaagccttcaccaaggagaccttcaagaagtcgctcatcctgaacgtaaaatatcccgcccagaaactgtggattgagggtcccccagagggccagaagctccgggctgggacccgggtgaggctggtgtgtttggctatcgggggcaacccagagccctccctcatgtggtacaaggactcgcgcaccgtgaccgagtcgcggctgccgcaggagtcgcggcgcgtgcatctcggcagcgtggagaaatctgggagcaccttctcccgagagctggtgctggtcacagggccgtcggacaaccaggccaagttcacgtgcaaggctggacagctcagcgcgtccacgcagctggcggtgcagtttcccccaactaacgtgacgatcctggccaacgcatccgcactgcgcccgggagacgccttaaacttgacatgcgtcagcgtcagcagcaatccgccggtcaacttgtcctgggacaaggaaggggagaggctggagggcgtggccgccccaccccggagagccccattcaaaggctccgccgccgccaggagcgtccttctgcaagtgtcatcccgcgatcatggccagcgcgtgacctgccgcgcccacagcgccgagctccgcgaaaccgtgagctccttctatcgcctcaacgtactgtaccgtccagagttcctgggggagcaggtgctggtggtgaccgcggtggagcagggcgaggcgttgctgcccgtgtccgtgtccgctaaccccgcccccgaggccttcaactggaccttccgcggctatcgcctcagtccagcgggcggcccccggcatcgcatcctgtccagcggggctctgcatctgtggaatgtgacccgcgcggacgacggcctctatcagctgcactgccagaactctgagggcaccgcggaagcgcggctgcggctggacgtgcactatgctcccaccatccgtgccctccaggaccccactgaggtgaacgtcgggggttctgtggacatagtctgcactgtcgatgccaatcccatcctcccgggcatgttcaactgggagagactgggagaagatgaggaggaccagagcctggatgacatggagaagatatccaggggaccaacggggcgcctgcggattcaccatgccaaactggcccaggctggcgcttaccagtgcattgtggacaatggggtggcgcctccagcacgacggctgctccgtcttgttgtcagatttgccccccaggtggagcaccccactcccctaactaaggtggctgcagctggagacagcaccagttctgccaccctccactgccgtgcccgaggtgtccccaacatcgttttcacttggacaaaaaacggggtccctctggatctccaagatcccaggtacacggagcacacataccaccagggtggtgtccacagcagcctcctgaccattgccaacgtgtctgccgcccaggattacgccctcttcacatgtacagccaccaacgcccttggctcggaccaaaccaacattcaacttgtcagcatcagccgccctgaccctccatcaggattaaaggttgtgagtctgaccccacactccgtggggctggagtggaagcctggctttgatgggggcctgccacagaggttctgcatcaggtatgaggccctggggactccagggttccactatgtggatgtcgtaccaccccaggccaccaccttcacgctgactggtctacagccttctacaagatacagggtctggctgctggccagtaatgccttgggggacagtggactggctgacaaagggacccagcttcccatcactaccccaggtctccaccagccttctggagaacctgaagaccagctgcccacagagccaccttcaggcatctcagagaagacagaggcagggtcggaagaggaccgagtcaggaacgaatatgaggagagccagtggacaggagagcgggacactcagagctccacggtcagcacaacagaggcagagccgtattaccgctccctgagggacttcagcccccagctgcccccgacgcaggaggaggtgtcttattcccgaggtttcacaggtgaagatgaggatatggccttccctgggcacttgtatgatgaggtagaaagaacgtaccccccgtctggagcctggggacccctctacgatgaagtgcagatgggaccctgggacctccactggcctgaagacacatatcaggatccaagaggaatctatgaccaggtggccggagacttggacactctggaacccgattctctgcccttcgagctgaggggacatctggtgtaagagccctctcaaccccattgtcctgcacctgcaggaatttacactccactggtctctctcattacagcctgggccgagctggttaggtgagctccataaaacccaaagggacttggtgtcaggagaggacatggagggggctgagtgacagagatggttcagctggtaccagagtagaaacaaggtgcatcctggggttggctttagaaactaaacttctccaaaaggacagggcagattgtaaacgtcgtctcaaaaatgaaatgctgccgggtgcggtgactcacgcctataatcccagcactttgggaggctgaggcgggtggatcacctgaggtcaggagttcgagaccagcctggccaacatggtaaaactccatttctactaaaaatataaaaaattagccaggagtagtggcgcatgcctgtagtcccagctacttgggaggctgatgcatgagaattgcttgaacccaggaggcggaggttgcagtgagctgagatcacgccactgcactccagcctgggcgacagagcgagattctgtctcaaaaaataaaaataaaataaaaataaaaaataaaatgctattctgagggtccctaagtgcttcatgaagtaaagttttcagaagtggggaaagacatatgaaaaactctgttcattttgcattccatgacgtctgaaatagctaataataagtggaatttatgaatccatgttgcatcctacctattattttattatttccgacagttatctaacacaggaggcataaactatgacacatgtaaacataagtatgctccataagcattaaaataaacagacaatcaaaagaagctagaggaaaagaatatgtactgtgtgtgtgctttcgtttatagaaattctaaaataggcaaaactaatctacggtggcagagagcacagcagaggtttcctggggccatgagaggagggttgactgcaaaaaggcatgggagaactttctgaggtgttggaaatattctatataacgattgtggtggtggttgcacgggtgcacagatttgtcaaaactcattgaactttacacttaagatgggtgcatttttattgtacataaatgatatctcaataaaagtgatttt

SEQ ID NO: 148419 - DNA, 5015 bp, Artificial Sequence
  derived and/or modified sequence
aggggaagaggaaaacgagaaagggaggagagtaacggaaagagataaaaaagaaaagcaggtggcagagacacacagagagggacccagagaaagccagacagacgcaggtggctggcagcgggcgctgtgggggtcacagtagggggacctgtgatggccctggggacgacgctcagggcttctctcctgctcctggggctgctgactgaaggcctggcgcagttggcgattcctgcctccgttccccggggcttctgggccctgcctgaaaacctgacggtggtggagggggcctcagtggagctgcgttgtggggtcagcacccctggcagtgcggtgcaatgggccaaagatgggctgctcctgggccccgaccccaggatcccaggcttcccgaggtaccgcctggaaggggaccctgctagaggtgaattccacctgcacatcgaggcctgtgacctcagcgatgacgcggagtatgagtgccaggtcggccgctctgagatggggcccgagctcgtgtctcccagagtgatcctctccatcctggttcctcccaagctgctcctgctgaccccagaggcaggcaccatggtcacctgggtagctgggcaggagtacgtggtcaactgtgtgtctggggacgcgaagccagcacctgacatcaccattctcctgagtggacagacaatatctgacatctctgcaaacgtgaacgagggctcccagcagaaactcttcactgtggaggccacagccagggtgacaccccggagctcagataataggcagttgctggtctgtgaggcgtctagcccagcactggaggcccccatcaaggcctcattcaccgtgaatgttctgttccctccaggaccccctgtcatcgagtggccaggcctggatgaggggcacgtgcgggcaggacagagcttggagctgccgtgcgtggcccgagggggtaatcccttagccacactgcagtggctgaagaatggccagccggtgtccacagcgtggggcacagagcacacccaggcggtggcccgcagtgtgctggtgatgaccgtgaggccagaagaccatggagcgcagctcagctgcgaggcccacaacagcgtgtctgcagggacccaggagcacggcatcacactgcaggtcacctttccccctagtgccattattatcttgggatctgcatcccagactgagaacaagaacgtgacactctcctgtgtcagcaagtccagtcgcccgcgggttctgctacgatggtggctgggctggcggcagctgctgcccatggaggagacagtcatggatggactgcatggcggtcacatctccatgtccaacctgacattcctggcgcggcgggaggacaacggtctgaccctcacatgtgaggccttcagtgaagccttcaccaaggagaccttcaagaagtcgctcatcctgaacgtaaaatatcccgcccagaaactgtggattgagggtcccccagagggccagaagctccgggctgggacccgggtgaggctggtgtgtttggctatcgggggcaacccagagccctccctcatgtggtacaaggactcgcgcaccgtgaccgagtcgcggctgccgcaggagtcgcggcgcgtgcatctcggcagcgtggagaaatctgggagcaccttctcccgagagctggtgctggtcacagggccgtcggacaaccaggccaagttcacgtgcaaggctggacagctcagcgcgtccacgcagctggcggtgcagtttcccccaactaacgtgacgatcctggccaacgcatccgcactgcgcccgggagacgccttaaacttgacatgcgtcagcgtcagcagcaatccgccggtcaacttgtcctgggacaaggaaggggagaggctggagggcgtggccgccccaccccggagagccccattcaaaggctccgccgccgccaggagcgtccttctgcaagtgtcatcccgcgatcatggccagcgcgtgacctgccgcgcccacagcgccgagctccgcgaaaccgtgagctccttctatcgcctcaacgtactgtaccgtccagagttcctgggggagcaggtgctggtggtgaccgcggtggagcagggcgaggcgttgctgcccgtgtccgtgtccgctaaccccgcccccgaggccttcaactggaccttccgcggctatcgcctcagtccagcgggcggcccccggcatcgcatcctgtccagcggggctctgcatctgtggaatgtgacccgcgcggacgacggcctctatcagctgcactgccagaactctgagggcaccgcggaagcgcggctgcggctggacgtgcactatgctcccaccatccgtgccctccaggaccccactgaggtgaacgtcgggggttctgtggacatagtctgcactgtcgatgccaatcccatcctcccgggcatgttcaactgggagagactgggagaagatgaggaggaccagagcctggatgacatggagaagatatccaggggaccaacggggcgcctgcggattcaccatgccaaactggcccaggctggcgcttaccagtgcattgtggacaatggggtggcgcctccagcacgacggctgctccgtcttgttgtcagatttgccccccaggtggagcaccccactcccctaactaaggtggctgcagctggagacagcaccagttctgccaccctccactgccgtgcccgaggtgtccccaacatcgttttcacttggacaaaaaacggggtccctctggatctccaagatcccaggtacacggagcacacataccaccagggtggtgtccacagcagcctcctgaccattgccaacgtgtctgccgcccaggattacgccctcttcacatgtacagccaccaacgcccttggctcggaccaaaccaacattcaacttgtcagcatcagccgccctgaccctccatcaggattaaaggttgtgagtctgaccccacactccgtggggctggagtggaagcctggctttgatgggggcctgccacagaggttctgcatcaggtatgaggccctggggactccagggttccactatgtggatgtcgtaccaccccaggccaccaccttcacgctgactggtctacagccttctacaagatacagggtctggctgctggccagtaatgccttgggggacagtggactggctgacaaagggacccagcttcccatcactaccccaggtctccaccagccttctggagaacctgaagaccagctgcccacagagccaccttcaggaccctcggggctgcccctgctgcctgtgctgttcgctcttggggggcttctgctcctctccaatgcctcctgtgtcgggggggtcctctggcagcggagactcaggcgtcttgctgagggcatctcagagaagacagaggcagggtcggaagaggaccgagtcaggaacgaatatgaggagagccagtggacaggagagcgggacactcagagctccacggtcagcacaacagaggcagagccgtattaccgctccctgagggacttcagcccccagctgcccccgacgcaggaggaggtgtcttattcccgaggtttcacaggtgaagatgaggatatggccttccctgggcacttgtatgatgaggtagaaagaacgtaccccccgtctggagcctggggacccctctacgatgaagtgcagatgggaccctgggacctccactggcctgaagacacatatcaggatccaagaggaatctatgaccaggtggccggagacttggacactctggaacccgattctctgcccttcgagctgaggggacatctggtgtaagagccctctcaaccccattgtcctgcacctgcaggaatttacactccactggtctctctcattacagcctgggccgagctggttaggtgagctccataaaacccaaagggacttggtgtcaggagaggacatggagggggctgagtgacagagatggttcagctggtaccagagtagaaacaaggtgcatcctggggttggctttagaaactaaacttctccaaaaggacagggcagattgtaaacgtcgtctcaaaaatgaaatgctgccgggtgcggtgactcacgcctataatcccagcactttgggaggctgaggcgggtggatcacctgaggtcaggagttcgagaccagcctggccaacatggtaaaactccatttctactaaaaatataaaaaattagccaggagtagtggcgcatgcctgtagtcccagctacttgggaggctgatgcatgagaattgcttgaacccaggaggcggaggttgcagtgagctgagatcacgccactgcactccagcctgggcgacagagcgagattctgtctcaaaaaataaaaataaaataaaaataaaaaataaaatgctattctgagggtccctaagtgcttcatgaagtaaagttttcagaagtggggaaagacatatgaaaaactctgttcattttgcattccatgacgtctgaaatagctaataataagtggaatttatgaatccatgttgcatcctacctattattttattatttccgacagttatctaacacaggaggcataaactatgacacatgtaaacataagtatgctccataagcattaaaataaacagacaatcaaaagaagctagaggaaaagaatatgtactgtgtgtgtgctttcgtttatagaaattctaaaataggcaaaactaatctacggtggcagagagcacagcagaggtttcctggggccatgagaggagggttgactgcaaaaaggcatgggagaactttctgaggtgttggaaatattctatataacgattgtggtggtggttgcacgggtgcacagatttgtcaaaactcattgaactttacacttaagatgggtgcatttttattgtacataaatgatatctcaataaaagtgatttt

SEQ ID NO: 148420 - DNA, 3606 bp, Artificial Sequence
  derived and/or modified sequence
atggccctggggacaactctgagggcgtcccttctgttgcttggcctattgactgaggggctcgcccagttagctatccccgcttcagtcccgcgtggcttttgggcgctgcctgaaaacttgacagtcgtggagggtgcttcggtggaactcaggtgcggggtgagtacacccggaagtgctgtgcagtgggctaaggatggcctgctgcttggccctgacccgcgaatacctggcttcccacgataccgactagagggcgacccggctcgaggggaattccatctccacatcgaagcgtgtgatctttccgatgacgcagaatatgagtgccaggtagggaggtccgagatgggaccagaactcgtctcgcctagagttattctgagtatattggtgccacccaagctgctcttgttgacacccgaggctggcaccatggtcacatgggtggcaggccaggagtatgtggttaactgcgtttcaggtgatgctaagccagcgccagatatcacaattctcctgagtggacagaccatcagcgacattagtgctaacgtgaatgaggggtctcagcagaaactgtttactgttgaagcaaccgcgagagtgacccccaggtcctcagataaccggcaactcttggtgtgtgaggcctcctctccagcattggaggcccctattaaagcatcattcacggtcaacgtgctatttccccctgggccacctgtcatagagtggccgggtttggacgaaggccatgttcgagctggtcagtcccttgaactaccttgcgtggctcgtggtggcaatcccttagcgactctgcagtggttaaagaacggccagccagtgtccactgcatgggggaccgagcacacacaagcagtggccaggtccgtgctggtcatgaccgtgaggcccgaggatcacggagcccagctgagctgtgaggctcataactctgtgtccgcgggtacccaggaacacggtatcactttgcaggtcaccttccccccatcagcaatcatcattcttggatctgcctctcagacagaaaacaaaaatgtgaccttgagctgcgtatctaagtcttctaggcctcgggttttattgcggtggtggttgggatggcggcaacttctgccgatggaagagacagttatggacggactgcatggagggcatatttcaatgtccaaccttactttcctggccagacgcgaagacaacgggttgactcttacctgcgaagcatttagcgaagcattcaccaaggagactttcaaaaagagtttgattctgaacgtaaaataccctgcccagaaactgtggatcgaagggcctcctgagggacagaaactgcgagcaggaactcgggtgcggctggtatgtctggcaataggtggaaaccctgagccatctctgatgtggtacaaagacagtcgaaccgtcactgaaagcaggctgccccaggagtcccggagggtgcacctcggatcagtggagaaatcaggttctactttttccagagaactggttctcgtgaccgggccatctgataaccaggctaaattcacatgtaaagctggtcaattatctgccagcacccaactggcagtgcagtttcccccaaccaatgtcacaattctggccaacgcgtccgcccttaggcccggtgatgccttgaatttgacttgtgtgtccgtctcatcaaaccccccagttaacttgagctgggataaagaaggggaaaggttggagggcgtggccgctccccctcgtagggcgccttttaagggatcagctgccgctcgatccgtgttactgcaggtgagtagtagagatcacgggcaacgggtcacatgtagggcccattccgccgagctgcgcgaaaccgtgagctccttctaccggttgaacgtgctgtatcggccagagtttctgggggagcaggtcttagtcgtgacagccgtcgagcaaggggaagctttactccctgtatccgtctccgccaacccagctccggaggcctttaattggactttcaggggctacagactatccccagctggtggccctagacacagaatcctttcatctggggctctccacctgtggaatgttaccagggctgacgatgggctgtaccagcttcactgtcagaacagcgaaggcactgccgaggctcggctaagacttgacgttcattacgcccctacgataagagctcttcaagaccccaccgaggtgaatgtaggtgggtccgtggacattgtttgtaccgtggacgcaaatcccattctgcccggtatgtttaattgggagcgcctcggggaagacgaagaggatcagagcctggatgacatggaaaagatctctcgcggtccgacaggccgactcagaattcatcacgccaaactcgcgcaggctggagcatatcagtgcatcgtggataacggcgtggcacccccagcgaggaggttgttacgcctagtggtccgattcgctccgcaggtggaacatccaaccccattaacaaaagtggcagctgcaggggactcgacaagttcagccaccctgcactgccgggctcgcggagtccctaacatcgtcttcacgtggactaagaatggtgtacctttagacctgcaggacccccgttacaccgaacatacgtaccaccagggcggagttcactcctctctgcttacaattgcaaatgtcagcgccgctcaggattacgccctttttacttgcaccgcaacaaatgcactggggagtgatcagacaaacatacagctggtaagtatttctcggccagacccgccttctggacttaaggtcgtgtccctgaccccacatagcgttggactggaatggaaacctggatttgatggtggtctaccacaacgcttttgtatcagatatgaggctctgggcacccctgggtttcattacgtggacgttgtccctcctcaagctaccacatttaccctgacaggtctgcagcccagtactcggtaccgcgtgtggctgctggcaagcaacgcactgggggatagcggcctggctgataaagggactcagttaccgatcacgacaccaggactgcatcagccttcgggggagccagaagaccaactgccaacagaaccaccatccggcatcagcgagaagacagaggctggttctgaagaggacagggtgaggaacgaatacgaagaatcgcaatggactggggagagagacacgcaaagcagcaccgtcagcacaaccgaggccgaaccatattatcgttcactgagagatttctccccacagctgccgcctactcaggaggaagtctcttactctaggggtttcacgggggaagacgaagatatggctttccctgggcacctgtatgatgaagtagaaagaacgtatccacccagtggggcttggggacccctctacgacgaagttcagatggggccttgggacctgcattggccggaggatacctatcaggaccccagggggatttatgatcaggtggccggagatctggatactctggagcccgatagcctgcctttcgaactccggggacacctggtctag

SEQ ID NO: 148421 - DNA, 3726 bp, Artificial Sequence
  derived and/or modified sequence
atggctttgggaaccacacttcgggcaagtctgctgctgctggggctcctgaccgaaggtctcgctcagctagccattcccgctagcgttcctcggggtttttgggccttacccgaaaacttgaccgtagtggaaggcgcatccgtcgagttgagatgcggcgtgtcaactcccggatctgccgtacagtgggctaaggatggactgctcttggggccagacccccgtatccccggtttcccccgataccgcctggagggagaccccgcacgaggcgaattccacctgcacatcgaggcctgtgatctgtccgacgatgccgagtacgagtgtcaggtgggaagaagcgaaatgggaccagaacttgtaagccccagagtgatcctctccattctcgtgcctcccaaacttctgctccttacccccgaagcgggaacaatggttacctgggtggcaggccaggagtatgtcgtgaattgtgtctcgggcgatgccaagccagctccagatatcaccatcctactctccggtcagactatcagcgacatatctgccaacgtaaatgaggggagccagcagaaactatttaccgtagaagccaccgccagggtgactcccagatcctctgacaatagacagctccttgtgtgcgaagcctccagtccggctctagaggccccaatcaaagccagttttaccgtcaatgtactcttcccccctggcccacctgtgatcgagtggccgggactggacgagggccatgtgcgagctggccagtctctggaactgccatgtgtggccaggggcggaaatcccctggccacattacaatggctcaaaaatggccagccagtgagcaccgcttggggtaccgaacacactcaagccgtggcgagaagtgtgctcgtgatgactgtgcgccctgaagaccatggcgcacagctgtcgtgtgaggcccacaacagtgtctccgctggtactcaggaacacggcatcacactgcaggttaccttcccgccttcggcaatcattatacttggctcagccagtcagaccgagaataagaatgtgactctgtcttgtgtgtcaaaatcatcgagacctagagtgctgctgcgatggtggctcggttggcgacagcttctccccatggaggagaccgtgatggatggactgcatggcggacatattagcatgagtaacctgacgtttttggccagaagagaagacaacggtctgaccctgacatgcgaggccttttccgaggctttcacaaaagaaaccttcaagaaatccctgattctgaatgtgaagtacccagcccagaagctttggatcgaaggcccaccagagggccagaaactaagggctggcacccgagtcagactggtgtgcctggccattggcggaaatccagagccatcgttgatgtggtacaaagattcccgcactgtaaccgaatcacgcctgccccaggagtccagaagggtgcacttgggcagcgttgagaagtcaggctccacgttcagtcgggaactcgttctggtgacgggcccaagtgacaaccaagccaaatttacatgtaaagcgggacagctgtcggccagtactcagcttgccgtgcaattcccccctaccaacgtgacaatcctggcgaatgcgtccgctctgaggcccggagacgcgctgaacctgacatgcgtgtcggtgtcctcaaaccccccagtgaacctcagctgggacaaggaaggagaaaggctggagggggtggcagccccaccccgtcgagccccttttaaaggcagtgcggctgctagatcagtgctgcttcaggtaagttctagggatcatgggcagagggtaacgtgtcgcgcacattcagccgaattgagagaaactgtgtcttccttctaccgcctgaacgtcctgtaccgccctgaatttctcggagaacaggtcctggtcgtgaccgcggttgagcagggcgaggctttgctgcctgtgtctgtatccgccaacccggctcccgaagccttcaattggacttttcgcggatacagattatctccggctggaggacctcggcatcggatcctctcatccggtgccctgcacctgtggaacgtaacaagggctgatgacggcctgtaccagctgcattgccagaatagtgaagggactgcggaagccagacttcgcctcgacgttcattatgcaccaactattcgcgctctgcaggatcctactgaagtcaatgtgggtggctccgtcgatatcgtgtgcacggtggacgccaatccgatcctccctgggatgttcaattgggagcgcctgggagaggacgaagaggaccagtcattagatgacatggaaaagatctcccggggacccaccggtaggttacggatccaccatgctaaattagctcaggcgggagcctaccaatgtatcgttgataatggggtggcacctccggcacgcaggctcctgcgcctggtagtcaggttcgcaccacaagtggagcaccctactcctcttactaaggtggccgctgcaggtgatagcacctcctcagccacattacactgcagagcaaggggcgtccccaacatcgtatttacatggacaaaaaacggagttcccctcgatctccaggacccccgatacaccgagcacacttaccaccaggggggagtccatagttcgctacttacgatcgccaacgtgtccgctgcacaggattatgctctattcacttgtaccgcaactaacgccctggggtcagatcaaactaacatccagttggtcagtatctccaggccggaccctccaagtggcctcaaagtggtgtccctcaccccacactcagtgggtctggaatggaaacccggattcgacgggggtttgccacagaggttctgcatacgctatgaggctctaggaactccaggatttcactatgtcgacgtggtccctcctcaagcaaccacattcacactcacaggcctgcagccgtccacccggtatcgggtctggctcctcgcgtcaaacgcactgggtgattccggactggctgataagggcactcaattgcctatcaccaccccaggactgcaccagccaagcggcgagccggaagaccagttgcccactgagcctccttccggcccttcaggcttacctctgctgcctgtgctctttgctctgggtggtctgctcctgctttctaatgcaagctgtgtgggcggtgtgctgtggcagcgcagactgagacgcctagccgagggaatctctgagaagacagaagctggttccgaggaagacagggtaagaaatgagtatgaggaaagccagtggaccggcgagcgcgacacacagtcctccactgtgtcaacaactgaggctgaaccgtactaccgctccctgcgggactttagcccccagcttcccccaacgcaggaggaagtttcctatagtcgtggctttacaggcgaggatgaagacatggcatttcccggtcatctgtacgatgaggtcgagagaacatacccaccctccggagcatggggcccattgtatgatgaagttcagatgggcccttgggatctccactggcctgaggacacctaccaggaccccagaggaatctatgatcaagtggcaggggatctagatacccttgagccagattccctccctttcgaacttagggggcacctggtatag

SEQ ID NO: 148422 - DNA, 3606 bp, Artificial Sequence
  derived and/or modified sequence
atggccctgggcaccaccctgagagccagcctgctgctgctgggcctgctgaccgagggcctggcccagctggccatccccgccagcgtgcccagaggcttctgggccctgcccgagaacctgaccgtggtggagggcgccagcgtggagctgagatgcggcgtgagcacccccggcagcgccgtgcagtgggccaaggacggcctgctgctgggccccgaccccagaatccccggcttccccagatacagactggagggcgaccccgccagaggcgagttccacctgcacatcgaggcctgcgacctgagcgacgacgccgagtacgagtgccaggtgggcagaagcgagatgggccccgagctggtgagccccagagtgatcctgagcatcctggtgccccccaagctgctgctgctgacccccgaggccggcaccatggtgacctgggtggccggccaggagtacgtggtgaactgcgtgagcggcgacgccaagcccgcccccgacatcaccatcctgctgagcggccagaccatcagcgacatcagcgccaacgtgaacgagggcagccagcagaagctgttcaccgtggaggccaccgccagagtgacccccagaagcagcgacaacagacagctgctggtgtgcgaggccagcagccccgccctggaggcccccatcaaggccagcttcaccgtgaacgtgctgttcccccccggcccccccgtgatcgagtggcccggcctggacgagggccacgtgagagccggccagagcctggagctgccctgcgtggccagaggcggcaaccccctggccaccctgcagtggctgaagaacggccagcccgtgagcaccgcctggggcaccgagcacacccaggccgtggccagaagcgtgctggtgatgaccgtgagacccgaggaccacggcgcccagctgagctgcgaggcccacaacagcgtgagcgccggcacccaggagcacggcatcaccctgcaggtgaccttcccccccagcgccatcatcatcctgggcagcgccagccagaccgagaacaagaacgtgaccctgagctgcgtgagcaagagcagcagacccagagtgctgctgagatggtggctgggctggagacagctgctgcccatggaggagaccgtgatggacggcctgcacggcggccacatcagcatgagcaacctgaccttcctggccagaagagaggacaacggcctgaccctgacctgcgaggccttcagcgaggccttcaccaaggagaccttcaagaagagcctgatcctgaacgtgaagtaccccgcccagaagctgtggatcgagggcccccccgagggccagaagctgagagccggcaccagagtgagactggtgtgcctggccatcggcggcaaccccgagcccagcctgatgtggtacaaggacagcagaaccgtgaccgagagcagactgccccaggagagcagaagagtgcacctgggcagcgtggagaagagcggcagcaccttcagcagagagctggtgctggtgaccggccccagcgacaaccaggccaagttcacctgcaaggccggccagctgagcgccagcacccagctggccgtgcagttcccccccaccaacgtgaccatcctggccaacgccagcgccctgagacccggcgacgccctgaacctgacctgcgtgagcgtgagcagcaacccccccgtgaacctgagctgggacaaggagggcgagagactggagggcgtggccgccccccccagaagagcccccttcaagggcagcgccgccgccagaagcgtgctgctgcaggtgagcagcagagaccacggccagagagtgacctgcagagcccacagcgccgagctgagagagaccgtgagcagcttctacagactgaacgtgctgtacagacccgagttcctgggcgagcaggtgctggtggtgaccgccgtggagcagggcgaggccctgctgcccgtgagcgtgagcgccaaccccgcccccgaggccttcaactggaccttcagaggctacagactgagccccgccggcggccccagacacagaatcctgagcagcggcgccctgcacctgtggaacgtgaccagagccgacgacggcctgtaccagctgcactgccagaacagcgagggcaccgccgaggccagactgagactggacgtgcactacgcccccaccatcagagccctgcaggaccccaccgaggtgaacgtgggcggcagcgtggacatcgtgtgcaccgtggacgccaaccccatcctgcccggcatgttcaactgggagagactgggcgaggacgaggaggaccagagcctggacgacatggagaagatcagcagaggccccaccggcagactgagaatccaccacgccaagctggcccaggccggcgcctaccagtgcatcgtggacaacggcgtggccccccccgccagaagactgctgagactggtggtgagattcgccccccaggtggagcaccccacccccctgaccaaggtggccgccgccggcgacagcaccagcagcgccaccctgcactgcagagccagaggcgtgcccaacatcgtgttcacctggaccaagaacggcgtgcccctggacctgcaggaccccagatacaccgagcacacctaccaccagggcggcgtgcacagcagcctgctgaccatcgccaacgtgagcgccgcccaggactacgccctgttcacctgcaccgccaccaacgccctgggcagcgaccagaccaacatccagctggtgagcatcagcagacccgacccccccagcggcctgaaggtggtgagcctgaccccccacagcgtgggcctggagtggaagcccggcttcgacggcggcctgccccagagattctgcatcagatacgaggccctgggcacccccggcttccactacgtggacgtggtgcccccccaggccaccaccttcaccctgaccggcctgcagcccagcaccagatacagagtgtggctgctggccagcaacgccctgggcgacagcggcctggccgacaagggcacccagctgcccatcaccacccccggcctgcaccagcccagcggcgagcccgaggaccagctgcccaccgagccccccagcggcatcagcgagaagaccgaggccggcagcgaggaggacagagtgagaaacgagtacgaggagagccagtggaccggcgagagagacacccagagcagcaccgtgagcaccaccgaggccgagccctactacagaagcctgagagacttcagcccccagctgccccccacccaggaggaggtgagctacagcagaggcttcaccggcgaggacgaggacatggccttccccggccacctgtacgacgaggtggagagaacctacccccccagcggcgcctggggccccctgtacgacgaggtgcagatgggcccctgggacctgcactggcccgaggacacctaccaggaccccagaggcatctacgaccaggtggccggcgacctggacaccctggagcccgacagcctgcccttcgagctgagaggccacctggtgtag

SEQ ID NO: 148423 - DNA, 3726 bp, Artificial Sequence
  derived and/or modified sequence
atggccctgggcaccaccctgagagccagcctgctgctgctgggcctgctgaccgagggcctggcccagctggccatccccgccagcgtgcccagaggcttctgggccctgcccgagaacctgaccgtggtggagggcgccagcgtggagctgagatgcggcgtgagcacccccggcagcgccgtgcagtgggccaaggacggcctgctgctgggccccgaccccagaatccccggcttccccagatacagactggagggcgaccccgccagaggcgagttccacctgcacatcgaggcctgcgacctgagcgacgacgccgagtacgagtgccaggtgggcagaagcgagatgggccccgagctggtgagccccagagtgatcctgagcatcctggtgccccccaagctgctgctgctgacccccgaggccggcaccatggtgacctgggtggccggccaggagtacgtggtgaactgcgtgagcggcgacgccaagcccgcccccgacatcaccatcctgctgagcggccagaccatcagcgacatcagcgccaacgtgaacgagggcagccagcagaagctgttcaccgtggaggccaccgccagagtgacccccagaagcagcgacaacagacagctgctggtgtgcgaggccagcagccccgccctggaggcccccatcaaggccagcttcaccgtgaacgtgctgttcccccccggcccccccgtgatcgagtggcccggcctggacgagggccacgtgagagccggccagagcctggagctgccctgcgtggccagaggcggcaaccccctggccaccctgcagtggctgaagaacggccagcccgtgagcaccgcctggggcaccgagcacacccaggccgtggccagaagcgtgctggtgatgaccgtgagacccgaggaccacggcgcccagctgagctgcgaggcccacaacagcgtgagcgccggcacccaggagcacggcatcaccctgcaggtgaccttcccccccagcgccatcatcatcctgggcagcgccagccagaccgagaacaagaacgtgaccctgagctgcgtgagcaagagcagcagacccagagtgctgctgagatggtggctgggctggagacagctgctgcccatggaggagaccgtgatggacggcctgcacggcggccacatcagcatgagcaacctgaccttcctggccagaagagaggacaacggcctgaccctgacctgcgaggccttcagcgaggccttcaccaaggagaccttcaagaagagcctgatcctgaacgtgaagtaccccgcccagaagctgtggatcgagggcccccccgagggccagaagctgagagccggcaccagagtgagactggtgtgcctggccatcggcggcaaccccgagcccagcctgatgtggtacaaggacagcagaaccgtgaccgagagcagactgccccaggagagcagaagagtgcacctgggcagcgtggagaagagcggcagcaccttcagcagagagctggtgctggtgaccggccccagcgacaaccaggccaagttcacctgcaaggccggccagctgagcgccagcacccagctggccgtgcagttcccccccaccaacgtgaccatcctggccaacgccagcgccctgagacccggcgacgccctgaacctgacctgcgtgagcgtgagcagcaacccccccgtgaacctgagctgggacaaggagggcgagagactggagggcgtggccgccccccccagaagagcccccttcaagggcagcgccgccgccagaagcgtgctgctgcaggtgagcagcagagaccacggccagagagtgacctgcagagcccacagcgccgagctgagagagaccgtgagcagcttctacagactgaacgtgctgtacagacccgagttcctgggcgagcaggtgctggtggtgaccgccgtggagcagggcgaggccctgctgcccgtgagcgtgagcgccaaccccgcccccgaggccttcaactggaccttcagaggctacagactgagccccgccggcggccccagacacagaatcctgagcagcggcgccctgcacctgtggaacgtgaccagagccgacgacggcctgtaccagctgcactgccagaacagcgagggcaccgccgaggccagactgagactggacgtgcactacgcccccaccatcagagccctgcaggaccccaccgaggtgaacgtgggcggcagcgtggacatcgtgtgcaccgtggacgccaaccccatcctgcccggcatgttcaactgggagagactgggcgaggacgaggaggaccagagcctggacgacatggagaagatcagcagaggccccaccggcagactgagaatccaccacgccaagctggcccaggccggcgcctaccagtgcatcgtggacaacggcgtggccccccccgccagaagactgctgagactggtggtgagattcgccccccaggtggagcaccccacccccctgaccaaggtggccgccgccggcgacagcaccagcagcgccaccctgcactgcagagccagaggcgtgcccaacatcgtgttcacctggaccaagaacggcgtgcccctggacctgcaggaccccagatacaccgagcacacctaccaccagggcggcgtgcacagcagcctgctgaccatcgccaacgtgagcgccgcccaggactacgccctgttcacctgcaccgccaccaacgccctgggcagcgaccagaccaacatccagctggtgagcatcagcagacccgacccccccagcggcctgaaggtggtgagcctgaccccccacagcgtgggcctggagtggaagcccggcttcgacggcggcctgccccagagattctgcatcagatacgaggccctgggcacccccggcttccactacgtggacgtggtgcccccccaggccaccaccttcaccctgaccggcctgcagcccagcaccagatacagagtgtggctgctggccagcaacgccctgggcgacagcggcctggccgacaagggcacccagctgcccatcaccacccccggcctgcaccagcccagcggcgagcccgaggaccagctgcccaccgagccccccagcggccccagcggcctgcccctgctgcccgtgctgttcgccctgggcggcctgctgctgctgagcaacgccagctgcgtgggcggcgtgctgtggcagagaagactgagaagactggccgagggcatcagcgagaagaccgaggccggcagcgaggaggacagagtgagaaacgagtacgaggagagccagtggaccggcgagagagacacccagagcagcaccgtgagcaccaccgaggccgagccctactacagaagcctgagagacttcagcccccagctgccccccacccaggaggaggtgagctacagcagaggcttcaccggcgaggacgaggacatggccttccccggccacctgtacgacgaggtggagagaacctacccccccagcggcgcctggggccccctgtacgacgaggtgcagatgggcccctgggacctgcactggcccgaggacacctaccaggaccccagaggcatctacgaccaggtggccggcgacctggacaccctggagcccgacagcctgcccttcgagctgagaggccacctggtgtag

SEQ ID NO: 148424 - protein, 380 aa, Artificial Sequence
  derived and/or modified sequence
MGGLSARPTAGRTDPAGTCWGQDPGSKMATVIPGPLSLGEDFYREAIEHCRSYNARLCAERSLRLPFLDSQTGVAQNNCYIWMEKTHRGPGLAPGQIYTYPARCWRKKRRLNILEDPRLRPCEYKIDCEAPLKKEGGLPEGPVLEALLCAETGEKKIELKEEETIMDCQKQQLLEFPHDLEVEDLEDDIPRRKNRAKGKAYGIGGLRKRQDTASLEDRDKPYVCDKFYKELAWVPEAQRKHTAKKAPDGTVIPNGYCDFCLGGSKKTGCPEDLISCADCGRSGHPSCLQFTVNMTAAVRTYRWQCIECKSCSLCGTSENDGASWAGLTPQDQLLFCDDCDRGYHMYCLSPPMAEPPEGSWSCHLCLRHLKEKASAYITLT

SEQ ID NO: 148425 - DNA, 2227 bp, Artificial Sequence
  derived and/or modified sequence
gtgctcccgccccccgggaatgaatggatgggcggcctcagcgcccgcccgaccgctgggaggaccgacccggcggggacctgctgggggcaggacccggggagcaagatggccactgtcatccctggccccctgagcctaggcgaggacttctaccgcgaggccatcgagcactgccgcagttacaacgcgcgcctgtgcgccgagcgcagcctgcgactgcccttcctcgactcgcagaccggcgtggcccagaacaactgctacatctggatggagaagacccaccgcgggccgggtttggccccgggacagatttacacgtaccccgcccgctgttggaggaagaaacggagactcaacatcctggaggaccccagactcaggccctgcgagtacaagatcgactgtgaagcacccctgaagaaggagggtggcctcccggaagggccggtcctcgaggctctactgtgtgcagagacgggggagaagaagattgagctgaaggaggaggagaccattatggactgtcagaaacagcagttgctggagtttccgcatgacctcgaggtggaagacttggaggatgacattcccaggaggaagaacagggccaaaggaaaggcatatggcatcgggggtctccggaaacgccaggacaccgcttccctggaggaccgagacaagccgtatgtctgtgataagttttacaaagaattggcctgggtccctgaggcacaaaggaaacacacagccaagaaggcgcccgacggcactgtcatccccaacggctactgtgacttctgcctggggggctccaagaagacggggtgtcccgaggacctcatctcctgtgcggactgtgggcgatcaggacacccctcgtgtttacaattcacggtgaacatgacggcagccgtgcggacctaccgctggcagtgcatcgagtgcaaatcctgcagcctgtgcggaacctccgagaacgacggtgccagctgggcgggtctcaccccccaggaccagctgctgttttgtgatgactgcgatcggggttaccacatgtactgcctgagtccccccatggcggagcccccggaagggagctggagctgtcacctctgtctccggcacctgaaggaaaaggcttctgcttacatcaccctcacctaggccggctcggctcgccgcgactctggggtggtgctcgcctacctgcctctccgagctcctcaattctcccccaccctgaacatcccgcagggggagggggagagggggaagccgagagggggctgggccaccccctcccctctgtgcaagtggaatgtctgccctgtgggtgggtgggcccggccagggcctctccctccctccctccctctctgtcccttggcaaatggacaccaggggcttctcccctcaaagccataccccgcctctgggcgggcatggggggtggtgggtgccagccaggggcatggacagagcctttttctaaagaaaaagacaaaaagttaaaaaaaaaaaaaagaagaaaagaaaagaagttaatatatacaaagagtcctccaaggcctggctgggtggaggggcgctgctgagagtgtccaccgggcacccgcctctgccggccccccgccgggcgccccaaccccaatttctggagctgcagccgtcccgcgccccacccaaggtgggcgccttcccctcttgtgcccagggcggtgggcgtggtgtccacccgcccctcctggtgcccacggtggatactgcatgatgtgaaccttggttttgaactctgttcctgcccctccccgaccgccccagcctgtgcccgccccgtgcctgccgtggctggtgggtggcggtggtggggccgggtgggcccccgcccagcgcctgctggaatgagaagcacagactccgccacggactccttttctctccctcctcccgccccgccaggcctggcggcccccgcccccctcgctggccattttgggggagtgagggggcgtggttgtttcttgtggttgtgtgtgtttgttgttcgggttttaaaaaagggaaactgagactgcaggtgggggaggtggtgggttttggggggatgtcccctaatccaggagtgccccctcacttgtcaccgagtctcctctattgcctgcctctgctgtgaattaacttgttctgtgtattaaactgggcctgacccctctgcccaaaa

SEQ ID NO: 148426 - DNA, 1143 bp, Artificial Sequence
  derived and/or modified sequence
atggggggactgtcagcccggcctacagcaggcagaactgacccagcgggaacatgctggggccaggaccccggctcaaagatggcgacagtgatccccggacccctgagtctgggtgaagacttttaccgtgaagccatcgaacactgccgatcttacaatgccagattatgcgccgagcgctctcttcggctgcctttcctggactcccagacgggcgtggcccagaataattgctacatttggatggaaaagactcaccgcggacctggactcgcaccaggccagatttacacttaccccgccagatgctggcgaaagaaaaggaggttgaacatactggaggatccgaggctcaggccttgtgagtataagatagactgcgaagcacccttaaaaaaggaaggagggctccctgagggtccagtgctggaagctctgctttgcgccgaaacgggtgaaaaaaaaattgagttaaaggaagaagagaccatcatggattgccaaaagcaacagctgttggagtttccacatgatctagaggtggaggacctggaggatgatatacctagacgcaaaaatcgggctaagggcaaggcctatggaattggggggctgaggaagcggcaggatacagctagcctggaagaccgagataagccctatgtgtgtgacaagttctataaggagctggcttgggtgcccgaggcgcagagaaagcacaccgcaaagaaggcacccgatgggacagtgattccaaatggatactgcgatttttgtctcggaggctcaaagaaaactggctgcccagaagacttaatctcctgcgctgattgtggccggtctggtcatccctcctgcctccagttcacagtgaacatgaccgccgccgtgagaacctaccggtggcaatgcatagaatgcaagagctgcagcctctgcgggaccagtgagaacgacggcgctagttgggcaggccttactcctcaggaccagctccttttctgcgacgattgcgatcggggctaccacatgtattgccttagtccaccaatggcagagcctccggagggctcatggtcctgccatctgtgcctaagacatttaaaggaaaaagcgtctgcgtacatcactctcacctag

SEQ ID NO: 148427 - DNA, 1143 bp, Artificial Sequence
  derived and/or modified sequence
atgggcggcctgagcgcccggcccacagctggccgcacagatcctgctggcacctgctggggccaggaccccggcagcaagatggccaccgtcatccctggccccctgagcctgggggaggacttctaccgggaggccatcgagcactgccgcagctacaatgcccggctgtgtgccgagaggagcctgcggctgcccttcctggacagccagacaggagtggcccagaacaactgctacatctggatggagaagacccaccggggccctggcctggcccctggccagatctacacctacccagcccgctgctggaggaagaagaggcggctgaacatcctggaggacccccggctgcggccctgtgagtacaagattgactgtgaggcccccctgaagaaggagggcggcctgcctgagggccctgtgctggaggccctgctgtgtgccgagaccggggagaagaagattgagctgaaggaggaggagaccatcatggactgccagaagcagcagctgctggagttcccccatgacctggaggtggaggacctggaggatgacatccccaggaggaagaacagagccaagggcaaggcctatggaattggaggcctgaggaagaggcaggacacagccagcctggaggaccgggacaagccctacgtgtgtgacaagttctacaaggagctggcctgggtgcctgaggcccagaggaagcacacagccaagaaggccccagatggcaccgtcatccccaacggctactgtgacttctgcctgggcggcagcaagaagacaggctgcccagaagatctcatcagctgtgccgactgtggccgcagcggccaccccagctgcctgcagttcaccgtgaacatgacagctgctgtgaggacctaccgctggcagtgcatcgagtgcaagagctgcagcctgtgtggcaccagtgaaaatgatggagcctcctgggccggcctgaccccccaggaccagctgctcttctgtgatgactgtgaccggggctaccacatgtactgcctgagcccccccatggccgagcccccagagggctcctggagctgccacctgtgcctgcggcacctgaaggagaaggccagcgcctacatcaccctgacctag

SEQ ID NO: 148428 - DNA, 1143 bp, Artificial Sequence
  derived and/or modified sequence
atgggcggcctgagcgcccggcccaccgccggccggaccgaccccgccggaacatgttggggacaggatccaggtagcaagatggccaccgtaatccctggaccgctttctttgggggaggacttctaccgagaagcaattgagcactgtcgaagttataacgcacgactctgtgcagaacgctcactcaggctgccattcctggacagccaaactggagtggcccagaataattgctacatctggatggaaaaaactcatcgcggcccagggcttgcccccgggcagatttacacatacccagcaaggtgctggaggaaaaaaaggcgcctgaatattttggaggacccgcgattgaggccttgcgagtacaagatagattgcgaggcacctctgaagaaagaggggggactaccagaaggccccgtcctggaagctctattatgcgctgaaacaggggagaagaaaattgagctcaaagaggaagagaccattatggattgccagaaacaacaattgcttgaattcccccatgacttagaggtagaggacttagaagacgatatcccaagacggaagaaccgcgcaaagggtaaagcatatggaataggcgggctgcgcaaaaggcaggataccgcttccctggaggaccgagataagccctatgtttgcgataaattctataaggagcttgcttgggtaccagaggcccagaggaagcataccgcaaagaaggctcccgacggtaccgtaatccctaatggctattgcgacttctgcctgggaggaagtaagaaaactggttgtcccgaagatttaatttcttgcgctgattgcggaagatcagggcacccctcttgccttcagtttaccgtgaacatgactgctgccgttcggacctacaggtggcagtgcattgaatgcaagagctgcagcctttgtggcaccagcgagaacgatggcgcctcctgggccggcctgaccccccaagaccagctgcttttctgtgacgactgtgaccgcggttatcatatgtactgcctctctcctccgatggcagagccccctgagggatcttggtcatgccacttatgtttgcgacatcttaaggagaaggcctccgcttacattaccctaacttag

SEQ ID NO: 148429 - DNA, 1143 bp, Artificial Sequence
  derived and/or modified sequence
atgggtggtctctcagcaagacctaccgcagggcgtactgatcccgctggtacatgctggggacaagatcctggctcaaagatggctactgtgattcccggacccctttctcttggcgaggatttctaccgcgaggctatcgaacattgtaggtcctataacgctaggctgtgcgcagagaggagcctgagattaccttttctggatagtcagaccggagttgcccagaataattgctacatctggatggaaaagacccaccgtggcccaggattggctccgggacaaatttacacctatcctgccaggtgttggagaaaaaagagacgactgaatatactggaagatcccaggttgcgcccatgtgaatacaagatagattgtgaggcccctttaaagaaagaaggcggattgccagaaggtcccgtcttagaggcactgctctgtgccgaaaccggagagaaaaagatagagctcaaggaggaggaaaccatcatggattgccagaagcaacaactccttgaattcccccatgacctagaggtggaggatctcgaagacgacatcccaagaaggaaaaatcgcgcaaaaggcaaggcttacggtataggcggtctcaggaaacgacaagacaccgcttctctcgaggatcgggacaagccctacgtgtgtgacaagttttacaaggagctggcctgggtgcccgaggcgcagcgtaagcacacagcgaaaaaggcgcctgatggcacggttatacccaacggctattgtgacttctgcttggggggttcgaaaaaaactggatgccccgaggatctaataagctgtgcggattgtggcagatccggccatccctcctgcctgcaattcacagttaatatgaccgccgcagtgaggacgtaccgatggcagtgcatcgagtgtaaaagctgctccttatgcggtacgtcagagaatgatggagcgtcttgggcgggactcacacctcaggatcagctcctgttctgcgatgactgcgaccgcggataccatatgtattgtctttcaccacctatggccgagcctcccgagggaagttggagttgccatttatgccttagacaccttaaggagaaagcctctgcttacattactttgacatag

SEQ ID NO: 148430 - DNA, 2227 bp, Artificial Sequence
  derived and/or modified sequence
gtgctcccgccccccgggaatgaatggatgggcggcctcagcgcccgcccgaccgctgggaggaccgacccggcggggacctgctgggggcaggacccggggagcaagatggccactgtcatccctggccccctgagcctaggcgaggacttctaccgcgaggccatcgagcactgccgcagttacaacgcgcgcctgtgcgccgagcgcagcctgcgactgcccttcctcgactcgcagaccggcgtggcccagaacaactgctacatctggatggagaagacccaccgcgggccgggtttggccccgggacagatttacacgtaccccgcccgctgttggaggaagaaacggagactcaacatcctggaggaccccagactcaggccctgcgagtacaagatcgactgtgaagcacccctgaagaaggagggtggcctcccggaagggccggtcctcgaggctctactgtgtgcagagacgggggagaagaagattgagctgaaggaggaggagaccattatggactgtcagaaacagcagttgctggagtttccgcatgacctcgaggtggaagacttggaggatgacattcccaggaggaagaacagggccaaaggaaaggcatatggcatcgggggtctccggaaacgccaggacaccgcttccctggaggaccgagacaagccgtatgtctgtgataagttttacaaagaattggcctgggtccctgaggcacaaaggaaacacacagccaagaaggcgcccgacggcactgtcatccccaacggctactgtgacttctgcctggggggctccaagaagacggggtgtcccgaggacctcatctcctgtgcggactgtgggcgatcaggacacccctcgtgtttacaattcacggtgaacatgacggcagccgtgcggacctaccgctggcagtgcatcgagtgcaaatcctgcagcctgtgcggaacctccgagaacgacggtgccagctgggcgggtctcaccccccaggaccagctgctgttttgtgatgactgcgatcggggttaccacatgtactgcctgagtccccccatggcggagcccccggaagggagctggagctgtcacctctgtctccggcacctgaaggaaaaggcttctgcttacatcaccctcacctaggccggctcggctcgccgcgactctggggtggtgctcgcctacctgcctctccgagctcctcaattctcccccaccctgaacatcccgcagggggagggggagagggggaagccgagagggggctgggccaccccctcccctctgtgcaagtggaatgtctgccctgtgggtgggtgggcccggccagggcctctccctccctccctccctctctgtcccttggcaaatggacaccaggggcttctcccctcaaagccataccccgcctctgggcgggcatggggggtggtgggtgccagccaggggcatggacagagcctttttctaaagaaaaagacaaaaagttaaaaaaaaaaaaaagaagaaaagaaaagaagttaatatatacaaagagtcctccaaggcctggctgggtggaggggcgctgctgagagtgtccaccgggcacccgcctctgccggccccccgccgggcgccccaaccccaatttctggagctgcagccgtcccgcgccccacccaaggtgggcgccttcccctcttgtgcccagggcggtgggcgtggtgtccacccgcccctcctggtgcccacggtggatactgcatgatgtgaaccttggttttgaactctgttcctgcccctccccgaccgccccagcctgtgcccgccccgtgcctgccgtggctggtgggtggcggtggtggggccgggtgggcccccgcccagcgcctgctggaatgagaagcacagactccgccacggactccttttctctccctcctcccgccccgccaggcctggcggcccccgcccccctcgctggccattttgggggagtgagggggcgtggttgtttcttgtggttgtgtgtgtttgttgttcgggttttaaaaaagggaaactgagactgcaggtgggggaggtggtgggttttggggggatgtcccctaatccaggagtgccccctcacttgtcaccgagtctcctctattgcctgcctctgctgtgaattaacttgttctgtgtattaaactgggcctgacccctctgcccacga

SEQ ID NO: 148431 - DNA, 1143 bp, Artificial Sequence
  derived and/or modified sequence
atgggcggcctgagcgccagacccaccgccggcagaaccgaccccgccggcacctgctggggccaggaccccggcagcaagatggccaccgtgatccccggccccctgagcctgggcgaggacttctacagagaggccatcgagcactgcagaagctacaacgccagactgtgcgccgagagaagcctgagactgcccttcctggacagccagaccggcgtggcccagaacaactgctacatctggatggagaagacccacagaggccccggcctggcccccggccagatctacacctaccccgccagatgctggagaaagaagagaagactgaacatcctggaggaccccagactgagaccctgcgagtacaagatcgactgcgaggcccccctgaagaaggagggcggcctgcccgagggccccgtgctggaggccctgctgtgcgccgagaccggcgagaagaagatcgagctgaaggaggaggagaccatcatggactgccagaagcagcagctgctggagttcccccacgacctggaggtggaggacctggaggacgacatccccagaagaaagaacagagccaagggcaaggcctacggcatcggcggcctgagaaagagacaggacaccgccagcctggaggacagagacaagccctacgtgtgcgacaagttctacaaggagctggcctgggtgcccgaggcccagagaaagcacaccgccaagaaggcccccgacggcaccgtgatccccaacggctactgcgacttctgcctgggcggcagcaagaagaccggctgccccgaggacctgatcagctgcgccgactgcggcagaagcggccaccccagctgcctgcagttcaccgtgaacatgaccgccgccgtgagaacctacagatggcagtgcatcgagtgcaagagctgcagcctgtgcggcaccagcgagaacgacggcgccagctgggccggcctgaccccccaggaccagctgctgttctgcgacgactgcgacagaggctaccacatgtactgcctgagcccccccatggccgagccccccgagggcagctggagctgccacctgtgcctgagacacctgaaggagaaggccagcgcctacatcaccctgacctag

SEQ ID NO: 148432 - protein, 268 aa, Artificial Sequence
  derived and/or modified sequence
MAAVRVLVASRLAAASAFTSLSPGGRTPSQRAALHLSVPRPAARVALVLSGCGVYDGTEIHEASAILVHLSRGGAEVQIFAPDVPQMHVIDHTKGQPSEGESRNVLTESARIARGKITDLANLSAANHDAAIFPGGFGAAKNLSTFAVDGKDCKVNKEVERVLKEFHQAGKPIGLCCIAPVLAAKVLRGVEVTVGHEQEEGGKWPYAGTAEAIKALGAKHCVKEVVEAHVDQKNKVVTTPAFMCETALHYIHDGIGAMVRKVLELTGK

SEQ ID NO: 148433 - DNA, 807 bp, Artificial Sequence
  derived and/or modified sequence
atggccgccgtgcgggtactcgtcgcttcacgcctcgccgcggcttcagcgttcacctccctgagccccggaggaaggactccttcccagagagcagctctccatctgtccgtgccacgaccggccgccagggtggcgttggtccttagtggctgcggtgtatatgatggcacagagatccatgaggcgagcgccattttggtccacttatcacgcggaggggctgaggtgcaaatctttgcgcctgacgtcccccagatgcacgttatcgatcacacaaagggtcaaccttcagagggcgaaagccggaatgtgttgacggaatcagcacgaatcgctagaggaaaaattactgatttggccaacctgagcgccgccaatcatgacgccgccatcttccccggtggtttcggtgccgccaagaatttgtccacatttgccgtggatggaaaggattgcaaagttaataaagaagtcgagagggtgttgaaagaattccaccaggctggaaagccaattggcctctgttgtattgccccggtcctggcggcaaaagtactccgaggcgttgaggttactgtggggcacgagcaggaagagggggggaaatggccctatgcaggaaccgccgaggctatcaaagctctgggcgcaaaacattgcgtgaaggaggtcgtagaagcccacgtggatcagaaaaataaggtcgtgacaactcctgcgtttatgtgtgagactgcactgcattatattcacgacggcatcggggccatggttcggaaagtattagaacttacgggcaagtag

SEQ ID NO: 148434 - DNA, 807 bp, Artificial Sequence
  derived and/or modified sequence
atggctgctgtgcgggtgctggtggccagccggctggccgccgccagcgccttcaccagcctgagccctgggggccgcacccccagccagagagctgccctgcacctgtctgtgcccaggcctgctgcccgggtggccctggtgctgagcggctgcggcgtgtatgatggaacagagatccacgaggccagcgccatcctggtgcacctgagcagaggaggagctgaggtgcagatctttgccccagatgtgccccagatgcacgtgattgaccacaccaagggccagcccagcgagggggagagcagaaatgtgctgacagaaagtgcccgcatcgcccggggcaagatcacagacctggccaacctgtctgctgccaaccatgatgctgccatcttccctgggggctttggagctgccaagaacctgagcacctttgctgtggatggcaaggactgcaaggtgaacaaggaggtggagcgggtgctgaaggagttccaccaggccggcaagcccatcggcctgtgctgcatcgcccctgtgctggccgccaaggtgctgcggggcgtggaggtgacagtgggccacgagcaggaggagggcggcaagtggccctatgccggcacagctgaggccatcaaggccctgggcgccaagcactgtgtgaaggaggtggtggaggcccacgtggaccagaagaacaaggtggtgaccaccccagccttcatgtgtgaaacagccctgcactacatccatgatggcattggagccatggtgaggaaggtgctggagctgaccgggaagtag

SEQ ID NO: 148435 - DNA, 807 bp, Artificial Sequence
  derived and/or modified sequence
atggccgccgtgcgggtgctggtggccagccggctggccgccgcctcagcattcacctccctttctccaggtggaaggactcccagtcaacgggcagctctgcacctgagtgtaccccggccagcagcccgagtggctctcgtactgtcggggtgcggagtgtacgatggcaccgagatacacgaagcgtcagctatcctggtgcacttgagtcgagggggggccgaagttcagatattcgcaccagatgtacctcagatgcacgttatagaccacaccaaggggcagcccagcgaaggcgaatcacgaaatgtacttaccgaatctgcccgcatcgccaggggtaagattacagacctggccaatctgtccgccgccaaccatgatgcagccatttttccaggcgggtttggcgccgcaaaaaatctatccacctttgctgtggatggcaaggactgcaaagtgaataaggaggtcgagcgagtcctgaaggaatttcaccaggccgggaaacccatcggcctatgttgcatcgcacctgtgctggcagctaaagtactaagaggtgtcgaagtcactgtggggcacgaacaggaggaaggaggaaagtggccatatgccggaaccgctgaagccattaaggcactgggggccaagcattgtgtcaaggaggtggtggaagctcacgttgaccagaagaacaaggtggtgacaactccagcgttcatgtgtgagaccgctcttcattacatccacgacggcattggtgccatggtacgaaaagtgctggaattgactggcaaatag

SEQ ID NO: 148436 - DNA, 807 bp, Artificial Sequence
  derived and/or modified sequence
atggcagccgttagagtcctggtagcttcccgcctcgccgctgcgtctgctttcacgagcctctctcctgggggaagaacaccatcacagagagctgccctccacctctccgtccctaggcccgcagctcgggtggctctggtgttgtcaggttgtggagtgtatgatgggacagagattcacgaagcgtctgctattttagtgcatctcagccgcggtggggctgaggtgcagattttcgcacccgatgtcccacagatgcacgtgatcgaccacaccaagggccagccatcagagggcgagagtcgtaatgtgctcacggagagcgcacgcatcgccaggggcaagatcactgatctggctaacctctccgccgctaatcacgacgcagccatcttccctggcggttttggtgcagctaagaatctgagcacattcgcagtggatggaaaggactgtaaagtcaacaaagaggtcgaacgggttcttaaggagtttcaccaggccggtaagccgatagggctttgctgtatcgcacccgtgttggctgccaaggtgctcagaggagttgaggtcacagttggacatgaacaggaggaagggggtaagtggccctacgccggaaccgctgaggccattaaagccctcggagccaagcactgtgtcaaagaagtcgtggaggctcatgtggatcaaaagaacaaggtcgtgacgacaccagcttttatgtgtgaaactgcactgcattacatccacgatgggatcggcgctatggtgagaaaagtcctcgagcttactggcaagtag

SEQ ID NO: 148437 - DNA, 1674 bp, Artificial Sequence
  derived and/or modified sequence
caggcgcagtcccgacgagcaacgcgtttgtagaggggtgggtgcgcacgctctgtccctgcgtgaccttccgaccccgctgtcctcaccgcaatggcggctgtgagggtcctggtggcctcgaggctcgctgcggcatctgcattcacgtccctgtcccccggcggtcggacgccttcccagcgcgcagcccttcacctctccgtgccgcgccccgcggccagggtcgcgctggtgctgtctggatgcggagtctacgatgggaccgagatccacgaggcctcggcgatcctggtgcacctgagccgtggaggggctgaagtccagatctttgctcctgacgtccctcagatgcacgtgattgaccacaccaaggggcagccgtccgaaggcgagagcaggaatgttttgaccgagtctgcgaggatcgcccgtggcaaaatcacagacctggccaacctcagtgcagccaaccatgatgctgccatctttccaggaggctttggagcggctaaaaacctgagcacgtttgccgtggacgggaaagattgcaaggtgaataaagaagtggagcgtgtcctgaaggagttccaccaggccgggaagcccatcggcttgtgctgcattgcacctgtcctcgcggccaaggtgctcagaggcgtcgaggtgactgtgggccacgagcaggaggaaggtggcaagtggccttatgccgggaccgcagaggccatcaaggccctgggtgccaagcactgcgtgaaggaagtggtcgaagctcacgtggaccagaaaaacaaggtggtcacgaccccagccttcatgtgcgagacggcactccactacatccatgatgggatcggagccatggtgaggaaggtgctggaactcactggaaagtgacgcgcatggacggggcccagctaggcgccaggacttggcctcaccctctggctgaggagctgtcggctgctttccatccagctgggagtctggcaggcccttttttttttttctttgccgaaacctgcaggcgttctctctctaaggaggatgtgctgcagtgcatgggggatgtttcttcctgggtgtggctgggctgctctcacatacagaggccgaggggccaattcgttctctgccacagggacttgcctcactgtgtcccaaaaacaaatcgcagccagcttttccagaaatagaaaattctgccgtctgaggttttatacttcaggttagttagtttttggaaggaagaacatttttaggtttgcaagcctcctgatcaggaaaccagaaataccacatttatggaccatgaaaggttggttcttgactctgaagggacttttgagttaatcagcgtaaggggatttctaaagcaggcaatccctgtagccgcagagaataaacgccttcccaaaatggcaacttcccacagccacatttcagacctgctgagactgctgagtgaggaatggcagtgaggtttcttcaattagtctcagttctcttaattttcaggaagaaagggaaattgcagcccctcagcccccaggattgacctctggggagtgatggtagcgttggtgccaggccgtgggttcaggtgtggcagaagcttgcagatgcgtccgaagggaaataaagtgtgttggcgttagactttgtgctgca

SEQ ID NO: 148438 - DNA, 807 bp, Artificial Sequence
  derived and/or modified sequence
atggccgccgtgagagtgctggtggccagcagactggccgccgccagcgccttcaccagcctgagccccggcggcagaacccccagccagagagccgccctgcacctgagcgtgcccagacccgccgccagagtggccctggtgctgagcggctgcggcgtgtacgacggcaccgagatccacgaggccagcgccatcctggtgcacctgagcagaggcggcgccgaggtgcagatcttcgcccccgacgtgccccagatgcacgtgatcgaccacaccaagggccagcccagcgagggcgagagcagaaacgtgctgaccgagagcgccagaatcgccagaggcaagatcaccgacctggccaacctgagcgccgccaaccacgacgccgccatcttccccggcggcttcggcgccgccaagaacctgagcaccttcgccgtggacggcaaggactgcaaggtgaacaaggaggtggagagagtgctgaaggagttccaccaggccggcaagcccatcggcctgtgctgcatcgcccccgtgctggccgccaaggtgctgagaggcgtggaggtgaccgtgggccacgagcaggaggagggcggcaagtggccctacgccggcaccgccgaggccatcaaggccctgggcgccaagcactgcgtgaaggaggtggtggaggcccacgtggaccagaagaacaaggtggtgaccacccccgccttcatgtgcgagaccgccctgcactacatccacgacggcatcggcgccatggtgagaaaggtgctggagctgaccggcaagtag

SEQ ID NO: 148439 - protein, 253 aa, Artificial Sequence
  derived and/or modified sequence
MKHINLSFAACGFLGIYHLGAASALCRHGKKLVKDVKAFAGASAGSLVASVLLTAPEKIEECNQFTYKFAEEIRRQSFGAVTPGYDFMARLRSGMESILPPSAHELAQNRLHVSITNAKTRENHLVSTFSSREDLIKVLLASSFVPIYAGLKLVEYKGQKWVDGGLTNALPILPVGRTVTISPFSGRLDISPQDKGQLDLYVNIAKQDIMLSLANLVRLNQALFPPSKRKMESLYQCGFDDTVKFLLKENWFE

SEQ ID NO: 148440 - protein, 190 aa, Artificial Sequence
  derived and/or modified sequence
MKHINLSFAACGFLGIYHLGAASALCRHGKKLVKDVKAFAGASAGSLVASVLLTAPEKIEECNQFTYKFAEEIRRQSFGAVTPGYDFMARLRSGMESILPPSAHELAQNRLHVSITNAKTRENHLVSTFSSREDLIKVLLASSFVPIYAGLKLVEYKGQKWVDGGLTNALPILPVGRTVTISPFSGRLDI

SEQ ID NO: 148441 - protein, 166 aa, Artificial Sequence
  derived and/or modified sequence
MARLRSGMESILPPSAHELAQNRLHVSITNAKTRENHLVSTFSSREDLIKVLLASSFVPIYAGLKLVEYKGQKWVDGGLTNALPILPVGRTVTISPFSGRLDISPQDKGQLDLYVNIAKQDIMLSLANLVRLNQALFPPSKRKMESLYQCGFDDTVKFLLKENWFE

SEQ ID NO: 148442 - DNA, 762 bp, Artificial Sequence
  derived and/or modified sequence
atgaagcacatcaacctgagcttcgccgcctgcggcttcctgggcatctaccacctgggcgccgccagcgccctgtgcagacacggcaagaagctggtgaaggacgtgaaggccttcgccggcgccagcgccggcagcctggtggccagcgtgctgctgaccgcccccgagaagatcgaggagtgcaaccagttcacctacaagttcgccgaggagatcagaagacagagcttcggcgccgtgacccccggctacgacttcatggccagactgagaagcggcatggagagcatcctgccccccagcgcccacgagctggcccagaacagactgcacgtgagcatcaccaacgccaagaccagagagaaccacctggtgagcaccttcagcagcagagaggacctgatcaaggtgctgctggccagcagcttcgtgcccatctacgccggcctgaagctggtggagtacaagggccagaagtgggtggacggcggcctgaccaacgccctgcccatcctgcccgtgggcagaaccgtgaccatcagccccttcagcggcagactggacatcagcccccaggacaagggccagctggacctgtacgtgaacatcgccaagcaggacatcatgctgagcctggccaacctggtgagactgaaccaggccctgttcccccccagcaagagaaagatggagagcctgtaccagtgcggcttcgacgacaccgtgaagttcctgctgaaggagaactggttcgagtag

SEQ ID NO: 148443 - DNA, 573 bp, Artificial Sequence
  derived and/or modified sequence
atgaagcacatcaacctgagcttcgccgcctgcggcttcctgggcatctaccacctgggcgccgccagcgccctgtgcagacacggcaagaagctggtgaaggacgtgaaggccttcgccggcgccagcgccggcagcctggtggccagcgtgctgctgaccgcccccgagaagatcgaggagtgcaaccagttcacctacaagttcgccgaggagatcagaagacagagcttcggcgccgtgacccccggctacgacttcatggccagactgagaagcggcatggagagcatcctgccccccagcgcccacgagctggcccagaacagactgcacgtgagcatcaccaacgccaagaccagagagaaccacctggtgagcaccttcagcagcagagaggacctgatcaaggtgctgctggccagcagcttcgtgcccatctacgccggcctgaagctggtggagtacaagggccagaagtgggtggacggcggcctgaccaacgccctgcccatcctgcccgtgggcagaaccgtgaccatcagccccttcagcggcagactggacatctag

SEQ ID NO: 148444 - DNA, 762 bp, Artificial Sequence
  derived and/or modified sequence
atgaagcacattaatctctcctttgcggcttgtggttttttaggcatttaccacctgggagccgcatcagctctctgcagacacggaaaaaagctggttaaggacgtcaaagctttcgccggagcttccgctggcagtctagtggcctccgtgctgctaacagcccccgagaagattgaagagtgcaaccagtttacttataagttcgccgaggaaataagacggcagagctttggcgcagtaaccccagggtatgattttatggcaaggctacggtcaggcatggaatccatactgcctccgtcagcccacgagctggcgcagaatcgacttcatgtgtctataactaacgctaagactcgagaaaaccatctggtgagcaccttctcttcgagagaagatctcattaaagtgttactggcttcaagctttgttcctatttatgcaggactgaaactcgtggagtacaagggccaaaaatgggtcgatggagggttgacaaacgccctgcccatcctgcccgttggcaggaccgttacgatttcacccttttctggacgcctcgacatttccccacaggacaagggtcagctggacctttatgtgaatatcgcgaagcaggatattatgttgtcgctggccaatctggtgagactgaatcaagccctgtttcctcccagcaaacgcaaaatggagtctctgtatcaatgtggtttcgatgacacagtgaaattcttgctgaaggaaaattggtttgaatag

SEQ ID NO: 148445 - DNA, 573 bp, Artificial Sequence
  derived and/or modified sequence
atgaagcacatcaatctgtcattcgctgcctgcgggttcctaggcatctaccatctcggcgccgcaagcgctctatgccgacacggcaagaagctggtcaaggatgttaaagcattcgcaggggcgagcgcaggcagcctcgtagcaagcgtcctgttgacagccccagaaaagatcgaggagtgcaatcagtttacgtacaagttcgccgaagaaattcgtagacagtctttcggcgccgtgactcctggatatgatttcatggccagattgcgttccggtatggagtccattttgccaccaagtgcacatgagctggcccagaaccgattgcatgtgagcatcaccaatgcaaaaactagggagaaccacctcgtcagcacattttcctctcgggaggatctcattaaggtcttattagcctcctcattcgtgcctatctatgcgggactcaagctggttgagtataaagggcagaagtgggtcgacgggggcctcaccaatgctcttccaatcttgcccgtgggaagaaccgtcacaatatctccattctccggccgcttggatatctag

SEQ ID NO: 148446 - DNA, 762 bp, Artificial Sequence
  derived and/or modified sequence
atgaaacatattaacttgagtttcgctgcctgtggcttcctcgggatttaccacctgggcgctgcgagcgcgttgtgcaggcacggcaagaaattggtgaaggatgtgaaggcttttgctggagcttccgcgggttcactggtagcaagcgtccttctcactgcaccggagaagatcgaagaatgcaaccagtttacctacaagttcgctgaggagatacggcgacagtctttcggcgccgtgactcccggctatgacttcatggcaaggttgaggagcgggatggagagcatccttccccctagtgctcacgaacttgctcagaataggctgcacgtgtccatcacaaacgctaaaactcgtgaaaaccatctcgtttcaactttttcatcgagggaggacttgattaaagtgttgctggcttcctcttttgtaccgatctacgcaggtttaaaactggtggagtacaaaggccagaagtgggtcgacggcggcttgacgaatgctctccctattctgcccgtgggaaggacggtcacgatctcgcccttttccgggcgactcgatatcagccctcaggacaagggacaattagacctctatgtaaacatcgctaaacaagatattatgctgtcccttgcaaacctggtcaggcttaatcaagctctgttccctccctcgaaacggaagatggagagcctgtaccagtgcggatttgacgacaccgttaaattcctcctgaaagagaattggtttgaatag

SEQ ID NO: 148447 - DNA, 762 bp, Artificial Sequence
  derived and/or modified sequence
atgaagcacatcaacctgagctttgctgcctgtggcttcctgggcatctaccacctgggcgccgccagcgccctgtgccgccacggcaagaagctggtgaaggatgtgaaggcctttgctggggccagcgctggcagcctggtggcctctgtgctgctgacagcccctgagaagattgaggagtgcaaccagttcacctacaagtttgctgaggagatccggcggcagagctttggagctgtgaccccaggctatgacttcatggcccggctgcggagcggcatggagagcatcctgccccccagcgcccacgagctggcccagaaccggctgcacgtgtccatcaccaatgccaagacccgggagaaccacctggtgtccaccttcagcagcagagaagatctcatcaaggtgctgctggccagcagctttgtgcccatctatgccggcctgaagctggtggagtacaagggccagaagtgggtggatggcggcctgaccaatgccctgcccatcctgcctgtgggccgcacagtgaccatcagccccttcagcggccgcctggacatcagcccccaggacaagggccagctggacctgtatgtgaacatcgccaagcaggacatcatgctgagcctggccaacctggtgcggctgaaccaggccctcttcccccccagcaagaggaagatggagagcctgtaccagtgtggctttgatgacacagtgaagttcctgctgaaggagaactggtttgaatag

SEQ ID NO: 148448 - DNA, 573 bp, Artificial Sequence
  derived and/or modified sequence
atgaagcacatcaacctgagctttgctgcctgtggcttcctgggcatctaccacctgggcgccgccagcgccctgtgccgccacggcaagaagctggtgaaggatgtgaaggcctttgctggggccagcgctggcagcctggtggcctctgtgctgctgacagcccctgagaagattgaggagtgcaaccagttcacctacaagtttgctgaggagatccggcggcagagctttggagctgtgaccccaggctatgacttcatggcccggctgcggagcggcatggagagcatcctgccccccagcgcccacgagctggcccagaaccggctgcacgtgtccatcaccaatgccaagacccgggagaaccacctggtgtccaccttcagcagcagagaagatctcatcaaggtgctgctggccagcagctttgtgcccatctatgccggcctgaagctggtggagtacaagggccagaagtgggtggatggcggcctgaccaatgccctgcccatcctgcctgtgggccgcacagtgaccatcagccccttcagcggccgcctggacatctag

SEQ ID NO: 148449 - DNA, 762 bp, Artificial Sequence
  derived and/or modified sequence
atgaagcacatcaacctgagcttcgccgcctgcggcttcctgggcatttaccatttaggcgcagccagcgccctttgccgtcatggaaaaaagctagtcaaagacgttaaggctttcgctggcgcctctgcggggtctctcgtggcctccgtcttactcacagctcctgagaaaattgaagagtgtaatcagttcacatacaaattcgccgaagaaatcaggcgacagtcgttcggcgcggtgacccccggatacgacttcatggccagattgcgcagcggtatggaatccattctcccccctagcgctcatgagctggcccagaatcgcctccacgtttcaatcacaaatgctaaaaccagggagaatcacttggttagtaccttttcttcaagagaggacctgattaaggttctgctggcgtccagtttcgtgcctatatatgcaggattgaagttggtagagtataagggacagaaatgggtagacggcggactcacgaacgcccttcctatcctccccgtgggtcgcactgtgaccatctcccccttttcaggcagactggacatcagcccacaggataagggacagctcgatctttatgttaacatagctaaacaagacatcatgctgtcactagcaaatttggtgcgccttaaccaagcgctatttcctccctccaaacgcaaaatggaaagcttataccaatgcggctttgacgacactgtcaagtttctgctgaaggagaattggttcgaatag

SEQ ID NO: 148450 - DNA, 573 bp, Artificial Sequence
  derived and/or modified sequence
atgaagcacatcaacctgagcttcgccgcctgcggcttcctgggcatttaccacctaggggctgccagcgccctgtgcaggcacggcaaaaaactggtcaaggacgttaaggcatttgccggggcctccgcaggcagcctggtggcaagcgtgctgttaacagcccctgaaaaaatcgaggagtgtaaccaattcacctataagtttgctgaagagatccgtagacaatcctttggggccgtaacccccggttatgatttcatggcgaggttgcgcagtggcatggagtccattttgcccccttcagcccacgagttagcccagaacaggttgcacgtgtcaatcacgaacgccaagacaagagagaatcatttggtatctaccttttcttccagggaggacctgataaaagtgctgttagcctcttcgttcgtgcccatctatgcaggccttaaactagtggaatacaaaggccagaagtgggtcgacgggggcctaacaaatgctttaccaatactgccagtgggcagaaccgtcactatctctccattcagtggcaggctggacatctag

SEQ ID NO: 148451 - DNA, 762 bp, Artificial Sequence
  derived and/or modified sequence
atgaagcacatcaacctgagcttcgccgcctgcggcttcctgggcatttatcatctgggcgctgcctcagcactttgtagacacggcaagaagctagttaaagatgtgaaagcattcgccggggcgtccgctggcagcttagtggcatcagtcttacttacagcaccagaaaagatcgaggaatgcaatcaattcacctataagtttgctgaagagattcggcggcaatctttcggagcggtgaccccgggctacgattttatggctcgcctacgttcaggaatggaaagcatccttccgccctcggctcacgagctggcccagaatagacttcatgtctcaataactaatgccaaaacccgcgagaaccacctcgtcagcacctttagttcacgtgaagacctgattaaggtgctgttagctagtagctttgtccccatctatgctggcctcaagctcgtggagtataaaggtcagaaatgggttgatggaggacttaccaacgcactgccaattctaccagtcggccgcacagtcacaatatcccccttttctggccgcctggacatatctccacaggacaaggggcagctggacctgtatgttaacatcgccaagcaggatataatgttgtcactagcgaaccttgttcgcttgaatcaagctctgttccctcctagcaaaagaaagatggagtccttgtaccagtgtggattcgatgatacagtgaaatttctgctaaaagagaattggttcgaatag

SEQ ID NO: 148452 - DNA, 3372 bp, Artificial Sequence
  derived and/or modified sequence
gcgggaggcggtaccaacccctgccgcaggactttcctgggccggctcgcggagagcgtagcgcggccttggtggcggaatggcgttgagtgacggcccggccccgccatctggttaaagggactcgttcaacacggaagtgtcccggggctgcattgtgctacagctagaatgaagcacatcaacctatcatttgcagcgtgtggatttctgggcatttaccacttgggggcagcatctgcactttgcagacatggcaaaaaacttgtgaaggatgtcaaagccttcgctggggcgtctgcgggatcgttggttgcttctgttctgctaacagcaccagaaaaaatagaggaatgtaaccaatttacctacaagtttgccgaagaaatcagaaggcagtctttcggggcagtaacgcccggttatgacttcatggcccgactaagaagtgggatggagtcgattcttcctcccagcgctcacgagctggcccagaaccgactgcacgtatccatcaccaacgccaaaaccagagaaaatcacttagtctccactttttcctccagggaggacctcattaaggtcctcctagccagcagttttgtgcccatttatgcaggactgaagctagtggaatacaaagggcagaagtgggtggacggaggcctcaccaacgctcttcccatcctgcccgtcggccggacagtaaccatctcccccttcagtggacgactggacatctccccgcaggacaaagggcagctagatctgtatgttaatatcgccaagcaggatatcatgttgtccctggcaaacctggtgagactcaaccaagccctttttcccccaagcaagaggaaaatggaatctttgtatcagtgtggttttgatgacactgttaagtttttacttaaagaaaattggtttgaataaaatgcataaaagtttataatgcaaaacacgttttagatagtttttgatggaagtttctaatcaaatcctttttagaaaatctatcatgactcaattgtattactccttgtaatatttgtgtttatttttaatatttgaattattacttagcacatggatataagaggcactttattagaatttgacaacgtcattaagaaggatacacttaggtgataaggaatcatttttggtgaactgttgtgtcctttaaaaaatggaggaggataggttctttgggtaaattgaggaacatggaaaatggagggccaccacttaggttccatggagaatatgtggcatgatcttgacgtgaagcatgggtgtttccgtgacttagctgtgtccctgtagctctggaactgaaggaactaggtaggagaggaaggatttgagaaataggcaactcatggttaaagacctttgatcaggactggaggaacaaaggtttgtgtattagtccattttcacactgctgagaaagacatacccaagactgggcaatttacaaaagaaaggtttaatgggctcacagttccacatgactgaggaggcctcacaattgtggtggaaggtgaaaggcatgtctcacatggcagcagacaagagaagaaaacttgtgcagggaaactcccctttataaaaccatcggatctcttgagactcgttcactatcatgagaatagcatgggaaagacctgcctccatgattcagttacctcccactgggtccctcccacaacgtgtggcaattgtgggagctacatacacttcaagatgagatttgggtggggacacagccaaaccataacagtttgctttccacaggtgtgtgcagttgctcccagtgcagttaggggcagatatccagaagcctaggagattttgaagaggcttatcccctctcatcttcctcccctaaaccccaccccagtttaggagattatcaagctggttgtcattcattctctctctctctctctctctctctctctctctctctctctctctctctctctcgccatacctctctgagtatttagctattgttctatatactggatacatctattatgggaacttaaatagataaaatactactaaacacaaagaaccaagtagcctagtaaataagaattaaatccagaataatcattcacttctcatttttaaatcacgttgtactgatcccaggttttttactttctgagtagttgtccatcactttgaggacttgtgtatgggcttgtaccaatttactgacactgtcttaaatcctaaatctgtttttatgaggttttgccaagcaagaactcttgattactaagaggcagttagagacaaaccaatttaattccatgtcttcaattgtcacgcatttcttcttttactctttgaaactattctttgagtcaattttatggttctcagaagccaaaatacacaacttttagcacataaacaccaacgatggcctctttttgaggagttatgcatagacccactctagagtaatgatggtccctgtggtatatactttctcctactctagcaaacatgtagtttaatcttaatgtgttgtttccataagtgacatgaagtggatagattctcaattgttatgtccacttattcactaggtaaattttcagttttaatacttttctccttaccccttcctttgatcatttcatgtgaatattctatttgtatgatacactgtatttcaataaattccttgttgatgtacccttaaattgaagaaatttaagctgcaaaaccaaatctcattgtataagacttttttgaagtatcttgtatcgactacatatgtatttgaccctgtgggaggatggtacttttctttttaacttttattttaagttcaggggtacgtgtacaggtttgttataggtaaacttgtgtcacgggggtttgttgtaaagattaatttatcacccaggtgttggtacttttctttaaaaatactgtaagatcattgacgtatcagtctgcagcaactttcctacatgaggggaatacagcggtgtaatgaaacacatacttggtgcacactaggcgctctccggggctggtgcaccaaattctcctgtgagcatgctaccaagcatgctctgcttacctttgctggagtgtgtgctcatgcagccatactaattgaaaacaggcattcacaacaggatctgcctcacttgtgggatcaaaattttgaggcattgtagaactggcatatagaaaatctgaaaggagtttctgacccagatactgatatgtttgcagggtaattactgtgattggcagcttgataaattcccaattccctgtgggggcaatttccttatatatttgaatctgtcattaaaaatgtcattagtcttc

SEQ ID NO: 148453 - DNA, 652 bp, Artificial Sequence
  derived and/or modified sequence
agacgcgaagagggtaaggcacttccggggcacagaaaatgaggattattaaaggtcagttgctcgcagtgctacagctagaatgaagcacatcaacctatcatttgcagcgtgtggatttctgggcatttaccacttgggggcagcatctgcactttgcagacatggcaaaaaacttgtgaaggatgtcaaagccttcgctggggcgtctgcgggatcgttggttgcttctgttctgctaacagcaccagaaaaaatagaggaatgtaaccaatttacctacaagtttgccgaagaaatcagaaggcagtctttcggggcagtaacgcccggttatgacttcatggcccgactaagaagtgggatggagtcgattcttcctcccagcgctcacgagctggcccagaaccgactgcacgtatccatcaccaacgccaaaaccagagaaaatcacttagtctccactttttcctccagggaggacctcattaaggtcctcctagccagcagttttgtgcccatttatgcaggactgaagctagtggaatacaaagggcagaagtgggtggacggaggcctcaccaacgctcttcccatcctgcccgtcggccggacagtaaccatctcccccttcagtggacgactggacatc

SEQ ID NO: 148454 - DNA, 2752 bp, Artificial Sequence
  derived and/or modified sequence
agacgcgaagagggtaaggcacttccggggcacagaaaatgaggattattaaagtgctacagctagaatgaagcacatcaacctatcatttgcagcgtgtggatttctgggcatttaccacttgggggcagcatctgcactttgcagacatggcaaaaaacttgtgaaggatgtcaaagccttcgctggggcgtctgcgggatcgttggttgcttctgttctgctaacagcaccagaaaaaatagaggaatgtaaccaatttacctacaagtttgccgaagaaatcagaaggcagtctttcggggcagtaacgcccggttatgacttcatggcccgactaagaagtgggatggagtcgattcttcctcccagcgctcacgagctggcccagaaccgactgcacgtatccatcaccaacgccaaaaccagagaaaatcacttagtctccactttttcctccagggaggacctcattaaggtcctcctagccagcagttttgtgcccatttatgcaggactgaagctagtggaatacaaagggcagaagtgggtggacggaggcctcaccaacgctcttcccatcctgcccgtcggccggacagtaaccatctcccccttcagtggacgactggacatctccccgcaggacaaagggcagctagatctgtatgttaatatcgccaagcaggatatcatgttgtccctggcaaacctggtgagactcaaccaagccctttttcccccaagcaagaggaaaatggaatctttgtatcagtgtggttttgatgacactgttaagtttttacttaaagaaaattggtttgaataaaatgcataaaagtttataatgcaaaacacgttttagatagtttttgatggaagtttctaatcaaatcctttttagaaaatctatcatgactcaattgtattactccttgtaatatttgtgtttatttttaatatttgaattattacttagcacatggatataagaggcactttattagaatttgacaacgtcattaagaaggatacacttaggtgataaggaatcatttttggtgaactgttgtgtcctttaaaaaatggaggaggataggttctttgggtaaattgaggaacatggaaaatggagggccaccacttaggttccatggagaatatgtggcatgatcttgacgtgaagcatgggtgtttccgtgacttagctgtgtccctgtagctctggaactgaaggaactaggtaggagaggaaggatttgagaaataggcaactcatggttaaagacctttgatcaggactggaggaacaaaggtttgtgtattagtccattttcacactgctgagaaagacatacccaagactgggcaatttacaaaagaaaggtttaatgggctcacagttccacatgactgaggaggcctcacaattgtggtggaaggtgaaaggcatgtctcacatggcagcagacaagagaagaaaacttgtgcagggaaactcccctttataaaaccatcggatctcttgagactcgttcactatcatgagaatagcatgggaaagacctgcctccatgattcagttacctcccactgggtccctcccacaacgtgtggcaattgtgggagctacatacacttcaagatgagatttgggtggggacacagccaaaccataacagtttgctttccacaggtgtgtgcagttgctcccagtgcagttaggggcagatatccagaagcctaggagattttgaagaggcttatcccctctcatcttcctcccctaaaccccaccccagtttaggagattatcaagctggttgtcattcattctctctctctctctctctctctctctctctctctctctctctctctctctctcgccatacctctctgagtatttagctattgttctatatactggatacatctattatgggaacttaaatagataaaatactactaaacacaaagaaccaagtagcctagtaaataagaattaaatccagaataatcattcacttctcatttttaaatcacgttgtactgatcccaggttttttactttctgagtagttgtccatcactttgaggacttgtgtatgggcttgtaccaatttactgacactgtcttaaatcctaaatctgtttttatgaggttttgccaagcaagaactcttgattactaagaggcagttagagacaaaccaatttaattccatgtcttcaattgtcacgcatttcttcttttactctttgaaactattctttgagtcaattttatggttctcagaagccaaaatacacaacttttagcacataaacaccaacgatggcctctttttgaggagttatgcatagacccactctagagtaatgatggtccctgtggtatatactttctcctactctagcaaacatgtagtttaatcttaatgtgttgtttccataagtgacatgaagtggatagattctcaattgttatgtccacttattcactaggtaaattttcagttttaatacttttctccttaccccttcctttgatcatttcatgtgaatattctatttgtatgatacactgtatttcaataaattccttgttgatgtacccttaaattgaagaaatttaagctgcaaaaccaaatctcattgtataagacttttttgaagtatcttgtatcgactacatatgtatttgaccctgtgggaggatggtacttttctttttaacttttattttaag

SEQ ID NO: 148455 - DNA, 2559 bp, Artificial Sequence
  derived and/or modified sequence
agacgcgaagagggtaaggcacttccggggcacagaaaatgaggattattaaaggaatgtaaccaatttacctacaagtttgccgaagaaatcagaaggcagtctttcggggcagtaacgcccggttatgacttcatggcccgactaagaagtgggatggagtcgattcttcctcccagcgctcacgagctggcccagaaccgactgcacgtatccatcaccaacgccaaaaccagagaaaatcacttagtctccactttttcctccagggaggacctcattaaggtcctcctagccagcagttttgtgcccatttatgcaggactgaagctagtggaatacaaagggcagaagtgggtggacggaggcctcaccaacgctcttcccatcctgcccgtcggccggacagtaaccatctcccccttcagtggacgactggacatctccccgcaggacaaagggcagctagatctgtatgttaatatcgccaagcaggatatcatgttgtccctggcaaacctggtgagactcaaccaagccctttttcccccaagcaagaggaaaatggaatctttgtatcagtgtggttttgatgacactgttaagtttttacttaaagaaaattggtttgaataaaatgcataaaagtttataatgcaaaacacgttttagatagtttttgatggaagtttctaatcaaatcctttttagaaaatctatcatgactcaattgtattactccttgtaatatttgtgtttatttttaatatttgaattattacttagcacatggatataagaggcactttattagaatttgacaacgtcattaagaaggatacacttaggtgataaggaatcatttttggtgaactgttgtgtcctttaaaaaatggaggaggataggttctttgggtaaattgaggaacatggaaaatggagggccaccacttaggttccatggagaatatgtggcatgatcttgacgtgaagcatgggtgtttccgtgacttagctgtgtccctgtagctctggaactgaaggaactaggtaggagaggaaggatttgagaaataggcaactcatggttaaagacctttgatcaggactggaggaacaaaggtttgtgtattagtccattttcacactgctgagaaagacatacccaagactgggcaatttacaaaagaaaggtttaatgggctcacagttccacatgactgaggaggcctcacaattgtggtggaaggtgaaaggcatgtctcacatggcagcagacaagagaagaaaacttgtgcagggaaactcccctttataaaaccatcggatctcttgagactcgttcactatcatgagaatagcatgggaaagacctgcctccatgattcagttacctcccactgggtccctcccacaacgtgtggcaattgtgggagctacatacacttcaagatgagatttgggtggggacacagccaaaccataacagtttgctttccacaggtgtgtgcagttgctcccagtgcagttaggggcagatatccagaagcctaggagattttgaagaggcttatcccctctcatcttcctcccctaaaccccaccccagtttaggagattatcaagctggttgtcattcattctctctctctctctctctctctctctctctctctctctctctctctctctctcgccatacctctctgagtatttagctattgttctatatactggatacatctattatgggaacttaaatagataaaatactactaaacacaaagaaccaagtagcctagtaaataagaattaaatccagaataatcattcacttctcatttttaaatcacgttgtactgatcccaggttttttactttctgagtagttgtccatcactttgaggacttgtgtatgggcttgtaccaatttactgacactgtcttaaatcctaaatctgtttttatgaggttttgccaagcaagaactcttgattactaagaggcagttagagacaaaccaatttaattccatgtcttcaattgtcacgcatttcttcttttactctttgaaactattctttgagtcaattttatggttctcagaagccaaaatacacaacttttagcacataaacaccaacgatggcctctttttgaggagttatgcatagacccactctagagtaatgatggtccctgtggtatatactttctcctactctagcaaacatgtagtttaatcttaatgtgttgtttccataagtgacatgaagtggatagattctcaattgttatgtccacttattcactaggtaaattttcagttttaatacttttctccttaccccttcctttgatcatttcatgtgaatattctatttgtatgatacactgtatttcaataaattccttgttgatgtacccttaaattgaagaaatttaagctgcaaaaccaaatctcattgtataagacttttttgaagtatcttgtatcgactacatatgtatttgaccctgtgggaggatggtacttttctttttaacttttattttaag

SEQ ID NO: 148456 - DNA, 762 bp, Artificial Sequence
  derived and/or modified sequence
atgaagcacataaatctatctttcgccgcttgcggcttcttgggcatctatcatctgggcgctgcctctgctctgtgtcggcacgggaaaaaactggtgaaggatgtcaaggccttcgccggtgccagcgccggatctcttgtggccagcgtgttactgaccgctcctgagaaaatcgaagagtgcaatcagttcacatataagttcgctgaagagattaggcggcagtcttttggcgctgtgacacctggttacgattttatggccagactgcgctcgggcatggaaagtattctcccacccagtgcacacgagttggcccagaacaggctacacgtgtctatcaccaacgctaaaactcgggagaatcacctggtttccacatttagctcccgggaggatctcatcaaggtgctgctcgccagctcattcgtcccgatatacgcaggcttaaaacttgtggaatacaaagggcagaagtgggtggatgggggattaacaaatgctttaccaattctaccagtgggacgcacagtaactatttccccatttagtgggagactcgatatatccccccaggacaaggggcagctcgacctgtacgtgaacattgccaagcaggacatcatgttatccctggctaatttggtgcggctgaaccaagccctcttcccacctagcaagcgaaaaatggaaagtctgtaccaatgtggctttgacgatactgtgaaatttctgctcaaggagaattggtttgaatag

SEQ ID NO: 148457 - DNA, 573 bp, Artificial Sequence
  derived and/or modified sequence
atgaaacacatcaatttgagtttcgcagcatgtggcttcttggggatctatcacctgggggctgctagcgctctttgtcgccatggaaaaaaactggtcaaagacgtgaaagcattcgcaggtgctagcgccggatcccttgtggcctccgttctcttgacagcgccagaaaaaattgaggagtgtaaccaattcacttacaaatttgccgaggagattcggaggcagagtttcggcgcagtgactcccggatacgacttcatggccaggctgaggtctggcatggagtccatactcccgcctagtgctcacgagctggcccagaatcgcctgcacgtgagtattaccaacgcgaagacgcgcgagaaccacctcgtctctaccttctcttctagggaggatctgatcaaagttctactggccagctcattcgtccctatctatgccggtctgaaactggtcgaatacaagggccaaaaatgggtggacggcggtttgacgaacgctttgcccatactccctgttggaaggactgtcaccattagtcccttttccggcagacttgatatttag

SEQ ID NO: 148458 - DNA, 762 bp, Artificial Sequence
  derived and/or modified sequence
atgaagcatatcaatctttcctttgcagcctgtggttttctcggcatatatcatctgggtgccgctagcgctttatgcagacacggcaagaagctggtcaaggacgtcaaggcattcgccggtgcatccgcaggaagcctggtggccagtgtcctgctgaccgccccagaaaaaattgaagagtgcaatcagtttacttacaaattcgctgaagaaatcaggagacaatccttcggagcggtaacccccggatacgatttcatggcgcgactgcgctccggaatggagtctatcctacctccgagcgctcacgaactcgcacagaacagacttcacgtcagcattacaaacgcaaaaacccgagaaaaccacctcgtgtccacattcagtagtcgggaagacctaatcaaagtgctccttgctagtagtttcgtgccaatctatgcaggtcttaaattggtcgaatataaaggccagaaatgggtggatggaggattgacgaatgcactgccaattctacctgtcggacgaactgtcactatcagccctttcagcggaaggttggatatctccccccaggataagggacaacttgatctgtacgtgaatattgcgaaacaggacatcatgctgagtctcgcaaatctcgtgaggctgaaccaagcactgtttccgccatcgaagcggaagatggagagtttatatcagtgcggatttgacgacacagtaaaattcctgttgaaggagaactggtttgagtag

SEQ ID NO: 148459 - protein, 963 aa, Artificial Sequence
  derived and/or modified sequence
MAVAPRLFGGLCFRFRDQNPEVAVEGRLPISHSCVGCRRERTAMATVAANPAAAAAAVAAAAAVTEDREPQHEELPGLDSQWRQIENGESGRERPLRAGESWFLVEKHWYKQWEAYVQGGDQDSSTFPGCINNATLFQDEINWRLKEGLVEGEDYVLLPAAAWHYLVSWYGLEHGQPPIERKVIELPNIQKVEVYPVELLLVRHNDLGKSHTVQFSHTDSIGLVLRTARERFLVEPQEDTRLWAKNSEGSLDRLYDTHITVLDAALETGQLIIMETRKKDGTWPSAQLHVMNNNMSEEDEDFKGQPGICGLTNLGNTCFMNSALQCLSNVPQLTEYFLNNCYLEELNFRNPLGMKGEIAEAYADLVKQAWSGHHRSIVPHVFKNKVGHFASQFLGYQQHDSQELLSFLLDGLHEDLNRVKKKEYVELCDAAGRPDQEVAQEAWQNHKRRNDSVIVDTFHGLFKSTLVCPDCGNVSVTFDPFCYLSVPLPISHKRVLEVFFIPMDPRRKPEQHRLVVPKKGKISDLCVALSKHTGISPERMMVADVFSHRFYKLYQLEEPLSSILDRDDIFVYEVSGRIEAIEGSREDIVVPVYLRERTPARDYNNSYYGLMLFGHPLLVSVPRDRFTWEGLYNVLMYRLSRYVTKPNSDDEDDGDEKEDDEEDKDDVPGPSTGGSLRDPEPEQAGPSSGVTNRCPFLLDNCLGTSQWPPRRRRKQLFTLQTVNSNGTSDRTTSPEEVHAQPYIAIDWEPEMKKRYYDEVEAEGYVKHDCVGYVMKKAPVRLQECIELFTTVETLEKENPWYCPSCKQHQLATKKLDLWMLPEILIIHLKRFSYTKFSREKLDTLVEFPIRDLDFSEFVIQPQNESNPELYKYDLIAVSNHYGGMRDGHYTTFACNKDSGQWHYFDDNSVSPVNENQIESKAAYVLFYQRQDVARRLLSPAGSSGAPASPACSSPPSSEFMDVN

SEQ ID NO: 148460 - protein, 920 aa, Artificial Sequence
  derived and/or modified sequence
MATVAANPAAAAAAVAAAAAVTEDREPQHEELPGLDSQWRQIENGESGRERPLRAGESWFLVEKHWYKQWEAYVQGGDQDSSTFPGCINNATLFQDEINWRLKEGLVEGEDYVLLPAAAWHYLVSWYGLEHGQPPIERKVIELPNIQKVEVYPVELLLVRHNDLGKSHTVQFSHTDSIGLVLRTARERFLVEPQEDTRLWAKNSEGSLDRLYDTHITVLDAALETGQLIIMETRKKDGTWPSAQLHVMNNNMSEEDEDFKGQPGICGLTNLGNTCFMNSALQCLSNVPQLTEYFLNNCYLEELNFRNPLGMKGEIAEAYADLVKQAWSGHHRSIVPHVFKNKVGHFASQFLGYQQHDSQELLSFLLDGLHEDLNRVKKKEYVELCDAAGRPDQEVAQEAWQNHKRRNDSVIVDTFHGLFKSTLVCPDCGNVSVTFDPFCYLSVPLPISHKRVLEVFFIPMDPRRKPEQHRLVVPKKGKISDLCVALSKHTGISPERMMVADVFSHRFYKLYQLEEPLSSILDRDDIFVYEVSGRIEAIEGSREDIVVPVYLRERTPARDYNNSYYGLMLFGHPLLVSVPRDRFTWEGLYNVLMYRLSRYVTKPNSDDEDDGDEKEDDEEDKDDVPGPSTGGSLRDPEPEQAGPSSGVTNRCPFLLDNCLGTSQWPPRRRRKQLFTLQTVNSNGTSDRTTSPEEVHAQPYIAIDWEPEMKKRYYDEVEAEGYVKHDCVGYVMKKAPVRLQECIELFTTVETLEKENPWYCPSCKQHQLATKKLDLWMLPEILIIHLKRFSYTKFSREKLDTLVEFPIRDLDFSEFVIQPQNESNPELYKYDLIAVSNHYGGMRDGHYTTFACNKDSGQWHYFDDNSVSPVNENQIESKAAYVLFYQRQDVARRLLSPAGSSGAPASPACSSPPSSEFMDVN

SEQ ID NO: 148461 - DNA, 2892 bp, Artificial Sequence
  derived and/or modified sequence
atggccgtggcgccgcgcttattcggtggtttgtgcttcaggttccgcgaccagaatccagaggtcgcagtcgagggtcgcttgcccatttctcactcttgcgtgggttgccgccgggagcgaacagcgatggctacggtagctgctaacccggcagccgcggccgccgccgtggccgcagcagccgcagtgacggaggatcgggaaccccagcacgaagaacttccaggcctggacagccagtggcgccagattgagaatggtgaaagcgggagagaacgcccgctacgcgctggcgagtcctggttcttggtagagaaacattggtataaacagtgggaggcgtacgtccaaggtggagatcaggattcctcaacattcccagggtgtattaataatgccacgttgttccaagatgagattaattggcgtctcaaggagggcctagtggaaggcgaagattacgtcctgctacctgcagcagcctggcattatctcgttagctggtacggactggagcacgggcagccccctattgaacgaaaagtgatagaacttcctaatattcagaaagtggaagtttaccccgtagaattgctcctagtccgccataacgacctgggcaaatcccacactgtgcagttcagccataccgacagtattgggttggtcctaagaacagcccgcgagcgctttctcgtggagccccaggaagacacccggctgtgggccaagaactctgaagggtcgcttgaccggttgtacgacacacacatcacagtgttagatgctgcactggagaccggtcaactcataattatggagaccaggaagaaagacggcacatggcccagtgcacagttgcatgtcatgaacaataatatgagcgaggaggacgaggacttcaagggtcaacctggcatttgtggcttgactaacctggggaatacctgctttatgaattccgccctgcagtgcctgtctaacgttccacaactgactgagtacttcctaaacaattgctacttagaagagctcaatttccggaacccgctgggaatgaagggcgagattgcagaagcatacgccgacctggttaagcaagcatggtccggccaccacagaagtatcgtacctcacgtttttaagaacaaagtgggccacttcgcaagtcaatttctcggataccagcagcacgatagccaggagttgctgtcattcctgctcgacggtctacacgaagacctcaatagagtcaagaagaaagaatacgtcgaactctgtgacgctgccgggcggccagatcaggaagtggcccaggaggcctggcagaaccataagaggaggaacgactctgttatagtcgatacctttcacggactctttaagtccacattagtatgtccggactgcggcaacgtctccgtgacattcgaccctttctgttatctttcagttcctttgccgattagtcataaacgggttctcgaggtgtttttcattccaatggatccaaggcggaaaccagagcagcacagacttgtggtccccaaaaaggggaaaatttcagatttgtgtgtcgccctcagtaagcacaccgggatttcacccgagaggatgatggtagccgatgtcttctctcataggttctacaaactgtatcagctggaggagcctctcagttccatcctcgacagagatgacatcttcgtgtacgaagtgagcggccgaatcgaagcaattgaggggtcacgtgaggacatagtcgtgcctgtttacctaagggaacggacgcctgcaagagactacaataactcatattacgggttgatgttattcggccatcccctgctggttagcgtccccagagataggttcacgtgggaaggactctataacgtgctgatgtatcggctgtctagatatgtgaccaagccgaattcagatgatgaagacgacggcgacgagaaagaagacgacgaggaagataaagacgatgttcctggcccaagtacgggaggatctctgagggatcccgaacccgaacaggctgggccgagctcaggcgtgacaaacagatgtccgtttctgctcgataactgcctggggacctcccagtggcccccacggcggcggagaaagcaactctttactctccagaccgtgaacagtaatggaacatctgaccgaacaacaagccctgaagaggtccacgctcaaccatatatcgccattgactgggagcccgagatgaagaagcgctactacgacgaggtcgaagctgaaggctatgttaagcacgactgtgtaggctatgtgatgaagaaggctcctgtgcggctccaggagtgtattgaattgtttaccacagtcgaaactctggagaaggagaatccgtggtattgccccagctgtaagcagcatcagcttgcaacaaagaagcttgacttgtggatgctcccggagattctcatcattcacttgaagcggttctcttataccaagttctctagggagaagctcgacacattggtggagttccctatcagggatttagacttctcggaattcgtcatccagcctcagaatgaaagcaacccagagttgtacaaatacgacctgattgccgtttccaatcactacgggggcatgcgggacgggcattacacgacatttgcctgcaacaaggacagcggacagtggcactacttcgatgataattctgtgtctccagtgaacgagaaccaaattgagtccaaggctgcctacgttctgttctaccagcggcaagacgttgctcgacgtctcttatcacctgctgggtctagtggtgcgcccgccagccctgcatgttctagcccccccagtagtgagtttatggatgttaactag

SEQ ID NO: 148462 - DNA, 2892 bp, Artificial Sequence
  derived and/or modified sequence
atggctgtggccccccggctgtttggaggcctgtgcttccgcttccgggaccagaaccctgaggtggccgtggagggccgcctgcccatcagccacagctgtgtgggctgccggcgggagaggacagccatggccaccgtggccgccaacccagctgctgctgctgctgctgtggccgctgctgctgctgtgacagaggaccgggagccccagcacgaggagctgcccggcctggacagccagtggaggcagattgaaaatggagagagcggccgggagcggcccctgcgggccggggagagctggttcctggtggagaagcactggtacaagcagtgggaggcctacgtgcagggcggggaccaggacagcagcaccttccctggctgcatcaacaatgccaccctcttccaggatgagatcaactggaggctgaaggagggcctggtggagggagaagattatgtgctgctgcctgctgctgcctggcactacctggtgtcctggtacggcctggagcacggccagccccccattgaaaggaaggtgattgagctgcccaacatccagaaggtggaggtgtaccctgtggagctgctgctggtgcgccacaatgacctgggcaagagccacacagtgcagttcagccacacagacagcatcggcctggtgctgaggacagcccgggagcgcttcctggtggagccccaggaggacacccggctgtgggccaagaacagcgagggcagcctggaccggctgtatgacacccacatcaccgtgctggatgctgccctggagaccggccagctgatcatcatggagaccaggaagaaggatggcacctggcccagcgcccagctgcacgtgatgaacaacaacatgtctgaggaggatgaggacttcaagggccagcccggcatctgtggcctgaccaacctgggcaacacctgcttcatgaacagcgccctgcagtgcctgagcaatgtgccccagctgacagagtacttcctgaacaactgctacctggaggagctgaacttcaggaaccccctgggcatgaagggggagattgctgaggcctatgctgacctggtgaagcaggcctggagcggccaccacaggagcatcgtgccccacgtgttcaagaacaaggtgggccactttgccagccagttcctgggctaccagcagcacgacagccaggagctgctgtccttcctgctggatggcctgcacgaggacctgaacagagtgaagaagaaggagtatgtggagctgtgtgatgctgctggccgcccagaccaggaggtggcccaggaggcctggcagaaccacaagagaagaaatgacagcgtcatcgtggacaccttccacggcctcttcaagagcaccctggtgtgcccagactgtggaaatgtgtctgtgacctttgaccccttctgctacctgtctgtgcccctgcccatcagccacaagagggtgctggaggtgttcttcatccccatggaccccaggaggaagccagagcagcaccggctggtggtgcccaagaagggcaagatcagtgacctgtgtgtggccctgagcaagcacacaggcatcagccctgagaggatgatggtggctgatgtgttcagccaccgcttctacaagctgtaccagctggaggagcccctgagcagcatcctggacagagatgacatctttgtgtatgaggtgtctggccgcatcgaggccatcgagggcagccgggaggacatcgtggtgcctgtgtacctgcgggagaggaccccagcccgggactacaacaacagctactacggcctgatgctgtttggccaccccctgctggtgtctgtgccccgggaccgcttcacctgggagggcctgtacaacgtgctgatgtaccgcctgagccgctacgtgaccaagcccaacagtgatgatgaagatgatggagatgagaaggaggatgatgaggaggacaaggatgatgtgcccggccccagcactggaggcagcctgcgggaccctgagcctgagcaggccggccccagcagcggcgtgaccaaccgctgccccttcctgctggacaactgcctgggcaccagccagtggccacccaggagaagaaggaagcagctgttcaccctgcagacagtgaacagcaatggcaccagtgacaggaccaccagccctgaggaggtgcacgcccagccctacatcgccatcgactgggagcctgagatgaagaagcgctactatgatgaggtggaggccgagggctacgtgaagcatgactgtgtgggctacgtgatgaagaaggcccctgtgcggctgcaggagtgcatcgagctgttcaccaccgtggagaccctggagaaggagaacccctggtactgccccagctgcaagcagcaccagctggccaccaagaagctggacctgtggatgctgcctgagatcctgatcatccacctgaagcgcttctcctacaccaagttcagccgggagaagctggacaccctggtggagttccccatccgggacctggacttcagcgagtttgtgatccagccccagaatgaaagcaaccctgagctgtacaagtatgacctgattgctgtgagcaaccactatggaggcatgagagatggccactacaccacctttgcctgcaacaaggacagcggccagtggcactactttgatgacaacagcgtgtcccctgtgaatgaaaaccagatcgagagcaaggccgcctacgtgctcttctaccagaggcaggatgtggcccggcggctgctgagccctgctggcagcagcggggccccagccagccctgcctgcagcagcccccccagcagcgagttcatggatgtgaactag

SEQ ID NO: 148463 - DNA, 2892 bp, Artificial Sequence
  derived and/or modified sequence
atggccgtggccccccggctgttcggcggcctgtgcttccggttcagggatcagaacccagaggtcgcggtggaaggccgcctgccgatttcccacagttgcgttggctgtcgccgggaacgtaccgctatggccactgttgcagctaacccagccgccgccgcggccgcagtggcagcggctgcagctgttacagaagatcgcgagccccaacatgaggagctgcccgggctcgattcacagtggcgtcaaattgagaatggcgagtccggtagggaacgaccactgcgcgccggcgaatcttggttcctggtcgaaaaacactggtataaacaatgggaagcatatgttcagggtggcgaccaggatagctctactttccccggatgcatcaacaacgctacgctcttccaggatgagatcaattggcgcctgaaggagggcctggtcgagggggaagattatgttctacttcccgcggcagcatggcactaccttgtctcatggtatgggctggaacacgggcagccccctattgaaaggaaagtgatcgagctgccaaatatccagaaagtggaagtttaccccgtagagctgctattggtccgacacaatgacctgggtaaatctcatactgttcagttctctcacacagattcaatcggactggtgctgcgaacagctagagagaggttcctggtcgaacctcaggaggatacaaggctctgggcaaagaattccgaggggagtctggaccgcctgtacgatactcacatcaccgtcttagacgccgctctcgaaacaggtcaactcatcattatggagacaaggaagaaagacgggacctggccatccgcacagttgcatgtcatgaacaacaacatgtctgaagaggacgaggattttaaggggcagcccggcatatgcgggttaactaatttaggcaatacgtgtttcatgaattctgcactgcagtgcctctcaaatgtaccccagctgactgagtacttcttgaacaattgttatttagaagaactaaatttccgaaaccccctcggcatgaagggcgaaattgccgaagcatacgccgaccttgttaaacaggcgtggtctggacatcatcgatcaattgtgcctcatgtttttaagaataaagttggccacttcgcctcccagtttctcgggtatcagcaacatgactcccaggagctgctgtcattcctgttggacgggctccacgaagatctcaaccgggtaaagaagaaagaatatgtagaattatgcgacgcagctggaagacccgatcaggaagtggctcaagaagcatggcagaatcacaagaggagaaacgattcagtcatcgttgatacttttcacggtttattcaaaagtacgttggtgtgtccggactgtgggaatgtgtcagtcacattcgatcccttctgctatttatctgtacctctacctatcagccacaaacgggtactggaagtgttttttatacccatggacccacgaagaaagcccgagcagcatcgccttgttgtcccgaagaaagggaagatctcagacctgtgtgtggcgcttagcaagcacaccggcatctcccctgaacgcatgatggtagcagacgttttctctcaccggttttataagctctatcaacttgaagaacctctaagttctattctagacagagatgacatttttgtctatgaggtgtctgggagaatcgaggctatcgaaggatctcgcgaagacatcgtggtacccgtctacctccgggagcggacccctgcccgcgattataacaactcttactatgggctgatgctgtttggtcacccccttctggtatctgtcccaagagacaggtttacctgggaaggcctctataatgtccttatgtatcgactatcccgatacgttaccaaaccaaacagcgatgatgaggatgacggtgacgaaaaagaagatgacgaggaagacaaagatgatgtgcctggaccttccacaggcggaagtttacgtgatcccgaacccgagcaggccggcccatcatccggggttactaaccggtgcccatttctcctggataactgtcttggtacctcccagtggccccccagacggcgacgcaagcaactttttacattgcagaccgtaaactctaatggcacaagcgaccgaactacctcacccgaagaagtgcacgcacaaccttacattgctatagactgggaacccgaaatgaaaaagcgctactatgatgaggtggaagcagagggctacgtcaagcacgactgcgtcggctacgtgatgaaaaaagcacctgtgagactgcaggaatgtatagagctcttcactacggtggagacgcttgaaaaagagaacccatggtactgccccagctgtaagcaacaccagctggcaactaagaagcttgatctgtggatgcttccggaaattctgatcatccatctgaaaagattttcatacaccaagttcagtagagagaagctagacactctcgtagagtttcccataagggatttagatttctcagagttcgtaattcagccccagaacgaatccaaccccgagctttacaagtatgacctcattgccgtctccaatcattatggtgggatgcgcgacgggcattataccactttcgcctgtaacaaagacagcggccagtggcattattttgacgacaactccgtgtcgcctgtaaatgaaaatcagattgagagtaaagctgcatacgtattattctatcagcgccaggacgtggctcggcggttgctttccccagcaggctcatcaggcgcccccgcttcccccgcatgttccagtccacctagtagcgagtttatggacgtgaactag

SEQ ID NO: 148464 - DNA, 2892 bp, Artificial Sequence
  derived and/or modified sequence
atggctgtcgccccaagattatttggcggtttgtgctttaggtttcgggaccagaacccggaagtggcagtggaagggagactcccaatttctcacagttgtgtgggctgccggagagaaagaaccgccatggcgaccgtcgcagcaaatcccgcagctgccgctgctgccgtcgcggcagccgctgccgtcacagaggatcgcgagccacagcacgaggagcttccgggactggactctcagtggaggcaaatcgaaaatggtgagagtggcagagagagaccattacgcgcaggagaaagttggtttctggttgaaaagcattggtacaagcaatgggaagcctacgttcaggggggagatcaggactcaagcactttccctggctgtatcaataatgcgactcttttccaggacgaaatcaactggcgcctgaaagaaggactggtagagggggaggattatgtgctcctgcccgctgccgcatggcactacctggtctcctggtatggtcttgagcacggtcagccacccattgagcggaaggtgatagagctgcccaatattcagaaagtagaggtgtatcctgtcgaactactactggttagacacaacgacctagggaagtcccacacagtgcagttttctcacacagatagtattggtctggtcctgagaactgcacgtgagagattcctggtggagcctcaggaagatacccgcctgtgggcaaagaactcagaagggtcgttggatcgtctctacgacacccatatcacagtgctggatgccgctctggaaacggggcagctcatcattatggagacccgcaaaaaagacgggacatggccctctgctcaacttcatgtgatgaataacaacatgagtgaagaagatgaggattttaaagggcagcctggcatctgtggcctgacaaacctgggtaatacctgttttatgaattccgctttgcaatgcctttccaacgtcccacaacttactgagtacttcctgaataattgctacttagaggaactcaacttcaggaatccgctggggatgaagggcgagatcgctgaggcatatgccgatctggtgaagcaggcatggagcggccaccacaggtctattgtgccacacgtcttcaagaataaggtcgggcattttgccagccagtttttgggatatcaacaacacgactctcaagagctgctgagctttctgctggacggactccacgaggacttgaacagagtcaagaaaaaggaatacgtggaactgtgtgacgcggcagggaggcccgaccaggaggtcgcacaagaggcgtggcagaaccacaaaagacgaaatgactctgtgatcgtcgacacatttcacggcttattcaagagcacattggtgtgccccgattgcggcaacgtgtctgtgacattcgatcctttctgttacctttctgtcccactgccgatatctcacaaacgagtgctcgaagtgttctttatccccatggacccgagacggaagccagagcagcaccgcttggtcgtcccgaaaaaaggtaaaatcagtgatctctgtgtcgccttgtccaaacacacaggaatcagtcccgagcgaatgatggtcgcggatgtgttttcccacagattctacaaactctaccagctggaggaacccctgagcagtattctcgaccgggacgatattttcgtttacgaggtcagtggccgtatcgaagcgattgaagggagccgagaggacattgtcgtaccggtatacttaagggagcgcactcctgccagagattacaataatagttactatggtctaatgctgttcgggcatcccctactcgtctcggtccctcgggaccgattcacatgggaagggctgtacaacgtccttatgtaccgcctcagcagatatgtgaccaagcccaatagcgatgacgaggacgatggagatgaaaaagaggatgacgaagaggacaaagacgatgttcccggaccatctacaggcggttcactcagagatcctgaaccggaacaagccggtcccagctctggggtcacaaatcggtgtccctttctgctggataattgcctcggtaccagccagtggcctccacgaagacggaggaagcagctgttcactcttcagacagtgaattcgaatggaactagcgatcggactaccagtcccgaggaagtgcacgcgcagccttatatcgcaattgattgggagccggagatgaagaaaagatattatgatgaggttgaagcagagggttatgtaaagcacgattgcgtaggctatgtcatgaaaaaggcccctgtacgtcttcaagaatgcattgaactgttcacaaccgtggaaacacttgaaaaggagaatccttggtattgtccttcctgcaaacagcaccaactagcgacaaagaagttagacctgtggatgcttcctgaaattctcatcatacacttgaagagattctcttacacgaagtttagtagggagaagctcgacacgctcgtggagttccctattcgcgatctggacttttccgaattcgttatacaacctcaaaacgaaagcaatcccgagttgtataaatacgatctgattgctgtcagtaaccattacggaggtatgcgggacggacattacaccacattcgcctgcaacaaggattccggccagtggcattacttcgacgataattccgtgagcccggtcaatgagaatcaaatcgagtctaaggccgcatatgtgttattctatcagaggcaggatgtcgccaggcggttactatcacccgctggatcatcgggtgcaccagcgtccccggcatgcagctctccaccctcaagtgaattcatggacgtgaactag

SEQ ID NO: 148465 - DNA, 2892 bp, Artificial Sequence
  derived and/or modified sequence
atggccgtggcccccagactgttcggcggcctgtgcttcagattcagagaccagaaccccgaggtggccgtggagggcagactgcccatcagccacagctgcgtgggctgcagaagagagagaaccgccatggccaccgtggccgccaaccccgccgccgccgccgccgccgtggccgccgccgccgccgtgaccgaggacagagagccccagcacgaggagctgcccggcctggacagccagtggagacagatcgagaacggcgagagcggcagagagagacccctgagagccggcgagagctggttcctggtggagaagcactggtacaagcagtgggaggcctacgtgcagggcggcgaccaggacagcagcaccttccccggctgcatcaacaacgccaccctgttccaggacgagatcaactggagactgaaggagggcctggtggagggcgaggactacgtgctgctgcccgccgccgcctggcactacctggtgagctggtacggcctggagcacggccagccccccatcgagagaaaggtgatcgagctgcccaacatccagaaggtggaggtgtaccccgtggagctgctgctggtgagacacaacgacctgggcaagagccacaccgtgcagttcagccacaccgacagcatcggcctggtgctgagaaccgccagagagagattcctggtggagccccaggaggacaccagactgtgggccaagaacagcgagggcagcctggacagactgtacgacacccacatcaccgtgctggacgccgccctggagaccggccagctgatcatcatggagaccagaaagaaggacggcacctggcccagcgcccagctgcacgtgatgaacaacaacatgagcgaggaggacgaggacttcaagggccagcccggcatctgcggcctgaccaacctgggcaacacctgcttcatgaacagcgccctgcagtgcctgagcaacgtgccccagctgaccgagtacttcctgaacaactgctacctggaggagctgaacttcagaaaccccctgggcatgaagggcgagatcgccgaggcctacgccgacctggtgaagcaggcctggagcggccaccacagaagcatcgtgccccacgtgttcaagaacaaggtgggccacttcgccagccagttcctgggctaccagcagcacgacagccaggagctgctgagcttcctgctggacggcctgcacgaggacctgaacagagtgaagaagaaggagtacgtggagctgtgcgacgccgccggcagacccgaccaggaggtggcccaggaggcctggcagaaccacaagagaagaaacgacagcgtgatcgtggacaccttccacggcctgttcaagagcaccctggtgtgccccgactgcggcaacgtgagcgtgaccttcgaccccttctgctacctgagcgtgcccctgcccatcagccacaagagagtgctggaggtgttcttcatccccatggaccccagaagaaagcccgagcagcacagactggtggtgcccaagaagggcaagatcagcgacctgtgcgtggccctgagcaagcacaccggcatcagccccgagagaatgatggtggccgacgtgttcagccacagattctacaagctgtaccagctggaggagcccctgagcagcatcctggacagagacgacatcttcgtgtacgaggtgagcggcagaatcgaggccatcgagggcagcagagaggacatcgtggtgcccgtgtacctgagagagagaacccccgccagagactacaacaacagctactacggcctgatgctgttcggccaccccctgctggtgagcgtgcccagagacagattcacctgggagggcctgtacaacgtgctgatgtacagactgagcagatacgtgaccaagcccaacagcgacgacgaggacgacggcgacgagaaggaggacgacgaggaggacaaggacgacgtgcccggccccagcaccggcggcagcctgagagaccccgagcccgagcaggccggccccagcagcggcgtgaccaacagatgccccttcctgctggacaactgcctgggcaccagccagtggccccccagaagaagaagaaagcagctgttcaccctgcagaccgtgaacagcaacggcaccagcgacagaaccaccagccccgaggaggtgcacgcccagccctacatcgccatcgactgggagcccgagatgaagaagagatactacgacgaggtggaggccgagggctacgtgaagcacgactgcgtgggctacgtgatgaagaaggcccccgtgagactgcaggagtgcatcgagctgttcaccaccgtggagaccctggagaaggagaacccctggtactgccccagctgcaagcagcaccagctggccaccaagaagctggacctgtggatgctgcccgagatcctgatcatccacctgaagagattcagctacaccaagttcagcagagagaagctggacaccctggtggagttccccatcagagacctggacttcagcgagttcgtgatccagccccagaacgagagcaaccccgagctgtacaagtacgacctgatcgccgtgagcaaccactacggcggcatgagagacggccactacaccaccttcgcctgcaacaaggacagcggccagtggcactacttcgacgacaacagcgtgagccccgtgaacgagaaccagatcgagagcaaggccgcctacgtgctgttctaccagagacaggacgtggccagaagactgctgagccccgccggcagcagcggcgcccccgccagccccgcctgcagcagcccccccagcagcgagttcatggacgtgaactag

SEQ ID NO: 148466 - DNA, 2763 bp, Artificial Sequence
  derived and/or modified sequence
atggccaccgtggccgccaaccccgccgccgccgccgccgccgtggccgccgccgccgccgtgaccgaggacagagagccccagcacgaggagctgcccggcctggacagccagtggagacagatcgagaacggcgagagcggcagagagagacccctgagagccggcgagagctggttcctggtggagaagcactggtacaagcagtgggaggcctacgtgcagggcggcgaccaggacagcagcaccttccccggctgcatcaacaacgccaccctgttccaggacgagatcaactggagactgaaggagggcctggtggagggcgaggactacgtgctgctgcccgccgccgcctggcactacctggtgagctggtacggcctggagcacggccagccccccatcgagagaaaggtgatcgagctgcccaacatccagaaggtggaggtgtaccccgtggagctgctgctggtgagacacaacgacctgggcaagagccacaccgtgcagttcagccacaccgacagcatcggcctggtgctgagaaccgccagagagagattcctggtggagccccaggaggacaccagactgtgggccaagaacagcgagggcagcctggacagactgtacgacacccacatcaccgtgctggacgccgccctggagaccggccagctgatcatcatggagaccagaaagaaggacggcacctggcccagcgcccagctgcacgtgatgaacaacaacatgagcgaggaggacgaggacttcaagggccagcccggcatctgcggcctgaccaacctgggcaacacctgcttcatgaacagcgccctgcagtgcctgagcaacgtgccccagctgaccgagtacttcctgaacaactgctacctggaggagctgaacttcagaaaccccctgggcatgaagggcgagatcgccgaggcctacgccgacctggtgaagcaggcctggagcggccaccacagaagcatcgtgccccacgtgttcaagaacaaggtgggccacttcgccagccagttcctgggctaccagcagcacgacagccaggagctgctgagcttcctgctggacggcctgcacgaggacctgaacagagtgaagaagaaggagtacgtggagctgtgcgacgccgccggcagacccgaccaggaggtggcccaggaggcctggcagaaccacaagagaagaaacgacagcgtgatcgtggacaccttccacggcctgttcaagagcaccctggtgtgccccgactgcggcaacgtgagcgtgaccttcgaccccttctgctacctgagcgtgcccctgcccatcagccacaagagagtgctggaggtgttcttcatccccatggaccccagaagaaagcccgagcagcacagactggtggtgcccaagaagggcaagatcagcgacctgtgcgtggccctgagcaagcacaccggcatcagccccgagagaatgatggtggccgacgtgttcagccacagattctacaagctgtaccagctggaggagcccctgagcagcatcctggacagagacgacatcttcgtgtacgaggtgagcggcagaatcgaggccatcgagggcagcagagaggacatcgtggtgcccgtgtacctgagagagagaacccccgccagagactacaacaacagctactacggcctgatgctgttcggccaccccctgctggtgagcgtgcccagagacagattcacctgggagggcctgtacaacgtgctgatgtacagactgagcagatacgtgaccaagcccaacagcgacgacgaggacgacggcgacgagaaggaggacgacgaggaggacaaggacgacgtgcccggccccagcaccggcggcagcctgagagaccccgagcccgagcaggccggccccagcagcggcgtgaccaacagatgccccttcctgctggacaactgcctgggcaccagccagtggccccccagaagaagaagaaagcagctgttcaccctgcagaccgtgaacagcaacggcaccagcgacagaaccaccagccccgaggaggtgcacgcccagccctacatcgccatcgactgggagcccgagatgaagaagagatactacgacgaggtggaggccgagggctacgtgaagcacgactgcgtgggctacgtgatgaagaaggcccccgtgagactgcaggagtgcatcgagctgttcaccaccgtggagaccctggagaaggagaacccctggtactgccccagctgcaagcagcaccagctggccaccaagaagctggacctgtggatgctgcccgagatcctgatcatccacctgaagagattcagctacaccaagttcagcagagagaagctggacaccctggtggagttccccatcagagacctggacttcagcgagttcgtgatccagccccagaacgagagcaaccccgagctgtacaagtacgacctgatcgccgtgagcaaccactacggcggcatgagagacggccactacaccaccttcgcctgcaacaaggacagcggccagtggcactacttcgacgacaacagcgtgagccccgtgaacgagaaccagatcgagagcaaggccgcctacgtgctgttctaccagagacaggacgtggccagaagactgctgagccccgccggcagcagcggcgcccccgccagccccgcctgcagcagcccccccagcagcgagttcatggacgtgaactag

SEQ ID NO: 148467 - DNA, 2763 bp, Artificial Sequence
  derived and/or modified sequence
atggctaccgtggccgcaaaccccgctgcagccgccgcagctgtggcagcagccgctgcagtcactgaggaccgtgagccgcaacacgaggagctgcccgggctcgatagtcagtggagacaaatcgagaatggggaaagcggccgggaaaggcctttgcgtgccggagagtcatggtttcttgtcgagaagcactggtacaagcagtgggaggcctacgtgcaggggggtgaccaggactcaagcaccttccccgggtgcatcaataacgccactttattccaggacgaaatcaactggaggctgaaagagggtttggtggaaggcgaggactacgtgctgttacccgctgctgcgtggcattaccttgtgtcatggtatggactggagcacggacagcctccaatcgagcggaaggtaatcgaacttccaaatatccagaaagtggaagtgtaccccgtggagctgctactcgtccgccacaatgacctcgggaagagccatacagtccagttctcacatacagactcaatcgggctcgttctgagaacagcccgagagcgatttttggtcgagcctcaggaggatacccggctgtgggcaaaaaacagcgaagggtccctcgataggctctatgatacgcacattactgttctggacgctgcgctcgaaactggccaactgatcattatggagacaaggaagaaagatggcacttggccatctgcccagctgcatgtaatgaacaataacatgtctgaggaagacgaagactttaagggccaacccggaatttgcggcctaacaaacctggggaatacttgcttcatgaactcagccctgcagtgtctatctaatgtgccccagctgacggagtatttcctaaacaattgttacctcgaggagctgaacttcagaaaccccctgggaatgaagggagaaatagccgaagcctatgcagacctggtcaaacaggcctggtctggccaccaccgctcaatcgtgcctcacgtctttaagaataaggtcggacactttgcctctcagtttctcggctaccagcagcacgatagtcaggagttgctgtcatttcttcttgacggcttgcacgaggatttgaatagagttaaaaagaaggaatacgtggagttatgtgatgcagctggaagacctgatcaggaggtggcccaggaggcctggcagaaccataagcgacgcaacgactcggtgatagtcgacacatttcacggactgttcaagtcaaccctcgtatgtcctgattgcggaaacgtctccgtcactttcgaccccttttgctatttaagcgtccctttgccgatttctcataagcgcgttctagaagtttttttcatcccgatggacccacgcagaaagcctgagcagcatcggcttgtggtgcctaaaaaaggaaagatttcagatctgtgtgtggctttgagcaagcacacagggatcagccccgagagaatgatggtcgcagatgtgtttagtcaccggttttacaagctttaccagctggaggagccgctgtcgagcattctcgaccgggatgacatctttgtgtatgaagtgtctgggcgcatagaggctattgagggttctcgcgaagatatcgtggttcctgtctatctacgggagcgtaccccggcgcgggattataacaatagctactatggccttatgttgttcggccaccccctgctcgtgagcgtgccgagggaccgatttacctgggaaggattgtacaatgtgctgatgtaccgattgtctaggtatgtgactaagcctaactctgatgacgaggacgatggtgacgagaaagaggacgacgaagaagacaaggacgatgtgccgggcccttcaactggaggctctctgcgggatcctgaacctgaacaggctggaccaagttcaggcgtgactaaccgctgccctttcttgctggacaactgcctcggcacgtctcagtggcctcctagaagacggaggaagcagttgtttaccctacaaacagttaacagcaacggcacgtccgatcgaacgacgagtcctgaggaagtgcacgctcagccttacattgccatcgattgggagcccgagatgaagaagcgatactatgatgaggtcgaagccgagggttatgtgaaacatgactgtgtgggttacgtcatgaaaaaggccccagttaggcttcaggagtgcatcgaactctttaccacagtcgagactctggagaaggagaacccatggtactgcccctcgtgtaagcagcatcaactggctactaagaagctcgacctgtggatgctgccggagattctgatcatccatctgaagcgtttcagttataccaagttttcccgcgagaagctggatacactagtagagttccccatcagggacttagatttcagcgagtttgtcatccaacctcagaacgaaagcaatcctgagctgtataaatatgatctcatagctgtctccaaccactacgggggcatgcgggacgggcactataccaccttcgcttgcaacaaggattccgggcagtggcactacttcgacgacaactctgtgtccccggtgaacgaaaaccagatcgaaagcaaggccgcgtatgttctgttttaccagcgccaagatgttgcccggcgtctgctctcacccgcaggcagcagtggagctcctgcctcccctgcgtgttcctcccccccatcctccgagtttatggacgttaactag

SEQ ID NO: 148468 - DNA, 2763 bp, Artificial Sequence
  derived and/or modified sequence
atggccaccgtggccgccaacccagctgctgctgctgctgctgtggccgctgctgctgctgtgacagaagatcgggagccccagcacgaggagctgcccggcctggacagccagtggaggcagattgaaaatggagagagcggccgggagcggcccctgcgggccggggagagctggttcctggtggagaagcactggtacaagcagtgggaggcctacgtgcagggcggggaccaggacagcagcaccttccctggctgcatcaacaatgccaccctcttccaggatgagatcaactggaggctgaaggagggcctggtggagggggaggactatgtgctgctgcctgctgctgcctggcactacctggtgtcctggtacggcctggagcacggccagccccccatcgagaggaaggtgattgagctgcccaacatccagaaggtggaggtgtaccctgtggagctgctgctggtgcgccacaatgacctgggcaagagccacacagtgcagttcagccacacagacagcatcggcctggtgctgaggacagcccgggagcgcttcctggtggagccccaggaggacacccggctgtgggccaagaacagcgagggcagcctggaccggctgtatgacacccacatcaccgtgctggatgctgccctggagaccggccagctgatcatcatggagaccaggaagaaggatggcacctggcccagcgcccagctgcacgtgatgaacaacaacatgtctgaagaagatgaggacttcaagggccagcccggcatctgtggcctgaccaacctgggcaacacctgcttcatgaacagcgccctgcagtgcctgagcaatgtgccccagctgacagagtacttcctgaacaactgctacctggaggagctgaacttcaggaaccccctgggcatgaagggggagattgctgaggcctatgctgacctggtgaagcaggcctggagcggccaccacaggagcatcgtgccccacgtgttcaagaacaaggtgggccactttgccagccagttcctgggctaccagcagcacgacagccaggagctgctgtccttcctgctggatggcctgcacgaggacctgaacagagtgaagaagaaggagtatgtggagctgtgtgatgctgctggccgcccagaccaggaggtggcccaggaggcctggcagaaccacaagagaagaaatgattctgtgattgtggacaccttccacggcctcttcaagagcaccctggtgtgcccagactgtggaaatgtgtctgtgacctttgaccccttctgctacctgtctgtgcccctgcccatcagccacaagagggtgctggaggtgttcttcatccccatggaccccaggaggaagccagagcagcaccggctggtggtgcccaagaagggcaagatcagtgacctgtgtgtggccctgagcaagcacacaggcatcagccctgagaggatgatggtggctgatgtgttcagccaccgcttctacaagctgtaccagctggaggagcccctgagcagcatcctggacagagatgacatctttgtgtatgaggtgtctggaagaattgaggccatcgagggcagcagagaagatattgtggtgcctgtgtacctgcgggagaggaccccagcccgggactacaacaacagctactacggcctgatgctgtttggccaccccctgctggtgtctgtgccccgggaccgcttcacctgggagggcctgtacaacgtgctgatgtaccgcctgagccgctacgtgaccaagcccaacagtgatgatgaagatgatggagatgagaaggaggatgatgaggaggacaaggatgatgtgcccggccccagcactggaggcagcctgcgggaccctgagcctgagcaggccggccccagcagtggagtgaccaaccgctgccccttcctgctggacaactgcctgggcaccagccagtggcccccaagaagaagaaggaagcagctgttcaccctgcagacagtgaacagcaatggcaccagtgacaggaccaccagccctgaggaggtgcacgcccagccctacatcgccatcgactgggagcctgagatgaagaagcgctactatgatgaggtggaggccgagggctacgtgaagcatgactgtgtgggctacgtgatgaagaaggcccctgtgcggctgcaggagtgcatcgagctgttcaccaccgtggagaccctggagaaggagaacccctggtactgccccagctgcaagcagcaccagctggccaccaagaagctggacctgtggatgctgcctgagatcctgatcatccacctgaagcgcttctcctacaccaagttcagccgggagaagctggacaccctggtggagttccccatccgggacctggacttcagcgagtttgtgatccagccccagaatgaaagcaaccctgagctgtacaagtatgacctgattgctgtgagcaaccactacggcggcatgagagatggccactacaccacctttgcctgcaacaaggacagcggccagtggcactactttgatgacaacagcgtgtcccctgtgaatgaaaaccagatcgagagcaaggccgcctacgtgctcttctaccagaggcaggatgtggcccggcggctgctgagccctgctggcagcagcggggccccagccagccctgcctgcagcagcccccccagcagcgagttcatggatgtgaactag

SEQ ID NO: 148469 - DNA, 2763 bp, Artificial Sequence
  derived and/or modified sequence
atggccaccgtggccgccaaccccgccgccgccgccgccgccgtggccgctgcagctgctgtcacagaagacagggagcctcagcacgaggagcttcccggcctggactctcagtggcgccaaatcgagaacggcgagtctggccgggagcggccactcagagccggggaaagctggtttctagtcgagaaacactggtataagcagtgggaagcttatgtgcaaggcggcgatcaagattcgtctactttccccgggtgcataaataacgcaacactcttccaggacgagatcaactggcgactcaaagaagggctggtggagggtgaggattatgtccttctgcccgcagctgcatggcactacctcgtgtcttggtacggcttggagcatggccaaccacctatcgaacggaaagtcatcgagcttcctaatatccagaaggtcgaggtgtatccagtcgagttgcttctggtgcgacacaacgacctggggaaaagtcacactgtccaattctctcacaccgactctatcggtctcgtgcttagaactgcaagagaaaggttcttggtggaaccccaggaagacactaggttatgggcaaagaattcagagggatccttggaccggctatacgatactcacatcaccgtgctcgatgctgctttggagactggccagttgatcattatggaaacccgaaaaaaggacggaacatggccctcagctcagttacatgtcatgaataacaacatgtcggaggaagatgaagattttaagggacagccaggcatctgtggcttgactaacctcgggaacacatgctttatgaattctgcgctccagtgtctgtccaatgtgccccagctgactgagtactttctcaataattgttacctggaagagcttaacttccgcaatccactggggatgaagggcgagatcgccgaagcctacgccgatctggtgaaacaggcctggtccgggcaccatcggtctatagtgccccacgtgttcaaaaataaagtgggtcatttcgcttctcagtttctcggctaccaacaacatgactcccaggaactgctgagcttccttctagatggactgcatgaggacctaaacagagtcaagaagaaagaatatgtcgagctatgcgatgccgcaggccgtccggatcaggaggtggctcaggaagcctggcagaaccataagcggcgcaatgactcagttattgtcgatacctttcacggactttttaagagcacactggtctgtccagattgtggcaacgtgtcggttacatttgatcctttctgttacctcagcgttccacttccaatcagtcataaaagggtactcgaagtgttttttattcccatggatccaaggagaaaacctgagcagcataggttggtggtccccaagaagggcaaaatatccgacctgtgcgtagctttgtctaaacacaccggaatttctcctgaacgaatgatggtggcagatgtgttcagtcaccgattttataagctctaccagctggaggagcctctttcgagtattctcgatcgtgatgatatattcgtatacgaggtgagtgggcggatagaagctatcgagggaagccgggaggacatcgtggtacccgtctatctgagggagcgaacacccgccagggactataataactcatactacgggttaatgctctttggtcacccactgcttgtatcggtaccccgggacagattcacttgggagggcctttataacgtcctgatgtaccgcctgtcaagatacgtgactaaacctaactcagatgatgaagatgacggagatgagaaagaggatgatgaagaagacaaagacgacgtgccgggccccagtactgggggctctctaagggacccagaacctgagcaggccggcccttcatcaggggttaccaacaggtgtccctttctgctggataattgtttggggacctcgcagtggcccccgaggaggaggcggaagcaactgtttactctccaaaccgtgaattccaacgggacctccgaccggaccactagtcctgaggaggtgcatgctcagccatacattgccatagactgggaaccagaaatgaagaagcggtactacgacgaagtggaggccgaggggtacgtaaagcacgactgcgtgggctatgtcatgaagaaggctccagtacgtctgcaggagtgcattgagctcttcactactgtcgaaaccttggagaaagaaaacccatggtactgtccgtcctgcaaacaacaccagcttgccaccaagaagctggatctttggatgctccccgaaatcctgatcattcatcttaaacggttctcttatactaagttttcacgcgagaagctggacacattggtggaatttccaatccgagatctggatttcagtgagttcgtgattcaaccacagaatgagtccaaccccgagctgtataaatatgacttgatcgcggtctcaaatcattacggcggcatgagagatggtcattacactaccttcgcctgtaataaggatagtggccaatggcattatttcgacgacaattctgtatcaccagttaacgagaatcaaattgaatccaaagccgcttatgtcctgttctaccaacggcaggacgtggccaggcgcctgctctctccagccggaagcagtggggctccagccagccctgcctgttctagccctcctagctctgagttcatggacgtgaactag

SEQ ID NO: 148470 - DNA, 2763 bp, Artificial Sequence
  derived and/or modified sequence
atggcgactgtggccgcaaaccccgcagccgctgccgctgccgtggctgccgcagccgcagtcacagaggatagagaaccgcagcatgaagagttgcctggcctggattctcagtggagacaaattgagaatggggagtctggaagggagcgcccattgcgggctggcgagagttggttccttgtcgaaaaacactggtataaacaatgggaggcctacgtccaggggggagatcaagactcctctacctttcccggttgtatcaacaacgctacacttttccaggatgaaatcaactggcgactcaaggagggcctggtggagggagaagattatgtgctactgccagctgctgcttggcattacctggtcagctggtatggtcttgaacatggtcagcctcctattgaacgcaaggtaatcgagttgcctaacatccagaaggtggaagtctaccccgtggagctcctgctcgttcggcacaatgatctggggaagtctcatacagtccaatttagccataccgacagcattggtctcgtgcttagaactgcgagggagcgtttcctggtagagccacaagaggacactcgtctgtgggctaaaaattctgagggctccttggaccgtctgtacgacactcacattaccgtgctggatgccgctctggaaacaggacagttaatcatcatggagaccagaaagaaagacggcacctggccatctgcccaactccatgtcatgaacaataatatgagtgaagaagacgaggactttaaagggcagccaggcatatgtggactgacgaacctcgggaacacctgcttcatgaacagtgcccttcagtgcctcagcaacgtcccccagctgactgagtatttcctaaacaattgctatctcgaagagctaaattttcggaaccctctgggaatgaagggcgaaattgccgaggcctacgccgacctggtgaagcaggcttggtcggggcatcatcgtagtatagtcccccacgtgtttaagaacaaggttggccattttgccagtcagttcttaggataccaacagcacgactcgcaggaactactcagctttctgttggacggtctgcatgaggatctgaaccgagtgaaaaaaaaagagtacgtggagctctgcgacgccgcaggcagaccagaccaagaggtggcccaggaagcatggcaaaatcataaacggaggaatgatagcgtgattgtggataccttccacggactctttaagagtacactggtgtgtccagactgcggcaacgtgtcagtgacgtttgaccctttctgctacctgagtgttccactgcccatttcccataagagagtgcttgaggtgttcttcatccctatggatcccaggcgtaaacccgagcagcaccgcttggttgtccctaagaagggcaagatctctgacctttgcgtggccttgagcaagcacacagggatctctcccgaacgtatgatggtggccgacgtgttctctcatcggttctacaaactttaccagttagaagaaccacttagtagcatcctcgatagggacgacatatttgtgtatgaggtgagtggccgaatcgaagccatcgaagggtcccgggaggacatcgtagtgcctgtttacctgagggagcggacgcccgctagagattataacaatagctattacggcttgatgttgtttggccaccctttgctggtaagcgttcccagagacaggtttacctgggagggactgtacaacgtcttaatgtaccgtctgtcgcgctacgttaccaaacctaactcagacgacgaggatgacggcgacgagaaagaagatgacgaagaagacaaagacgacgtgcccggtccctctacggggggatcactccgcgatcctgaacctgaacaggctggacccagttccggggtgactaatcgctgtccgttcttgttggacaattgtctaggcacaagccagtggccgcctaggcgcaggcggaagcagctgttcacattacaaacggtgaatagcaatggaacctctgatcggaccaccagccctgaggaagtgcatgcccagccttatattgccatcgattgggaacccgaaatgaagaagcgctactacgatgaggtagaggcagaagggtacgtcaagcacgactgcgtcggttatgtgatgaagaaggccccagtgaggctgcaggaatgcatcgagctcttcaccaccgtagaaaccctggaaaaggaaaatccatggtattgccccagttgtaagcagcatcagctggccaccaagaagttagacttgtggatgctgccggagattctgatcatccatctaaagcggtttagctacacaaagttttctagagaaaagctcgataccctggtggagttccccatccgagatcttgatttcagcgagtttgtgattcagccccagaatgagtctaatccagagctgtacaagtatgatcttattgccgttagcaaccactatggagggatgcgcgatggtcattacaccactttcgcctgcaacaaggattccgggcagtggcactattttgacgacaactctgtcagccctgtaaatgagaaccagatcgaatctaaggctgcctacgttctcttctaccagaggcaggacgtggctcgaagattgctctctccggctggtagctccggtgcgccagcctcccctgcttgtagttcacccccatctagtgaatttatggacgtgaactag

SEQ ID NO: 148471 - DNA, 3289 bp, Artificial Sequence
  derived and/or modified sequence
atggcagtagccccgcgactgtttggggggctctgcttccgtttccgggaccagaatccggaagtggctgttgaggggcgtcttccaatctcgcacagctgcgttggctgtagaagagaacggacggcgatggcgacggtcgcagcaaatccagctgctgctgcggcggctgtggcggcggcagcggcggtgactgaggatagagagccacagcacgaggagctgccaggcctggacagccagtggcgccagatagaaaacggcgagagtgggcgagaacgtccactgcgggccggcgaaagctggttccttgtggagaagcactggtataagcagtgggaggcatacgtgcagggaggggaccaggactccagcaccttccctggctgcatcaacaatgccacactctttcaagatgagataaactggcgcctcaaggagggactggtggaaggcgaggattatgtgctgctcccagcagctgcttggcattacctggtcagctggtatggtctagagcatggccagccacccattgaacgcaaggtcatagagctgcccaacatccagaaggtcgaagtgtacccagtagaactgctgcttgtccggcacaatgatttgggcaaatctcacactgttcagttcagccataccgattctattggcctagtattgcgcacagctcgggagcggtttctggtggagccccaggaagacactcggctttgggccaagaactcagaaggctctttggataggttgtatgacacacacatcacggttctcgatgcggcccttgagactgggcagttgatcatcatggagacccgcaagaaagatggcacttggcccagcgcacagctgcatgtcatgaacaacaacatgtcggaagaggatgaggacttcaagggtcagccaggcatctgtggcctcaccaatctgggcaacacgtgcttcatgaactcggccctgcagtgcctcagcaatgtgccacagctcaccgagtacttcctcaacaactgctacctggaggagctcaacttccgcaacccactgggcatgaagggtgagatcgcagaggcctatgcagacctggtgaagcaggcgtggtctggccaccaccgctccattgtgccacatgtgttcaagaacaaggttggccattttgcatcccaatttctgggctaccagcagcatgactctcaggagctgctgtcattcctcctggacgggctgcatgaggaccttaatcgggtgaagaagaaggagtatgtggagctgtgcgatgctgctgggcgaccggatcaggaggtggcacaggaggcatggcaaaaccacaaacggcggaacgattctgtgatcgtggacactttccacggcctcttcaagtccacgctggtgtgccccgattgtggcaatgtatctgtgaccttcgaccccttctgctacctcagtgttccactgcctatcagccacaagagggtcttggaggtcttctttatccccatggatccgcgccgcaagccagagcagcaccggctcgtggtccccaagaaaggcaagatctcggatctatgtgtggctctgtccaaacacacgggcatctcgccagagaggatgatggtggctgatgtcttcagtcaccgcttctataagctctatcagctagaggagcctctgagcagcatcttggaccgtgatgatatcttcgtctatgaggtgtcaggtcgcattgaggccattgagggctcaagagaggacatcgtggttcctgtctacctgcgggagcgcacccctgcccgtgactacaacaactcctactacggcctgatgctttttggacaccccctcctggtatcagtgccccgggaccgcttcacctgggagggcctgtataacgtcctgatgtaccggctctcacgctacgtgaccaaacccaactcagatgatgaggacgatggggatgagaaagaagatgacgaggaggataaagatgacgtccctgggccctcaactgggggcagcctccgagaccctgagccagagcaggctgggcccagctctggagtcacgaacaggtgcccgttcctcctggacaattgccttggcacatctcagtggcccccaaggcgacgacgcaagcagctgttcaccctgcagacggtgaactccaatgggaccagcgaccgcacaacctcccctgaagaagtccatgcccagccgtacattgctatcgactgggagccagagatgaagaagcgttactatgacgaggtagaggctgagggctacgtgaagcatgactgcgtcgggtacgtgatgaagaaggctcccgtgcggctgcaggagtgcattgagctcttcaccactgtggagaccctggagaaggaaaacccctggtactgcccttcctgcaagcagcaccagctggcaaccaagaagctggacctgtggatgctgccggagattctcatcatccacctgaaacgcttttcctacaccaagttctcccgagagaagctggacaccctcgtggagtttcctatccgggacctggacttctctgagtttgtcatccagccacagaatgagtcgaatccggagctgtacaaatatgacctcatcgcggtttccaaccattatgggggcatgcgtgatggacactacacaacatttgcctgcaacaaggacagcggccagtggcactactttgatgacaacagcgtctcccctgtcaatgagaatcagatcgagtccaaggcagcctatgtcctcttctaccaacgccaggacgtggcgcgacgcctgctgtccccggccggctcatctggcgccccagcctcccctgcctgcagctccccacccagctctgagttcatggatgttaattgagagccctgggtcctgccacagaaaaaaaaaaaaaaaagccctctctgcaatctcgcttctcgtgtccgccccgcttctcttattcgtgttaggtgcccccgccaggcattgcaggcttagtcgtggctactgttctcctgtgccgctgcatcgctctctcccgggaaagaacaggtcgtgtctcctcctagcagtgcgcgccccgcctgtgtttgcccttccagcagtgaccctcccttctagtctttatttatggtcgtgcccttccctctcctcagcccagagtgttctgcgtgggtggtgatgggggttcacctgaacacagagtgtattttcttattgaggccctgtaccttctgctgtgtgtgtgtatatataaagcaccagtctgctcccc

SEQ ID NO: 148472 - DNA, 3515 bp, Artificial Sequence
  derived and/or modified sequence
gatggtacaatgaagggcattctgatcaggctaacaaaaacactgctcccagggtaggagtcctagcccacctcgggaacctcagcctccactttccatgccacctgtgccctaagtctacagggcgttaggaccccacaaggcacttttgtctttcttggttcccactgaagattttaccccacctagcccttcgacgcgtctgtgcacggggccatttccaatatggcagtagccccgcgactgtttggggggctctgcttccgtttccgggaccagaatccggaagtggctgttgaggggcgtcttccaatctcgcacagctgcgttggctgtagaagagaacggacggcgatggcgacggtcgcagcaaatccagctgctgctgcggcggctgtggcggcggcagcggcggtgactgaggatagagagccacagcacgaggagctgccaggcctggacagccagtggcgccagatagaaaacggcgagagtgggcgagaacgtccactgcgggccggcgaaagctggttccttgtggagaagcactggtataagcagtgggaggcatacgtgcagggaggggaccaggactccagcaccttccctggctgcatcaacaatgccacactctttcaagatgagataaactggcgcctcaaggagggactggtggaaggcgaggattatgtgctgctcccagcagctgcttggcattacctggtcagctggtatggtctagagcatggccagccacccattgaacgcaaggtcatagagctgcccaacatccagaaggtcgaagtgtacccagtagaactgctgcttgtccggcacaatgatttgggcaaatctcacactgttcagttcagccataccgattctattggcctagtattgcgcacagctcgggagcggtttctggtggagccccaggaagacactcggctttgggccaagaactcagaaggctctttggataggttgtatgacacacacatcacggttctcgatgcggcccttgagactgggcagttgatcatcatggagacccgcaagaaagatggcacttggcccagcgcacagctgcatgtcatgaacaacaacatgtcggaagaggatgaggacttcaagggtcagccaggcatctgtggcctcaccaatctgggcaacacgtgcttcatgaactcggccctgcagtgcctcagcaatgtgccacagctcaccgagtacttcctcaacaactgctacctggaggagctcaacttccgcaacccactgggcatgaagggtgagatcgcagaggcctatgcagacctggtgaagcaggcgtggtctggccaccaccgctccattgtgccacatgtgttcaagaacaaggttggccattttgcatcccaatttctgggctaccagcagcatgactctcaggagctgctgtcattcctcctggacgggctgcatgaggaccttaatcgggtgaagaagaaggagtatgtggagctgtgcgatgctgctgggcgaccggatcaggaggtggcacaggaggcatggcaaaaccacaaacggcggaacgattctgtgatcgtggacactttccacggcctcttcaagtccacgctggtgtgccccgattgtggcaatgtatctgtgaccttcgaccccttctgctacctcagtgttccactgcctatcagccacaagagggtcttggaggtcttctttatccccatggatccgcgccgcaagccagagcagcaccggctcgtggtccccaagaaaggcaagatctcggatctatgtgtggctctgtccaaacacacgggcatctcgccagagaggatgatggtggctgatgtcttcagtcaccgcttctataagctctatcagctagaggagcctctgagcagcatcttggaccgtgatgatatcttcgtctatgaggtgtcaggtcgcattgaggccattgagggctcaagagaggacatcgtggttcctgtctacctgcgggagcgcacccctgcccgtgactacaacaactcctactacggcctgatgctttttggacaccccctcctggtatcagtgccccgggaccgcttcacctgggagggcctgtataacgtcctgatgtaccggctctcacgctacgtgaccaaacccaactcagatgatgaggacgatggggatgagaaagaagatgacgaggaggataaagatgacgtccctgggccctcaactgggggcagcctccgagaccctgagccagagcaggctgggcccagctctggagtcacgaacaggtgcccgttcctcctggacaattgccttggcacatctcagtggcccccaaggcgacgacgcaagcagctgttcaccctgcagacggtgaactccaatgggaccagcgaccgcacaacctcccctgaagaagtccatgcccagccgtacattgctatcgactgggagccagagatgaagaagcgttactatgacgaggtagaggctgagggctacgtgaagcatgactgcgtcgggtacgtgatgaagaaggctcccgtgcggctgcaggagtgcattgagctcttcaccactgtggagaccctggagaaggaaaacccctggtactgcccttcctgcaagcagcaccagctggcaaccaagaagctggacctgtggatgctgccggagattctcatcatccacctgaaacgcttttcctacaccaagttctcccgagagaagctggacaccctcgtggagtttcctatccgggacctggacttctctgagtttgtcatccagccacagaatgagtcgaatccggagctgtacaaatatgacctcatcgcggtttccaaccattatgggggcatgcgtgatggacactacacaacatttgcctgcaacaaggacagcggccagtggcactactttgatgacaacagcgtctcccctgtcaatgagaatcagatcgagtccaaggcagcctatgtcctcttctaccaacgccaggacgtggcgcgacgcctgctgtccccggccggctcatctggcgccccagcctcccctgcctgcagctccccacccagctctgagttcatggatgttaattgagagccctgggtcctgccacagaaaaaaaaaaaaaaaagccctctctgcaatctcgcttctcgtgtccgccccgcttctcttattcgtgttaggtgcccccgccaggcattgcaggcttagtcgtggctactgttctcctgtgccgctgcatcgctctctcccgggaaagaacaggtcgtgtctcctcctagcagtgcgcgccccgcctgtgtttgcccttccagcagtgaccctcccttctagtctttatttatggtcgtgcccttccctctcctcagcccagagtgttctgcgtgggtggtgatgggggttcacctgaacacagagtgtattttcttattgaggccctgtaccttctgctgtgtgtgtgtatatataaagcaccagtctgctcccca

SEQ ID NO: 148473 - protein, 1539 aa, Artificial Sequence
  derived and/or modified sequence
MEPGCDEFLPPPECPVFEPSWAEFQDPLGYIAKIRPIAEKSGICKIRPPADWQPPFAVEVDNFRFTPRVQRLNELEAQTRVKLNYLDQIAKFWEIQGSSLKIPNVERKILDLYSLSKIVIEEGGYEAICKDRRWARVAQRLHYPPGKNIGSLLRSHYERIIYPYEMFQSGANHVQCNTHPFDNEVKDKEYKPHSIPLRQSVQPSKFSSYSRRAKRLQPDPEPTEEDIEKHPELKKLQIYGPGPKMMGLGLMAKDKDKTVHKKVTCPPTVTVKDEQSGGGNVSSTLLKQHLSLEPCTKTTMQLRKNHSSAQFIDSYICQVCSRGDEDDKLLFCDGCDDNYHIFCLLPPLPEIPRGIWRCPKCILAECKQPPEAFGFEQATQEYSLQSFGEMADSFKSDYFNMPVHMVPTELVEKEFWRLVSSIEEDVTVEYGADIHSKEFGSGFPVSNSKQNLSPEEKEYATSGWNLNVMPVLDQSVLCHINADISGMKVPWLYVGMVFSAFCWHIEDHWSYSINYLHWGEPKTWYGVPSLAAEHLEEVMKMLTPELFDSQPDLLHQLVTLMNPNTLMSHGVPVVRTNQCAGEFVITFPRAYHSGFNQGYNFAEAVNFCTADWLPAGRQCIEHYRRLRRYCVFSHEELICKMAAFPETLDLNLAVAVHKEMFIMVQEERRLRKALLEKGVTEAEREAFELLPDDERQCIKCKTTCFLSALACYDCPDGLVCLSHINDLCKCSSSRQYLRYRYTLDELPTMLHKLKIRAESFDTWANKVRVALEVEDGRKRSFEELRALESEARERRFPNSELLQRLKNCLSEVEACIAQVLGLVSGQVARMDTPQLTLTELRVLLEQMGSLPCAMHQIGDVKDVLEQVEAYQAEAREALATLPSSPGLLRSLLERGQQLGVEVPEAHQLQQQVEQAQWLDEVKQALAPSAHRGSLVIMQGLLVMGAKIASSPSVDKARAELQELLTIAERWEEKAHFCLEARQKHPPATLEAIIRETENIPVHLPNIQALKEALTKAQAWIADVDEIQNGDHYPCLDDLEGLVAVGRDLPVGLEELRQLELQVLTAHSWREKASKTFLKKNSCYTLLEVLCPCADAGSDSTKRSRWMEKALGLYQCDTELLGLSAQDLRDPGSVIVAFKEGEQKEKEGILQLRRTNSAKPSPLAPSLMASSPTSICVCGQVPAGVGVLQCDLCQDWFHGQCVSVPHLLTSPKPSLTSSPLLAWWEWDTKFLCPLCMRSRRPRLETILALLVALQRLPVRLPEGEALQCLTERAIGWQDRARKALASEDVTALLRQLAELRQQLQAKPRPEEASVYTSATACDPIREGSGNNISKVQGLLENGDSVTSPENMAPGKGSDLELLSSLLPQLTGPVLELPEAIRAPLEELMMEGDLLEVTLDENHSIWQLLQAGQPPDLDRIRTLLELEKFEHQGSRTRSRALERRRRRQKVDQGRNVENLVQQELQSKRARSSGIMSQVGREEEHYQEKADRENMFLTPSTDHSPFLKGNQNSLQHKDSGSSAACPSLMPLLQLSYSDEQQL

SEQ ID NO: 148474 - protein, 1476 aa, Artificial Sequence
  derived and/or modified sequence
MEPGCDEFLPPPECPVFEPSWAEFQDPLGYIAKIRPIAEKSGICKIRPPADWQPPFAVEVDNFRFTPRVQRLNELEIVIEEGGYEAICKDRRWARVAQRLHYPPGKNIGSLLRSHYERIIYPYEMFQSGANHVQCNTHPFDNEVKDKEYKPHSIPLRQSVQPSKFSSYSRRAKRLQPDPEPTEEDIEKHPELKKLQIYGPGPKMMGLGLMAKDKDKTVHKKVTCPPTVTVKDEQSGGGNVSSTLLKQHLSLEPCTKTTMQLRKNHSSAQFIDSYICQVCSRGDEDDKLLFCDGCDDNYHIFCLLPPLPEIPRGIWRCPKCILAECKQPPEAFGFEQATQEYSLQSFGEMADSFKSDYFNMPVHMVPTELVEKEFWRLVSSIEEDVTVEYGADIHSKEFGSGFPVSNSKQNLSPEEKEYATSGWNLNVMPVLDQSVLCHINADISGMKVPWLYVGMVFSAFCWHIEDHWSYSINYLHWGEPKTWYGVPSLAAEHLEEVMKMLTPELFDSQPDLLHQLVTLMNPNTLMSHGVPVVRTNQCAGEFVITFPRAYHSGFNQGYNFAEAVNFCTADWLPAGRQCIEHYRRLRRYCVFSHEELICKMAAFPETLDLNLAVAVHKEMFIMVQEERRLRKALLEKGVTEAEREAFELLPDDERQCIKCKTTCFLSALACYDCPDGLVCLSHINDLCKCSSSRQYLRYRYTLDELPTMLHKLKIRAESFDTWANKVRVALEVEDGRKRSFEELRALESEARERRFPNSELLQRLKNCLSEVEACIAQVLGLVSGQVARMDTPQLTLTELRVLLEQMGSLPCAMHQIGDVKDVLEQVEAYQAEAREALATLPSSPGLLRSLLERGQQLGVEVPEAHQLQQQVEQAQWLDEVKQALAPSAHRGSLVIMQGLLVMGAKIASSPSVDKARAELQELLTIAERWEEKAHFCLEARQKHPPATLEAIIRETENIPVHLPNIQALKEALTKAQAWIADVDEIQNGDHYPCLDDLEGLVAVGRDLPVGLEELRQLELQVLTAHSWREKASKTFLKKNSCYTLLEVLCPCADAGSDSTKRSRWMEKALGLYQCDTELLGLSAQDLRDPGSVIVAFKEGEQKEKEGILQLRRTNSAKPSPLAPSLMASSPTSICVCGQVPAGVGVLQCDLCQDWFHGQCVSVPHLLTSPKPSLTSSPLLAWWEWDTKFLCPLCMRSRRPRLETILALLVALQRLPVRLPEGEALQCLTERAIGWQDRARKALASEDVTALLRQLAELRQQLQAKPRPEEASVYTSATACDPIREGSGNNISKVQGLLENGDSVTSPENMAPGKGSDLELLSSLLPQLTGPVLELPEAIRAPLEELMMEGDLLEVTLDENHSIWQLLQAGQPPDLDRIRTLLELEKFEHQGSRTRSRALERRRRRQKVDQGRNVENLVQQELQSKRARSSGIMSQVGREEEHYQEKADRENMFLTPSTDHSPFLKGNQNSLQHKDSG

SEQ ID NO: 148475 - DNA, 5502 bp, Artificial Sequence
  derived and/or modified sequence
cattttaaaaaagatccggccatactatttttatcttgctttttcgttctgtcgcagtactgtttaatatgagtccagcgacggctctgtgactgttttcctctggtaaaatcgctcttgcgtcctcagcgtttatctcaggtgcggaaggtctcacaggtttggaaatagcgccggaaaaatcgatccgcggagtgagacggctcgtaccacactgcagggcccggaggtcaagatggtggctgtaaaactaggatccctgacgattgcttagcattaaggcccgacatggaaccggggtgtgacgagttcctgccgccaccggagtgcccggtttttgagcctagctgggctgaattccaagacccgcttggctacattgcgaaaataaggcccatagcagagaagtctggcatctgcaaaatccgcccacccgcggattggcagcctccttttgcagtagaagttgacaatttcagatttactcctcgcgtccaaaggctaaatgaactggaggcccaaactagagtgaaattgaactatttggatcagattgcaaaattctgggaaattcaaggctcctctttaaagattcccaatgtggagcggaagatcttggacctctacagccttagtaagattgtgattgaggaaggtggctatgaagccatctgcaaggatcgtcggtgggctcgagttgcccagcgtctccactacccaccaggcaaaaacattggctccctgctacgatcacattacgaacgcattatttacccctatgaaatgtttcagtctggagccaaccatgtgcaatgtaacacacacccgtttgacaatgaggtaaaagataaggaatacaagccccacagcatcccccttagacagtctgtgcagccttcaaagttcagcagctacagtcgacgggcaaaaaggctacagcctgatccagagcctacagaggaggacattgagaagcatccagagctaaagaagttacagatatatgggccaggtcccaaaatgatgggcttgggccttatggctaaggataaggataagactgtgcataagaaagtcacatgccccccaactgttacggtgaaggatgagcaaagtggaggtgggaacgtgtcatcaacattgctcaagcagcacttgagcctagagccctgcactaagacaaccatgcaacttcgaaagaatcacagcagtgcccagtttattgactcatatatttgccaagtatgctcccgtggggatgaagatgataagcttcttttctgtgatggctgtgatgacaattaccacatcttctgcttgttaccaccccttcctgaaatccccagaggcatctggaggtgcccaaaatgtatcttggcggagtgtaaacagcctcctgaagcttttggatttgaacaggctacccaggagtacagtttgcagagttttggtgaaatggctgattccttcaagtccgactacttcaacatgcctgtacatatggtgcctacagaacttgtagagaaggaattctggaggctggtgagcagcattgaggaagacgtgacagttgaatatggagctgatattcattccaaagaatttggcagtggctttcctgtcagcaatagcaaacaaaacttatctcctgaggagaaggagtatgcgaccagtggttggaacctgaatgtgatgccagtgctagatcagtctgttctctgtcacatcaatgcagacatctcaggcatgaaggtgccctggctgtacgtgggcatggttttctcagcattttgttggcatattgaggatcactggagttactctattaactatctgcattggggtgagccgaagacctggtatggtgtaccctccctggcagcagagcatttggaggaggtgatgaagatgctgacacctgagctgtttgatagccagcctgatctcctacaccagcttgtcactctcatgaatcccaacactttgatgtcccatggtgtgccagttgtccgcacaaaccagtgtgcaggggagtttgtcatcacttttcctcgtgcttaccacagtggttttaaccaaggctacaattttgctgaagctgtcaacttttgtactgctgactggctacctgctggacgccagtgcattgaacactaccgccggctccggcgctattgtgtcttctcccacgaggagctcatctgcaagatggctgccttcccagagacgttggatctcaatctagcagtagctgtgcacaaggagatgttcattatggttcaggaggagcgacgtctacgaaaggcccttttggagaagggcgtcacggaggctgagcgagaggcttttgagctgctcccagatgatgaacgccagtgcatcaagtgcaagaccacgtgcttcttgtcagccctggcctgctacgactgcccagatggccttgtatgcctttcccacatcaatgacctctgcaagtgctctagtagccgacagtacctccggtatcggtacaccttggatgagctccccaccatgctgcataaactgaagattcgggctgagtcttttgacacctgggccaacaaagtgcgagtggccttggaggtggaggatggccgtaaacgcagctttgaagagctaagggcactggagtctgaggctcgtgagaggaggtttcctaatagtgagctgcttcagcgactgaagaactgcctgagtgaggtggaggcttgtattgctcaagtcctggggctggtcagtggtcaggtggccaggatggacactccacagctgaccttgactgaactccgggtccttcttgagcagatgggcagcctgccctgtgccatgcatcagattggggatgtcaaggatgtcctggaacaggtggaggcctatcaagctgaggctcgtgaggctctggccacactgccctctagtccagggctattgcggtccctgttggagagggggcagcagctgggtgtagaggtgcctgaagcccatcagcttcagcagcaggtggagcaggcgcaatggctagatgaagtgaagcaggccctggccccttctgctcacaggggctctctggtcatcatgcaggggcttttggttatgggtgccaagatagcctccagcccttctgtggacaaggcccgggctgagctgcaagaactactgaccattgcagagcgctgggaagaaaaggctcatttctgcctggaggccaggcagaagcatccaccagccacattggaagccataattcgtgagacagaaaacatccctgttcacctgcctaacatccaggctctcaaagaagctctgactaaggcacaagcttggattgctgatgtggatgagatccaaaatggtgaccactacccctgtctagatgacttggagggcctggtggctgtgggccgggacctgcctgtggggctggaagagctgagacagctagagctgcaggtattgacagcacattcctggagagagaaggcctccaagacctttctcaagaagaattcttgctacacactgcttgaggtgctttgcccgtgtgcagacgctggctcagacagcaccaagcgtagccggtggatggagaaggcgctggggttgtaccagtgtgacacagagctgctggggctgtctgcacaggacctcagagacccaggctctgtgattgtggccttcaaggaaggggaacagaaggagaaggagggtatcctgcagctgcgtcgcaccaactcagccaagcccagtccactggcaccatccctcatggcctcttctccgacttctatctgtgtgtgtgggcaggtgccagctggggtgggagttctgcagtgtgacctgtgtcaggactggttccatgggcagtgtgtgtcagtgccccatctcctcacctctccaaagcccagtctcacttcatctccactgctagcctggtgggaatgggacacaaaattcctgtgtccactgtgtatgcgctcacgacggccacgcctagagacaatcctagccttgctggttgccctgcagaggctgcccgtgcggctgcctgagggtgaggcccttcagtgtctcacagagagggccattggctggcaagaccgtgccagaaaggctctggcctctgaagatgtgactgctctgttgcgacagctggctgagcttcgccaacagctacaggccaaacccagaccagaggaggcctcagtctacacttcagccactgcctgtgaccctatcagagaaggcagtggcaacaatatttctaaggtccaagggctgctggagaatggagacagtgtgaccagtcctgagaacatggctccaggaaagggctctgacctggagctactgtcctcactgttgccgcagttgactggccctgtgttggagctgcctgaggcaatccgggctcccctggaggagctcatgatggaaggggacctgcttgaggtgaccctggatgagaaccacagcatctggcagctgctgcaggctggacagcctccagacctggacagaattcgcacacttctggagctggaaaaatttgaacatcaagggagtcggacaaggagccgggctctggagaggcgacggcggcggcagaaggtggatcagggtagaaacgttgagaatcttgttcaacaggagcttcagtcaaaaagggctcggagctcagggattatgtctcaggtgggccgagaagaagaacattatcaggagaaagcagaccgtgaaaatatgttcctgacaccttccacagaccacagccctttcttgaaaggaaaccaaaatagcttacaacacaaggattcaggctcttcagctgcttgtccttctttaatgcctttgctacaactctcctactctgatgagcaacagttgtgacagtggcaccaaaggtcatttgtggttgtttttgtttgtttgtttcttaaatcctactatctcctggcctggacctcagaaggagctttttgcttatctataatttttcactgccaatttttgatatcctctctcctagagttactgttaaaaggttggttcgtaaagtccacaccccgatgctcagaagtgtcttgccagcaacattcctgctagcatacaggagtgatttcctaaaccagtttcattctagtctgaatagggacaaacaaatcttgaggaagcccaagtgcgtacctttatttttgcccccaccaccctctttctgtacttcaatttttgtttgttttttgtttttttgtccctgtcataaaatattttggtgcttcaaaacttgtaccttcattgtacatccttttcttttctccccttgggtcttattataaaagaagacaatgtacgttgtaattaccaaaaagaatagggaaaaacaagaatttcatgactctacctgtggtctatctttaatttcatttcttttgttaaaaataaaacaatgagtatgtttggatactatgaaaaaaaaaaaaaaaa

SEQ ID NO: 148476 - DNA, 4620 bp, Artificial Sequence
  derived and/or modified sequence
atggaacctggctgtgacgagttccttcctccccctgagtgcccggtctttgaaccctcctgggccgaattccaagacccactgggttatattgccaaaatacgccccatcgccgagaaatccggtatatgtaagattagaccccccgccgattggcagcctccctttgccgtcgaagtcgataactttcggtttaccccacgcgttcagaggctcaacgagttagaggctcaaactcgcgtgaagctgaattacctggatcagattgcgaaattctgggagatccagggatcttcactgaaaatccctaatgtggagcggaaaatacttgatttgtattcgctgtctaagatcgtgattgaggagggaggctatgaggcaatatgtaaagaccgccggtgggcgagagttgctcaacgtctccattacccccccggcaagaacatcgggtctctactgagatcccactacgaacggatcatatacccctatgagatgtttcagagcggcgcgaaccacgttcagtgtaatactcatccattcgataacgaggtgaaggataaggagtataagcctcattccattcccctgaggcaaagcgtacaaccttccaaattcagttcctatagtagacgggccaaaagattgcagccagaccctgaacctaccgaggaagacatagagaaacaccccgagctgaagaaactccagatttacggtcccggtccaaagatgatgggactggggctgatggccaaagataaggataagacagttcacaaaaaagttacctgtccaccaacagtgactgtcaaggacgagcagagcggcggaggtaacgtttcttccaccctgctgaaacaacaccttagcctagagccgtgcactaaaaccactatgcagctgagaaagaatcattccagcgcacagtttatcgacagctacatctgccaagtttgctcgagaggcgatgaagacgataaactgttgttttgtgacggctgtgacgataattaccatatcttctgcctgctcccccccctgcccgagattcctagggggatttggcgctgtccaaaatgtattctggccgagtgtaaacaaccacctgaagcatttggattcgaacaggccacacaggagtattccctgcaatcgtttggagaaatggctgactctttcaaatctgactacttcaatatgcccgtccacatggtacctacggaactggtggaaaaagaattctggaggcttgtctccagtatcgaggaggacgtgaccgtcgaatatggagccgatatccactctaaagagttcggcagcggatttcccgtgagcaatagtaagcagaacctgagccctgaggagaaggagtacgcaacatcgggatggaatctgaatgtcatgcctgtgctggaccagtcagtgctgtgccatatcaacgctgacatcagtggaatgaaggtcccctggctgtacgtaggcatggtgttttcagccttttgttggcatatcgaggatcactggtcttacagcatcaattatcttcattggggcgagcctaaaacttggtatggagtgccgtctctcgccgcagagcatttggaagaggttatgaagatgctgaccccggagctgtttgattcacagcccgacctcctgcatcaactcgtgaccctgatgaatcccaacactctcatgtcccatggagttccagtcgtgcgaactaaccaatgcgccggcgagttcgtgattactttccctcgggcataccatagcggtttcaaccagggttacaatttcgcagaagccgtaaacttttgtacagccgactggctgccagctggacggcagtgcattgaacattacagacgcttgagacgctactgtgtcttcagccacgaggagttgatctgtaaaatggcagcttttccggaaaccctggacctgaacctggccgttgccgtgcacaaggagatgttcataatggtgcaggaggaaaggaggctccgaaaagccctgcttgagaagggggtaaccgaggccgagcgtgaggcgttcgagctgctgcccgacgatgaaaggcaatgcatcaaatgcaagactacttgttttctcagcgctctggcctgctatgattgccccgacgggctggtttgcctctcccatatcaacgatctttgcaaatgttccagcagtaggcagtatttgcgctaccggtacaccctcgatgaacttccgaccatgctccataagctaaaaattcgggccgagagttttgatacatgggccaacaaagtccgcgtcgcattggaagtcgaagatggtcgaaagaggagttttgaagaactccgggcactggaaagcgaagcccgggaacgccgatttccaaatagcgagctgctgcagcggctgaaaaattgcttgtctgaggtagaggcttgtattgcccaggtgcttggcttggtttctgggcaggttgcgcgcatggacacccctcaattgaccctgaccgagctcagggtgctgcttgaacaaatgggatccctcccctgcgccatgcaccagattggcgatgtcaaggacgtgctcgagcaggtcgaggcctaccaggctgaagcccgggaggcgctggccacactcccctcatcccctggactgcttcgctctcttctggagcggggacaacagctcggagtggaggttcctgaagctcatcagttgcagcagcaagtcgaacaggcacaatggttggacgaggtgaaacaggcacttgccccaagtgcccacagaggctccctcgtgatcatgcagggcctgctcgttatgggagctaagatcgcctcttcaccctctgtagataaagctcgagccgaactacaagaattgttaacgatcgcagaaaggtgggaggaaaaagctcacttttgcctggaggcacggcagaagcatccccccgcgacacttgaggccattataagagagaccgaaaatatacccgtacacctcccaaatattcaagcactcaaggaggcactgacaaaagctcaggcctggattgctgatgtcgatgaaatccagaacggggatcactacccatgccttgatgatctggaagggctagtcgccgtcgggcgcgacctgcctgtggggcttgaagaactgagacagctggagctgcaggttcttacggcacatagttggagggaaaaggcttccaaaacgttcctgaagaagaatagttgttatactctgctggaggtgctatgtccctgtgccgatgcgggatcagacagcaccaagaggtcgagatggatggagaaggctctcggcctgtatcagtgtgataccgaactgctgggcctgagcgcacaagatctccgtgacccagggtcagtgatcgtagcgttcaaggagggtgaacagaaagaaaaggaggggatcctacaactgagacgtaccaatagcgccaagcctagtccactggctccctccctgatggcctcttctccaacctcaatctgtgtgtgtggacaggtgccagccggcgttggagtcctgcagtgcgacctgtgccaggactggtttcacggacaatgcgtaagtgtgcctcacctgcttactagtccaaagccaagtctcacctccagtcctctgttagcctggtgggagtgggacacgaagttcctgtgtcccctgtgtatgagatctagaaggccacggttggaaactatccttgccctgttggtcgcattacagcggctgccagtgcgcctccctgaaggggaagccttacagtgcctgaccgagcgggctataggttggcaagatagggcccgcaaagccttggcgagcgaggatgtgactgctttactgagacagctggcagagctacggcagcagctgcaggctaagccacgacctgaggaggcatctgtctatacttctgcaactgcatgtgatcccattcgggaaggctctggtaacaatatctcaaaggtacaaggattgctggaaaatggagacagcgtgacatccccggagaatatggcccctggcaaaggcagcgacctggaactgctgagtagcctgctccctcagttgactggaccggtgctcgaacttccggaggctattcgcgcacccttggaggagctaatgatggaaggagacttgcttgaggttacgttagacgaaaatcattctatctggcaactgcttcaggctgggcagccaccagacctcgaccggattcgtactctgctggagctcgaaaaattcgagcatcagggcagtagaaccaggagcagagctttggaaagacggagaaggcgccagaaggtggatcaggggagaaacgtggaaaacctggtccaacaggagttgcaatcaaagcgggcaagaagctctgggattatgtcccaggtggggcgcgaagaagagcattaccaggagaaggccgacagagaaaatatgttcctgaccccctctactgatcacagccctttcctgaagggcaaccagaactcactccaacacaaagattccggatcaagtgcggcatgtccctccttgatgccactgctgcagctgtcctattcggatgagcaacaactttag

SEQ ID NO: 148477 - DNA, 4431 bp, Artificial Sequence
  derived and/or modified sequence
atggaacccggttgcgacgaatttctccctcctcctgagtgccctgtgttcgagccatcttgggccgaattccaagatcccctcggctacatcgcgaagattcgccccatcgccgagaagagtgggatctgtaagatcaggccaccagcagattggcagccccccttcgccgttgaagtggacaattttagatttacccccagggtgcagcgattaaatgagctcgaaatcgtcattgaagagggggggtacgaggcaatctgtaaggaccgcaggtgggccagggtagcacaacggttgcattatcccccaggcaagaacataggctctctgcttcgctcgcattacgagcggatcatctatccatacgaaatgtttcagagcggagcaaaccatgtacaatgtaacacccacccattcgacaatgaggtcaaggacaaggagtacaaaccccactccataccgctccgccaatctgtacaacccagcaaattctcgagttactctcggagagcaaagagactgcagcctgatccggaaccaactgaggaggacattgaaaaacatcccgagctaaagaaactgcaaatttatggccccgggcccaaaatgatgggactcggactgatggcaaaggataaggacaaaactgtgcataagaaggtgacttgccctcccacagttacagttaaggacgagcagtctggtggcggaaatgtgtctagtactctcctgaagcagcacctgagcctcgaaccatgcaccaaaacaaccatgcagttgagaaaaaatcacagctcagcccaatttatcgactcttacatttgccaggtttgttctagaggtgatgaggatgataaattgctgttctgcgacggatgcgatgacaactaccacatattttgtctcctcccacctctccccgagattcctcggggaatctggagatgccctaagtgtattctggccgagtgcaaacagcctcccgaggccttcgggtttgagcaggccactcaggagtactccttgcagtctttcggggagatggccgactcctttaaatccgactattttaacatgcccgtgcatatggtgccaactgagctggtagagaaggagttttggaggcttgtgtcaagcatcgaagaagacgtaacagtggaatacggagccgacatccactccaaggaattcggctcaggctttccagtgagtaactctaaacagaacctctccccagaggaaaaagagtacgccacatcaggttggaatctgaacgtcatgcctgttctcgatcagtcagttttatgtcacattaacgccgacatttctggcatgaaggtcccttggctgtacgtgggcatggtgttcagcgcattttgctggcatattgaggatcattggtcatacagcataaattacctgcactggggagaacctaagacatggtatggagtgccaagtcttgccgcagaacacctggaggaggtcatgaagatgctaacccctgagctcttcgattcacaacccgaccttcttcatcagctggttaccctcatgaatccaaatactctgatgtcccacggcgtgcctgttgtgagaacaaatcagtgcgctggagaattcgttattacgtttcctagagcatatcactcgggcttcaaccagggttataactttgccgaagctgtgaatttttgcacagctgactggctccctgccggtcgacagtgcatcgaacactatcgcagactccggagatattgtgtattttctcatgaagaattaatctgcaaaatggcagcatttcctgagacgctcgatctgaacctggcggtcgcagtgcataaggaaatgttcatcatggtgcaggaagaaagacggttacgcaaagcacttctggagaaaggcgtgacagaagctgagcgcgaggcattcgaactgctccccgacgacgagcggcagtgcatcaagtgcaagactacttgcttcctttctgcacttgcatgctacgattgtccggacgggctcgtctgcctctctcacattaacgatttgtgtaagtgttcctcatccagacaatacctgcgttatagatatactctcgatgaactgccaactatgcttcacaaattgaagattcgcgccgaaagtttcgacacctgggccaacaaggtgcgtgtggccctggaggtcgaggatggccggaagcgctcattcgaagagctgcgagcgctggagagtgaggcacgcgagcggagattccctaatagcgaactcctccagcgcctgaagaattgcctttccgaagtggaagcttgtattgcccaggttcttgggctcgtgagtggccaggtggcgcgcatggacaccccccagttgactctcacagaactgcgggtactgcttgagcagatgggttccttaccttgcgccatgcatcagatcggtgacgtgaaagatgtattggagcaagttgaagcgtaccaggctgaggcgcgggaagctctcgcaacattaccaagctcacctgggttacttagatcactgcttgagcgcgggcagcagctgggcgttgaagtcccagaggcacaccaactgcagcagcaggtggagcaagcacagtggctcgatgaggttaagcaggccctagcaccatctgctcaccgaggttctctggtgataatgcaagggcttctcgtcatgggagccaagattgccagctccccaagcgttgataaggctagggcggagctacaggaactgcttactatagccgagcggtgggaggaaaaagcgcatttttgcttggaggcccgacagaagcatccgcctgcaactctggaggccataatccgagaaaccgaaaatattcccgttcaccttcccaatatccaggctctaaaggaagccctcaccaaggcacaggcctggatagccgatgtcgacgagatccagaatggagaccattatccttgtttagacgacttggagggcctggttgcggtcggcagagatttgccagtcggcctagaagagctcaggcagttagagctccaagtgcttaccgcacactcctggcgcgaaaaggcttctaagactttcctcaaaaagaactcatgttatacactattagaggtcctctgcccgtgtgccgacgccggctccgattccacaaagcgcagcaggtggatggaaaaagctctcgggctgtaccagtgtgacactgagctgctgggtctgagcgcccaggacttgagagatcccggctctgtgatcgtggccttcaaagagggagaacaaaaagagaaagaaggaatcctccaactgcgtcgcacaaacagtgcaaagccaagccctctggccccctcactgatggcttcatcccctacgagcatctgcgtgtgcggccaggtgcccgccggtgtaggagtgctgcagtgtgatctgtgtcaggactggttccatgggcagtgcgttagcgtccctcacctcttaaccagcccaaagccatcactgacctcttcgccactgcttgcatggtgggaatgggacactaaattcctgtgccctctgtgtatgcgctcacgacggccccgactggagaccatcctggctttgcttgtggccctccagcgcctgcctgtgagactgccagagggggaagctctgcagtgcctcacagagcgggccatcgggtggcaggatagagcacggaaggctcttgcttcagaagatgtgactgcactattacggcagttagcggagttgagacagcagctccaggctaaaccaaggcctgaagaggcgagcgtttacacgtcagccaccgcgtgtgacccgattcgggaaggctcaggtaataatatctctaaggtccaaggattattggaaaatggggactcggtaacatcacctgagaacatggcccccgggaaaggttccgacctggagctgttgtcctcgctactgccccagctgactggcccagtgctcgaactgccagaggcgatcagggcacccttagaggaactcatgatggagggcgaccttctggaagttacgctcgacgagaaccattccatatggcagctgctgcaggccggacagcctcccgacctggacagaatcaggaccctgctggaattggaaaaatttgagcaccagggcagccgcacccggtccagagccttagagagaagacgccggcgccaaaaggtcgatcagggtagaaatgtcgagaacctggtgcagcaagaactgcagtcgaagagagctaggtcgtctgggattatgtcacaggtgggacgagaagaggagcactaccaggaaaaagcagatcgcgagaacatgttcctgacgccttccaccgaccatagtccatttctaaagggtaatcagaatagccttcaacataaggactctggatag

SEQ ID NO: 148478 - DNA, 4620 bp, Artificial Sequence
  derived and/or modified sequence
atggagcccggctgtgatgagttcctgcccccaccagaatgtcctgtgtttgagcccagctgggccgagttccaggaccccctgggctacatcgccaagatccggcccatcgccgagaagagcggcatctgcaagatccggcccccagctgactggcagcccccatttgctgtggaggtggacaacttccgcttcaccccccgggtgcagaggctgaatgagctggaggcccagaccagggtgaagctgaactacctggaccagatcgccaagttctgggagatccagggcagcagcctgaagatccccaacgtggagaggaagatcctggacctgtacagcctgagcaagatcgtcatcgaggagggcggctatgaggccatctgcaaggaccggcgctgggcccgggtggcccagaggctgcactacccacctgggaagaacatcggcagcctgctgcggagccactatgagcgcatcatctacccctatgagatgttccagagcggggccaaccacgtgcagtgcaacacccacccctttgacaatgaggtgaaggacaaggagtacaagccccacagcatccccctgcggcagagcgtgcagcccagcaagttcagcagctacagcagaagagccaagaggctgcagcctgaccctgagcccacagaagaagatattgagaagcaccctgagctgaagaagctgcagatctacggccctggccccaagatgatgggcctgggcctgatggccaaggacaaggacaagacagtgcacaagaaggtgacctgcccccccaccgtgacagtgaaggatgagcagagcggcggcggcaatgtgagcagcaccctgctgaagcagcacctgagcctggagccctgcaccaagaccaccatgcagctgaggaagaaccacagcagcgcccagttcatcgacagctacatctgccaggtgtgcagcagaggagatgaagatgacaagctgctcttctgtgatggctgtgatgacaactaccacatcttctgcctgctgccccccctgcctgagatcccccggggcatctggcgctgccccaagtgcatcctggccgagtgcaagcagcccccagaggcctttggatttgagcaggccacccaggagtacagcctgcagagctttggagagatggctgacagcttcaagagtgactacttcaacatgcctgtgcacatggtgcccacagagctggtggagaaggagttctggaggctggtgagcagcattgaggaggatgtgacagtggagtatggagctgacatccacagcaaggagtttggaagtggcttccctgtgagcaacagcaagcagaacctgagccctgaggagaaggagtatgccaccagcggctggaacctgaatgtgatgcctgtgctggaccagagcgtgctgtgccacatcaatgctgacatcagcggcatgaaggtgccctggctgtatgtgggcatggtgttttctgccttctgctggcacatcgaggaccactggagctacagcatcaactacctgcactggggcgagcccaagacctggtatggagtgcccagcctggccgctgagcacctggaggaggtgatgaagatgctgaccccagagctgtttgacagccagcctgacctgctgcaccagctggtgaccctgatgaaccccaacaccctgatgagccatggagtgcctgtggtgaggaccaaccagtgtgccggggagtttgtgatcaccttcccccgggcctaccacagcggcttcaaccagggctacaactttgctgaggccgtgaacttctgcacagctgactggctgcctgctggccggcagtgcatcgagcactaccgccgcctgcggcgctactgtgtgttcagccatgaggagctgatctgcaagatggccgccttccctgagaccctggacctgaacctggccgtggccgtgcacaaggagatgttcatcatggtgcaggaggagcggcggctgaggaaggccctgctggagaagggcgtgacagaggccgagcgggaggcctttgagctgctgcctgatgatgagcggcagtgcatcaagtgcaagaccacctgcttcctgagcgccctggcctgctatgactgcccagatggcctggtgtgcctgagccacatcaatgacctgtgcaagtgcagcagcagccggcagtacctgcgctaccgctacaccctggatgagctgcccaccatgctgcacaagctgaagatccgggcagagagctttgacacctgggccaacaaggtgcgggtggccctggaggtggaggatggcaggaagaggagctttgaggagctgcgggccctggagagcgaggcccgggagcggcgcttccccaacagcgagctgctgcagaggctgaagaactgcctgtctgaggtggaggcctgcatcgcccaggtgctgggcctggtgtctggccaggtggccaggatggacaccccccagctgaccctgacagagctgcgggtgctgctggagcagatgggcagcctgccctgtgccatgcaccagattggagatgtgaaggatgtgctggagcaggtggaggcctaccaggccgaggcccgggaggccctggccaccctgcccagcagccctggcctgctgcggagcctgctggagcggggccagcagctgggcgtggaggtgcctgaggcccaccagctgcagcagcaggtggagcaggcccagtggctggatgaggtgaagcaggccctggcccccagcgcccaccggggcagcctggtgatcatgcagggcctgctggtgatgggcgccaagatcgccagcagccccagcgtggacaaggcccgggcagagctgcaggagctgctgaccatcgccgagcgctgggaggagaaggcccacttctgcctggaggcccggcagaagcaccccccagccaccctggaggccatcatccgggagacagagaacatccctgtgcacctgcccaacatccaggccctgaaggaggccctgaccaaggcccaggcctggattgctgatgtggatgagatccagaatggagaccactacccctgcctggatgacctggagggcctggtggccgtgggccgggacctgcctgtgggcctggaggagctgcggcagctggagctgcaggtgctgacagcccacagctggagggagaaggccagcaagaccttcctgaagaagaacagctgctacaccctgctggaggtgctgtgcccctgtgctgatgctggcagtgacagcaccaagaggagccgctggatggagaaggccctgggcctgtaccagtgtgacacagagctgctgggcctgagcgcccaggacctgcgggaccccggcagcgtcatcgtggccttcaaggagggggagcagaaggagaaggagggcatcctgcagctgcggaggaccaacagcgccaagcccagccccctggcccccagcctgatggccagcagccccaccagcatctgtgtgtgtggccaggtgcctgctggggtgggcgtgctgcagtgtgacctgtgccaggactggttccacggccagtgtgtgtctgtgccccacctgctgaccagccccaagcccagcctgaccagcagccccctgctggcctggtgggagtgggacaccaagttcctgtgccccctgtgcatgaggagccggcggccccggctggagaccatcctggccctgctggtggccctgcagaggctgcctgtgcggctgcctgagggggaggccctgcagtgcctgacagagcgggccatcggctggcaggaccgggccaggaaggccctggcctctgaagatgtgacagccctgctgcggcagctggccgagctgcggcagcagctgcaggccaagcccaggcctgaggaggcctctgtgtacaccagcgccacagcctgtgaccccatccgggagggcagcggcaacaacatcagcaaggtgcagggcctgctggagaatggagacagcgtgaccagccctgagaacatggcccctgggaagggcagtgacctggagctgctgagcagcctgctgccccagctgactggacctgtgctggagctgcctgaggccatccgggcccccctggaggagctgatgatggagggggacctgctggaggtgaccctggatgagaaccacagcatctggcagctgctgcaggccggccagcccccagacctggaccgcatccgcaccctgctggagctggagaagtttgagcaccagggcagcaggaccaggagccgggccctggagaggagaagaagacggcagaaggtggaccagggcagaaatgtggagaacctggtgcagcaggagctgcagagcaagagggcccggagcagcggcatcatgagccaggtgggccgggaggaggagcactaccaggagaaggctgaccgggagaacatgttcctgacccccagcacagaccacagccccttcctgaagggcaaccagaacagcctgcagcacaaggacagcggcagcagcgctgcctgccccagcctgatgcccctgctgcagctgagctacagtgatgagcagcagctgtag

SEQ ID NO: 148479 - DNA, 4431 bp, Artificial Sequence
  derived and/or modified sequence
atggagcccggctgtgatgagttcctgcccccaccagaatgtcctgtgtttgagcccagctgggccgagttccaggaccccctgggctacatcgccaagatccggcccatcgccgagaagagcggcatctgcaagatccggcccccagctgactggcagcccccatttgctgtggaggtggacaacttccgcttcaccccccgggtgcagaggctgaatgagctggagatcgtgattgaggagggcggctatgaggccatctgcaaggaccggcgctgggcccgggtggcccagaggctgcactacccacctgggaagaacatcggcagcctgctgcggagccactatgaaagaatcatctacccctatgagatgttccagagcggggccaaccacgtgcagtgcaacacccacccctttgacaatgaggtgaaggacaaggagtacaagccccacagcatccccctgcggcagagcgtgcagcccagcaagttcagcagctacagccggcgggccaagaggctgcagcctgaccctgagcccacagaggaggacatcgagaagcaccctgagctgaagaagctgcagatctacggccctggccccaagatgatgggcctgggcctgatggccaaggacaaggacaagacagtgcacaagaaggtgacctgccccccaacagtgacagtgaaggatgagcagagcggcggcggcaatgtgagcagcaccctgctgaagcagcacctgagcctggagccctgcaccaagaccaccatgcagctgaggaagaaccacagcagcgcccagttcatcgacagctacatctgccaggtgtgcagcagaggagatgaagatgacaagctgctcttctgtgatggctgtgatgacaactaccacatcttctgcctgctgccccccctgcctgagatcccccggggcatctggcgctgccccaagtgcatcctggccgagtgcaagcagcccccagaggccttcggctttgagcaggccacccaggagtacagcctgcagagctttggagagatggctgacagcttcaagagtgactacttcaacatgcctgtgcacatggtgcccacagagctggtggagaaggagttctggaggctggtgagcagcattgaagaagatgtgacagtggagtatggagctgacatccacagcaaggagtttggcagcggcttccctgtgagcaacagcaagcagaacctgagccctgaggagaaggagtatgccaccagcggctggaacctgaatgtgatgcctgtgctggaccagagcgtgctgtgccacatcaatgctgacatcagcggcatgaaggtgccctggctgtatgtgggcatggtgttcagcgccttctgctggcacatcgaggaccactggagctacagcatcaactacctgcactggggcgagcccaagacctggtacggcgtgcccagcctggccgctgagcacctggaggaggtgatgaagatgctgaccccagagctgtttgacagccagcctgacctgctgcaccagctggtgaccctgatgaaccccaacaccctgatgagccacggcgtgcctgtggtgaggaccaaccagtgtgccggggagtttgtgatcaccttcccccgggcctaccacagcggcttcaaccagggctacaactttgctgaggccgtgaacttctgcacagctgactggctgcctgctggccggcagtgcatcgagcactacagaaggctgcggcgctactgtgtgttcagccatgaggagctgatctgcaagatggccgccttccctgagaccctggacctgaacctggccgtggccgtgcacaaggagatgttcatcatggtgcaggaggagcggcggctgaggaaggccctgctggagaagggcgtgacagaagctgagcgggaggcctttgagctgctgcctgatgatgagcggcagtgcatcaagtgcaagaccacctgcttcctgagcgccctggcctgctatgactgcccagatggcctggtgtgcctgagccacatcaatgacctgtgcaagtgcagcagcagccggcagtacctgcgctaccgctacaccctggatgagctgcccaccatgctgcacaagctgaagatccgggcagagagctttgacacctgggccaacaaggtgcgggtggccctggaggtggaggatggcaggaagaggagctttgaggagctgcgggccctggagagcgaggcccgggagcggcgcttccccaacagcgagctgctgcagaggctgaagaactgcctgtctgaggtggaggcctgcatcgcccaggtgctgggcctggtgtctggccaggtggccaggatggacaccccccagctgaccctgacagagctgcgggtgctgctggagcagatgggcagcctgccctgtgccatgcaccagattggagatgtgaaggatgtgctggagcaggtggaggcctaccaggccgaggcccgggaggccctggccaccctgcccagcagccctggcctgctgcggagcctgctggagcggggccagcagctgggcgtggaggtgcctgaggcccaccagctgcagcagcaggtggagcaggcccagtggctggatgaggtgaagcaggccctggcccccagcgcccaccggggcagcctggtgatcatgcagggcctgctggtgatgggcgccaagatcgccagcagccccagcgtggacaaggcccgggcagagctgcaggagctgctgaccatcgccgagcgctgggaggagaaggcccacttctgcctggaggcccggcagaagcaccccccagccaccctggaggccatcatccgggagacagagaacatccctgtgcacctgcccaacatccaggccctgaaggaggccctgaccaaggcccaggcctggattgctgatgtggatgagatccagaatggagaccactacccctgcctggatgacctggagggcctggtggccgtgggccgggacctgcctgtgggcctggaggagctgcggcagctggagctgcaggtgctgacagcccacagctggagggagaaggccagcaagaccttcctgaagaagaacagctgctacaccctgctggaggtgctgtgcccctgtgctgatgctggcagtgacagcaccaagaggagccgctggatggagaaggccctgggcctgtaccagtgtgacacagagctgctgggcctgagcgcccaggacctgcgggaccccggctctgtgattgtggccttcaaggagggggagcagaaggagaaggagggcatcctgcagctgcggaggaccaacagcgccaagcccagccccctggcccccagcctgatggccagcagccccaccagcatctgtgtgtgtggccaggtgcctgctggggtgggcgtgctgcagtgtgacctgtgccaggactggttccacggccagtgtgtgtctgtgccccacctgctgaccagccccaagcccagcctgaccagcagccccctgctggcctggtgggagtgggacaccaagttcctgtgccccctgtgcatgaggagcagaagaccccggctggagaccatcctggccctgctggtggccctgcagaggctgcctgtgcggctgcctgagggggaggccctgcagtgcctgacagagcgggccatcggctggcaggaccgggccaggaaggccctggcctctgaagatgtgacagccctgctgcggcagctggccgagctgcggcagcagctgcaggccaagcccaggcctgaggaggcctctgtgtacaccagcgccacagcctgtgaccccatccgggagggcagcggcaacaacatcagcaaggtgcagggcctgctggagaatggagacagcgtgaccagccctgagaacatggcccctggaaaaggaagtgacctggagctgctgagcagcctgctgccccagctgaccggccctgtgctggagctgcctgaggccatccgggcccccctggaggagctgatgatggagggggacctgctggaggtgaccctggatgagaaccacagcatctggcagctgctgcaggccggccagcccccagacctggaccgcatccgcaccctgctggagctggagaagtttgagcaccagggcagcaggaccaggagccgggccctggagaggagaagaagacggcagaaggtggaccagggcagaaatgtggagaacctggtgcagcaggagctgcagagcaagagggcccggagcagcggcatcatgagccaggtgggccgggaggaggagcactaccaggagaaggctgaccgggagaacatgttcctgacccccagcacagaccacagccccttcctgaagggcaaccagaacagcctgcagcacaaggacagcggctag

SEQ ID NO: 148480 - DNA, 5472 bp, Artificial Sequence
  derived and/or modified sequence
cggccatactatttttatcttgctttttcgttctgtcgcagtactgtttaatatgagtccagcgacggctctgtgactgttttcctctggtaaaatcgctcttgcgtcctcagcgtttatctcaggtgcggaaggtctcacaggtttggaaatagcgccggaaaaatcgatccgcggagtgagacggctcgtaccacactgcagggcccggaggtcaagatggtggctgtaaaactaggatccctgacgattgcttagcattaaggcccgacatggaaccggggtgtgacgagttcctgccgccaccggagtgcccggtttttgagcctagctgggctgaattccaagacccgcttggctacattgcgaaaataaggcccatagcagagaagtctggcatctgcaaaatccgcccacccgcggattggcagcctccttttgcagtagaagttgacaatttcagatttactcctcgcgtccaaaggctaaatgaactggaggcccaaactagagtgaaattgaactatttggatcagattgcaaaattctgggaaattcaaggctcctctttaaagattcccaatgtggagcggaagatcttggacctctacagccttagtaagattgtgattgaggaaggtggctatgaagccatctgcaaggatcgtcggtgggctcgagttgcccagcgtctccactacccaccaggcaaaaacattggctccctgctacgatcacattacgaacgcattatttacccctatgaaatgtttcagtctggagccaaccatgtgcaatgtaacacacacccgtttgacaatgaggtaaaagataaggaatacaagccccacagcatcccccttagacagtctgtgcagccttcaaagttcagcagctacagtcgacgggcaaaaaggctacagcctgatccagagcctacagaggaggacattgagaagcatccagagctaaagaagttacagatatatgggccaggtcccaaaatgatgggcttgggccttatggctaaggataaggataagactgtgcataagaaagtcacatgccccccaactgttacggtgaaggatgagcaaagtggaggtgggaacgtgtcatcaacattgctcaagcagcacttgagcctagagccctgcactaagacaaccatgcaacttcgaaagaatcacagcagtgcccagtttattgactcatatatttgccaagtatgctcccgtggggatgaagatgataagcttcttttctgtgatggctgtgatgacaattaccacatcttctgcttgttaccaccccttcctgaaatccccagaggcatctggaggtgcccaaaatgtatcttggcggagtgtaaacagcctcctgaagcttttggatttgaacaggctacccaggagtacagtttgcagagttttggtgaaatggctgattccttcaagtccgactacttcaacatgcctgtacatatggtgcctacagaacttgtagagaaggaattctggaggctggtgagcagcattgaggaagacgtgacagttgaatatggagctgatattcattccaaagaatttggcagtggctttcctgtcagcaatagcaaacaaaacttatctcctgaggagaaggagtatgcgaccagtggttggaacctgaatgtgatgccagtgctagatcagtctgttctctgtcacatcaatgcagacatctcaggcatgaaggtgccctggctgtacgtgggcatggttttctcagcattttgttggcatattgaggatcactggagttactctattaactatctgcattggggtgagccgaagacctggtatggtgtaccctccctggcagcagagcatttggaggaggtgatgaagatgctgacacctgagctgtttgatagccagcctgatctcctacaccagcttgtcactctcatgaatcccaacactttgatgtcccatggtgtgccagttgtccgcacaaaccagtgtgcaggggagtttgtcatcacttttcctcgtgcttaccacagtggttttaaccaaggctacaattttgctgaagctgtcaacttttgtactgctgactggctacctgctggacgccagtgcattgaacactaccgccggctccggcgctattgtgtcttctcccacgaggagctcatctgcaagatggctgccttcccagagacgttggatctcaatctagcagtagctgtgcacaaggagatgttcattatggttcaggaggagcgacgtctacgaaaggcccttttggagaagggcgtcacggaggctgagcgagaggcttttgagctgctcccagatgatgaacgccagtgcatcaagtgcaagaccacgtgcttcttgtcagccctggcctgctacgactgcccagatggccttgtatgcctttcccacatcaatgacctctgcaagtgctctagtagccgacagtacctccggtatcggtacaccttggatgagctccccaccatgctgcataaactgaagattcgggctgagtcttttgacacctgggccaacaaagtgcgagtggccttggaggtggaggatggccgtaaacgcagctttgaagagctaagggcactggagtctgaggctcgtgagaggaggtttcctaatagtgagctgcttcagcgactgaagaactgcctgagtgaggtggaggcttgtattgctcaagtcctggggctggtcagtggtcaggtggccaggatggacactccacagctgaccttgactgaactccgggtccttcttgagcagatgggcagcctgccctgtgccatgcatcagattggggatgtcaaggatgtcctggaacaggtggaggcctatcaagctgaggctcgtgaggctctggccacactgccctctagtccagggctattgcggtccctgttggagagggggcagcagctgggtgtagaggtgcctgaagcccatcagcttcagcagcaggtggagcaggcgcaatggctagatgaagtgaagcaggccctggccccttctgctcacaggggctctctggtcatcatgcaggggcttttggttatgggtgccaagatagcctccagcccttctgtggacaaggcccgggctgagctgcaagaactactgaccattgcagagcgctgggaagaaaaggctcatttctgcctggaggccaggcagaagcatccaccagccacattggaagccataattcgtgagacagaaaacatccctgttcacctgcctaacatccaggctctcaaagaagctctgactaaggcacaagcttggattgctgatgtggatgagatccaaaatggtgaccactacccctgtctagatgacttggagggcctggtggctgtgggccgggacctgcctgtggggctggaagagctgagacagctagagctgcaggtattgacagcacattcctggagagagaaggcctccaagacctttctcaagaagaattcttgctacacactgcttgaggtgctttgcccgtgtgcagacgctggctcagacagcaccaagcgtagccggtggatggagaaggcgctggggttgtaccagtgtgacacagagctgctggggctgtctgcacaggacctcagagacccaggctctgtgattgtggccttcaaggaaggggaacagaaggagaaggagggtatcctgcagctgcgtcgcaccaactcagccaagcccagtccactggcaccatccctcatggcctcttctccgacttctatctgtgtgtgtgggcaggtgccagctggggtgggagttctgcagtgtgacctgtgtcaggactggttccatgggcagtgtgtgtcagtgccccatctcctcacctctccaaagcccagtctcacttcatctccactgctagcctggtgggaatgggacacaaaattcctgtgtccactgtgtatgcgctcacgacggccacgcctagagacaatcctagccttgctggttgccctgcagaggctgcccgtgcggctgcctgagggtgaggcccttcagtgtctcacagagagggccattggctggcaagaccgtgccagaaaggctctggcctctgaagatgtgactgctctgttgcgacagctggctgagcttcgccaacagctacaggccaaacccagaccagaggaggcctcagtctacacttcagccactgcctgtgaccctatcagagaaggcagtggcaacaatatttctaaggtccaagggctgctggagaatggagacagtgtgaccagtcctgagaacatggctccaggaaagggctctgacctggagctactgtcctcactgttgccgcagttgactggccctgtgttggagctgcctgaggcaatccgggctcccctggaggagctcatgatggaaggggacctgcttgaggtgaccctggatgagaaccacagcatctggcagctgctgcaggctggacagcctccagacctggacagaattcgcacacttctggagctggaaaaatttgaacatcaagggagtcggacaaggagccgggctctggagaggcgacggcggcggcagaaggtggatcagggtagaaacgttgagaatcttgttcaacaggagcttcagtcaaaaagggctcggagctcagggattatgtctcaggtgggccgagaagaagaacattatcaggagaaagcagaccgtgaaaatatgttcctgacaccttccacagaccacagccctttcttgaaaggaaaccaaaatagcttacaacacaaggattcaggctcttcagctgcttgtccttctttaatgcctttgctacaactctcctactctgatgagcaacagttgtgacagtggcaccaaaggtcatttgtggttgtttttgtttgtttgtttcttaaatcctactatctcctggcctggacctcagaaggagctttttgcttatctataatttttcactgccaatttttgatatcctctctcctagagttactgttaaaaggttggttcgtaaagtccacaccccgatgctcagaagtgtcttgccagcaacattcctgctagcatacaggagtgatttcctaaaccagtttcattctagtctgaatagggacaaacaaatcttgaggaagcccaagtgcgtacctttatttttgcccccaccaccctctttctgtacttcaatttttgtttgttttttgtttttttgtccctgtcataaaatattttggtgcttcaaaacttgtaccttcattgtacatccttttcttttctccccttgggtcttattataaaagaagacaatgtacgttgtaattaccaaaaagaatagggaaaaacaagaatttcatgactctacctgtggtctatctttaatttcatttcttttgttaaaaataaaacaatgagtatgtttggatactatgaa

SEQ ID NO: 148481 - DNA, 4701 bp, Artificial Sequence
  derived and/or modified sequence
cggccatactatttttatcttgctttttcgttctgtcgcagtactgtttaatatgagtccagcgacggctctgtgactgttttcctctggtaaaatcgctcttgcgtcctcagcgtttatctcaggtgcggaaggtctcacaggtttggaaatagcgccggaaaaatcgatccgcggagtgagacggctcgtaccacactgcagggcccggaggtcaagatggtggctgtaaaactaggatccctgacgattgcttagcattaaggcccgacatggaaccggggtgtgacgagttcctgccgccaccggagtgcccggtttttgagcctagctgggctgaattccaagacccgcttggctacattgcgaaaataaggcccatagcagagaagtctggcatctgcaaaatccgcccacccgcggattggcagcctccttttgcagtagaagttgacaatttcagatttactcctcgcgtccaaaggctaaatgaactggagattgtgattgaggaaggtggctatgaagccatctgcaaggatcgtcggtgggctcgagttgcccagcgtctccactacccaccaggcaaaaacattggctccctgctacgatcacattacgaacgcattatttacccctatgaaatgtttcagtctggagccaaccatgtgcaatgtaacacacacccgtttgacaatgaggtaaaagataaggaatacaagccccacagcatcccccttagacagtctgtgcagccttcaaagttcagcagctacagtcgacgggcaaaaaggctacagcctgatccagagcctacagaggaggacattgagaagcatccagagctaaagaagttacagatatatgggccaggtcccaaaatgatgggcttgggccttatggctaaggataaggataagactgtgcataagaaagtcacatgccccccaactgttacggtgaaggatgagcaaagtggaggtgggaacgtgtcatcaacattgctcaagcagcacttgagcctagagccctgcactaagacaaccatgcaacttcgaaagaatcacagcagtgcccagtttattgactcatatatttgccaagtatgctcccgtggggatgaagatgataagcttcttttctgtgatggctgtgatgacaattaccacatcttctgcttgttaccaccccttcctgaaatccccagaggcatctggaggtgcccaaaatgtatcttggcggagtgtaaacagcctcctgaagcttttggatttgaacaggctacccaggagtacagtttgcagagttttggtgaaatggctgattccttcaagtccgactacttcaacatgcctgtacatatggtgcctacagaacttgtagagaaggaattctggaggctggtgagcagcattgaggaagacgtgacagttgaatatggagctgatattcattccaaagaatttggcagtggctttcctgtcagcaatagcaaacaaaacttatctcctgaggagaaggagtatgcgaccagtggttggaacctgaatgtgatgccagtgctagatcagtctgttctctgtcacatcaatgcagacatctcaggcatgaaggtgccctggctgtacgtgggcatggttttctcagcattttgttggcatattgaggatcactggagttactctattaactatctgcattggggtgagccgaagacctggtatggtgtaccctccctggcagcagagcatttggaggaggtgatgaagatgctgacacctgagctgtttgatagccagcctgatctcctacaccagcttgtcactctcatgaatcccaacactttgatgtcccatggtgtgccagttgtccgcacaaaccagtgtgcaggggagtttgtcatcacttttcctcgtgcttaccacagtggttttaaccaaggctacaattttgctgaagctgtcaacttttgtactgctgactggctacctgctggacgccagtgcattgaacactaccgccggctccggcgctattgtgtcttctcccacgaggagctcatctgcaagatggctgccttcccagagacgttggatctcaatctagcagtagctgtgcacaaggagatgttcattatggttcaggaggagcgacgtctacgaaaggcccttttggagaagggcgtcacggaggctgagcgagaggcttttgagctgctcccagatgatgaacgccagtgcatcaagtgcaagaccacgtgcttcttgtcagccctggcctgctacgactgcccagatggccttgtatgcctttcccacatcaatgacctctgcaagtgctctagtagccgacagtacctccggtatcggtacaccttggatgagctccccaccatgctgcataaactgaagattcgggctgagtcttttgacacctgggccaacaaagtgcgagtggccttggaggtggaggatggccgtaaacgcagctttgaagagctaagggcactggagtctgaggctcgtgagaggaggtttcctaatagtgagctgcttcagcgactgaagaactgcctgagtgaggtggaggcttgtattgctcaagtcctggggctggtcagtggtcaggtggccaggatggacactccacagctgaccttgactgaactccgggtccttcttgagcagatgggcagcctgccctgtgccatgcatcagattggggatgtcaaggatgtcctggaacaggtggaggcctatcaagctgaggctcgtgaggctctggccacactgccctctagtccagggctattgcggtccctgttggagagggggcagcagctgggtgtagaggtgcctgaagcccatcagcttcagcagcaggtggagcaggcgcaatggctagatgaagtgaagcaggccctggccccttctgctcacaggggctctctggtcatcatgcaggggcttttggttatgggtgccaagatagcctccagcccttctgtggacaaggcccgggctgagctgcaagaactactgaccattgcagagcgctgggaagaaaaggctcatttctgcctggaggccaggcagaagcatccaccagccacattggaagccataattcgtgagacagaaaacatccctgttcacctgcctaacatccaggctctcaaagaagctctgactaaggcacaagcttggattgctgatgtggatgagatccaaaatggtgaccactacccctgtctagatgacttggagggcctggtggctgtgggccgggacctgcctgtggggctggaagagctgagacagctagagctgcaggtattgacagcacattcctggagagagaaggcctccaagacctttctcaagaagaattcttgctacacactgcttgaggtgctttgcccgtgtgcagacgctggctcagacagcaccaagcgtagccggtggatggagaaggcgctggggttgtaccagtgtgacacagagctgctggggctgtctgcacaggacctcagagacccaggctctgtgattgtggccttcaaggaaggggaacagaaggagaaggagggtatcctgcagctgcgtcgcaccaactcagccaagcccagtccactggcaccatccctcatggcctcttctccgacttctatctgtgtgtgtgggcaggtgccagctggggtgggagttctgcagtgtgacctgtgtcaggactggttccatgggcagtgtgtgtcagtgccccatctcctcacctctccaaagcccagtctcacttcatctccactgctagcctggtgggaatgggacacaaaattcctgtgtccactgtgtatgcgctcacgacggccacgcctagagacaatcctagccttgctggttgccctgcagaggctgcccgtgcggctgcctgagggtgaggcccttcagtgtctcacagagagggccattggctggcaagaccgtgccagaaaggctctggcctctgaagatgtgactgctctgttgcgacagctggctgagcttcgccaacagctacaggccaaacccagaccagaggaggcctcagtctacacttcagccactgcctgtgaccctatcagagaaggcagtggcaacaatatttctaaggtccaagggctgctggagaatggagacagtgtgaccagtcctgagaacatggctccaggaaagggctctgacctggagctactgtcctcactgttgccgcagttgactggccctgtgttggagctgcctgaggcaatccgggctcccctggaggagctcatgatggaaggggacctgcttgaggtgaccctggatgagaaccacagcatctggcagctgctgcaggctggacagcctccagacctggacagaattcgcacacttctggagctggaaaaatttgaacatcaagggagtcggacaaggagccgggctctggagaggcgacggcggcggcagaaggtggatcagggtagaaacgttgagaatcttgttcaacaggagcttcagtcaaaaagggctcggagctcagggattatgtctcaggtgggccgagaagaagaacattatcaggagaaagcagaccgtgaaaatatgttcctgacaccttccacagaccacagccctttcttgaaaggaaaccaaaatagcttacaacacaaggattcaggct

SEQ ID NO: 148482 - DNA, 4620 bp, Artificial Sequence
  derived and/or modified sequence
atggagcccggctgcgacgagttcctgcccccccccgagtgccccgtgttcgagccatcatgggccgagtttcaagacccactcggatatatagcaaagattcggccaatcgctgaaaagtccgggatctgtaagatccgccccccagctgattggcagccccctttcgcggttgaagtcgacaacttccggttcaccccgcgcgtccagagactgaatgaacttgaagcacagacacgtgtgaaacttaactacctcgatcaaatcgctaagttctgggagatccagggaagttccctcaagattccaaacgttgaaaggaagatattggatctgtattctctttctaaaatagtcatagaggaaggcggttacgaggccatctgtaaggataggagatgggccagggtggcccagagactccattacccaccaggcaagaacataggcagtctgctgcggtcccactatgaacgtattatttatccttatgaaatgttccagtccggggctaaccacgtgcaatgcaatacccaccctttcgacaatgaagtcaaagacaaagagtacaaaccccacagcattcccctgaggcagtccgttcaaccatccaagttctcatcttattcaaggagagctaagcgcctccaacccgacccagagcccaccgaagaggatatcgagaagcaccccgaactgaagaaactgcagatctatgggcctggacccaaaatgatgggtctgggcctgatggctaaagataaagacaagaccgtacacaagaaggtaacttgcccccctacagtgactgtcaaggacgagcagagcggggggggcaatgtcagcagtactctgctgaaacaacatttgagcctcgagccatgcactaagacaacgatgcagcttcgtaaaaaccacagttccgcacaattcatcgattcctacatctgtcaggtctgttctcggggcgatgaggacgataaactgctcttttgcgatgggtgcgacgacaactaccacatcttttgtctcctaccaccactccctgaaatcccccgtggtatctggcggtgtcccaagtgtattctggctgagtgtaaacagcctccggaggcattcggctttgagcaggccactcaagagtattcgttacagagctttggcgagatggctgactcttttaagtcagactatttcaatatgcccgtgcacatggtaccgaccgaacttgtggagaaagagttttggaggttggtttcaagtatcgaagaggatgtaacggttgagtacggggccgatatccacagcaaggaattcggctcagggtttcccgtctctaactccaagcagaacctgtctcccgaggaaaaggaatatgcaacgagtggatggaacttgaacgtgatgccagtgcttgatcagtcagtcctttgtcacattaacgcagacatctccggcatgaaggtaccctggttgtatgtcgggatggtgttctccgccttctgctggcacattgaagatcactggtcctatagcatcaactaccttcactggggggaacccaagacctggtatggggtgccttcgctggctgccgaacatctggaagaggtcatgaaaatgctgactccggagctgtttgacagccaacccgacttattgcaccaacttgtgactctgatgaatcccaataccttaatgagtcatggcgtgcctgtggtacgcacaaatcagtgcgccggtgaattcgtaattacctttcccagagcctaccacagcgggtttaatcagggctacaacttcgctgaggctgtcaacttctgtactgctgactggttacctgcgggccgccagtgcatcgagcattatcgaaggttgaggcgttattgcgtattcagtcacgaggagctcatttgcaaaatggcggccttcccagaaacgcttgatctgaaccttgctgtggcggtacacaaggagatgttcataatggtccaggaggaacgtaggctgcgaaaggccttgctggaaaagggcgttacagaggcagaaagagaggcgtttgaactgttgcctgacgatgagcgtcagtgcatcaagtgcaagacaacatgtttcctctccgccctagcttgctatgactgcccggacggactggtgtgtctcagccatattaatgacctctgcaagtgcagttcatccaggcagtatctgagatacaggtataccctcgatgagctgccaaccatgctgcacaagctgaaaattcgcgccgagtcttttgacacgtgggccaacaaggtcagagtggccctcgaggtagaggacgggaggaagcggagctttgaggaactgcgggccttggaatcggaggcccgggagagacgcttccctaactctgaactgctccagcgtctcaaaaactgcttaagtgaggtggaggcttgtatagcacaagtactggggctggttagcgggcaggtggcacgcatggatacgcctcagctgactctcaccgaactcagggtgctcctcgagcagatgggttcgttaccctgtgcaatgcaccagattggagatgtcaaggacgtgctggaacaagttgaggcgtatcaggcggaagcccgggaagccctggcaacactaccatcttctccagggctgttgcggagtttactggagcgcgggcaacagttaggcgttgaggtgcccgaggctcaccagctgcagcaacaggtcgagcaggcgcaatggctggatgaagttaagcaggcccttgccccatccgcacatcggggttcattggttattatgcaggggctgctcgtcatgggagcaaagatcgcatcctcacctagtgtggataaggccagagcggaactccaggaacttctcaccatagcagagcgttgggaggagaaagcccatttctgccttgaggcaaggcaaaaacatccgccggccaccctagaagccatcatcagagagactgagaatatccctgtgcatctgccaaatatccaggcactgaaggaggctttgactaaagcgcaggcctggatcgctgatgttgatgagattcaaaacggtgaccactacccttgtcttgacgacctggagggtttggtagccgtcggaagagacctgcctgtcgggcttgaggagctgcgccaactggagctccaggtgcttactgcacacagttggagggagaaagcctcaaaaacctttctcaagaaaaattcctgctatacactgctagaggtgctctgcccttgtgctgacgccggatccgacagcactaaacgaagtcggtggatggagaaggctttgggcctctaccagtgcgacaccgagctgctggggctttctgcacaagacctgagagaccccggctcggtgattgtggccttcaaggagggggaacagaaggaaaaggaaggcatacttcaactgaggagaactaattctgctaaacctagcccactagccccctcactcatggcctcttcacccacctccatatgcgtgtgcgggcaagtccccgccggcgttggcgtgctgcagtgcgacttgtgccaggactggtttcacggtcagtgcgtcagtgtgccacacttactcaccagtcctaagccctcactgactagtagcccactgctggcttggtgggaatgggatactaaattcctgtgccccctttgcatgcgcagtcgccgtccacgattggaaactattctggccctgctggtagccctgcagaggctacctgttcgcctgccggagggcgaagcgttacaatgcttgactgaaagagccataggctggcaggatcgggcccgaaaggctctcgcgagcgaggatgtcaccgctttgttacgccagttggcggaactgcgtcaacagctccaggctaaaccccggcctgaagaggccagcgtctacacttctgccaccgcttgcgatccaatcagagaaggctctggaaacaacattagtaaggtccaaggcttgctggagaatggcgattccgtgacgtcccccgaaaatatggcccccgggaaaggctctgatctggagctcctgagcagcctcctccctcagctaacgggtcctgttctcgagttgcctgaggccatcagggcccccctggaagagctcatgatggagggcgaccttcttgaagtgactctcgatgaaaatcacagcatttggcagctgttacaggctggacaacctcccgatcttgacaggattcgaaccctgttggagctggaaaaattcgagcatcaggggagccgcacccggtctcgcgctctggagcgtaggcgccgccgccagaaagtggatcagggaaggaatgtagagaacttggtacaacaggagctgcagagcaagcgagctcggagttctggcattatgagccaagtgggcagagaagaggagcactaccaagagaaagccgacagggaaaacatgttcctgactccttccacagaccactcccctttcttgaaaggtaatcaaaacagcttgcagcacaaagatagcggtagctcagctgcctgccctagtctgatgccacttctacagctgtcctactccgatgagcagcagttatag

SEQ ID NO: 148483 - DNA, 4431 bp, Artificial Sequence
  derived and/or modified sequence
atggagcccggctgcgacgagttcctgcccccccccgagtgccccgtgttcgaaccatcttgggccgagtttcaggacccactcggatacatagctaaaatccggccaatagccgagaaatctgggatttgtaagatccgccctccggccgactggcagccgcccttcgctgtggaggttgataatttccgatttacaccaagggtgcaacgccttaatgaactggagattgttatcgaggaagggggctatgaagccatctgcaaagacagaagatgggcgagagtggctcaaagactgcattacccccctgggaagaacatcggtagcctcctcaggtcccactacgagcgcatcatttacccctatgaaatgttccagtccggggccaaccatgtgcagtgcaacacacatccttttgataacgaggttaaagacaaagaatataagccacactcaatacccttgaggcagagtgtccaaccctccaaattcagcagctatagcagacgtgctaagagactgcaacccgaccctgaacctactgaggaagatatcgagaaacatcctgagctgaaaaagttacagatctatggtcccggccccaagatgatgggtttggggctcatggccaaggacaaagacaagaccgttcacaaaaaagtgacatgccctcctaccgtgaccgtcaaggacgagcagagcgggggtggaaatgtttcctctaccctcttgaaacaacacctgagcctagaaccttgcacaaagacaactatgcagctgaggaagaaccactcttcagcccagtttatcgattcctatatctgtcaggtctgtagtagaggcgatgaagacgataaactcctgttctgtgatgggtgcgacgataactaccacattttctgcctactgccacctctacctgagatcccacggggtatctggaggtgcccaaagtgtatactggctgagtgcaagcaacctcccgaggcctttgggtttgaacaggcgacacaggaatactcattacagagcttcggggagatggccgattcattcaagagcgattacttcaacatgcccgttcatatggtgccaaccgagctggtggagaaagaattttggcggctagtttccagtattgaggaagatgtgactgtggaatatggagcagatattcactctaaggaattcggaagcggctttccagtaagcaattccaagcagaatcttagtccagaggaaaaggagtatgccacctcaggctggaatctaaacgtcatgccagtgttggaccagagcgttctctgtcatatcaacgccgatatttctggaatgaaggtcccttggctgtatgtggggatggtgttctcagccttttgctggcatattgaggatcattggtcttacagtattaattacctgcactggggggagccaaagacctggtacggcgtgcccagcctggctgcagagcacctggaagaagtgatgaagatgcttacccctgagctgtttgacagtcaacccgaccttctccatcaactggttacgctgatgaaccctaataccctgatgagtcacggggtgccagtcgtccgcacaaatcagtgcgctggcgagttcgtgattacgttccctcgtgcttaccatagcgggttcaatcagggctacaacttcgcggaggccgtgaatttctgtacggctgattggttgcctgccggacgacagtgcatagagcactaccggcgcctgcggcggtactgcgtcttcagccatgaagagcttatttgtaagatggcagccttccccgagactttagatcttaatctggccgttgctgtccacaaggagatgttcatcatggtacaagaagaacgcagactgcggaaagcactcttggaaaagggagttacggaagcagagcgggaagcctttgaactgttacccgatgacgaacggcaatgtatcaaatgcaagactacttgtttcctgagtgctctagcctgttatgactgtcctgacggactggtgtgcctcagccacattaacgacctttgcaaatgttcgagttcccgtcaatatctccgataccgctatacattagatgagcttccaactatgctacataagctgaaaatcagggccgaatccttcgatacgtgggcaaataaagttcgagtggctctcgaagttgaagacggacggaaaaggagcttcgaggagctcagagccctagaatcagaggctagggagcgcagattccccaactctgagctcctgcaaagacttaaaaactgccttagtgaagtcgaggcgtgtattgcgcaggtcctgggcctggtgtcgggccaggtagctcgcatggataccccccagttaaccttgacggagcttcgggtactgttggagcagatgggaagcttgccttgtgccatgcatcaaataggggatgtgaaagatgtcctggaacaggtggaagcctaccaggcagaagccagagaggcattagccactctcccttccagtccaggtttactacggagcttgctggagcggggacagcaattgggcgtggaagtgcctgaggcacatcaattgcagcagcaggtggagcaggctcaatggctggacgaggttaagcaggccctggcccccagtgcccatagaggctcccttgtgattatgcaaggcctgctggtcatgggtgcaaaaattgccagctctccttccgtggacaaggctcgggccgaactgcaggagttgttgaccatcgcagaacgctgggaggagaaggcacatttctgcctggaagccaggcaaaagcatccgccagcaactctcgaggccattataagagagaccgagaacattcccgtgcatctaccgaacatacaagcgcttaaggaggctctgaccaaggcccaagcctggattgccgacgtagacgaaattcagaatggagaccattatccctgcctcgatgacttggagggcttagtggccgttggtagggacttgcctgtcggtctcgaggagttgcggcagttagaactgcaggtcctgacggctcacagctggcgggaaaaagcatccaaaacgttcctcaagaagaattcatgttacaccttacttgaggtgctctgtccttgcgcagacgcaggctccgattccacaaaacgctcgcgttggatggagaaggcactcgggttatatcagtgcgacacggagctgctcgggctgtccgcccaggatctgcgcgaccctggatcagtaattgtggcatttaaggagggggaacagaaagagaaggaggggatcctccagttgagaagaacaaacagcgctaagccgtctcccctcgcccctagcctgatggcttcttctccaacttctatctgcgtgtgtggccaggtcccggctggggtcggggtccttcagtgtgacttgtgtcaggattggttccatgggcagtgcgtgagtgtgccacacctcctgacaagtcctaagcctagcctaactagtagccctctactcgcttggtgggaatgggatacaaaattcctatgccccctgtgtatgaggtcacggcgaccaagactcgaaactatcctcgccttgcttgtggcattgcagagactgcctgtacgcctgcctgagggggaagctctacagtgcctcactgagagggcaatcgggtggcaagacagggcgaggaaagctcttgcgagcgaggatgtgactgcgttactgagacagttggccgagctccggcagcaattgcaagcaaagcctagacccgaggaggcctctgtttatacctctgcaactgcttgtgacccaatacgggaggggtctggcaacaacatctctaaggtccagggactgctggaaaacggtgatagcgtcacgtcccccgaaaacatggctcccggcaaaggtagtgatttagagcttctgtcctccctgctacctcagctcaccggcccagtcttggagctccccgaggccatccgggcgccactggaagaactcatgatggagggagatttgctagaggttactctggacgaaaatcacagcatctggcaactgctgcaggcagggcaaccacccgacctcgaccgaatccggacactgcttgagctggagaaattcgagcaccagggcagccggacccgcagcagggcactggagaggaggcgccgtaggcagaaagtagatcaaggacgcaatgttgagaatctcgtccaacaggagctccagagcaaaagggccagatcgagtgggataatgagtcaggttggtcgcgaagaggaacactaccaggaaaaggccgatagagagaatatgttcctgacaccttctacagatcattcaccttttctcaagggaaatcagaactcgcttcagcacaaagacagtggttag

SEQ ID NO: 148484 - DNA, 4620 bp, Artificial Sequence
  derived and/or modified sequence
atggaacccggatgcgatgagtttctaccaccccctgagtgcccggtgttcgaaccttcttgggccgaatttcaagatccactcggctacatcgcaaagatcagacctattgctgagaaatcgggaatatgtaaaatcaggcccccagcagattggcaacctcccttcgccgttgaagttgataacttccgttttacccctagggtgcagcggctcaacgaactggaggcccagacccgcgtgaagctcaattacctcgaccagatcgccaagttttgggaaatccagggaagctccctaaaaatccccaatgtagagcgcaagattctggatttgtactctttgtccaagatagtcatagaagaaggtggctatgaggccatttgcaaagaccggcgatgggctcgggtggcccagcggttgcactatccacctggcaaaaatatcggatccctgcttcgctctcactacgagagaataatctacccttacgagatgttccagagcggagctaaccatgtgcaatgcaacacacatccttttgacaacgaagttaaagataaggagtataagccacactctattcctctgcgacagtctgttcaacctagcaagttctccagttattctaggcgagccaaaagactccaaccggaccccgaaccgaccgaggaggacattgaaaagcatcctgaactaaagaagcttcagatttacgggcctgggcctaaaatgatgggcctgggtctcatggctaaggataaggacaagaccgtgcacaagaaggtgacctgccctcctacagtgacagttaaggatgagcaatcaggcggagggaatgtgtcaagcaccctgctgaagcagcacctctctctggagccctgtactaagaccactatgcagctgagaaagaaccatagcagcgcgcaattcatagactcctacatctgccaggtgtgctcccgtggcgacgaagatgacaagcttttattttgcgatggatgcgacgataattaccacattttttgcctcctccctccattacccgaaatcccaagaggaatctggcgctgtcccaagtgcattctggccgagtgcaaacaacctcctgaggccttcggcttcgaacaagccacacaagaatatagcttgcagtcctttggtgaaatggccgactccttcaagagtgactacttcaatatgcctgtgcacatggtcccaacagaactggtggagaaggagttctggcgccttgtgtcttccatagaagaggacgtgactgtcgagtacggggctgacatacactcaaaagagttcgggtcagggtttcctgtgagtaattcaaagcaaaacctgtcccctgaagagaaggaatatgccacgtctgggtggaacctgaacgtcatgcccgtcttagaccagagtgtattgtgtcatataaacgctgatatctctgggatgaaagtgccatggctttacgtgggtatggtcttcagcgctttctgctggcacattgaggaccattggagctactccattaattaccttcactggggagaaccgaagacttggtatggtgtccctagcctggccgcagagcatctcgaggaagtgatgaagatgcttacaccggagctgttcgactcccagcctgatctgctgcaccagttagtgacactgatgaacccaaacacactcatgagccacggggtgcctgtggtcagaacaaaccagtgtgcaggcgagtttgtaattaccttccccagagcctatcatagcggctttaaccagggatacaacttcgcggaagcggtgaatttctgcactgcagattggcttcccgctggacgtcagtgcattgaacactatcgacggcttcggagatactgtgttttcagtcacgaggaactgatctgcaagatggctgcatttccagaaaccctggacctgaatctcgcagtggccgtccacaaggaaatgttcattatggttcaggaggaacgtaggctgcgaaaagccctccttgagaaaggtgtgactgaagctgaaagagaggcctttgaattgctgccagatgacgaacgccagtgcatcaaatgcaaaaccacatgcttcctgtcggcattagcctgttacgattgtccagatggactcgtttgcttgagccatataaatgacttatgtaagtgcagcagctcacggcagtacctgagataccggtataccctcgacgaactgcccacgatgctgcacaagctaaaaatccgcgcagaatctttcgatacatgggcaaataaagttcgagtggctctggaagttgaggacgggagaaaacgctccttcgaagaattgagagccctggagtctgaagccagggagaggagattcccgaacagcgagctcttgcagagactcaagaactgtttgtcggaagttgaggcatgtatcgctcaagttcttggactggttagcgggcaggttgcaaggatggatacacctcagctgactctcactgagctgagagtcctcttagaacagatgggttccctgccctgtgccatgcatcagattggggatgtgaaggacgtgctcgagcaggtcgaggcttatcaggcagaggcacgtgaggcgctagccaccctgccgtcttcccctggactgctcagatctctgcttgagagaggacagcagttaggcgtggaggtgcctgaagcccatcagctgcaacagcaagtggaacaggcccaatggctggatgaggttaagcaagccttggctcctagcgctcaccgaggcagcttagtgataatgcaggggctccttgtgatgggggctaagatcgccagctctccttctgtggacaaagcacgggcagagcttcaagaactattgaccatcgccgagagatgggaggagaaagcacacttctgcctggaggccagacaaaagcatccacccgctacactggaagctattatccgcgagaccgaaaacattcccgtgcatctgcctaatatacaggctctaaaagaggccctgacgaaagcacaggcatggatcgctgatgttgatgagatacagaatggcgaccattatccgtgcttagacgatttagaagggttggtggctgtgggcagggacttgcctgtggggctggaagagcttcggcaacttgagctgcaagtgctgacagcacactcttggcgagaaaaagcttcaaagactttccttaagaagaacagttgctacactctgctcgaggtgctctgcccttgcgctgatgctgggtcggattccactaagcggtctaggtggatggagaaggctctgggcctctatcaatgtgataccgagttgctcggcctgtccgcacaggatttacgggatccaggctccgtgatcgtggccttcaaggagggtgagcagaaagagaaggagggaatcctccaactccgtaggactaattcggccaagccctcacccctggcaccctcgctcatggcatcctcgccaacgtcaatttgcgtctgtgggcaggtccctgccggagtcggtgtgttacagtgtgacttgtgtcaggactggttccatggccagtgcgtcagtgttccgcatctcctgactagccctaaaccatcccttacttccagtcctcttctagcctggtgggagtgggataccaaattcctgtgccccctgtgcatgcgctcccgtagaccccgtcttgaaacgatcttagccctgctggtggcactccaacgcctgccggttcgcctacccgagggagaggccctacaatgtttgacagagagggctatcggatggcaggatagagccagaaaagccctagcttcagaggatgtaacagcgctgttgcgacaattggccgagcttcgtcagcagcttcaagccaagcccagacctgaggaagcctctgtatataccagtgctacagcttgtgatcccatacgggagggcagcgggaacaatatatctaaggtgcagggactgctggagaatggtgatagtgtcacctctcccgaaaatatggctccagggaaggggagtgacttggagctcctatcttccctcctgccccagttgactggccctgtgctggagttacctgaggcaataagggctccactggaagagcttatgatggaaggggatctcttggaggtgacgctggacgagaaccactcgatctggcaacttctacaggccggtcaacccccagatttagaccggatccggacactgctggagctggagaaattcgagcaccaaggctcaaggacacggtccagagccctggaacgcaggagacgaagacagaaagttgaccaggggcgaaacgttgaaaacctcgtccagcaagagctgcagagcaagcgggcacgcagttcaggaataatgtcacaggtgggaagagaggaagagcactatcaggaaaaagccgatagggagaatatgttcctgaccccctccacagaccatagccccttcctcaaaggaaatcagaattcattgcagcataaggattcgggctcttctgcggcttgtccgtctttgatgccactgctccagctcagctactcggatgagcagcagctgtag

SEQ ID NO: 148485 - DNA, 4431 bp, Artificial Sequence
  derived and/or modified sequence
atggagcctgggtgcgatgaatttctaccccctcccgagtgcccagtttttgagccatcctgggcagagttccaggacccactgggctatatcgccaagatcagaccaatcgcagaaaagagtggcatctgcaagattagaccccctgccgactggcagccaccattcgctgtcgaggtagataacttccgcttcacaccgagagtgcaaagactcaatgaactggagattgtaatcgaagaaggtggctacgaggccatctgcaaagaccggaggtgggctcgagtggctcagcgtcttcattatcctccagggaaaaacattggctccttgctacgatctcactacgaacgtatcatctatccttatgagatgttccagtcaggcgcaaatcacgttcagtgcaacacgcacccttttgacaatgaggtgaaggataaagagtataagccacactcaattcccctcagacagtccgttcagcccagcaaatttagttcctactcccggagggccaagcggctccagcctgatcccgaacctacagaggaagacatcgagaagcaccccgagctgaagaagctccagatatatggccctggcccaaagatgatgggcttgggactaatggccaaagacaaggacaagaccgtacacaaaaaggtgacctgccccccaaccgtgaccgtgaaggatgagcagagcggaggaggaaatgttagttccactttgctgaagcagcacttgtcattagagccctgcactaagactacaatgcagctaaggaagaaccactcttccgctcagtttattgatagctatatttgccaggtgtgcagccgcggagatgaggatgacaaactcctcttttgcgatgggtgcgacgataactatcatatcttctgtttgctaccccctctgccagagattcctcgagggatctggcgctgtcctaagtgtatcttggccgagtgtaagcagcctcctgaagcctttgggtttgaacaggccacccaggagtacagcttacaatcttttggagaaatggctgactcctttaaatccgactactttaatatgccggtgcatatggtgcccactgagttggtcgagaaagagttctggcgcctggtttcctccatagaggaggacgtcactgttgagtacggcgcagatatccattcaaaggagttcggcagcggtttccccgtctcaaatagcaagcaaaacctgagccctgaagagaaagagtatgccacctccggatggaaccttaatgttatgcccgttttggatcagagcgttctctgccacatcaatgccgatatctccggtatgaaagtcccatggctgtacgtagggatggtcttctcagcattctgctggcacattgaggatcattggtcctattccatcaactacctgcactggggtgagccaaagacctggtatggagtgccaagtttagccgcagagcatttggaagaggtcatgaaaatgctaacccctgaactgttcgacagtcagcctgacctgttgcaccagctggtaaccttaatgaacccaaacacccttatgtcccacggggtcccggtagttaggaccaatcagtgcgcgggtgagttcgttatcacttttcccagggcttatcatagcggctttaatcaaggttataactttgccgaggccgttaatttctgtactgccgattggctgcccgcagggcgtcagtgcattgaacattacagacgcttacggaggtactgtgtgttctctcatgaggaactcatctgtaaaatggccgctttcccagagacactggacttgaacctcgccgtggccgtgcacaaagaaatgtttataatggtgcaagaggagcgcagacttagaaaggcccttctcgagaagggtgtgacggaggccgagcgcgaagcctttgaactgctccccgacgacgaaaggcagtgcattaagtgcaaaactacctgcttcctgagtgcactggcatgctacgactgcccggacgggctcgtatgtctctcacacataaacgatctctgtaaatgctccagctccagacagtacttgaggtataggtatacactcgacgagctccctaccatgctacataaattaaagattagagccgagtcatttgatacctgggccaacaaggtgagggtggcgcttgaagtcgaagacggacgcaagcgaagcttcgaggagttgcgtgccctggagtccgaagctagggagcgaaggttccccaacagtgaactgcttcaacgactgaaaaactgtctgagcgaagtggaggcctgtatcgctcaggtgctgggcctggtaagcgggcaggtcgctaggatggatactcctcagctgacactaaccgaactcagagtcttgctcgaacagatggggagcctgccatgcgccatgcatcaaattggcgacgttaaagatgtcctggagcaagtcgaagcctaccaggctgaagcacgagaagccctggccaccctcccttcttcaccaggacttttgaggtccctgctagaaagaggacagcagctgggagtggaggtaccagaggcacaccagctgcaacagcaggtggagcaagcacagtggctcgacgaggtcaagcaggccctcgccccatccgcacacagaggctctctggttattatgcaaggtctgctcgtgatgggagccaaaattgcaagcagcccatccgttgataaagctcgggcagagctgcaagagctgttgaccatcgccgaacggtgggaagagaaggcacatttctgtctggaagcacgacagaaacacccacctgctaccttggaggctataatcagagagacagaaaatattccagtccacctccccaacatccaggctttaaaggaggctctgacgaaggcacaggcctggatagctgatgttgacgagatacagaacggtgatcactatccctgtctggacgatctggagggtttggtagcagtgggcagagaccttcccgttggcctcgaggagttgcgtcaactcgagctgcaggtactgacggcacactcttggcgtgaaaaggctagcaagaccttcctcaaaaagaactcctgttatacactcctggaggtcctctgcccatgcgccgatgcaggatcggacagtacaaaacgatcgagatggatggagaaggcgctgggcctctaccagtgtgatacggagctcctggggctttccgcacaggacctgagagatcccggatctgtgatcgtcgctttcaaagaaggggagcagaaggaaaaggaggggatactgcaactcaggaggacgaactcagcaaagccttctcctctggcgccatccctgatggcttcctctcccacgtctatttgtgtgtgtggacaagtccccgctggcgtcggagtgctgcagtgcgacctttgtcaggactggttccacggccagtgtgttagcgtcccccatctgctgaccagccccaaaccatctctgacttcatcccctctgctggcctggtgggaatgggacaccaaatttctgtgccccctttgtatgcggagcaggcggccacggcttgagacaatactggccttacttgtagctcttcagaggttaccagtgcggcttcccgagggcgaggcactccagtgcctcacggagcgcgcaatcggatggcaggacagggctaggaaggcactcgctagtgaagatgtgaccgcattactgcgacagctggccgaactgaggcaacagctacaggcgaagccacggcctgaggaggcaagcgtgtacaccagtgcaactgcctgtgatccgatacgtgaggggtcaggaaacaacatttccaaagtacagggcctgctggagaatggtgacagcgtcacttcacccgagaatatggcacccggaaaggggagcgacttagagctgttgtcaagtctcctcccacagttgaccggccctgtcctagaactacccgaggcaatccgcgctcccctcgaggaactgatgatggaaggtgatttactggaggtaacgttagacgagaatcattcaatttggcaactgcttcaggcagggcaacctccagatcttgacagaatcagaacactgctggaactcgaaaaatttgaacaccagggctctagaacgcggtcaagggcactcgagcgcaggcggagacggcagaaagtcgaccagggacgcaatgtagaaaacttggtgcagcaggagctccagtctaaacgggcaaggtcctctggaattatgtcccaggtagggagggaggaagaacactaccaggagaaggcagatagagagaacatgttccttacaccctcgaccgatcactcaccctttctgaaaggcaaccagaattccctccaacacaaggacagcggttag

SEQ ID NO: 148486 - DNA, 4620 bp, Artificial Sequence
  derived and/or modified sequence
atggagcccggctgcgacgagttcctgcccccccccgagtgccccgtgttcgagcccagctgggccgagttccaggaccccctgggctacatcgccaagatcagacccatcgccgagaagagcggcatctgcaagatcagaccccccgccgactggcagccccccttcgccgtggaggtggacaacttcagattcacccccagagtgcagagactgaacgagctggaggcccagaccagagtgaagctgaactacctggaccagatcgccaagttctgggagatccagggcagcagcctgaagatccccaacgtggagagaaagatcctggacctgtacagcctgagcaagatcgtgatcgaggagggcggctacgaggccatctgcaaggacagaagatgggccagagtggcccagagactgcactacccccccggcaagaacatcggcagcctgctgagaagccactacgagagaatcatctacccctacgagatgttccagagcggcgccaaccacgtgcagtgcaacacccaccccttcgacaacgaggtgaaggacaaggagtacaagccccacagcatccccctgagacagagcgtgcagcccagcaagttcagcagctacagcagaagagccaagagactgcagcccgaccccgagcccaccgaggaggacatcgagaagcaccccgagctgaagaagctgcagatctacggccccggccccaagatgatgggcctgggcctgatggccaaggacaaggacaagaccgtgcacaagaaggtgacctgcccccccaccgtgaccgtgaaggacgagcagagcggcggcggcaacgtgagcagcaccctgctgaagcagcacctgagcctggagccctgcaccaagaccaccatgcagctgagaaagaaccacagcagcgcccagttcatcgacagctacatctgccaggtgtgcagcagaggcgacgaggacgacaagctgctgttctgcgacggctgcgacgacaactaccacatcttctgcctgctgccccccctgcccgagatccccagaggcatctggagatgccccaagtgcatcctggccgagtgcaagcagccccccgaggccttcggcttcgagcaggccacccaggagtacagcctgcagagcttcggcgagatggccgacagcttcaagagcgactacttcaacatgcccgtgcacatggtgcccaccgagctggtggagaaggagttctggagactggtgagcagcatcgaggaggacgtgaccgtggagtacggcgccgacatccacagcaaggagttcggcagcggcttccccgtgagcaacagcaagcagaacctgagccccgaggagaaggagtacgccaccagcggctggaacctgaacgtgatgcccgtgctggaccagagcgtgctgtgccacatcaacgccgacatcagcggcatgaaggtgccctggctgtacgtgggcatggtgttcagcgccttctgctggcacatcgaggaccactggagctacagcatcaactacctgcactggggcgagcccaagacctggtacggcgtgcccagcctggccgccgagcacctggaggaggtgatgaagatgctgacccccgagctgttcgacagccagcccgacctgctgcaccagctggtgaccctgatgaaccccaacaccctgatgagccacggcgtgcccgtggtgagaaccaaccagtgcgccggcgagttcgtgatcaccttccccagagcctaccacagcggcttcaaccagggctacaacttcgccgaggccgtgaacttctgcaccgccgactggctgcccgccggcagacagtgcatcgagcactacagaagactgagaagatactgcgtgttcagccacgaggagctgatctgcaagatggccgccttccccgagaccctggacctgaacctggccgtggccgtgcacaaggagatgttcatcatggtgcaggaggagagaagactgagaaaggccctgctggagaagggcgtgaccgaggccgagagagaggccttcgagctgctgcccgacgacgagagacagtgcatcaagtgcaagaccacctgcttcctgagcgccctggcctgctacgactgccccgacggcctggtgtgcctgagccacatcaacgacctgtgcaagtgcagcagcagcagacagtacctgagatacagatacaccctggacgagctgcccaccatgctgcacaagctgaagatcagagccgagagcttcgacacctgggccaacaaggtgagagtggccctggaggtggaggacggcagaaagagaagcttcgaggagctgagagccctggagagcgaggccagagagagaagattccccaacagcgagctgctgcagagactgaagaactgcctgagcgaggtggaggcctgcatcgcccaggtgctgggcctggtgagcggccaggtggccagaatggacaccccccagctgaccctgaccgagctgagagtgctgctggagcagatgggcagcctgccctgcgccatgcaccagatcggcgacgtgaaggacgtgctggagcaggtggaggcctaccaggccgaggccagagaggccctggccaccctgcccagcagccccggcctgctgagaagcctgctggagagaggccagcagctgggcgtggaggtgcccgaggcccaccagctgcagcagcaggtggagcaggcccagtggctggacgaggtgaagcaggccctggcccccagcgcccacagaggcagcctggtgatcatgcagggcctgctggtgatgggcgccaagatcgccagcagccccagcgtggacaaggccagagccgagctgcaggagctgctgaccatcgccgagagatgggaggagaaggcccacttctgcctggaggccagacagaagcacccccccgccaccctggaggccatcatcagagagaccgagaacatccccgtgcacctgcccaacatccaggccctgaaggaggccctgaccaaggcccaggcctggatcgccgacgtggacgagatccagaacggcgaccactacccctgcctggacgacctggagggcctggtggccgtgggcagagacctgcccgtgggcctggaggagctgagacagctggagctgcaggtgctgaccgcccacagctggagagagaaggccagcaagaccttcctgaagaagaacagctgctacaccctgctggaggtgctgtgcccctgcgccgacgccggcagcgacagcaccaagagaagcagatggatggagaaggccctgggcctgtaccagtgcgacaccgagctgctgggcctgagcgcccaggacctgagagaccccggcagcgtgatcgtggccttcaaggagggcgagcagaaggagaaggagggcatcctgcagctgagaagaaccaacagcgccaagcccagccccctggcccccagcctgatggccagcagccccaccagcatctgcgtgtgcggccaggtgcccgccggcgtgggcgtgctgcagtgcgacctgtgccaggactggttccacggccagtgcgtgagcgtgccccacctgctgaccagccccaagcccagcctgaccagcagccccctgctggcctggtgggagtgggacaccaagttcctgtgccccctgtgcatgagaagcagaagacccagactggagaccatcctggccctgctggtggccctgcagagactgcccgtgagactgcccgagggcgaggccctgcagtgcctgaccgagagagccatcggctggcaggacagagccagaaaggccctggccagcgaggacgtgaccgccctgctgagacagctggccgagctgagacagcagctgcaggccaagcccagacccgaggaggccagcgtgtacaccagcgccaccgcctgcgaccccatcagagagggcagcggcaacaacatcagcaaggtgcagggcctgctggagaacggcgacagcgtgaccagccccgagaacatggcccccggcaagggcagcgacctggagctgctgagcagcctgctgccccagctgaccggccccgtgctggagctgcccgaggccatcagagcccccctggaggagctgatgatggagggcgacctgctggaggtgaccctggacgagaaccacagcatctggcagctgctgcaggccggccagccccccgacctggacagaatcagaaccctgctggagctggagaagttcgagcaccagggcagcagaaccagaagcagagccctggagagaagaagaagaagacagaaggtggaccagggcagaaacgtggagaacctggtgcagcaggagctgcagagcaagagagccagaagcagcggcatcatgagccaggtgggcagagaggaggagcactaccaggagaaggccgacagagagaacatgttcctgacccccagcaccgaccacagccccttcctgaagggcaaccagaacagcctgcagcacaaggacagcggcagcagcgccgcctgccccagcctgatgcccctgctgcagctgagctacagcgacgagcagcagctgtag

SEQ ID NO: 148487 - DNA, 4431 bp, Artificial Sequence
  derived and/or modified sequence
atggagcccggctgcgacgagttcctgcccccccccgagtgccccgtgttcgagcccagctgggccgagttccaggaccccctgggctacatcgccaagatcagacccatcgccgagaagagcggcatctgcaagatcagaccccccgccgactggcagccccccttcgccgtggaggtggacaacttcagattcacccccagagtgcagagactgaacgagctggagatcgtgatcgaggagggcggctacgaggccatctgcaaggacagaagatgggccagagtggcccagagactgcactacccccccggcaagaacatcggcagcctgctgagaagccactacgagagaatcatctacccctacgagatgttccagagcggcgccaaccacgtgcagtgcaacacccaccccttcgacaacgaggtgaaggacaaggagtacaagccccacagcatccccctgagacagagcgtgcagcccagcaagttcagcagctacagcagaagagccaagagactgcagcccgaccccgagcccaccgaggaggacatcgagaagcaccccgagctgaagaagctgcagatctacggccccggccccaagatgatgggcctgggcctgatggccaaggacaaggacaagaccgtgcacaagaaggtgacctgcccccccaccgtgaccgtgaaggacgagcagagcggcggcggcaacgtgagcagcaccctgctgaagcagcacctgagcctggagccctgcaccaagaccaccatgcagctgagaaagaaccacagcagcgcccagttcatcgacagctacatctgccaggtgtgcagcagaggcgacgaggacgacaagctgctgttctgcgacggctgcgacgacaactaccacatcttctgcctgctgccccccctgcccgagatccccagaggcatctggagatgccccaagtgcatcctggccgagtgcaagcagccccccgaggccttcggcttcgagcaggccacccaggagtacagcctgcagagcttcggcgagatggccgacagcttcaagagcgactacttcaacatgcccgtgcacatggtgcccaccgagctggtggagaaggagttctggagactggtgagcagcatcgaggaggacgtgaccgtggagtacggcgccgacatccacagcaaggagttcggcagcggcttccccgtgagcaacagcaagcagaacctgagccccgaggagaaggagtacgccaccagcggctggaacctgaacgtgatgcccgtgctggaccagagcgtgctgtgccacatcaacgccgacatcagcggcatgaaggtgccctggctgtacgtgggcatggtgttcagcgccttctgctggcacatcgaggaccactggagctacagcatcaactacctgcactggggcgagcccaagacctggtacggcgtgcccagcctggccgccgagcacctggaggaggtgatgaagatgctgacccccgagctgttcgacagccagcccgacctgctgcaccagctggtgaccctgatgaaccccaacaccctgatgagccacggcgtgcccgtggtgagaaccaaccagtgcgccggcgagttcgtgatcaccttccccagagcctaccacagcggcttcaaccagggctacaacttcgccgaggccgtgaacttctgcaccgccgactggctgcccgccggcagacagtgcatcgagcactacagaagactgagaagatactgcgtgttcagccacgaggagctgatctgcaagatggccgccttccccgagaccctggacctgaacctggccgtggccgtgcacaaggagatgttcatcatggtgcaggaggagagaagactgagaaaggccctgctggagaagggcgtgaccgaggccgagagagaggccttcgagctgctgcccgacgacgagagacagtgcatcaagtgcaagaccacctgcttcctgagcgccctggcctgctacgactgccccgacggcctggtgtgcctgagccacatcaacgacctgtgcaagtgcagcagcagcagacagtacctgagatacagatacaccctggacgagctgcccaccatgctgcacaagctgaagatcagagccgagagcttcgacacctgggccaacaaggtgagagtggccctggaggtggaggacggcagaaagagaagcttcgaggagctgagagccctggagagcgaggccagagagagaagattccccaacagcgagctgctgcagagactgaagaactgcctgagcgaggtggaggcctgcatcgcccaggtgctgggcctggtgagcggccaggtggccagaatggacaccccccagctgaccctgaccgagctgagagtgctgctggagcagatgggcagcctgccctgcgccatgcaccagatcggcgacgtgaaggacgtgctggagcaggtggaggcctaccaggccgaggccagagaggccctggccaccctgcccagcagccccggcctgctgagaagcctgctggagagaggccagcagctgggcgtggaggtgcccgaggcccaccagctgcagcagcaggtggagcaggcccagtggctggacgaggtgaagcaggccctggcccccagcgcccacagaggcagcctggtgatcatgcagggcctgctggtgatgggcgccaagatcgccagcagccccagcgtggacaaggccagagccgagctgcaggagctgctgaccatcgccgagagatgggaggagaaggcccacttctgcctggaggccagacagaagcacccccccgccaccctggaggccatcatcagagagaccgagaacatccccgtgcacctgcccaacatccaggccctgaaggaggccctgaccaaggcccaggcctggatcgccgacgtggacgagatccagaacggcgaccactacccctgcctggacgacctggagggcctggtggccgtgggcagagacctgcccgtgggcctggaggagctgagacagctggagctgcaggtgctgaccgcccacagctggagagagaaggccagcaagaccttcctgaagaagaacagctgctacaccctgctggaggtgctgtgcccctgcgccgacgccggcagcgacagcaccaagagaagcagatggatggagaaggccctgggcctgtaccagtgcgacaccgagctgctgggcctgagcgcccaggacctgagagaccccggcagcgtgatcgtggccttcaaggagggcgagcagaaggagaaggagggcatcctgcagctgagaagaaccaacagcgccaagcccagccccctggcccccagcctgatggccagcagccccaccagcatctgcgtgtgcggccaggtgcccgccggcgtgggcgtgctgcagtgcgacctgtgccaggactggttccacggccagtgcgtgagcgtgccccacctgctgaccagccccaagcccagcctgaccagcagccccctgctggcctggtgggagtgggacaccaagttcctgtgccccctgtgcatgagaagcagaagacccagactggagaccatcctggccctgctggtggccctgcagagactgcccgtgagactgcccgagggcgaggccctgcagtgcctgaccgagagagccatcggctggcaggacagagccagaaaggccctggccagcgaggacgtgaccgccctgctgagacagctggccgagctgagacagcagctgcaggccaagcccagacccgaggaggccagcgtgtacaccagcgccaccgcctgcgaccccatcagagagggcagcggcaacaacatcagcaaggtgcagggcctgctggagaacggcgacagcgtgaccagccccgagaacatggcccccggcaagggcagcgacctggagctgctgagcagcctgctgccccagctgaccggccccgtgctggagctgcccgaggccatcagagcccccctggaggagctgatgatggagggcgacctgctggaggtgaccctggacgagaaccacagcatctggcagctgctgcaggccggccagccccccgacctggacagaatcagaaccctgctggagctggagaagttcgagcaccagggcagcagaaccagaagcagagccctggagagaagaagaagaagacagaaggtggaccagggcagaaacgtggagaacctggtgcagcaggagctgcagagcaagagagccagaagcagcggcatcatgagccaggtgggcagagaggaggagcactaccaggagaaggccgacagagagaacatgttcctgacccccagcaccgaccacagccccttcctgaagggcaaccagaacagcctgcagcacaaggacagcggctag

SEQ ID NO: 148488 - protein, 711 aa, Artificial Sequence
  derived and/or modified sequence
MNKGWLELESDPGLFTLLVEDFGVKGVQVEEIYDLQSKCQGPVYGFIFLFKWIEERRSRRKVSTLVDDTSVIDDDIVNNMFFAHQLIPNSCATHALLSVLLNCSSVDLGPTLSRMKDFTKGFSPESKGYAIGNAPELAKAHNSHARPEPRHLPEKQNGLSAVRTMEAFHFVSYVPITGRLFELDGLKVYPIDHGPWGEDEEWTDKARRVIMERIGLATAGIKYEARLHVLKVNRQTVLEALQQLIRVTQPELIQTHKSQESQLPEESKSASNKSPLVLEANRAPAASEGNHTDGAEEAAGSCAQAPSHSPPNKPKLVVKPPGSSLNGVHPNPTPIVQRLPAFLDNHNYAKSPMQEEEDLAAGVGRSRVPVRPPQQYSDDEDDYEDDEEDDVQNTNSALRYKGKGTGKPGALSGSADGQLSVLQPNTINVLAEKLKESQKDLSIPLSIKTSSGAGSPAVAVPTHSQPSPTPSNESTDTASEIGSAFNSPLRSPIRSANPTRPSSPVTSHISKVLFGEDDSLLRVDCIRYNRAVRDLGPVISTGLLHLAEDGVLSPLALTEGGKGSSPSIRPIQGSQGSSSPVEKEVVEATDSREKTGMVRPGEPLSGEKYSPKELLALLKCVEAEIANYEACLKEEVEKRKKFKIDDQRRTHNYDEFICTFISMLAQEGMLANLVEQNISVRRRQGVSIGRLHKQRKPDRRKRSRPYKAKRQ

SEQ ID NO: 148489 - protein, 729 aa, Artificial Sequence
  derived and/or modified sequence
MNKGWLELESDPGLFTLLVEDFGVKGVQVEEIYDLQSKCQGPVYGFIFLFKWIEERRSRRKVSTLVDDTSVIDDDIVNNMFFAHQLIPNSCATHALLSVLLNCSSVDLGPTLSRMKDFTKGFSPESKGYAIGNAPELAKAHNSHARPEPRHLPEKQNGLSAVRTMEAFHFVSYVPITGRLFELDGLKVYPIDHGPWGEDEEWTDKARRVIMERIGLATAGEPYHDIRFNLMAVVPDRRIKYEARLHVLKVNRQTVLEALQQLIRVTQPELIQTHKSQESQLPEESKSASNKSPLVLEANRAPAASEGNHTDGAEEAAGSCAQAPSHSPPNKPKLVVKPPGSSLNGVHPNPTPIVQRLPAFLDNHNYAKSPMQEEEDLAAGVGRSRVPVRPPQQYSDDEDDYEDDEEDDVQNTNSALRYKGKGTGKPGALSGSADGQLSVLQPNTINVLAEKLKESQKDLSIPLSIKTSSGAGSPAVAVPTHSQPSPTPSNESTDTASEIGSAFNSPLRSPIRSANPTRPSSPVTSHISKVLFGEDDSLLRVDCIRYNRAVRDLGPVISTGLLHLAEDGVLSPLALTEGGKGSSPSIRPIQGSQGSSSPVEKEVVEATDSREKTGMVRPGEPLSGEKYSPKELLALLKCVEAEIANYEACLKEEVEKRKKFKIDDQRRTHNYDEFICTFISMLAQEGMLANLVEQNISVRRRQGVSIGRLHKQRKPDRRKRSRPYKAKRQ

SEQ ID NO: 148490 - DNA, 2136 bp, Artificial Sequence
  derived and/or modified sequence
atgaataagggttggcttgaactggaatcggatccaggcttattcactctcctggtggaagactttggagttaagggcgtgcaggttgaagagatctacgatttacagtctaagtgtcagggacctgtgtacggctttatctttctcttcaagtggatagaggaaagacgtagtcggcgtaaggtgtctacactagtggatgacactagtgtgatcgacgacgacatagtgaataacatgttcttcgcacaccagctgatcccgaattcctgcgcaactcacgcgctactctctgtgctattaaattgcagttcagtggacctcgggcccacattgagccgaatgaaagatttcaccaagggattttcacccgaatctaaaggctatgccatcggcaatgcacctgaattagccaaggcgcacaattctcatgcacgtcccgaaccccgccacctgcctgagaagcagaatggtctatctgctgtccgcacaatggaggctttccatttcgtttcctacgtgcccattacagggcggttattcgagctggacgggctgaaagtctatcctatcgaccacggcccttggggcgaagacgaggaatggacggacaaggcccgtcgagtgattatggagaggatcgggctggcaaccgccggcatcaaatacgaggcaaggcttcacgtcttaaaagtgaaccggcagaccgtgctggaagccctgcaacagctaatccgggtcacgcaacccgaattaatccagacccataaatctcaagagtcccagcttccagaggagtccaagtcagcttctaacaagtcacccttggttttagaggccaatagggctcctgcagccagcgaggggaaccacacggatggggccgaggaagctgccggctcatgtgcacaggcacctagccactcacctcctaacaaacctaagctcgttgttaagcctcctggttcatcactaaacggggttcatcccaatccaactccgattgtccaacgcctccctgcctttcttgacaatcataactacgctaaaagcccgatgcaggaggaggaagacttggctgcaggcgtaggacggtcaagagttcctgtgcggcccccacagcaatatagtgacgacgaggacgactatgaagatgatgaagaggacgacgtgcagaataccaactctgcattgcgatataaagggaaaggcaccggtaaaccaggagctttatcgggatctgcagacggccagctcagtgtgctgcagccgaatactataaacgttctcgccgagaagctgaaagagtcccaaaaggatttgagtatcccattgagcattaaaacaagttctggtgctggttcacccgcagttgccgtgcccacccactctcagccttctccaactccctctaatgaatccactgacacggcttcagagattggctcagcttttaactctcccctccggagccctatccgaagtgccaatccgactcgaccctcaagtccagttacgagtcacatttccaaggtgctgtttggtgaggatgactctctgctgagggtcgactgcattagatacaacagggctgtgcgcgacctgggccctgtcatctcaaccggcctgctgcacctcgcagaggatggagtgctgtctccccttgcacttaccgaaggaggaaaaggatcaagcccatcgatccgcccaatccaagggtctcaaggctcgtccagtcctgtcgagaaagaggtggtcgaagcgactgattcacgcgagaagacaggaatggtgcgccccggggaaccgctctcaggcgagaagtacagccctaaggaacttttagcgcttttaaagtgcgtggaggccgagatcgccaattatgaagcctgccttaaggaggaggtcgagaagcggaagaaattcaaaatcgatgatcagaggagaacacataattatgacgaatttatctgcacatttatctccatgctagcgcaggagggaatgctcgctaatctggtggagcagaatatttcggtgagaagacgccagggggtctccatcggacgtctccacaaacagagaaaaccggataggcgtaagcgctcgcgtccttacaaggccaagagacagtag

SEQ ID NO: 148491 - DNA, 2190 bp, Artificial Sequence
  derived and/or modified sequence
atgaataagggctggttggagcttgaatcagaccctggactgttcactctgctggtggaagacttcggggtaaagggcgtccaggtcgaggagatatatgacctgcaatctaagtgtcagggtccagtatacgggtttatttttctgttcaaatggattgaggaacgaaggtcacggaggaaagtctctacgctcgtggatgacactagtgtcatagatgacgatattgtgaacaatatgtttttcgcgcaccagctcatccctaactcttgtgccacacatgcactactttctgtgttactgaactgttctagcgttgatctgggcccaaccctgagccgaatgaaggatttcacaaagggctttagtccggagtctaagggctacgcaataggtaatgctcctgagttggccaaagctcataattcccacgcccggcccgagcctcggcatctgcctgagaagcagaacggcctgtctgcagtaagaacaatggaggcttttcacttcgtcagctacgttccgattacaggtagactgtttgagctcgatggtctgaaagtgtaccctatcgatcatggcccgtggggagaggacgaggaatggaccgataaagccagacgcgtgattatggagcgaatcggtctggccacagcgggcgagccgtatcacgatattcgatttaacctgatggcagtagtgcctgacaggcggattaaatacgaggctagactgcacgtgctgaaagtaaaccggcaaactgtgttagaggcccttcagcaactgattagagtgacacaacctgaactcatccagacgcacaagagccaggagagccagttgccagaggaatctaagagcgccagcaataagtctcctctagtcctggaggctaacagggcaccagctgctagtgaaggaaatcacacagacggcgcagaggaagccgcaggctcctgtgcacaggcaccttctcactctccacctaacaagccaaagctggtggtcaaaccacctgggtcatccctgaacggcgtgcatcccaaccctacccctatcgtgcagcggctgcccgcctttctggataatcacaattatgctaagtcacctatgcaggaggaggaggatctagcggccggcgtaggacgaagtagggtgccagtgcgcccccctcagcaatactccgacgatgaggacgactatgaagacgacgaagaggatgacgtgcagaacaccaacagcgccctccgctataaagggaagggtacagggaagcccggggcgttgtcaggctctgccgacgggcagctgtctgtcctgcagcctaataccattaatgttcttgcggagaagctcaaggaatcccaaaaggaccttagcatcccccttagtattaagacatcctcaggggcaggcagcccggcggtggctgtcccgactcattcacagccctctcccacaccatctaacgaatctaccgacaccgcctccgagattggttccgccttcaacagccccttgagaagccccataagaagcgcaaaccctaccagaccaagttcacctgtgacatcacatattagtaaggttcttttcggggaggatgactctctgctacgcgtggattgcatacgttataatcgggccgtgagggatctggggccagtcattagcacagggttgctgcatctagctgaagatggcgtgctgagcccccttgccctgacggaaggtggtaaaggttcttccccgtccattaggccaattcagggctcccagggatctagtagtccagtcgaaaaggaagtggtggaggcaacggactctcgagaaaagaccggaatggtccgccccggagaacctctctcgggggaaaagtattcacccaaagagctccttgccctcctaaaatgcgtagaggccgagattgcgaattacgaagcatgtctgaaagaggaggtggagaaacggaaaaaatttaagatcgacgaccagagaaggactcataactacgatgagtttatttgcactttcatctccatgctcgcccaggagggcatgctcgctaatctggtcgaacagaacatcagcgtgagaagaaggcagggcgtcagtatcggccgcttgcataagcagcgtaaacctgacaggaggaagcgctcccggccctacaaggctaagcgccagtag

SEQ ID NO: 148492 - DNA, 2136 bp, Artificial Sequence
  derived and/or modified sequence
atgaacaagggctggctggagctggagagtgaccccggcctcttcaccctgctggtggaggactttggagtgaagggcgtgcaggtggaggagatctatgacctgcagagcaagtgccagggccctgtgtatggcttcatcttcctgttcaagtggattgaggagcggcgcagcaggaggaaggtgtccaccctggtggatgacacctctgtgattgatgatgacatcgtgaacaacatgttctttgcccaccagctgatccccaacagctgtgccacccacgccctgctgtctgtgctgctgaactgcagctctgtggacctgggccccaccctgagcaggatgaaggacttcaccaagggcttcagccctgagagcaagggctacgccatcggaaatgcccctgagctggccaaggcccacaacagccacgcccggcctgagcccaggcacctgcctgagaagcagaatggcctgtctgctgtgaggaccatggaggccttccactttgtgtcctatgtgcccatcaccggccgcctgtttgagctggatggcctgaaggtgtaccccatcgaccacggcccctggggagaagatgaggagtggacagacaaggcccggcgggtcatcatggagcgcatcggcctggccacagctggcatcaagtatgaggcccggctgcacgtgctgaaggtgaaccggcagacagtgctggaggccctgcagcagctgatccgggtgacccagcctgagctgatccagacccacaagagccaggagagccagctgcctgaggagagcaagagcgccagcaacaagagccccctggtgctggaggccaacagagccccagctgccagcgagggcaaccacacagatggagctgaggaggccgccggcagctgtgcccaggcccccagccacagcccccccaacaagcccaagctggtggtgaagcccccaggcagcagcctgaatggagtgcaccccaaccccacccccatcgtgcagaggctgcctgccttcctggacaaccacaactatgccaagagccccatgcaggaggaggaggacctggccgccggcgtgggccgcagccgggtgcctgtgcggcccccccagcagtacagtgatgatgaagatgattatgaagatgatgaggaggatgatgtgcagaacaccaacagcgccctgcgctacaagggcaaaggaacaggcaagccaggggccctgagcggcagcgcagatggccagctgtctgtgctgcagcccaacaccatcaacgtgctggccgagaagctgaaggagagccagaaggacctgagcatccccctgagcatcaagaccagcagtggagctggcagccctgctgtggccgtgcccacccacagccagcccagccccacccccagcaatgaaagcacagacacagccagcgagatcggcagcgccttcaacagccccctgcggagccccatccgcagcgccaaccccacccggcccagcagccctgtgaccagccacatcagcaaggtgctgtttggagaagatgacagcctgctgcgggtggactgcatccgctacaacagagctgtgcgggacctgggccctgtgatcagcacaggcctgctgcacctggccgaggatggagtgctgagccccctggccctgacagagggcggcaagggcagcagccccagcatccggcccatccagggcagccagggcagcagcagccctgtggagaaggaggtggtggaggccacagacagccgggagaagacaggcatggtgcggcctggagagcccctgtctggagagaagtacagccccaaggagctgctggccctgctgaagtgtgtggaggccgagatcgccaactatgaggcctgcctgaaggaggaggtggagaagaggaagaagttcaagattgatgaccagaggaggacccacaactatgatgagttcatctgcaccttcatctccatgctggcccaggagggcatgctggccaacctggtggagcagaacatctctgtgagaagacggcagggcgtgtccatcggccgcctgcacaagcagaggaagccagacaggaggaagaggagccggccctacaaggccaagaggcagtag

SEQ ID NO: 148493 - DNA, 2190 bp, Artificial Sequence
  derived and/or modified sequence
atgaacaagggctggctggagctggagagtgaccccggcctcttcaccctgctggtggaggactttggagtgaagggcgtgcaggtggaggagatctatgacctgcagagcaagtgccagggccctgtgtatggcttcatcttcctgttcaagtggattgaggagcggcgcagcaggaggaaggtgtccaccctggtggatgacacctctgtgattgatgatgacatcgtgaacaacatgttctttgcccaccagctgatccccaacagctgtgccacccacgccctgctgtctgtgctgctgaactgcagctctgtggacctgggccccaccctgagcaggatgaaggacttcaccaagggcttcagccctgagagcaagggctacgccatcggaaatgcccctgagctggccaaggcccacaacagccacgcccggcctgagcccaggcacctgcctgagaagcagaatggcctgtctgctgtgaggaccatggaggccttccactttgtgtcctatgtgcccatcaccggccgcctgtttgagctggatggcctgaaggtgtaccccatcgaccacggcccctggggagaagatgaggagtggacagacaaggcccggcgggtcatcatggagcgcatcggcctggccacagctggggagccctaccatgacatccgcttcaacctgatggctgtggtgcctgaccggcgcatcaagtatgaggcccggctgcacgtgctgaaggtgaaccggcagacagtgctggaggccctgcagcagctgatccgggtgacccagcctgagctgatccagacccacaagagccaggagagccagctgcctgaggagagcaagagcgccagcaacaagagccccctggtgctggaggccaacagagccccagctgccagcgagggcaaccacacagatggagctgaggaggccgccggcagctgtgcccaggcccccagccacagcccccccaacaagcccaagctggtggtgaagcccccaggcagcagcctgaatggagtgcaccccaaccccacccccatcgtgcagaggctgcctgccttcctggacaaccacaactatgccaagagccccatgcaggaggaggaggacctggccgccggcgtgggccgcagccgggtgcctgtgcggcccccccagcagtacagtgatgatgaagatgattatgaagatgatgaggaggatgatgtgcagaacaccaacagcgccctgcgctacaagggcaaaggaacaggcaagccaggggccctgagcggcagcgcagatggccagctgtctgtgctgcagcccaacaccatcaacgtgctggccgagaagctgaaggagagccagaaggacctgagcatccccctgagcatcaagaccagcagtggagctggcagccctgctgtggccgtgcccacccacagccagcccagccccacccccagcaatgaaagcacagacacagccagcgagatcggcagcgccttcaacagccccctgcggagccccatccgcagcgccaaccccacccggcccagcagccctgtgaccagccacatcagcaaggtgctgtttggagaagatgacagcctgctgcgggtggactgcatccgctacaacagagctgtgcgggacctgggccctgtgatcagcacaggcctgctgcacctggccgaggatggagtgctgagccccctggccctgacagagggcggcaagggcagcagccccagcatccggcccatccagggcagccagggcagcagcagccctgtggagaaggaggtggtggaggccacagacagccgggagaagacaggcatggtgcggcctggagagcccctgtctggagagaagtacagccccaaggagctgctggccctgctgaagtgtgtggaggccgagatcgccaactatgaggcctgcctgaaggaggaggtggagaagaggaagaagttcaagattgatgaccagaggaggacccacaactatgatgagttcatctgcaccttcatctccatgctggcccaggagggcatgctggccaacctggtggagcagaacatctctgtgagaagacggcagggcgtgtccatcggccgcctgcacaagcagaggaagccagacaggaggaagaggagccggccctacaaggccaagaggcagtag

SEQ ID NO: 148494 - DNA, 2136 bp, Artificial Sequence
  derived and/or modified sequence
atgaacaagggctggctggagctggagagcgaccccggcctgttcacactcttggtggaagactttggagtcaagggcgtgcaggtggaagaaatctatgacctgcagtccaaatgtcagggtccagtctacggatttatctttttgttcaaatggatcgaggaacggcgaagtaggcgtaaggtttccactttggtcgatgatacctccgtcattgacgacgacattgtgaacaatatgttctttgcccaccagttgatacccaatagctgcgcaacacacgcactgcttagcgtgcttttgaattgcagttctgtcgatctggggcctacgctcagcaggatgaaggatttcaccaaaggatttagccccgaatcgaagggatacgccatagggaacgcgccagagctcgccaaagcccataacagccatgcgcggcccgaaccgcgtcacttaccagagaaacaaaacggcctgtcagccgtgcggacgatggaggcctttcacttcgtaagctatgtacctattaccggccgactgttcgagttagatggcttgaaagtatatccaatagaccacggcccctggggggaggatgaggagtggacagataaggcccgcagagtgatcatggaaagaataggcctcgcaaccgctggaatcaagtatgaagctcggctgcatgtgctgaaggtgaatcgccagacagtgctagaggctctgcaacagctcattcgagtcacccaacctgagctcatccagactcacaaatctcaggagtctcaactgccagaagagagcaaatctgccagcaacaagagtccactggtgctcgaggccaaccgcgcccctgccgccagcgaggggaaccataccgatggagccgaggaagctgcaggatcctgtgcacaggccccctcccattcgccgcccaacaaacctaagctggttgtgaagcccccaggatccagcctcaacggagtgcaccccaatcctacacccatcgtacaaagattgcccgcattcctggacaatcacaattatgccaagagcccaatgcaggaagaggaagatctggctgcgggagtgggcagaagtcgagtacccgtcaggccacctcagcaatattcagatgatgaggatgattatgaagacgatgaggaggacgacgttcagaataccaattcagcccttaggtataagggtaaaggaacaggaaaacctggagctctttccgggagcgccgatgggcagctgagcgttctgcaaccgaatactatcaacgtgcttgctgagaaactcaaggagtcccagaaggacctgagcattcctttatctattaaaacttcttccggagcaggaagcccggctgtcgcagtgcccacccacagtcagccctcaccaacgcctagtaacgagtccactgacactgcgtcagagatagggagcgcttttaattctcccctccgaagccccattaggtcagccaaccccacaaggccatcatcacccgtgacgagccacataagtaaagtgctgttcggagaggatgattcacttttgagggtcgactgcataagatataatcgtgcagtccgagatctgggccctgtcatatcaaccggactcctccatcttgctgaggacggagtactgtcccccctagccttaactgaaggtggcaaaggcagctccccaagcattcggccaattcaagggtcgcaggggagcagtagtcccgtggaaaaagaggtagtggaggctaccgatagcagggagaagacaggaatggtcagacctggagaacccctgagtggagagaaatatagcccgaaggaacttctggcactcctgaagtgcgtcgaagcggagatcgccaattatgaggcttgtctaaaggaggaggtcgaaaagaggaagaaattcaaaatcgatgatcaacgcaggacacacaattatgacgagttcatttgtacctttatcagcatgctggcgcaggaaggaatgttggcaaacttggtcgagcagaacatctccgtgcgcaggcgccaaggagtgtctataggccgattgcacaaacagaggaagcctgaccgtcgcaagaggagtcgaccgtacaaggctaaacgccagtag

SEQ ID NO: 148495 - DNA, 2190 bp, Artificial Sequence
  derived and/or modified sequence
atgaacaagggctggctggagctggagagcgaccccggcctgttcaccctgctggtggaagatttcggggtgaaaggcgtacaggtggaggaaatttacgatttgcagagcaagtgtcagggacctgtctacggcttcatcttcctgttcaaatggattgaggagcgccgctcccgccggaaggtttcgacactcgtagacgacacgagtgtaattgatgatgacatcgtgaacaatatgtttttcgcccaccagctgatcccaaactcctgcgctacccatgcccttttaagtgttttgctgaattgttcctctgtggacctaggccctacactgtctaggatgaaggattttacgaaggggttctcacccgaaagcaagggctacgccataggaaacgcccccgagttagctaaggcccacaactcgcacgcacgccccgagcctcgacacttgcctgaaaaacaaaacggactctcggccgttcggacaatggaggcattccactttgtatcgtacgtgcccatcaccggaagactattcgagttggacggcttaaaggtgtatcccattgaccacgggccttggggagaggacgaggagtggactgacaaggcacggcgtgttatcatggaacgaattggcttggccactgccggggaaccctatcatgacattcgtttcaatctaatggctgtggtgcccgacagaaggattaaatatgaagctagactccatgtgttgaaagtgaaccggcagactgtcctggaggccctgcagcaacttatccgcgtcactcaaccggagctgattcaaacccataaaagccaagagtcccaattgcctgaggaaagcaaatctgcctcaaacaaatcacctttggttctggaggccaatagggctccggctgcttccgaggggaatcacactgatggggccgaggaggcggcagggtcatgcgcccaagcaccttcccacagcccacctaataaacccaaactagtcgtgaagcctcctggatcatcattaaacggagtgcatcctaacccaactcctattgttcaacgcctgcccgcttttttggacaaccataattatgcaaagagcccaatgcaagaagaggaagacctcgctgccggtgtgggaaggtccagggtgcccgtgcgcccaccccagcagtactccgacgatgaagatgattacgaagacgacgaagaagacgatgtgcaaaatacaaacagcgccttacggtacaaaggtaaaggaacaggcaagcccggggcgctgagtgggtccgccgatgggcagctttctgtccttcagcctaacacaattaatgtgcttgcagagaaacttaaggagtcccagaaggacctgtctattccattatcgatcaaaacatcgtcaggcgctgggtctccagcagtggccgttcctacacatagtcagccgagccctacgccatcaaacgagtcgaccgacacggcctcagaaatcggctccgcgtttaattccccactacgaagccccatcaggtccgctaacccaacccgtccctctagtccagtcacaagtcacattagcaaagtgctgtttggtgaggatgactcactgctgcgcgtcgattgcatacgctacaatagagcggtcagagatctgggccccgttatttccactggtctcttgcatctggctgaggacggggtgttgtcgccgctggcccttactgaaggcggcaagggctccagcccttccatccggcctatccaggggtcccaaggttcatcttcaccggtcgaaaaggaggtggtagaagctaccgattcgcgagagaagaccgggatggtgcgaccaggtgagcccctgagcggcgagaagtattcacctaaggagctgctagctttgctgaaatgtgtcgaggctgaaattgccaattacgaggcatgtctcaaggaagaggttgagaagcggaaaaagtttaagattgatgaccagagacgtacccacaattatgacgagtttatctgcacgttcattagtatgctcgcacaggagggaatgctggcaaacctcgtggaacagaatatcagtgtgcgtcgccggcaaggggtttcaatcgggcgtctacataagcagagaaagcccgatcgacggaagcgcagcaggccatataaagccaaacgccagtag

SEQ ID NO: 148496 - DNA, 2136 bp, Artificial Sequence
  derived and/or modified sequence
atgaataagggctggttggaactggaaagcgacccaggcctgttcaccctattagtggaggactttggtgtcaagggcgtccaggtcgaggagatctacgacttgcagtccaagtgccagggacctgtgtatggattcatctttctctttaaatggattgaagagaggcgttccagaagaaaagtgagtacactggtcgacgacacaagtgtgatcgatgatgatatcgtgaacaatatgttctttgcccatcaacttattcctaattcctgtgctacacacgctttgttgtcagttctgctcaattgcagttctgtcgatctggggcctaccctatccaggatgaaagacttcaccaaaggttttagccctgaaagtaagggctacgctatcgggaatgccccagagctggctaaggcccacaacagccacgcccgaccagaaccacggcacctgcctgagaagcagaatggtctcagcgcagttcggacaatggaagctttccactttgtttcctatgtccccattaccggtcggctgtttgaactggacggcttgaaggtgtatcccatcgatcatggaccttggggcgaggacgaagagtggactgataaagcccgtagggtgattatggagaggatcgggttggctactgccggtattaagtacgaggctcgcctgcacgttcttaaggtcaacaggcaaaccgtgctcgaggctctccaacaacttataagagtgacacagccagagctgatccagacgcataagagtcaggagagccaactcccagaggagtcaaagtctgcttctaataagagtccactcgtgctggaggccaatcgcgctccagctgccagtgaaggcaaccacacagatggtgcggaggaagccgcagggtcttgcgcccaggcacctagccatagccctcctaataaacctaagctggtggtaaagccaccagggtccagtctgaacggggtgcatcctaacccaacccccatcgtccagcgcctgccggcattcctggacaatcacaattacgccaaaagtcctatgcaggaagaggaggacctggcagccggtgtaggtagatctcgggtgcccgtgagacccccacagcagtatagcgacgacgaagacgactacgaagatgatgaggaagatgacgtccagaatacgaatagtgccctgcgatacaaaggaaaagggacaggtaaaccaggagcgctatcgggctctgccgacgggcagctgtcagtcttgcaacctaatacaatcaacgtgttggcagagaagctaaaggaatcccagaaggacctcagtatcccgctgtcaataaagaccagcagcggagctgggtcacctgctgtcgccgtccccactcactcccaacccagccctacaccctcaaatgaaagcactgacactgcctccgagattggatccgccttcaactcccccctcagatcacccattcgttcggctaacccaacacgtcctagcagcccggtgacttcacacatatccaaggtcctctttggagaagacgatagcctattgcgggtcgactgcattcgctacaatcgggctgtaagggaccttggaccggtcatatctaccggactcttgcacctagcggaggacggagtgctgtcgcccctggcactgactgaaggagggaaaggaagcagtccctccatccggcctatccagggaagtcagggcagcagctcccccgtcgaaaaggaggtagtggaagccacagactcacgagaaaagacagggatggtccgtcctggcgaaccattatctggcgaaaaatatagccctaaggaactacttgccctgcttaagtgtgttgaggctgagattgcaaactatgaagcctgtttaaaggaagaggtcgagaagaggaaaaagtttaaaatagatgatcaacgacgcacacacaattacgatgagttcatctgcaccttcatcagtatgctggctcaggagggcatgctggctaatctggttgagcagaatatatccgtgaggaggcggcaaggcgtgtctatagggagacttcataaacagaggaagcctgacaggaggaagcgtagccggccatataaagcaaaaagacagtag

SEQ ID NO: 148497 - DNA, 2190 bp, Artificial Sequence
  derived and/or modified sequence
atgaacaaggggtggctggagctggaaagcgaccctgggttgttcactctcctggtggaggactttggagtcaagggagtccaagtagaggaaatttatgaccttcagtctaagtgccagggtccagtttacggttttattttcctattcaaatggatcgaggaacggagaagccgccgtaaggtttccaccctcgtggatgacacatctgttatagatgatgacattgtgaataacatgtttttcgcccaccaattaatccctaacagctgtgcaacacacgccttgctgagtgtgcttttgaattgctccagcgtggatctaggaccaacactcagccgcatgaaggatttcaccaagggcttttctcctgaaagcaaaggatatgctataggcaatgccccagagttagcaaaggcccataatagtcacgcacggccagagcccaggcacctgccagaaaaacaaaatgggctctccgcagtacgcaccatggaagctttccactttgtgagttacgttcccataacagggagattatttgagctagatggtctgaaagtctatccaattgaccatgggccatggggagaagatgaagagtggacagataaggcccgaagggtgataatggaaaggattgggcttgccacagcaggcgagccttaccatgatattcggttcaacctgatggccgtcgtgcctgatcgtaggattaagtatgaggccagattgcacgtactaaaagtaaataggcagacagtgctagaggcattacagcagctaatcagagtgacccaacctgagctaatccagacccataagtcccaggagtcccagctgcccgaggagtccaagtcggcctctaataaatcgccactggtgctcgaagcaaatcgtgcccctgctgcttcagagggcaaccacactgatggggcagaagaggccgctgggagctgtgcacaggctcccagccactctcctccaaacaagccaaagttagtagtcaagcctccagggagcagccttaacggagtgcaccccaatcccactccgatcgtacagcggctgccagccttcctggacaatcataactacgccaaaagccctatgcaggaggaagaggacctcgcagctggcgtgggcagaagccgggtgccagttaggcctccccagcaatatagtgacgatgaagacgattacgaagatgatgaggaggatgacgtgcagaatactaacagcgccctgaggtacaaaggaaaggggaccgggaaaccaggcgcactcagcggaagcgcagatgggcagctttcagtgttacaacctaacaccattaacgtgttagccgagaagctcaaggagtcccaaaaggatcttagtattcccctttcaatcaaaacgtcgtccggagctggcagccccgctgtggctgtacctacgcacagccaaccgtctccaaccccaagcaacgaatccacagacactgcctctgagattggatccgcctttaattcacctctacgaagccccattcgctctgctaaccccacccgtccctcctctcctgtaacctcccacatcagcaaagtgctgttcggagaagacgactcactcctaagggtcgattgcatcaggtacaaccgagccgttcgcgaccttgggccagtgatttccaccggcctgctccacctggccgaggacggtgttctgtccccgcttgccctgacagagggaggcaaggggtcttcaccgtccatcaggcccatccagggcagtcagggcagctcgtctcccgtagaaaaggaggtggttgaggccaccgacagccgagaaaagacaggcatggtcagaccaggagagcccttaagcggtgagaagtacagtccgaaagagctgttggccctcctgaaatgtgttgaggccgagatcgccaactatgaagcctgtctgaaggaagaggtagagaaacggaaaaaatttaagatcgacgaccaacgcagaacccacaattacgatgagttcatttgcaccttcattagtatgctagcccaggaaggtatgctggcaaacctggtcgagcaaaacatcagtgtacgcaggcggcagggtgtgtcaatagggaggctgcacaaacagaggaagcctgaccggcgtaaaagaagtcggccttacaaggccaagcgccagtag

SEQ ID NO: 148498 - DNA, 3434 bp, Artificial Sequence
  derived and/or modified sequence
cctggacatggcgctgaggggccgccccgcgggaagatgaataagggctggctggagctggagagcgacccaggcctcttcaccctgctcgtggaagatttcggtgtcaagggggtgcaagtggaggagatctacgaccttcagagcaaatgtcagggccctgtatatggatttatcttcctgttcaaatggatcgaagagcgccggtcccggcgaaaggtctctaccttggtggatgatacgtccgtgattgatgatgatattgtgaataacatgttctttgcccaccagctgatacccaactcttgtgcaactcatgccttgctgagcgtgctcctgaactgcagcagcgtggacctgggacccaccctgagtcgcatgaaggacttcaccaagggtttcagccctgagagcaaaggatatgcgattggcaatgccccggagttggccaaggcccataatagccatgccaggcccgagccacgccacctccctgagaagcagaatggccttagtgcagtgcggaccatggaggcgttccactttgtcagctatgtgcctatcacaggccggctctttgagctggatgggctgaaggtctaccccattgaccatgggccctggggggaggacgaggagtggacagacaaggcccggcgggtcatcatggagcgtatcggcctcgccactgcagggatcaagtatgaggccaggctgcatgtgctgaaggtgaaccgtcagacagtactagaggctctgcagcagctgataagagtaacacagccagagctgattcagacccacaagtctcaagagtcacagctgcctgaggagtccaagtcagccagcaacaagtccccgctggtgctggaagcaaacagggcccctgcagcctctgagggcaaccacacagatggtgcagaggaggcggctggttcatgcgcacaagccccatcccacagccctcccaacaaacccaagctagtggtgaagcctccaggcagcagcctcaatggggttcaccccaaccccactcccattgtccagcggctgccggcctttctagacaatcacaattatgccaagtcccccatgcaggaggaagaagacctggcggcaggtgtgggccgcagccgagttccagtccgcccaccccagcagtactcagatgatgaggatgactatgaggatgacgaggaggatgacgtgcagaacaccaactctgcccttaggtataaggggaagggaacagggaagccaggggcattgagcggttctgctgatgggcaactgtcagtgctgcagcccaacaccatcaacgtcttggctgagaagctcaaagagtcccagaaggacctctcaattcctctgtccatcaagactagcagcggggctgggagtccggctgtggcagtgcccacacactcgcagccctcacccacccccagcaatgagagtacagacacggcctctgagatcggcagtgctttcaactcgccactgcgctcgcctatccgctcagccaacccgacgcggccctccagccctgtcacctcccacatctccaaggtgctttttggagaggatgacagcctgctgcgtgttgactgcatacgctacaaccgtgctgtccgtgatctgggtcctgtcatcagcacaggcctgctgcacctggctgaggatggggtgctgagtcccctggcgctgacagagggtgggaagggttcctcgccctccatcagaccaatccaaggcagccaggggtccagcagcccagtggagaaggaggtcgtggaagccacggacagcagagagaagacggggatggtgaggcctggcgagcccttgagtggggagaaatactcacccaaggagctgctggcactgctgaagtgtgtggaggctgagattgcaaactatgaggcgtgcctcaaggaggaggtagagaagaggaagaagttcaagattgatgaccagagaaggacccacaactacgatgagttcatctgcacctttatctccatgctggctcaggaaggcatgctggccaacctagtggagcagaacatctccgtgcggcggcgccaaggggtcagcatcggccggctccacaagcagcggaagcctgaccggcggaaacgctctcgcccctacaaggccaagcgccagtgaggactgctggccctgactctgcagcccactcttgccgtgtggccctcaccagggtccttccctgccccacttccccttttcccagtattactgaatagtcccagctggagagtccaggccctgggaatgggaggaaccaggccacattccttccatcgtgccctgaggcctgacacggcagatcagccccatagtgctcaggaggcagcatctggagttggggcacagcgaggtactgcagcttcctccacagccggctgtggagcagcaggacctggcccttctgcctgggcagcagaatatatattttacctatcagagacatctatttttctgggctccaacccaacatgccaccatgttgacataagttcctacctgactatgctttctctcctaggagctgtcctggtgggcccaggtccttgtatcatgccacggtcccaactacagggtcctagctgggggcctgggtgggccctgggctctgggccctgctgctctagccccagccaccagcctgtccctgttgtaaggaagccaggtcttctctcttcattcctcttaggagagtgccaaactcagggacccagcactgggctgggttgggagtagggtgtcccagtggggttggggtgagcaggctgctgggatcccatggcctgagcagagcatgtgggaactgttcagtggcctgtgaactgtcttccttgttctagccaggctgttcaagactgctctccatagcaaggttctagggctcttcgccttcagtgttgtggccctagctatgggcctaaattgggctctaggtctctgtccctggcgcttgaggctcagaagagcctctgtccagcccctcagtattaccatgtctccctctcaggggtagcagagacagggttgcttataggaagctggcaccactcagctcttcctgctactccagtttcctcagcctctgcaaggcactcagggtgggggacagcaggatcaagacaacccgttggagcccctgtgttccagaggacctgatgccaaggggtaatgggcccagcagtgcctctggagcccaggccccaacacagccccatggcctctgccagatggctttgaaaaaggtgatccaagcaggcccctttatctgtacatagtgactgagtggggggtgctggcaagtgtggcagctgcctctgggctgagcacagcttgacccctctagcccctgtaaatactggatcaatgaatgaataaaactctcc

SEQ ID NO: 148499 - DNA, 3937 bp, Artificial Sequence
  derived and/or modified sequence
cgctccgcccctcccctcgcagcacccgggcctagtactgcccgtcccgcccctcctctcgagcctcagcgctcagcatcgcccggaccccctcttcccttcgcccgcctcgtcccgaccctccccttcgcccccgtcccgccccgcccctccccttcgcccccgtcccgtcccgccccgcccctccccttcgcccccgtccctccccttcgcccccgtccctccgcgcgtgcgcgttcgccttcgagcgcatgcccgcatctgctgtccgacaggcggaagacgagcccagaggcggagcagggccgtcgcgccttggtgacgtctgccgccggcgcgggcgggtgacgcgactgggcccgttgtctgtgtgtgggactgaggggccccgggggcggtgggggctcccggtgggggcagcggtggggagggagggcctggacatggcgctgaggggccgccccgcgggaagatgaataagggctggctggagctggagagcgacccaggcctcttcaccctgctcgtggaagatttcggtgtcaagggggtgcaagtggaggagatctacgaccttcagagcaaatgtcagggccctgtatatggatttatcttcctgttcaaatggatcgaagagcgccggtcccggcgaaaggtctctaccttggtggatgatacgtccgtgattgatgatgatattgtgaataacatgttctttgcccaccagctgatacccaactcttgtgcaactcatgccttgctgagcgtgctcctgaactgcagcagcgtggacctgggacccaccctgagtcgcatgaaggacttcaccaagggtttcagccctgagagcaaaggatatgcgattggcaatgccccggagttggccaaggcccataatagccatgccaggcccgagccacgccacctccctgagaagcagaatggccttagtgcagtgcggaccatggaggcgttccactttgtcagctatgtgcctatcacaggccggctctttgagctggatgggctgaaggtctaccccattgaccatgggccctggggggaggacgaggagtggacagacaaggcccggcgggtcatcatggagcgtatcggcctcgccactgcaggggagccctaccacgacatccgcttcaacctgatggcagtggtgcccgaccgcaggatcaagtatgaggccaggctgcatgtgctgaaggtgaaccgtcagacagtactagaggctctgcagcagctgataagagtaacacagccagagctgattcagacccacaagtctcaagagtcacagctgcctgaggagtccaagtcagccagcaacaagtccccgctggtgctggaagcaaacagggcccctgcagcctctgagggcaaccacacagatggtgcagaggaggcggctggttcatgcgcacaagccccatcccacagccctcccaacaaacccaagctagtggtgaagcctccaggcagcagcctcaatggggttcaccccaaccccactcccattgtccagcggctgccggcctttctagacaatcacaattatgccaagtcccccatgcaggaggaagaagacctggcggcaggtgtgggccgcagccgagttccagtccgcccaccccagcagtactcagatgatgaggatgactatgaggatgacgaggaggatgacgtgcagaacaccaactctgcccttaggtataaggggaagggaacagggaagccaggggcattgagcggttctgctgatgggcaactgtcagtgctgcagcccaacaccatcaacgtcttggctgagaagctcaaagagtcccagaaggacctctcaattcctctgtccatcaagactagcagcggggctgggagtccggctgtggcagtgcccacacactcgcagccctcacccacccccagcaatgagagtacagacacggcctctgagatcggcagtgctttcaactcgccactgcgctcgcctatccgctcagccaacccgacgcggccctccagccctgtcacctcccacatctccaaggtgctttttggagaggatgacagcctgctgcgtgttgactgcatacgctacaaccgtgctgtccgtgatctgggtcctgtcatcagcacaggcctgctgcacctggctgaggatggggtgctgagtcccctggcgctgacagagggtgggaagggttcctcgccctccatcagaccaatccaaggcagccaggggtccagcagcccagtggagaaggaggtcgtggaagccacggacagcagagagaagacggggatggtgaggcctggcgagcccttgagtggggagaaatactcacccaaggagctgctggcactgctgaagtgtgtggaggctgagattgcaaactatgaggcgtgcctcaaggaggaggtagagaagaggaagaagttcaagattgatgaccagagaaggacccacaactacgatgagttcatctgcacctttatctccatgctggctcaggaaggcatgctggccaacctagtggagcagaacatctccgtgcggcggcgccaaggggtcagcatcggccggctccacaagcagcggaagcctgaccggcggaaacgctctcgcccctacaaggccaagcgccagtgaggactgctggccctgactctgcagcccactcttgccgtgtggccctcaccagggtccttccctgccccacttccccttttcccagtattactgaatagtcccagctggagagtccaggccctgggaatgggaggaaccaggccacattccttccatcgtgccctgaggcctgacacggcagatcagccccatagtgctcaggaggcagcatctggagttggggcacagcgaggtactgcagcttcctccacagccggctgtggagcagcaggacctggcccttctgcctgggcagcagaatatatattttacctatcagagacatctatttttctgggctccaacccaacatgccaccatgttgacataagttcctacctgactatgctttctctcctaggagctgtcctggtgggcccaggtccttgtatcatgccacggtcccaactacagggtcctagctgggggcctgggtgggccctgggctctgggccctgctgctctagccccagccaccagcctgtccctgttgtaaggaagccaggtcttctctcttcattcctcttaggagagtgccaaactcagggacccagcactgggctgggttgggagtagggtgtcccagtggggttggggtgagcaggctgctgggatcccatggcctgagcagagcatgtgggaactgttcagtggcctgtgaactgtcttccttgttctagccaggctgttcaagactgctctccatagcaaggttctagggctcttcgccttcagtgttgtggccctagctatgggcctaaattgggctctaggtctctgtccctggcgcttgaggctcagaagagcctctgtccagcccctcagtattaccatgtctccctctcaggggtagcagagacagggttgcttataggaagctggcaccactcagctcttcctgctactccagtttcctcagcctctgcaaggcactcagggtgggggacagcaggatcaagacaacccgttggagcccctgtgttccagaggacctgatgccaaggggtaatgggcccagcagtgcctctggagcccaggccccaacacagccccatggcctctgccagatggctttgaaaaaggtgatccaagcaggcccctttatctgtacatagtgactgagtggggggtgctggcaagtgtggcagctgcctctgggctgagcacagcttgacccctctagcccctgtaaatactggatcaatgaatgaataaaactctcctaagaatctcctg

SEQ ID NO: 148500 - DNA, 2136 bp, Artificial Sequence
  derived and/or modified sequence
atgaacaagggctggctggagctggagagcgaccccggcctgttcaccctgctggtggaggacttcggcgtgaagggcgtgcaggtggaggagatctacgacctgcagagcaagtgccagggccccgtgtacggcttcatcttcctgttcaagtggatcgaggagagaagaagcagaagaaaggtgagcaccctggtggacgacaccagcgtgatcgacgacgacatcgtgaacaacatgttcttcgcccaccagctgatccccaacagctgcgccacccacgccctgctgagcgtgctgctgaactgcagcagcgtggacctgggccccaccctgagcagaatgaaggacttcaccaagggcttcagccccgagagcaagggctacgccatcggcaacgcccccgagctggccaaggcccacaacagccacgccagacccgagcccagacacctgcccgagaagcagaacggcctgagcgccgtgagaaccatggaggccttccacttcgtgagctacgtgcccatcaccggcagactgttcgagctggacggcctgaaggtgtaccccatcgaccacggcccctggggcgaggacgaggagtggaccgacaaggccagaagagtgatcatggagagaatcggcctggccaccgccggcatcaagtacgaggccagactgcacgtgctgaaggtgaacagacagaccgtgctggaggccctgcagcagctgatcagagtgacccagcccgagctgatccagacccacaagagccaggagagccagctgcccgaggagagcaagagcgccagcaacaagagccccctggtgctggaggccaacagagcccccgccgccagcgagggcaaccacaccgacggcgccgaggaggccgccggcagctgcgcccaggcccccagccacagcccccccaacaagcccaagctggtggtgaagccccccggcagcagcctgaacggcgtgcaccccaaccccacccccatcgtgcagagactgcccgccttcctggacaaccacaactacgccaagagccccatgcaggaggaggaggacctggccgccggcgtgggcagaagcagagtgcccgtgagacccccccagcagtacagcgacgacgaggacgactacgaggacgacgaggaggacgacgtgcagaacaccaacagcgccctgagatacaagggcaagggcaccggcaagcccggcgccctgagcggcagcgccgacggccagctgagcgtgctgcagcccaacaccatcaacgtgctggccgagaagctgaaggagagccagaaggacctgagcatccccctgagcatcaagaccagcagcggcgccggcagccccgccgtggccgtgcccacccacagccagcccagccccacccccagcaacgagagcaccgacaccgccagcgagatcggcagcgccttcaacagccccctgagaagccccatcagaagcgccaaccccaccagacccagcagccccgtgaccagccacatcagcaaggtgctgttcggcgaggacgacagcctgctgagagtggactgcatcagatacaacagagccgtgagagacctgggccccgtgatcagcaccggcctgctgcacctggccgaggacggcgtgctgagccccctggccctgaccgagggcggcaagggcagcagccccagcatcagacccatccagggcagccagggcagcagcagccccgtggagaaggaggtggtggaggccaccgacagcagagagaagaccggcatggtgagacccggcgagcccctgagcggcgagaagtacagccccaaggagctgctggccctgctgaagtgcgtggaggccgagatcgccaactacgaggcctgcctgaaggaggaggtggagaagagaaagaagttcaagatcgacgaccagagaagaacccacaactacgacgagttcatctgcaccttcatcagcatgctggcccaggagggcatgctggccaacctggtggagcagaacatcagcgtgagaagaagacagggcgtgagcatcggcagactgcacaagcagagaaagcccgacagaagaaagagaagcagaccctacaaggccaagagacagtag

SEQ ID NO: 148501 - DNA, 2190 bp, Artificial Sequence
  derived and/or modified sequence
atgaacaagggctggctggagctggagagcgaccccggcctgttcaccctgctggtggaggacttcggcgtgaagggcgtgcaggtggaggagatctacgacctgcagagcaagtgccagggccccgtgtacggcttcatcttcctgttcaagtggatcgaggagagaagaagcagaagaaaggtgagcaccctggtggacgacaccagcgtgatcgacgacgacatcgtgaacaacatgttcttcgcccaccagctgatccccaacagctgcgccacccacgccctgctgagcgtgctgctgaactgcagcagcgtggacctgggccccaccctgagcagaatgaaggacttcaccaagggcttcagccccgagagcaagggctacgccatcggcaacgcccccgagctggccaaggcccacaacagccacgccagacccgagcccagacacctgcccgagaagcagaacggcctgagcgccgtgagaaccatggaggccttccacttcgtgagctacgtgcccatcaccggcagactgttcgagctggacggcctgaaggtgtaccccatcgaccacggcccctggggcgaggacgaggagtggaccgacaaggccagaagagtgatcatggagagaatcggcctggccaccgccggcgagccctaccacgacatcagattcaacctgatggccgtggtgcccgacagaagaatcaagtacgaggccagactgcacgtgctgaaggtgaacagacagaccgtgctggaggccctgcagcagctgatcagagtgacccagcccgagctgatccagacccacaagagccaggagagccagctgcccgaggagagcaagagcgccagcaacaagagccccctggtgctggaggccaacagagcccccgccgccagcgagggcaaccacaccgacggcgccgaggaggccgccggcagctgcgcccaggcccccagccacagcccccccaacaagcccaagctggtggtgaagccccccggcagcagcctgaacggcgtgcaccccaaccccacccccatcgtgcagagactgcccgccttcctggacaaccacaactacgccaagagccccatgcaggaggaggaggacctggccgccggcgtgggcagaagcagagtgcccgtgagacccccccagcagtacagcgacgacgaggacgactacgaggacgacgaggaggacgacgtgcagaacaccaacagcgccctgagatacaagggcaagggcaccggcaagcccggcgccctgagcggcagcgccgacggccagctgagcgtgctgcagcccaacaccatcaacgtgctggccgagaagctgaaggagagccagaaggacctgagcatccccctgagcatcaagaccagcagcggcgccggcagccccgccgtggccgtgcccacccacagccagcccagccccacccccagcaacgagagcaccgacaccgccagcgagatcggcagcgccttcaacagccccctgagaagccccatcagaagcgccaaccccaccagacccagcagccccgtgaccagccacatcagcaaggtgctgttcggcgaggacgacagcctgctgagagtggactgcatcagatacaacagagccgtgagagacctgggccccgtgatcagcaccggcctgctgcacctggccgaggacggcgtgctgagccccctggccctgaccgagggcggcaagggcagcagccccagcatcagacccatccagggcagccagggcagcagcagccccgtggagaaggaggtggtggaggccaccgacagcagagagaagaccggcatggtgagacccggcgagcccctgagcggcgagaagtacagccccaaggagctgctggccctgctgaagtgcgtggaggccgagatcgccaactacgaggcctgcctgaaggaggaggtggagaagagaaagaagttcaagatcgacgaccagagaagaacccacaactacgacgagttcatctgcaccttcatcagcatgctggcccaggagggcatgctggccaacctggtggagcagaacatcagcgtgagaagaagacagggcgtgagcatcggcagactgcacaagcagagaaagcccgacagaagaaagagaagcagaccctacaaggccaagagacagtag

SEQ ID NO: 148502 - protein, 425 aa, Artificial Sequence
  derived and/or modified sequence
MGEDAAQAEKFQHPGSDMRQEKPSSPSPMPSSTPSPSLNLGNTEEAIRDNSQVNAVTVLTLLDKLVNMLDAVQENQHKMEQRQISLEGSVKGIQNDLTKLSKYQASTSNTVSKLLEKSRKVSAHTRAVKERMDRQCAQVKRLENNHAQLLRRNHFKVLIFQEENEIPASVFVKQPVSGAVEGKEELPDENKSLEETLHTVDLSSDDDLPHDEEALEDSAEEKVEESRAEKIKRSSLKKVDSLKKAFSRQNIEKKMNKLGTKIVSVERREKIKKSLTSNHQKISSGKSSPFKVSPLTFGRKKVREGESHAENETKSEDLPSSEQMPNDQEEESFAEGHSEASLASALVEGEIAEEAAEKATSRGSNSGMDSNIDLTIVEDEEEESVALEQAQKVRYEGSYALTSEEAERSDGDPVQPAVLQVHQTS

SEQ ID NO: 148503 - DNA, 1278 bp, Artificial Sequence
  derived and/or modified sequence
atgggagaagacgccgcccaggcggagaaatttcagcatcccggttccgacatgcgccaggaaaagccttcctccccttctccgatgccctcatctacacctagcccaagtctgaatcttggtaataccgaggaagccatccgggacaattcccaagtcaacgccgtgacagtgttgaccctgctcgataagctggtgaacatgttggatgctgtgcaagagaaccagcataaaatggaacagagacagatttctttagaaggttctgtaaaagggattcagaacgacctgactaaactgtctaagtaccaggccagcacttccaataccgtcagtaaactccttgaaaagagtcgcaaagtgtctgcccacacccgggccgtgaaagagaggatggacagacaatgcgcacaagtgaagcgacttgaaaacaatcacgcacagctattgagacgaaaccatttcaaggtgttaatttttcaggaagagaacgagatccctgcaagtgttttcgtgaaacagcctgtctccggtgccgtggagggaaaggaagagcttcccgatgaaaacaagagccttgaggagactttacataccgtagatctgtcatcggacgacgacttgcctcacgatgaggaggccctcgaagacagtgccgaagagaaagtggaggagtcacgcgcagaaaagataaagaggtcatcactgaagaaagtagatagtttgaaaaaagccttcagcagacagaatatagaaaaaaagatgaataagttggggacaaagatcgtgtccgttgagcgtcgagagaaaattaaaaagtccttgacctcaaatcaccaaaaaatatcttccggaaagtcttcaccgttcaaggtttcacccctgacttttgggaggaaaaaagttagagagggcgagtctcacgctgaaaatgaaacaaaaagtgaggacctgccaagctcggaacaaatgccaaatgaccaggaggaggagtccttcgcggaaggccatagtgaggcaagcctggctagtgccctggtcgaaggggagattgccgaggaggctgccgaaaaagcgacgtcccgaggatccaattcggggatggattcaaatatcgatctgacaatcgtggaggacgaagaggaagagtctgtcgctctagaacaggctcagaaggtgcgctatgagggatcatatgcactgacatcagaggaggccgaaagaagtgacggagacccagtgcaacccgccgtcctgcaagtgcatcagacttcctag

SEQ ID NO: 148504 - DNA, 1278 bp, Artificial Sequence
  derived and/or modified sequence
atgggagaagatgctgcccaggccgagaagttccagcaccctggcagtgacatgaggcaggagaagcccagcagccccagccccatgcccagcagcacccccagccccagcctgaacctgggcaacacagaggaggccatccgggacaacagccaggtgaatgctgtgacagtgctgaccctgctggacaagctggtgaacatgctggatgctgtgcaggagaaccagcacaagatggagcagaggcagatcagcctggagggctctgtgaagggcatccagaatgacctgaccaagctgagcaagtaccaggccagcaccagcaacacagtgtccaagctgctggagaagagcaggaaggtgtctgcccacaccagggctgtgaaggagaggatggaccggcagtgtgcccaggtgaagaggctggagaacaaccacgcccagctgctgcggaggaaccacttcaaggtgctgatcttccaggaggagaatgagatcccagcctctgtgtttgtgaagcagcctgtgtctggagctgtggagggcaaggaggagctgcctgatgagaacaagagcctggaggagaccctgcacacagtggacctgagcagtgatgatgacctgccccatgatgaggaggccctggaggacagcgctgaggagaaggtggaggagagcagagctgagaagatcaagaggagcagcctgaagaaggtggacagcctgaagaaggccttcagccggcagaacatcgagaagaagatgaacaagctgggcaccaagatcgtgtctgtggagcggcgggagaagatcaagaagagcctgaccagcaaccaccagaagatcagcagcggcaagagcagccccttcaaggtgagccccctgacctttggaaggaagaaggtgcgggagggggagagccatgctgaaaatgagaccaagtctgaggacctgcccagcagcgagcagatgcccaatgaccaggaggaggagagctttgctgagggccacagcgaggccagcctggccagcgccctggtggagggggagattgctgaggaggccgctgagaaggccaccagccggggcagcaacagcggcatggacagcaacatcgacctgaccatcgtggaggatgaggaggaggagagcgtggccctggagcaggcccagaaggtgcgctatgagggcagctatgccctgaccagcgaggaggccgagaggagtgatggagaccctgtgcagcctgctgtgctgcaggtgcaccagaccagctag

SEQ ID NO: 148505 - DNA, 1278 bp, Artificial Sequence
  derived and/or modified sequence
atgggcgaggacgccgcccaggccgagaagttccagcaccccggcagtgacatgcggcaagagaaacctagctccccttcccctatgccctcttctacaccgagtccgagtctgaatctcggtaatactgaggaggcaatccgagataattcccaggtgaatgctgttacagttttaactctcctggacaagctggtgaacatgctagacgctgttcaggagaaccagcacaagatggaacaaaggcagatcagcttagaggggagcgttaaaggtatccagaatgatttaacgaaactaagtaagtatcaagcttcgaccagtaacacggtgagcaagttactggaaaagagtcgcaaggtcagtgcccacacaagagctgtcaaggagagaatggatcgtcagtgtgctcaggtcaagagactcgagaataaccatgcacagctgcttcgtcgcaatcattttaaagtgctcatctttcaggaagagaatgaaattcccgcctccgtgttcgtgaaacagcctgtgtccggggccgtcgagggaaaggaagagcttcccgacgaaaataagtctcttgaagaaaccctgcacactgtcgacttgtcttccgatgatgatttacctcatgatgaggaggcgttggaagatagcgccgaagagaaggttgaggaaagtagggcagagaagatcaagaggtctagcctgaaaaaagtggattcccttaagaaggctttttctaggcagaacatcgagaaaaagatgaataaactggggactaaaattgtgagcgtcgagcggagagaaaaaattaagaagagcctgaccagcaatcaccagaaaatctcttccggcaagagcagcccattcaaagtctccccccttacatttggcagaaagaaggtgcgcgaaggggagtcccacgccgagaatgagaccaaatccgaggacctgcctagctcagaacagatgcctaatgatcaggaggaagagagttttgccgaaggacactccgaggccagcctggcctccgccttggtagagggtgagatcgccgaagaggcagccgaaaaggccacatcaagggggtccaactcaggaatggactccaacatcgatttaacaatcgttgaggatgaggaagaggagtctgtcgcactggagcaggcacagaaggtgcgctacgagggcagctacgccctcaccagcgaagaggcggagaggtccgatggggaccctgtgcagcccgccgtgctgcaggtacaccaaacttcctag

SEQ ID NO: 148506 - DNA, 1278 bp, Artificial Sequence
  derived and/or modified sequence
atgggtgaagacgcggctcaggctgaaaagttccaacaccctgggtcggatatgcggcaagaaaagccgtcatctccttctccaatgccatcatccacaccttcacctagccttaacctgggcaataccgaagaggccattagagataattcccaagtaaacgcggttacagttctgacgctgctggacaaattagtgaacatgctcgacgcggtccaggagaaccaacacaagatggagcagaggcagatctccctggaggggtcagtgaagggaattcaaaacgatttgacaaaattaagcaagtaccaggcgtcaaccagcaatactgtgagcaagctgttagaaaagagcagaaaggttagtgcccatacacgggctgtaaaagagagaatggacaggcaatgtgcccaggttaaacgcctggagaacaaccatgcccagctcctgaggcgcaaccattttaaagtactgatattccaggaggaaaatgaaatcccagcatctgtgttcgtgaaacagccagtgtcgggagcggtcgagggcaaggaggagctgccagacgaaaacaaaagtctggaggagacactgcatactgtggatctttcatcagacgatgatctacctcacgacgaggaggctttggaggacagcgctgaagagaaggtggaggagtcaagagccgagaagatcaagcgctcctcactgaagaaggttgatagcctgaagaaagctttttcacggcagaatattgagaagaaaatgaacaaactcgggaccaaaattgtctctgtggaaaggcgcgagaagattaaaaaatctttgaccagcaatcaccaaaagatttcctcgggcaaatcttcacccttcaaagtgtcccctttaacattcggtagaaaaaaggtacgcgaaggcgagtctcacgcagagaacgagacgaagtccgaggatctgccttcgtctgaacagatgcccaatgaccaggaggaggaatcgttcgctgaggggcatagcgaggcgtctctagcttccgccttggtagagggggagattgctgaggaggctgctgagaaggcaacatctcggggttctaacagtggaatggactctaatatagatctgactattgtggaagacgaagaagaggagtccgttgcgctggagcaggcccagaaggtgcggtatgagggcagctacgcactgacttctgaggaggctgagcgaagcgacggagatccagtgcaacctgcagtgcttcaggtccaccagaccagctag

SEQ ID NO: 148507 - DNA, 3229 bp, Artificial Sequence
  derived and/or modified sequence
ggggaacaggaaagaaaagctaaacctgcaacaaagtgtcctgtgcccagaacgcggttaggaagtgtgtgcatacgtctgaaccctaaatggttctcagttctgtaaacttctcctcccactgggtggagtagggcctttaagagcagctggaatgcagttcccctgatcagcgtagccagttgttgcctgtctgaacctctgccagtcctggagactggtgccctgagctccaaccagcgggcctcatcctacaccctcaccaccgcaacttctcacccgagcaagaagcagctcccagagagaaagaacgttcccacctgcctagccatgggagaggacgctgcacaggccgaaaagttccagcaccctgggtctgacatgcggcaggaaaagccctcgagccccagcccgatgccttcctccacaccaagccccagcctgaacctagggaacacagaggaggccatccgggacaactcacaggtgaacgcagtcacggtgctcacgctcctggacaagctggtgaacatgctagacgctgtgcaggagaaccagcacaagatggagcagcgacagatcagtttggagggctccgtgaagggcatccagaatgacctcaccaagctctccaagtaccaggcctccaccagcaacacggtgagcaagctgctggagaagtcccgcaaggtcagcgcccacacgcgcgcggtcaaagagcgcatggataggcagtgcgcacaggtgaagcggctggagaacaaccacgcccagctcctccgacgcaaccatttcaaagtgctcatcttccaggaggaaaatgagatccctgccagcgtgtttgtgaaacagcccgtttccggtgccgtggaagggaaggaggagcttccggatgaaaacaaatccctggaggaaaccctgcacaccgtggacctctcctcagatgatgatttgccccacgatgaggaggccctggaagacagtgccgaggaaaaggtggaagaaagtagggcagagaaaataaaaagatccagcctgaagaaagtggatagcctcaagaaagcattttctcgccagaacatcgagaaaaagatgaacaagctggggacaaagatcgtatctgtagagaggagagagaagattaagaaatctctcacgtcaaatcaccagaaaatatcctcaggaaaaagctcccccttcaaggtttctcccctcactttcgggcggaagaaagtccgagagggagaaagccatgcagaaaatgagaccaagtcagaagacctgcctagcagtgagcagatgccaaatgaccaggaagaggagtcctttgcagagggtcattccgaagcgtccctcgccagcgctctggtggaaggggaaattgcagaggaggctgctgagaaggcgacctccagggggagtaactcggggatggacagcaacatcgacttgactattgtggaagatgaagaggaggagtcagtggccctggaacaggcacagaaggtacgctatgagggtagctacgcgctaacatccgaggaggcggagcgctccgatggggaccccgtgcagcccgccgtgctccaggtgcaccagacctcctgagcttagagccaccgtgccatcctgtgctgtgctcaagcgggcagccagggctgaagaacaaactcttgcacatctccagcacgactcacccactcctgcgttcctgtccaggcagtaatcattgaccatatagtcatagtaagacacacgagaccaggctttaccatgaaagcgacctgtcacggactccacttttaatttgctcttaggttctatctctgtagaatgtctccaagattgaagaagaaactgagcagttgaaaaatgctaatctctttgacttagtcagaaaaaaacagaggataattaagatactagtcatgaaaagtgattcattcttttttgtcattccataagcttgctgaatagtgtaccggtaatatattgtatttccaccgtactctgtgaatctaattattattctttaagtgttgatatataatatacataaatatgtaagctaaacatataactatatgttttaagaagaaaacatctacgaaaggtaaaaagagatgatcagttggttgtttacttgctagaaaccattgttttattgcaaacgaaggaaaaatgaagagattataaaagtcagctaatgaagtaagatacgtagtaaagtcaggactattcaaaaagtaagaaagaaaatttggaaaatgagagaaacaggaaacaaagaatgccgaaaagaatgaaaacagagaaaaaatgtatgtgcttgaaagtaaaatacttacaatagtagcttaactatttcactctttaaataaaaatactaaagaagttcgtatatcctggaataacatgtcatcttcaaaatatttttattttctaatatttttaataataaacattttatagtgttaaagctgtatttttcttaataaataaaggacattacaaatatttctttaaggaagttcaaaaggatgttgtcttgttaacactggaacgaatataaatcttcaaaatacaattaatatatactgttttgtggaaacttagctcatactattctttaatgctcttcaaatttaaactaacccttacattccatgtgatgtgatgtaggcttataagatgctaaaatctataggttttggaagtgaaagattctattttttctttttttgtacataatgggaatttcattccagattatattttatttacatattaatttcacagaatattaatatttcttaacttcttaaagcatgctagcgttttatgtatatgtacacatatattcagacagggtaattttatctgctgcctaacattgtactaaaatattgctttatctgtttttaattacaaaatgctaatgatttcttaaattatagtttaaagacaattggcccaggaagcaaatcccctgcctttagtatgaaccactataagtaaccttacaaatagagttaatccaagacaatattaacaaactgtgctttgtctttaataaaagggataggattaacaaacatattgatggcataacctattcagctatgtccttatttttgcaataatgtaacctcaaatattggattgttgaaccaacaatggctgtgttaaagaagattaaataaaccgaaaaataaaaagcatgaaacaa

SEQ ID NO: 148508 - DNA, 1278 bp, Artificial Sequence
  derived and/or modified sequence
atgggcgaggacgccgcccaggccgagaagttccagcaccccggcagcgacatgagacaggagaagcccagcagccccagccccatgcccagcagcacccccagccccagcctgaacctgggcaacaccgaggaggccatcagagacaacagccaggtgaacgccgtgaccgtgctgaccctgctggacaagctggtgaacatgctggacgccgtgcaggagaaccagcacaagatggagcagagacagatcagcctggagggcagcgtgaagggcatccagaacgacctgaccaagctgagcaagtaccaggccagcaccagcaacaccgtgagcaagctgctggagaagagcagaaaggtgagcgcccacaccagagccgtgaaggagagaatggacagacagtgcgcccaggtgaagagactggagaacaaccacgcccagctgctgagaagaaaccacttcaaggtgctgatcttccaggaggagaacgagatccccgccagcgtgttcgtgaagcagcccgtgagcggcgccgtggagggcaaggaggagctgcccgacgagaacaagagcctggaggagaccctgcacaccgtggacctgagcagcgacgacgacctgccccacgacgaggaggccctggaggacagcgccgaggagaaggtggaggagagcagagccgagaagatcaagagaagcagcctgaagaaggtggacagcctgaagaaggccttcagcagacagaacatcgagaagaagatgaacaagctgggcaccaagatcgtgagcgtggagagaagagagaagatcaagaagagcctgaccagcaaccaccagaagatcagcagcggcaagagcagccccttcaaggtgagccccctgaccttcggcagaaagaaggtgagagagggcgagagccacgccgagaacgagaccaagagcgaggacctgcccagcagcgagcagatgcccaacgaccaggaggaggagagcttcgccgagggccacagcgaggccagcctggccagcgccctggtggagggcgagatcgccgaggaggccgccgagaaggccaccagcagaggcagcaacagcggcatggacagcaacatcgacctgaccatcgtggaggacgaggaggaggagagcgtggccctggagcaggcccagaaggtgagatacgagggcagctacgccctgaccagcgaggaggccgagagaagcgacggcgaccccgtgcagcccgccgtgctgcaggtgcaccagaccagctag

SEQ ID NO: 148509 - protein, 804 aa, Artificial Sequence
  derived and/or modified sequence
MAKSSSLNVRVVEGRALPAKDVSGSSDPYCLVKVDDEVVARTATVWRSLGPFWGEEYTVHLPLDFHQLAFYVLDEDTVGHDDIIGKISLSREAITADPRGIDSWINLSRVDPDAEVQGEICLSVQMLEDGQGRCLRCHVLQARDLAPRDISGTSDPFARVFWGSQSLETSTIKKTRFPHWDEVLELREMPGAPSPLRVELWDWDMVGKNDFLGMVEFSPKTLQQKPPKGWFRLLPFPRAEEDSGGNLGALRVKVRLIEDRVLPSQCYQPLMELLMESVQGPAEEDTASPLALLEELTLGDCRQDLATKLVKLFLGRGLAGRFLDYLTRREVARTMDPNTLFRSNSLASKSMEQFMKLVGMPYLHEVLKPVISRVFEEKKYMELDPCKMDLGRTRRISFKGALSEEQMRETSLGLLTGYLGPIVDAIVGSVGRCPPAMRLAFKQLHRRVEERFPQAEHQDVKYLAISGFLFLRFFAPAILTPKLFDLRDQHADPQTSRSLLLLAKAVQSIGNLGQQLGQGKELWMAPLHPFLLQCVSRVRDFLDRLVDVDGDEAGVPARALFPPSAIVREGYLLKRKEEPAGLATRFAFKKRYVWLSGETLSFSKSPEWQMCHSIPVSHIRAVERVDEGAFQLPHVMQVVTQDGTGALHTTYLQCKNVNELNQWLSALRKASAPNPNKLAACHPGAFRSARWTCCLQAERSAAGCSRTHSAVTLGDWSDPLDPDAEAQTVYRQLLLGRDQLRLKLLEDSNMDTTLEADTGACPEVLARQRAATARLLEVLADLDRAHEEFQQQERGKAALGPLGP

SEQ ID NO: 148510 - DNA, 2415 bp, Artificial Sequence
  derived and/or modified sequence
atggccaagagctcatctcttaatgtgagagtcgtggagggaagagcactccccgctaaagatgtgtctgggagcagtgatccatactgcttggtaaaagtcgatgatgaagtggtggctcggaccgcaaccgtatggcggtcccttggacccttttggggtgaagagtatacagtacacttgcccctggatttccatcagttagccttctatgtcctagacgaagatacagtcgggcacgatgatattatcggaaaaatcagtctcagcagggaggcaatcaccgcggacccacggggtatcgattcttggatcaacctatccagggtagaccccgatgccgaagtccagggcgagatatgcctgtccgtgcagatgctcgaggatggccaaggtcggtgcttaaggtgtcatgtacttcaggcccgggatcttgctccacgcgacattagtgggacttcagacccatttgcaagagttttctggggatcccagtcgctggagacttctaccatcaagaaaactcggttcccccattgggatgaggtgctcgagcttcgtgaaatgcccggggcacccagtcccctgcgggttgagctgtgggattgggatatggtgggaaagaacgatttcctgggaatggtcgaattcagccctaagaccttgcagcaaaaaccaccaaaaggctggtttcgcttgttgcccttccctcgggccgaagaggactccggcgggaacctgggagccctgagggtgaaggttaggctgattgaggatcgagtgctaccatcacaatgttaccaacccttaatggagcttctgatggaaagcgtgcaagggcctgccgaggaggataccgccagtcctctggctttgcttgaggagttaactctaggcgactgtcggcaggacctggcaactaagctcgtgaagctgttcctcgggcgcgggctggccggtcggtttcttgactacctcaccagacgcgaagtggccagaacaatggacccaaacaccctgttcaggtctaactccttagcaagcaagagcatggaacaatttatgaaactcgttggtatgccgtacctgcacgaggttctaaagcctgtgatttctagggtctttgaggagaagaagtacatggaactggacccctgtaaaatggacttaggccggacacgccgaatttccttcaaaggagccttatccgaagaacagatgcgcgaaacttccctgggcctcctcacggggtaccttggccccattgtagacgctatagtaggttcagtaggaaggtgtccccccgctatgaggctggcctttaagcaattgcacaggcgcgtggaggagcgctttccacaagcggaacatcaggatgtgaaatatttggcgatatctggttttctgttcttgaggttcttcgccccagcgatcttgacccccaagctttttgacctacgcgatcagcacgccgaccctcaaaccagtcgatcacttctgctcctcgcaaaagctgtgcagagcattggcaatctggggcagcaactcggccaggggaaagagctctggatggccccactccaccctttcctgctccagtgcgtgtctagggtgagagacttcctcgataggctagtggatgttgatggggacgaggccggtgtgcctgccagagccttgttcccaccctccgccattgtccgagagggatatcttctcaagcgcaaagaagagccagcaggtctggccactcggtttgcctttaagaagaggtacgtgtggctgtcaggagagaccttaagcttcagtaagagtcccgagtggcagatgtgccactctatcccggtgtctcatatccgggcagtggaacgggtggacgaaggagcctttcagctgccgcacgttatgcaggttgtcacacaggatggcacaggtgctctacacacaacctatcttcagtgtaaaaatgtaaacgagctgaaccagtggttgagcgctctgagaaaggccagtgctccaaacccaaacaaactcgcagcctgtcaccccggtgcttttcggagcgcacgctggacttgttgcctccaggcagaacggtctgctgccggttgttctaggacacatagtgcagtcacactgggagactggagtgatcccctggaccctgacgcggaagcccagacggtttaccgtcagctcctcctcggacgtgatcaactccgactcaagttgctggaagattctaatatggacactacgctcgaggccgatacaggtgcatgccccgaggtcctggcccggcaaagagccgcgaccgctcgcttgctggaagtcctcgccgacctggaccgcgctcacgaggagtttcagcagcaggagagaggtaaggcagccctgggaccactcggaccatag

SEQ ID NO: 148511 - DNA, 2415 bp, Artificial Sequence
  derived and/or modified sequence
atggccaagagcagcagcctgaatgtgcgggtggtggagggccgggccctgcctgccaaggatgtgtctggcagcagtgacccctactgcctggtgaaggtggatgatgaggtggtggccaggacagccaccgtgtggaggagcctgggccccttctggggcgaggagtacacagtgcacctgcccctggacttccaccagctggccttctacgtgctggatgaagatactgtgggccatgatgacatcatcggcaagatcagcctgagccgggaggccatcacagctgacccccggggcatcgacagctggatcaacctgagccgggtggaccctgatgctgaggtgcagggcgagatctgcctgtctgtgcagatgctggaggatggccagggccgctgcctgcgctgccacgtgctgcaggcccgggacctggccccccgggacatcagcggcaccagtgacccctttgcccgggtcttctggggcagccagagcctggagaccagcaccatcaagaagacccgcttcccccactgggatgaggtgctggagctgcgggagatgcctggggcccccagccccctgcgggtggagctgtgggactgggacatggtgggcaagaatgacttcctgggcatggtggagttcagccccaagaccctgcagcagaagccacccaagggctggttccggctgctgcccttccccagggcagaagaagattctgggggcaacctgggcgccctgcgggtgaaggtgcggctgattgaggacagagtgctgcccagccagtgctaccagcccctgatggagctgctgatggagagcgtgcagggccctgctgaggaggacacagccagccccctggccctgctggaggagctgaccctgggggactgccggcaggacctggccaccaagctggtgaagctgttcctgggccggggcctggccggccgcttcctggactacctgacccggcgggaggtggcccggaccatggaccccaacaccctcttccgcagcaacagcctggccagcaagtccatggagcagttcatgaagctggtgggcatgccctacctgcacgaggtgctgaagcctgtgatcagccgggtgtttgaggagaagaagtacatggagctggacccctgcaagatggacctgggccgcacccggcgcatctccttcaagggggccctgtctgaggagcagatgagggagaccagcctgggcctgctgaccggctacctgggccccatcgtggatgccatcgtgggctctgtgggccgctgccccccagccatgaggctggccttcaagcagctgcaccggcgggtggaggagcgcttcccccaggccgagcaccaggatgtgaagtacctggccatcagcggcttcctgttcctgcgcttctttgccccagccatcctgacccccaagctgtttgacctgcgggaccagcacgccgacccccagaccagccgcagcctgctgctgctggccaaggctgtgcagagcatcggcaacctgggccagcagctgggccagggcaaggagctgtggatggcccccctgcaccccttcctgctgcagtgtgtgtcccgggtgcgggacttcctggaccggctggtggatgtggatggagatgaagctggggtgcctgcccgggccctcttcccccccagcgccatcgtgcgggagggctacctgctgaagaggaaggaggagcccgccggcctggccaccaggtttgccttcaagaagcgctacgtgtggctgagcggggagaccctgtccttcagcaagagccctgagtggcagatgtgccacagcatccctgtgagccacatccgggctgtggagcgggtggatgagggcgccttccagctgccccacgtgatgcaggtggtgacccaggacggcaccggggccctgcacaccacctacctgcagtgcaagaatgtgaatgagctgaaccagtggctgagcgccctgaggaaggccagcgcccccaaccccaacaagctggccgcctgccaccctggggccttccgcagcgcccgctggacctgctgcctgcaggccgagaggtctgctgctggctgcagcaggacccacagcgctgtgaccctgggggactggagcgaccccctggaccctgatgctgaggcccagacagtgtaccggcagctgctgctgggccgggaccagctgcggctgaagctgctggaggacagcaacatggacaccaccctggaggccgacaccggggcctgcccagaggtgctggcccggcagagagctgccacagcccggctgctggaggtgctggccgacctggaccgggcccacgaggagttccagcagcaggagcggggcaaggccgccctgggccccctgggcccctag

SEQ ID NO: 148512 - DNA, 2415 bp, Artificial Sequence
  derived and/or modified sequence
atggccaagagcagcagcctgaacgtgcgggtggtggagggccgggccttgcccgccaaggacgtgagtggttcaagcgacccatactgcctcgtaaaggtcgatgacgaggtggtggcacggacggcaacagtctggcgtagtctcggtccgttttggggcgaggaatacactgtgcatctcccgctggattttcaccagttggcgttctatgttctggacgaggatactgttggacacgatgatattatcggtaagatcagcctcagccgagaggcaatcaccgctgacccccgcggcattgatagctggattaacttatccagggtcgaccctgatgctgaagttcagggcgagatttgcctgtcagttcaaatgttggaagatggccagggaagatgtctacggtgtcatgtcctgcaagcgagggacctcgctcccagggatatttccggcacgtctgaccctttcgcaagagtcttttggggttcccagagtctggagacgagcacaattaagaaaaccaggttcccgcattgggacgaggtcctcgaactgcgagaaatgccgggtgcgccatctccattgcgtgtggagttatgggattgggacatggttggcaagaatgatttccttggcatggtggaatttagccccaagaccctgcagcagaaacctcccaaggggtggttcagactccttccgtttccccgggcagaagaagatagtggcggcaatttgggcgcccttagggtgaaggtacgactgattgaagaccgcgtgttgccttctcagtgctatcaaccactcatggagctcctgatggagagcgtccaaggcccggcagaggaagacaccgccagtccacttgccctgttagaagagctgactttgggtgactgcaggcaggacctggctacgaagctggtgaagctgtttctggggagaggacttgcaggtcggttcctagattacctcacaaggcgtgaagtggctaggaccatggaccctaacacactgttcaggtccaacagtcttgcaagcaagagtatggagcagttcatgaaactggtgggaatgccctatctccatgaggtgttgaaaccagtaataagtagggtgttcgaagaaaagaaatatatggagctcgacccttgtaaaatggaccttggaagaactagacggatctcttttaagggcgctttaagcgaggagcaaatgcgcgagaccagccttggactactcaccggctaccttggccccatcgtcgacgccatagtgggatctgtgggacggtgcccccccgcaatgcggctcgccttcaaacagctccaccgtagggttgaagaacggtttcctcaagctgagcaccaagacgtcaagtacctggcaatctccgggttcctgttccttagatttttcgccccggctattttaacgccaaaactgttcgaccttagggaccagcacgcagacccacagacatccagatctctcctgctgctggctaaggcggttcagtctatcggcaacctgggccagcagctgggccaggggaaggagttatggatggctccccttcacccctttctccttcagtgtgtatccagagttcgggatttcctggatagactcgtggacgtcgatggagatgaggcaggggtccctgcaagggctctcttccccccctctgccatcgtgagagagggttatctgctcaaacgcaaggaagaaccagcagggttggcaacccgttttgcattcaaaaagagatacgtctggctgtccggagagacgctgagcttttccaaaagcccagaatggcagatgtgtcactccatccccgtttcgcatatccgcgccgtggaacgggttgatgaaggggccttccagttgccccacgttatgcaggtagtcactcaggatggcacaggggcgttgcacacaacttatctgcaatgtaaaaacgtaaatgaactgaatcagtggttgagcgccctgaggaaggctagcgccccgaaccctaacaagctggctgcatgtcaccctggcgccttccgctccgctcgttggacttgctgtttacaggcagagcggtcagccgccgggtgcagccggacccacagtgccgtcactttgggagactggtccgatcccctggacccggatgccgaggcccaaaccgtgtacaggcagcttctcctgggccgggaccaactcaggctaaaactgctcgaggatagcaacatggatacaaccctagaagccgacacaggagcctgtcctgaggtcctcgctagacagcgggccgccaccgcaagactgctagaagttctagctgacctggaccgagcccacgaggaattccaacaacaggagagagggaaggcagcactcgggccattgggaccctag

SEQ ID NO: 148513 - DNA, 2415 bp, Artificial Sequence
  derived and/or modified sequence
atggccaagtcctcctcgcttaatgtgagggtggttgaaggcagagctctgccggctaaagacgttagcggctcaagcgatccatactgcttggttaaagtggatgatgaggttgtcgcacgcaccgccaccgtctggagatcactcggccctttttggggggaagagtataccgtccacctgcctcttgacttccaccagctggccttctacgttttagacgaggacactgtaggacacgacgacatcattgggaagatttccctgagtcgggaagcgatcactgcagatcctagaggcatcgactcttggataaacctgtctcgagtggaccccgatgcggaggtgcagggagagatatgcctctctgtgcaaatgctggaggatggccagggtcgttgcctgcggtgccatgtcctccaggcccgtgacctcgcacccagagatatttccggaaccagcgacccctttgcgcgagttttttgggggtcccagtctttggaaacatcgactatcaaaaaaactagatttccccactgggacgaagtgctcgaactccgggaaatgcctggcgctccaagccccctccgggtggaattatgggactgggacatggtgggcaagaacgacttcctgggcatggttgagttttccccaaaaaccctgcagcaaaagccgcctaagggctggttcaggctactgcccttcccacgagctgaggaggactctggtgggaatctcggagccctgagggtgaaagtgagactcatcgaagatcgcgtcctcccctcgcagtgttatcagccattgatggaactgctaatggagtccgtgcagggacccgctgaagaagataccgcctcccctttggctctcctcgaggagttgacactaggtgactgcagacaagacctagcaaccaaactggtgaaactgtttcttggacggggactggctggcaggttcttggactacctgacccggagagaggtggccagaaccatggatccaaacaccctgttccgaagtaacagtctggcctccaaatcgatggagcaattcatgaagcttgtgggtatgccatacctccatgaggtgttgaagccagttataagtcgcgtttttgaggagaaaaagtatatggagttagacccctgcaagatggaccttggcaggactagacgcatttcatttaaaggggcactgtcagaggagcagatgcgggaaacttcactcggactgctgacgggctatctcggaccgattgttgacgcaatcgtgggatccgtcggcagatgcccgcctgccatgcgactggcatttaaacaacttcataggcgggtggaagaacggttcccccaagccgagcatcaggacgtcaaatatctggctataagtggatttttgtttctgcggtttttcgcaccagcaatcctgacacctaaactgttcgatctacgggaccaacacgctgaccctcaaacaagcaggagcctcctcctgctggctaaggctgtgcaaagcatcgggaacctcgggcaacagttgggacagggaaaggagctgtggatggcacccttacaccctttcctcctacagtgtgtatcgcgtgtaagagatttcctggacaggcttgtggacgtggacggagacgaagccggagtgccagctcgcgctctctttccaccttcagcgatcgtccgcgagggctacctgctgaaacgcaaggaggaacccgctggcctcgccacccggtttgcttttaagaagcgttacgtgtggctcagcggcgagactctaagtttttctaagagtcctgaatggcagatgtgccacagcattcccgtgtcccacatcagggctgtggagagggtggacgagggcgcttttcaactcccgcacgtgatgcaggtggtcacccaggacggcacaggagcgcttcacactacatacttacagtgcaagaatgtgaatgagttaaatcagtggctttccgccttgaggaaagcgagcgcccctaatcccaacaagcttgcagcatgtcatcctggcgcttttcggtctgccaggtggacatgctgtctgcaagcagaaagatccgctgctggttgttctcggacacactcagccgtgaccttgggagactggtcagatcccctcgacccggacgcagaggcccagacggtttacaggcagctcttgctcgggcgagatcagctgcgccttaagcttctcgaagattccaacatggacactactttggaggccgacactggagcctgtcctgaggttctggctagacagcgggcagcaacggctagacttctggaggtcctggcggaccttgatcgggctcacgaagagtttcagcaacaggagagggggaaagccgctctaggacccctcggtccgtag

SEQ ID NO: 148514 - DNA, 3382 bp, Artificial Sequence
  derived and/or modified sequence
gtgtttaactggaaactagaacgagatggaaggggatgttcaaggcccctcccttgactctgaacggacccccagggaacatgcgaccctctctctggcgacgcctcccacccaccactaatacttgctcctggaccggggggcgcggaggttggagagaggaggcaggtgtctgcatgctacccgggtctcggacaggcggcactgggaccacgaggcagggagccaggcttgaagcaggtgacatgtagacgtcccctggtccagcctcggaacctgagcgcccttctgcctggaaagtttgtggctaggcgccatggccaagagcagctccctgaatgttcgcgtggtggagggccgcgcgctgcctgccaaggacgtgtctgggagcagcgacccctactgcctagtgaaagtggacgacgaggtggtggccaggacagctactgtctggaggagcctgggccccttctggggggaggagtacacggtgcacctgcctctggatttccaccagctggccttctacgtgctggatgaggacactgtcgggcacgacgacatcatcggcaagatctcgctgagcagggaggcgattacagccgacccccgagggattgacagctggattaacttgagccgagtggacccagatgcagaagtgcagggtgagatctgcctgtcagtgcagatgctggaggatgggcagggccgctgccttcgctgccatgtgcttcaggccagggacctggctcccagagacatctctggcacatctgacccatttgcacgtgtgttttggggcagccagagcttggagacctcaaccatcaagaagactcgcttcccgcactgggatgaagtgctggagctgcgggagatgccaggtgccccgtccccactgcgggtggagctctgggactgggacatggtgggcaagaatgacttcttgggcatggtggagttctctccaaagaccctccagcagaagccacctaaaggctggttccgcctcctgccctttcccagagccgaggaggattctggggggaacctgggtgccctgcgagtgaaggtacgcctgattgaggaccgcgtcctgccctcccagtgctaccagcctctcatggagctgctcatggagtctgtgcaggggccagcagaggaggacactgctagccccttggctttgctggaagagctgaccttgggggactgccgccaggaccttgccaccaagctggtgaaactctttcttggccggggactggctgggcgctttctggactatctcacccggcgtgaggtggctcggaccatggaccccaacaccctcttccgttctaactccctggcatccaagtcgatggaacagtttatgaagctcgtgggcatgccctacctgcacgaggtcctgaagcctgtgattagccgtgtctttgaggagaagaagtacatggagctggatccctgcaagatggacctgggccgcacccggaggatctccttcaaaggcgcactctcggaggagcagatgcgggagaccagcctggggctgctgacgggctacctggggcccatcgtggacgccatcgtgggctccgtggggcgctgcccgcccgccatgcgcctcgccttcaagcagctgcaccggcgagtggaggagcgcttcccccaggccgagcaccaggatgtgaagtacctggccatcagtggatttctcttcttgcgattcttcgcacctgccatccttaccccaaagctgtttgaccttcgggaccaacacgcggacccccagactagccgctcactgctgttgcttgccaaggctgtgcagagcattggaaacctgggccagcagctgggccaaggcaaggaactgtggatggcccccctgcaccccttcctgctgcagtgtgtctcacgtgtgagagacttcctggaccggctggtggatgtggatggggatgaagctggtgtcccagccagggccctgttcccgccctcggccattgttcgagaaggctatctgctgaagcgcaaggaggagcctgccggcctggccacgcgctttgccttcaagaagcgctacgtctggctcagcggggagaccctctccttctccaagagtcctgagtggcagatgtgtcactccatccccgtgtctcacatccgcgccgtggagcgcgtagacgagggcgccttccaactgccccacgtgatgcaggtggtgacgcaggacggcacgggggcgctgcacaccacctacctccagtgcaagaatgtgaatgagctcaaccagtggctctcggccttgcgcaaggccagcgcccccaacccgaacaagctggccgcctgccaccccggtgccttccgcagcgcgcgctggacctgctgcctccaggctgagcgctcagccgccggctgcagccgtacacactcagctgtcaccctgggggactggagtgacccactggatcctgatgctgaggcccagacagtgtatcggcagctgctcctggggcgggaccagctcaggctgaaattactggaggattctaacatggatacaactctggaggcagacacaggggcctgtcctgaggtcctggcccggcaaagagcagcaactgcccgcctgctggaggtgctcgcagacctggatcgtgcccacgaggagttccagcagcaggagcgagggaaggcggccctgggcccccttggcccctaaggaaatgccagagctagcccggaaggaggagcaagagccagggggccctcttcagcgcatcctgccccgggagtctcctgtctccttggacctctttgattctgtggtttggaggctcccagagacgtgcctagtcctgtgtgccttgagtccagaactcagggcatggaagccctttggcaggggccagccttgcactgagtgaaacttgccctctggcttgattcagactggagtggataggataaggaacctgacttatttgactgagactggggtctctacttcaccaaactggcctctatccataccaaggaggccagcctggccctgagctgctggatacagctggacctgaattcctgatgcccatgtgatgttgttgccccagatgggcactaaatggcctcactccttcctgttttcatgtctgctaatccctataacctcactgattcttctgtaccctgcccttggcctaggactccaaccacaagcttccagaatcaggtgccctcaggaagaaccaaggctgggtgggggtccagtgtgccaaactcagacccttggagcctgggagaccttgggccaggctgtttatctctctctgggtctcagattaccctgtataaaaagaggagggaaagtcta

SEQ ID NO: 148515 - DNA, 2415 bp, Artificial Sequence
  derived and/or modified sequence
atggccaagagcagcagcctgaacgtgagagtggtggagggcagagccctgcccgccaaggacgtgagcggcagcagcgacccctactgcctggtgaaggtggacgacgaggtggtggccagaaccgccaccgtgtggagaagcctgggccccttctggggcgaggagtacaccgtgcacctgcccctggacttccaccagctggccttctacgtgctggacgaggacaccgtgggccacgacgacatcatcggcaagatcagcctgagcagagaggccatcaccgccgaccccagaggcatcgacagctggatcaacctgagcagagtggaccccgacgccgaggtgcagggcgagatctgcctgagcgtgcagatgctggaggacggccagggcagatgcctgagatgccacgtgctgcaggccagagacctggcccccagagacatcagcggcaccagcgaccccttcgccagagtgttctggggcagccagagcctggagaccagcaccatcaagaagaccagattcccccactgggacgaggtgctggagctgagagagatgcccggcgcccccagccccctgagagtggagctgtgggactgggacatggtgggcaagaacgacttcctgggcatggtggagttcagccccaagaccctgcagcagaagccccccaagggctggttcagactgctgcccttccccagagccgaggaggacagcggcggcaacctgggcgccctgagagtgaaggtgagactgatcgaggacagagtgctgcccagccagtgctaccagcccctgatggagctgctgatggagagcgtgcagggccccgccgaggaggacaccgccagccccctggccctgctggaggagctgaccctgggcgactgcagacaggacctggccaccaagctggtgaagctgttcctgggcagaggcctggccggcagattcctggactacctgaccagaagagaggtggccagaaccatggaccccaacaccctgttcagaagcaacagcctggccagcaagagcatggagcagttcatgaagctggtgggcatgccctacctgcacgaggtgctgaagcccgtgatcagcagagtgttcgaggagaagaagtacatggagctggacccctgcaagatggacctgggcagaaccagaagaatcagcttcaagggcgccctgagcgaggagcagatgagagagaccagcctgggcctgctgaccggctacctgggccccatcgtggacgccatcgtgggcagcgtgggcagatgcccccccgccatgagactggccttcaagcagctgcacagaagagtggaggagagattcccccaggccgagcaccaggacgtgaagtacctggccatcagcggcttcctgttcctgagattcttcgcccccgccatcctgacccccaagctgttcgacctgagagaccagcacgccgacccccagaccagcagaagcctgctgctgctggccaaggccgtgcagagcatcggcaacctgggccagcagctgggccagggcaaggagctgtggatggcccccctgcaccccttcctgctgcagtgcgtgagcagagtgagagacttcctggacagactggtggacgtggacggcgacgaggccggcgtgcccgccagagccctgttcccccccagcgccatcgtgagagagggctacctgctgaagagaaaggaggagcccgccggcctggccaccagattcgccttcaagaagagatacgtgtggctgagcggcgagaccctgagcttcagcaagagccccgagtggcagatgtgccacagcatccccgtgagccacatcagagccgtggagagagtggacgagggcgccttccagctgccccacgtgatgcaggtggtgacccaggacggcaccggcgccctgcacaccacctacctgcagtgcaagaacgtgaacgagctgaaccagtggctgagcgccctgagaaaggccagcgcccccaaccccaacaagctggccgcctgccaccccggcgccttcagaagcgccagatggacctgctgcctgcaggccgagagaagcgccgccggctgcagcagaacccacagcgccgtgaccctgggcgactggagcgaccccctggaccccgacgccgaggcccagaccgtgtacagacagctgctgctgggcagagaccagctgagactgaagctgctggaggacagcaacatggacaccaccctggaggccgacaccggcgcctgccccgaggtgctggccagacagagagccgccaccgccagactgctggaggtgctggccgacctggacagagcccacgaggagttccagcagcaggagagaggcaaggccgccctgggccccctgggcccctag

SEQ ID NO: 148516 - protein, 660 aa, Artificial Sequence
  derived and/or modified sequence
MSHVVVKNDPELDQQLANLDLNSEKQSGGASTASKGRYIPPHLRNREASKGFHDKDSSGWSCSKDKDAYSSFGSRDSRGKPGYFSERGSGSRGRFDDRGRSDYDGIGNRERPGFGRFERSGHSRWCDKSVEDDWSKPLPPSERLEQELFSGGNTGINFEKYDDIPVEATGSNCPPHIENFSDIDMGEIIMGNIELTRYTRPTPVQKHAIPIIKGKRDLMACAQTGSGKTAAFLLPILSQIYTDGPGEALKAVKENGRYGRRKQYPISLVLAPTRELAVQIYEEARKFSYRSRVRPCVVYGGADIGQQIRDLERGCHLLVATPGRLVDMMERGKIGLDFCKYLVLDEADRMLDMGFEPQIRRIVEQDTMPPKGVRHTMMFSATFPKEIQMLARDFLDEYIFLAVGRVGSTSENITQKVVWVEDLDKRSFLLDILGATGSDSLTLVFVETKKGADSLEDFLYHEGYACTSIHGDRSQRDREEALHQFRSGKSPILVATAVAARGLDISNVRHVINFDLPSDIEEYVHRIGRTGRVGNLGLATSFFNEKNMNITKDLLDLLVEAKQEVPSWLENMAYEHHYKGGSRGRSKSNRFSGGFGARDYRQSSGSSSSGFGASRGSSSRSGGGGYGNSRGFGGGGYGGFYNSDGYGGNYNSQGVDWWGN

SEQ ID NO: 148517 - DNA, 1983 bp, Artificial Sequence
  derived and/or modified sequence
atgagtcatgtagtggttaaaaatgaccccgagttggatcagcagcttgcaaaccttgatctcaactccgaaaagcagtccggcggggctagcactgccagcaaaggtagatacattcccccgcaccttaggaacagggaggcctccaagggctttcacgataaagacagcagtgggtggagctgtagtaaggataaggatgcttatagctcatttggatcaagagattcacgcggcaagcccgggtatttctccgagagagggtccggatctcggggaaggttcgatgaccgggggcggagcgactacgatgggattggcaatcgggagaggcccgggttcggacgctttgagagatcggggcattccaggtggtgcgataaaagtgtggaggatgattggtccaaacccctgccaccgtccgagcgcttggaacaggagctgtttagtggtggcaataccggcatcaactttgaaaagtacgatgatattccagtggaggctaccggctcaaattgtcctcctcatatcgaaaacttcagcgacatcgatatgggtgaaataatcatgggaaacattgagctaactcgatatactcgcccgacgccggtgcagaaacacgcaattcctatcataaaaggaaaacgtgatctgatggcctgtgcccaaactgggtccggcaagactgcagcatttctgctccccattctgtcacaaatctatacggacgggcccggggaagccttaaaggccgtcaaggagaatggcaggtacggaagaaggaaacagtatcctatcagccttgtgcttgctccaacacgggaattggcggtgcaaatctatgaggaggctagaaaattcagctataggagcagagtaaggccctgcgtggtgtatggcggagccgacattgggcaacagatcagagacctcgaaagagggtgccacctgctggtcgcaacccctggacggttagtcgacatgatggagagaggcaagatcggcctggatttttgcaagtacctagtgctcgacgaggctgacagaatgctggacatgggcttcgagccacagattcgcaggatagtggagcaggataccatgccccctaagggcgtccgtcacacaatgatgttctccgccaccttccctaaagaaattcagatgctggcgcgggatttcctagacgaatacatctttttggctgttggtcgagtggggagtacgtcagagaacattactcagaaggtggtgtgggttgaagatttggacaagagatcgtttctgctcgatattctgggggccaccggttccgactcactgaccctggtgttcgtcgagaccaaaaagggtgcagatagcctggaggactttctatatcacgaagggtacgcttgtacctcgattcacggagatcggtcccagagggatcgggaagaagccttgcaccagttccgatccggtaagtcccccatcttggttgctacagccgtggcagcaaggggactggacattagcaatgtgagacacgtgatcaatttcgatttaccgtccgatatcgaggaatatgttcatcgcattggacgaacaggtcgggtgggaaacttgggactggccacatccttctttaatgagaagaatatgaatattacaaaggacttgctggacttgcttgttgaagcaaaacaggaggtgccttcttggttggagaatatggcctacgagcatcactacaagggaggtagtaggggccgctctaaatccaatagattttcgggaggcttcggggcgagagactataggcagtcaagtggaagcagcagcagcggtttcggcgctagccgtggctctagcagtcgcagtggagggggtgggtatggaaattctcgcgggttcggcgggggcgggtatggcggattctacaacagcgatggatacgggggcaactataactcccagggcgtggactggtggggcaactag

SEQ ID NO: 148518 - DNA, 1983 bp, Artificial Sequence
  derived and/or modified sequence
atgagtcatgtcgtcgtgaaaaacgatcccgagctcgaccagcagttggccaacctcgacttaaactctgaaaaacagtctggcggcgcctcaactgcctccaagggtcggtacattcctccccacctacggaatcgcgaagcttctaaaggatttcatgataaggacagcagtggctggtcatgctccaaagacaaagatgcctactccagcttcggctctagggattctcggggcaagcccggatacttttctgagagagggagtggctctcgcggccgctttgatgatcgaggtaggagtgactatgacggcatcgggaaccgcgaaaggccaggctttggcaggttcgagaggtcaggtcatagtaggtggtgcgataaaagtgtggaagatgactggtcgaaaccactaccaccatctgaacgcctcgagcaggaactcttcagcggaggaaatacaggcataaactttgagaagtatgatgatattccagtcgaggcgacagggtcaaattgtcccccgcacatagagaacttttccgacattgacatgggcgagattattatgggaaatatcgaattgacccgttacaccaggcctacccctgttcagaagcacgcaatcccaataatcaagggcaaacgcgatcttatggcgtgtgctcagacaggctccggaaaaacagccgctttcctcctgcctattctttcccaaatttatacggacggccccggtgaggctttaaaggctgtgaaagagaatggaaggtacggccgcagaaaacaatacccaatatcattagtcttggcccctacccgggagctcgccgtgcaaatttatgaagaagcgcgtaagttcagctataggagcagggtgaggccatgcgtggtgtatgggggagctgatatcgggcaacaaattagggaccttgaaaggggatgccatttgctcgttgccacccccggacgcttggtggatatgatggagaggggcaaaattgggttggatttctgcaaatacctggtactggacgaagcggacagaatgctcgatatgggctttgagcctcagatcagacggattgtagagcaggacacgatgcctccaaagggtgtgaggcataccatgatgttttcagccaccttccctaaagagatccagatgctcgcgcgcgactttttggatgaatatatctttcttgccgtgggcagagtgggcagtaccagcgagaatatcacgcagaaggttgtttgggttgaggatctcgataaaaggtcctttctcttggatatcctgggagcgaccggaagcgactcgctgacactggtgttcgtggagactaagaaaggggccgatagcctggaggactttctctatcacgagggatatgcatgtacatcaatacatggcgatcggtcccagagggatcgcgaggaagccctgcatcagttcagaagcgggaaatcacccattcttgtggctaccgcagtcgcggctagaggactcgatattagcaatgtgcgccatgtcattaattttgacttgccatcagatatagaggagtacgttcataggatagggcgtaccggacgcgtgggaaacctcggtctagcaacatccttcttcaatgagaaaaacatgaacatcaccaaggacctgttggacctcctggttgaagctaaacaagaggtcccaagttggctagaaaacatggcatatgagcaccattacaaaggcggcagtcgcggccgaagtaagtcaaatcgattcagcggggggttcggagcccgtgattaccgacaatccagcggcagctcgagtagcggttttggtgcgtcccggggcagctcgtctagatctggaggaggcggctatgggaacagcagaggattcgggggtggcggatacggcggattctataattctgatggctatggtggaaattataacagtcagggggtggactggtggggtaattag

SEQ ID NO: 148519 - DNA, 1983 bp, Artificial Sequence
  derived and/or modified sequence
atgagccacgtggtggtgaagaatgaccctgagctggaccagcagctggccaacctggacctgaacagcgagaagcagagcggcggggccagcacagccagcaagggccgctacatccccccccacctgaggaaccgggaggccagcaagggcttccatgacaaggacagcagcggctggagctgcagcaaggacaaggatgcctacagcagctttggcagccgggacagccggggcaagccaggctacttcagcgagcggggcagcggcagccggggccgctttgatgaccggggccgcagtgactatgatggcatcggcaaccgggagcggcccggcttcggccgctttgagaggagcggccacagccgctggtgtgacaagtctgtggaggatgactggagcaagcccctgcccccatctgagcggctggagcaggagctgttcagcggcggcaacacaggcatcaactttgagaagtatgatgacatccctgtggaggccaccggcagcaactgccccccccacatcgagaacttcagtgacatcgacatgggagagatcatcatgggcaacatcgagctgacccgctacacccggcccacccctgtgcagaagcacgccatccccatcatcaagggcaagagggacctgatggcctgtgcccagacaggcagcggcaagacagctgccttcctgctgcccatcctgagccagatctacacagatggccctggagaggccctgaaggctgtgaaggaaaatggccgctatggccgcaggaagcagtaccccatcagcctggtgctggcccccacccgggagctggccgtgcagatctatgaggaggccaggaagttctcctaccgcagccgggtgcggccctgtgtggtgtatggaggagctgacatcggccagcagatccgggacctggagcggggctgccacctgctggtggccaccccaggccgcctggtggacatgatggagcggggcaagattggcctggacttctgcaagtacctggtgctggatgaagctgacaggatgctggacatgggctttgagccccagatccgccgcatcgtggagcaggacaccatgccacccaagggcgtgcgccacaccatgatgttcagcgccaccttccccaaggagatccagatgctggcccgggacttcctggatgagtacatcttcctggccgtgggccgggtgggcagcaccagcgagaacatcacccagaaggtggtgtgggtggaggacctggacaagaggagcttcctgctggacatcctgggcgccaccggcagtgacagcctgaccctggtgtttgtggagaccaagaagggagctgacagcctggaggacttcctgtaccacgagggctacgcctgcaccagcatccacggggacaggagccagagggaccgggaggaggccctgcaccagttccgcagcggcaagagccccatcctggtggccacagctgtggccgcccggggcctggacatcagcaatgtgcgccacgtgatcaactttgacctgcccagcgacatcgaggagtatgtgcacagaattggaagaacaggccgggtgggcaacctgggcctggccaccagcttcttcaatgagaagaacatgaacatcaccaaggacctgctggacctgctggtggaggccaagcaggaggtgcccagctggctggagaacatggcctatgagcaccactacaagggcggcagccggggccgcagcaagagcaaccgcttcagcggcggctttggagcccgggactaccggcagagcagcggcagcagcagcagcggctttggagccagccggggcagcagcagccgcagcggcggcggcggctacggcaacagccggggctttggaggcggcggctatggaggcttctacaacagtgatggctacggcggcaactacaacagccagggcgtggactggtggggcaactag

SEQ ID NO: 148520 - DNA, 1983 bp, Artificial Sequence
  derived and/or modified sequence
atgagccacgtggtggtgaagaacgaccccgagctggaccagcagctggcaaacttggacttgaatagcgagaaacaatctggcggggctagcaccgcaagtaaaggacgttatattcctccccacctgcggaaccgtgaagcctcaaagggcttccacgacaaggactcctccggatggagctgtagtaaggacaaagatgcttattcatcctttgggtccagggatagtcggggaaagcccggatacttctctgagcgaggcagcggctcacgggggagatttgacgacaggggtcggtcggattacgatgggattggcaaccgcgaacgaccaggtttcgggcgatttgagcgatccgggcatagcaggtggtgcgataaatctgttgaggatgactggtctaagcccctgcccccctcggaacgcctggaacaggagctgttctcaggaggcaacacagggataaatttcgagaagtacgatgacatcccagtggaagccacaggatccaattgtccgcctcatatcgagaatttttccgatatcgacatgggggaaataattatgggcaatattgagctcaccagatacacccgaccaacccccgtgcagaaacacgccattcctatcatcaagggcaaacgcgacctgatggcgtgtgcgcaaaccggaagtggaaaaactgccgcgttcctcctgcctatcctctctcagatctataccgacggcccgggcgaagcacttaaggctgttaaggagaatggtcgttatgggagaaggaaacagtatccaattagtctggtgctcgctcctactcgggagttggcggtacaaatttacgaagaggcacgcaagttcagttacaggtcgagggtgcgaccatgtgtagtgtacgggggcgccgacattggtcaacagattcgggaccttgaaagggggtgtcacttgctggtggcaacccccggtcgactggtcgacatgatggaacgaggaaagattggcttagatttttgcaaatatctggtgctggacgaagccgaccgtatgttagacatgggtttcgagccccaaataaggaggatcgttgagcaggacacaatgcctcctaaaggggtcagacatacgatgatgttctcagcaacatttccaaaggagatccagatgctggctagggactttcttgatgagtacatctttctggccgtgggccgcgtaggctcgacttcagaaaacatcacccagaaagtggtgtgggtcgaagatcttgacaagaggtccttcttactggacattctcggcgcaaccgggtcagactcactgaccctggtattcgttgagactaagaagggagcagacagtctggaagatttcctgtaccacgagggatacgcctgtacatcaatacacggagacagatcccaacgcgaccgggaggaagctctgcaccaattccgcagcggaaagtccccaatcctggtcgccacagctgtagccgctcgcggtctggatatctccaacgtgaggcacgtgataaacttcgatctgccctccgacattgaggaatatgtacaccgcatagggagaaccggccgggtggggaaccttggactggctacctcattttttaatgagaaaaatatgaacatcaccaaagatcttttagatttattggtcgaagcaaaacaggaggtgcccagctggctcgaaaatatggcgtatgaacaccattataaaggtggcagtcgcggccggagtaaaagtaacaggtttagcggcgggttcggcgcccgcgattacagacagtcctcagggtcatcttcgtccggcttcggggcctccagaggaagttcttctaggtcagggggcggcggttatggcaactccagagggttcgggggcggtggttacggcggattttacaactccgacggctacggggggaattacaactcccagggtgtcgattggtggggcaactag

SEQ ID NO: 148521 - DNA, 1983 bp, Artificial Sequence
  derived and/or modified sequence
atgagccacgtggtggtgaagaacgaccccgagctggaccagcagcttgccaacctggatctgaatagcgaaaaacagtccgggggcgcgtctaccgcgagcaagggccgctacatcccacctcacctgaggaatagagaagctagcaagggctttcacgacaaggacagcagcggatggagttgcagtaaggacaaggacgcgtattcatccttcggaagcagggattcaagagggaaacccgggtacttttcagaaaggggtagcggcagtagagggaggttcgatgatcggggtcggtcagactatgatgggattggcaaccgcgagaggcccgggtttgggagattcgaaaggagcgggcacagtaggtggtgtgataaatcagtggaggatgattggtcaaaacctcttcccccatccgagagacttgagcaagagcttttctcaggcggaaatacaggtatcaactttgagaagtatgacgatattccagtggaagccactggtagcaactgcccccctcacatcgaaaacttttccgatattgatatgggtgaaatcattatgggcaacatcgagcttacccgctatacacgccccactcctgtccaaaagcacgctattccaataattaagggtaagcgtgatctgatggcctgtgcacaaacagggtcaggaaagactgcagcattcctgctgcccatactttcacagatctacaccgatgggcccggagaggccctcaaagctgttaaagagaatggacgctacggccgacgaaaacagtatccaatcagcctggttctcgcaccgacacgggagctcgccgttcagatctacgaggaagctcgaaagttctcctaccgatccagggtccgaccttgcgtggtatatggcggcgcagatatcggacagcaaatcagagatctggagcgggggtgtcacttgctggtcgccacccccgggcgacttgtggatatgatggaacggggaaagatcggacttgatttttgtaagtacctggtgctggacgaggccgaccgcatgctggacatggggttcgagccccagattaggcgaatcgtggagcaggatacaatgccccctaaaggagtacgacatactatgatgttttccgcaacttttccgaaagagatccaaatgctggctcgggactttctggatgaatacatatttcttgcggtggggagggtgggatccaccagcgagaatatcactcagaaggtggtttgggttgaggacctagacaagaggtctttcctgcttgatatactgggagccactggaagtgatagcctgaccctcgtatttgttgagacaaaaaagggtgcggattcccttgaggacttcctctaccacgaaggttatgcctgcacttccattcacggtgaccgcagtcagcgcgaccgcgaagaggcactacaccagtttaggtcgggcaagagccctattctcgtggccaccgctgtcgccgcgcgtggtcttgacatttcaaacgtacggcacgtgattaactttgacttgccgtcagacattgaggaatacgttcatcggatcggacgaactggccgagtgggtaatttaggactggcgacctccttcttcaatgaaaaaaatatgaatatcactaaggacctgctcgacctgctggtcgaagccaagcaggaagtcccctcttggctggagaatatggcttacgagcaccactacaaaggcgggagccgaggaagatccaaaagcaatcgcttttctggcggatttggtgcacgggactacagacagtcttctgggagctcctcatctggtttcggcgcctctaggggctcttctagccgttccgggggcggtggttatgggaacagccgaggctttggaggtgggggttatggcggattttataattcagatggctatggaggcaactataacagccagggtgtagactggtggggaaattag

SEQ ID NO: 148522 - DNA, 1983 bp, Artificial Sequence
  derived and/or modified sequence
atgagccacgtggtcgtcaagaacgacccggagctggaccagcagctagccaatcttgacttaaattccgaaaagcaaagtggcggtgcctctaccgcttctaagggccgttatatacccccacatttgcgtaatcgcgaggcctccaaagggtttcacgataaggatagcagcggatggagctgcagtaaggataaagatgcctatagcagctttggctcaagggattccagagggaagcccggatatttcagtgaacgcggatccggatccagggggagattcgatgatagaggaagatccgattacgatggaattggcaatcgggagcggcctgggttcggaagatttgagcggtccgggcattcaagatggtgcgataagtccgtggaagacgactggagcaagccactgccaccgagtgaacgtctggaacaggagctgttctcgggcggaaacacaggtatcaactttgagaagtatgacgacattccagtcgaagcaacagggagtaattgcccaccacacatcgaaaacttttcagatattgacatgggggagattattatgggtaatattgagcttactaggtataccaggcccactcccgtgcagaagcacgcaattcccatcatcaagggaaaaagagatcttatggcctgtgcccagactggatccggaaagaccgccgctttcttactgcctatattgtctcagatttatactgatggaccgggagaggcacttaaagctgtgaaagagaacggaaggtatggtcgcagaaaacagtatcccatttccttggtactcgcaccaaccagggagctggccgttcagatatacgaagaagccagaaaattttcctatagaagccgagtccgaccttgcgttgtttatggaggcgcagatatcggtcagcagattcgcgatcttgagcgcggatgccacttattagtagccacccccggacgcttagtggacatgatggagcgcggaaagatcggcttagacttctgcaaatacctcgtgttggatgaggctgatcggatgctcgatatggggttcgagccacaaattcgtcgcatcgtggagcaggatactatgccacccaagggtgtgagacatacaatgatgttttccgcgacgtttcccaaggagattcaaatgctggccagggactttctggatgaatacatctttttggcagttgggagggtgggttccacctcagagaacatcactcagaaggtggtgtgggtagaggacctggacaaacggagcttcctgcttgatatcctgggggctacggggtctgattcactcacactcgtcttcgttgagactaaaaagggggcagattctctggaggatttcttgtaccacgagggttacgcctgtacctctatccacggggaccggagccagagggatcgggaagaagccctgcatcagtttagatctgggaagagtcctatcttggtcgctacagcagtcgcagcccgaggcctagacatctcaaatgtgcgccacgtcatcaattttgatctgccatctgatattgaggaatacgtacacagaattggacggacgggaagagtgggtaaccttggcctcgccaccagctttttcaacgagaaaaatatgaatatcaccaaagaccttctggatcttctggtcgaggctaagcaggaagtccccagctggttagaaaatatggcctatgagcatcattacaagggtggttcaagagggagatccaagagcaatagattctcgggcggatttggggcacgggactaccgacaaagcagtgggagtagttcaagcggcttcggcgcatcgcggggatcaagttcccgctccggaggcggaggttacggaaactccagagggttcggaggcggtggttatggtggattctacaacagcgacgggtacggcggaaattataatagtcagggggtcgactggtggggcaattag

SEQ ID NO: 148523 - DNA, 1983 bp, Artificial Sequence
  derived and/or modified sequence
atgtcacacgtcgtggtcaagaacgaccccgaattagatcaacagctagccaatcttgacctcaactccgaaaagcagagcggtggggcttccactgcttcaaaaggtagatacatccccccacatctcaggaaccgtgaggcgagcaaggggttccacgacaaagacagctctgggtggagctgctctaaggacaaagatgcttacagttcgttcggaagccgagactccagggggaagcccggatacttttccgagcgtggctccggaagcagagggagattcgacgatcggggtagatcagactacgatggaatcgggaaccgagaacgtccaggatttggcagatttgagagatccggccattccaggtggtgcgacaaaagtgtcgaggatgactggtcaaaaccactccccccaagcgagcgcctggaacaggagttattttcgggaggcaacaccgggattaactttgagaagtatgacgatatcccggtcgaagcgacgggcagtaactgtcctccgcacattgagaacttcagtgacattgatatgggagaaataatcatgggaaacatagaactaaccaggtacacccgccctacccccgtgcagaaacacgcgatccctattattaaaggcaaacgtgatttaatggcgtgcgcccagaccggcagcggaaaaactgctgcctttctgctgccaattctatctcaaatctacactgacggtccaggcgaagcgctcaaagcagtcaaggaaaatggacggtacggcaggcggaagcagtatcctatctccctggttcttgccccaacccgggagctggcggtccagatttatgaggaagccagaaagttcagctatcggtcccgtgttcgaccgtgcgtggtttacggtggagcggacattggacagcagatccgtgacctggaaagaggatgccacctgctggtggccactcccggtcggttggtggacatgatggaacgcggaaaaatcggactcgacttttgtaagtatcttgtattagatgaagccgaccgaatgctggacatgggcttcgagccccagatccggcgaatcgtggagcaggacacaatgccgcctaaaggggtccggcatacaatgatgttttcagccacttttcccaaagaaatccagatgctcgcacgcgactttctcgacgagtacatcttcctcgccgtcggccgtgtggggtctacctctgagaacatcacacagaaagttgtgtgggtggaggatcttgacaaacgatcctttctgctggatattctgggggctaccggatccgatagtttgacccttgtgtttgtcgaaaccaagaagggggctgacagcttagaagacttcctctaccacgaaggatacgcgtgtacaagcatccacggtgacaggagccagcgtgacagggaggaagccttacaccagttccggagcggaaagtcgccgatcctcgtggccacggccgtggccgctagaggactcgacattagcaatgtcaggcatgtaataaactttgatctgcctagtgatatcgaagaatacgttcatagaattggcagaactgggcgagtgggcaatttgggccttgcaaccagcttcttcaatgaaaaaaatatgaacatcacaaaagacctgcttgatctgcttgtcgaagctaagcaagaagtgccttcttggctagagaacatggcttatgagcatcactacaaaggcggatccagaggacggtccaagagcaatcgcttctcaggcggatttggggctagggattataggcagtcaagtgggtcctcctccagtggattcggggcatctagaggatcctctagccgaagcggtggcggaggctacggcaacagcagaggtttcggaggaggtggctacggaggattctacaatagtgacgggtacgggggaaactataactcccagggggtcgactggtggggcaactag

SEQ ID NO: 148524 - DNA, 4445 bp, Artificial Sequence
  derived and/or modified sequence
gcgtaggctaaccagtgcgcttaatagctgtaggtccagtgtaagagttccgctattcggtctcacacctacagtggactacccgatttttcgcttctcttcagggatgagtcatgtggtggtgaaaaatgaccctgaactggaccagcagcttgctaatctggacctgaactctgaaaaacagagtggaggagcaagtacagcgagcaaagggcgctatatacctcctcacttaaggaacagagaagcatctaaaggattccatgataaagacagttcaggttggagttgcagcaaagataaggatgcatatagcagttttgggtctcgagattctagaggaaagcctggttatttcagtgaacgtggaagtggatcaaggggaagatttgatgatcgtggacggagtgactatgatggtattggcaatcgtgaaagacctggctttggcagatttgaacggagtggacatagtcgttggtgtgacaagtcagttgaagatgattggtcaaaaccacttccaccaagtgaacgcttggagcaagaactgttttctggaggaaacacggggattaactttgagaaatatgatgatataccagtagaggcaaccggcagtaactgtcctccacatattgagaattttagcgatattgacatgggagaaattatcatggggaacattgaacttactcgctatactcgtcctactccagtgcaaaaacatgccattcctattattaagggaaaaagagacttaatggcttgtgcccaaacaggatctgggaaaactgcagcatttcttttacccatactgagtcagatatatacagatggtccaggagaagctttgaaggctgtgaaggaaaatggaaggtatgggcgccgcaaacaatatccaatatccttggttttagccccaacaagagaattggctgtacagatctatgaggaagccagaaaattttcctaccgatctagagttcgtccttgtgtagtttatggtggtgctgatattggtcagcagattcgggacttagaacgtggatgccacttgttagtagccactccaggacgtctagtggatatgatggaaagaggaaagattggattagacttctgcaagtacttagtgttggatgaagctgataggatgctggatatgggatttgaacctcagatacgtcgtatagttgaacaagatactatgccaccaaagggcgttcgtcacaccatgatgtttagtgctacttttcctaaggaaatacagatgcttgctcgtgactttttggatgaatatatctttttggctgtaggcagagtaggctctacctctgagaacatcacacagaaagtagtttgggtggaagacttagataaacggtcatttctactggacattttaggtgcaacagggagtgattcacttactttagtgtttgtggagaccaaaaagggagcagattccctggaggatttcttataccatgaaggatatgcttgtactagtattcatggagaccggtcacagagagatcgagaggaggcccttcaccagtttcgctcaggaaaaagcccaattctagtggctacagctgtggcagcacgaggactagacatttcaaatgtgagacatgttatcaattttgatttgccaagtgatattgaagaatatgtgcatcgtattggccgtacaggacgtgtaggaaacctgggccttgccacctcattctttaatgaaaaaaatatgaatattacaaaggatttgttggatcttcttgtagaagctaaacaagaagtgccttcttggttggaaaatatggcttatgaacaccactacaagggtggcagtcgtggacgatctaaaagtaatagattcagtggaggatttggtgccagagactatcgacaaagtagtggttccagcagttctggctttggtgctagtcgcggaagcagcagccgcagtggtggaggtggttacggcaacagcagaggatttggtggaggtggctatggaggcttctacaatagtgatggatatggaggaaattataactcccagggggttgactggtggggcaactgaatctgctttgcagcaaagtcacccttacaaagaagctaatatggaaaccacatgtaacttagccagactatattgtgtagcttcaagaacttgcagtacattaccagctgtgattctcctgataattcaagggagctcaaagtcacaagaagaaaaatgaaaggaaaaaacagcagccctattcagaaattggtttgaagatgtaattgctctagtttggattaaactcttcccctcctgctttagtgccaccccaaactgcatttataattttgtgactgaggatcgtttgtttgttaacgtactgtgactttaactttagacaacttactactttgatgtcctgttggctcagtaatgctcacgataccaattgttttgacaaaataaatttactaaacttggcctaaaatcaaaccttggcacagaggtatgatacaactttaacaggagtcatcaattcatccataaatataaaaagggaaaaaaacttaaggcagtagtctgcattaggactgtttgagttttgcagacttggggttgggagaacatcttaaagcattaaagcatagttttttgtatggccaaccttactaaattaagttctgacttgctcactctatcctggataggcacttgggaacttacactctttaagccattccagtcatgatgaggtggaatgtatcagtataccaattaatatttttgaaagagctcttttaggttaatttaagtacagcaatttctcatgtaatgtttagggagtttattctaacctaggcaaacggcatgctatcacaagaaaggtttaaagctttgataaaatgggggagatttaatcagtttttttaatgcctgctataaaaatttgaaatattagaatggccgaccatggcagtgaccaggcctcactacaggcctggttggattctggtctttaatgcatgctagtgttgatgttttttggtcaagaacggtttaaacaggaaggattgtgcagcaggctttaatttaatgtagattcatactgctctgttaaagctgcattgaaatgttaaaatggcttacacttgcagactttgcaaatcttaagactaacaaatccttgaaatcacacagcttgcaaatacgtactaaactgcacaaggtgtgtgttctatatgtgcagttttagcgtattttagttgcataggtttccatggtatttatagtctcttgtgctaaatttggccaaagatgattgtccaccactaaaaatgcctctcccacttggaattctgtactgattttgtggccagatgcaatgatctttaaaaacaaatcttttcaatggcataagaagttgacaaaaatttcttaaagtgcaatagattttcaagtgtattgtgccttgttctaaaacttttaagtaggtgcacttgacagtattgaggtcatttgttaaggtgctatttcaattagtgtaggtttagactcttgtacatttctcccataactttttacaaagtattttgttgcacattcagagaattttatatatatatgtcttgtgtgggtgtcctcgaccttccaatcttatttcgtctcttggagattgttgaatgcagccagtgaagaagtagattcctaaattttattggggaccatggaatggtagttgagaagaaaactatttgcacacaacagattttagatactttttgctgctagttgtgtaatatttattgaacattttgacaaatatttatttttgtaagcctaaaaatgattctttgaaagtttaaagaaacttgaccaaaagacagtacaaaaaacactggcacttgaatgttgaatgtcaccgtatgtgaaataatatattttggggtagtgtgagcttttaatgttaagtctgttaaacttgagtcaaattaagcagacccggcattggcaatgtagctgtaattttctgacaaaatttaagacaaaattgtcaacttgaaactaaaacatgccaaggttttgatatacttgtcttaagatattaatgaaacacttctgaacactgataggaagtgtccacatccacaaagtttctcttgagttttgttatgtgttttgttgtgtttgattttcagtgattgtctggtatatttacagtcctcaaacatggttatttctgtcagtgacttaacattcggttttatcagccagcagtattcttcagtaaataaagaatggaattgctgaatgtaatcattgaacctcgagtcactgtaaaagttcagtaattgcttattgtattagttttagatgctggcactgcatgtgctctgtttattctgattttactaaaataaaaagttcaaaagtc

SEQ ID NO: 148525 - DNA, 2709 bp, Artificial Sequence
  derived and/or modified sequence
agaggggtctggagttcctaggtgaaccccagcagcctaaccctgtcaagtctgtcgagcctctggctggtcacacgtgctgcggaatccactcagctttcctcaggtgcagtcaggtccatcctgcagagggaccttctgcggacctgttctttcacctccctaacctgaagattgtattcaaaccaccgtggatcgctcacgtaaaatggtcactgcgcctaacacctgggatcccgtaacccttatctatcttggcttcagagagttttttgactagttccaactttgctgaagcttgtcaaagggatgagtcatgtggtggtgaaaaatgaccctgaactggaccagcagcttgctaatctggacctgaactctgaaaaacagagtggaggagcaagtacagcgagcaaagggcgctatatacctcctcacttaaggaacagagaagcatctaaaggattccatgataaagacagttcaggttggagttgcagcaaagataaggatgcatatagcagttttgggtctcgagattctagaggaaagcctggttatttcagtgaacgtggaagtggatcaaggggaagatttgatgatcgtggacggagtgactatgatggtattggcaatcgtgaaagacctggctttggcagatttgaacggagtggacatagtcgttggtgtgacaagtcagttgaagatgattggtcaaaaccacttccaccaagtgaacgcttggagcaagaactgttttctggaggaaacacggggattaactttgagaaatatgatgatataccagtagaggcaaccggcagtaactgtcctccacatattgagaattttagcgatattgacatgggagaaattatcatggggaacattgaacttactcgctatactcgtcctactccagtgcaaaaacatgccattcctattattaagggaaaaagagacttaatggcttgtgcccaaacaggatctgggaaaactgcagcatttcttttacccatactgagtcagatatatacagatggtccaggagaagctttgaaggctgtgaaggaaaatggaaggtatgggcgccgcaaacaatatccaatatccttggttttagccccaacaagagaattggctgtacagatctatgaggaagccagaaaattttcctaccgatctagagttcgtccttgtgtagtttatggtggtgctgatattggtcagcagattcgggacttagaacgtggatgccacttgttagtagccactccaggacgtctagtggatatgatggaaagaggaaagattggattagacttctgcaagtacttagtgttggatgaagctgataggatgctggatatgggatttgaacctcagatacgtcgtatagttgaacaagatactatgccaccaaagggcgttcgtcacaccatgatgtttagtgctacttttcctaaggaaatacagatgcttgctcgtgactttttggatgaatatatctttttggctgtaggcagagtaggctctacctctgagaacatcacacagaaagtagtttgggtggaagacttagataaacggtcatttctactggacattttaggtgcaacagggagtgattcacttactttagtgtttgtggagaccaaaaagggagcagattccctggaggatttcttataccatgaaggatatgcttgtactagtattcatggagaccggtcacagagagatcgagaggaggcccttcaccagtttcgctcaggaaaaagcccaattctagtggctacagctgtggcagcacgaggactagacatttcaaatgtgagacatgttatcaattttgatttgccaagtgatattgaagaatatgtgcatcgtattggccgtacaggacgtgtaggaaacctgggccttgccacctcattctttaatgaaaaaaatatgaatattacaaaggatttgttggatcttcttgtagaagctaaacaagaagtgccttcttggttggaaaatatggcttatgaacaccactacaagggtggcagtcgtggacgatctaaaagtaatagattcagtggaggatttggtgccagagactatcgacaaagtagtggttccagcagttctggctttggtgctagtcgcggaagcagcagccgcagtggtggaggtggttacggcaacagcagaggatttggtggaggtggctatggaggcttctacaatagtgatggatatggaggaaattataactcccagggggttgactggtggggcaactgaatctgctttgcagcaaagtcacccttacaaagaagctaatatggaaaccacatgtaacttagccagactatattgtgtagcttcaagaacttgcagtacattaccagctgtgattctcctgataattcaagggagctcaaagtcacaagaagaaaaatgaaaggaaaaaacagcagccctattcagaaattggtttgaagatgtaattgctctagtttggattaaactcttcccctcctgctttagtgccaccccaaactgcatttataattttgtgactgaggatcgtttgtttgttaacgtactgtgactttaactttagacaacttactactttgatgtcctgttggctcagtaatgctcacgataccaattgttttgacaaaataaatttactaaacttggcctaaaatcaaa

SEQ ID NO: 148526 - DNA, 1983 bp, Artificial Sequence
  derived and/or modified sequence
atgagccacgtggtggtgaagaacgaccccgagctggaccagcagctggccaacctggacctgaacagcgagaagcagagcggcggcgccagcaccgccagcaagggcagatacatccccccccacctgagaaacagagaggccagcaagggcttccacgacaaggacagcagcggctggagctgcagcaaggacaaggacgcctacagcagcttcggcagcagagacagcagaggcaagcccggctacttcagcgagagaggcagcggcagcagaggcagattcgacgacagaggcagaagcgactacgacggcatcggcaacagagagagacccggcttcggcagattcgagagaagcggccacagcagatggtgcgacaagagcgtggaggacgactggagcaagcccctgccccccagcgagagactggagcaggagctgttcagcggcggcaacaccggcatcaacttcgagaagtacgacgacatccccgtggaggccaccggcagcaactgccccccccacatcgagaacttcagcgacatcgacatgggcgagatcatcatgggcaacatcgagctgaccagatacaccagacccacccccgtgcagaagcacgccatccccatcatcaagggcaagagagacctgatggcctgcgcccagaccggcagcggcaagaccgccgccttcctgctgcccatcctgagccagatctacaccgacggccccggcgaggccctgaaggccgtgaaggagaacggcagatacggcagaagaaagcagtaccccatcagcctggtgctggcccccaccagagagctggccgtgcagatctacgaggaggccagaaagttcagctacagaagcagagtgagaccctgcgtggtgtacggcggcgccgacatcggccagcagatcagagacctggagagaggctgccacctgctggtggccacccccggcagactggtggacatgatggagagaggcaagatcggcctggacttctgcaagtacctggtgctggacgaggccgacagaatgctggacatgggcttcgagccccagatcagaagaatcgtggagcaggacaccatgccccccaagggcgtgagacacaccatgatgttcagcgccaccttccccaaggagatccagatgctggccagagacttcctggacgagtacatcttcctggccgtgggcagagtgggcagcaccagcgagaacatcacccagaaggtggtgtgggtggaggacctggacaagagaagcttcctgctggacatcctgggcgccaccggcagcgacagcctgaccctggtgttcgtggagaccaagaagggcgccgacagcctggaggacttcctgtaccacgagggctacgcctgcaccagcatccacggcgacagaagccagagagacagagaggaggccctgcaccagttcagaagcggcaagagccccatcctggtggccaccgccgtggccgccagaggcctggacatcagcaacgtgagacacgtgatcaacttcgacctgcccagcgacatcgaggagtacgtgcacagaatcggcagaaccggcagagtgggcaacctgggcctggccaccagcttcttcaacgagaagaacatgaacatcaccaaggacctgctggacctgctggtggaggccaagcaggaggtgcccagctggctggagaacatggcctacgagcaccactacaagggcggcagcagaggcagaagcaagagcaacagattcagcggcggcttcggcgccagagactacagacagagcagcggcagcagcagcagcggcttcggcgccagcagaggcagcagcagcagaagcggcggcggcggctacggcaacagcagaggcttcggcggcggcggctacggcggcttctacaacagcgacggctacggcggcaactacaacagccagggcgtggactggtggggcaactag

SEQ ID NO: 148527 - protein, 151 aa, Artificial Sequence
  derived and/or modified sequence
MAASTSMVPVAVTAAVAPVLSINSDFSDLREIKKQLLLIAGLTRERGLLHSSKWSAELAFSLPALPLAELQPPPPITEEDAQDMDAYTLAKAYFDVKEYDRAAHFLHGCNSKKAYFLYMYSRYLVRAILKCHSAFSETSIFRTNGKVKSFK

SEQ ID NO: 148528 - protein, 597 aa, Artificial Sequence
  derived and/or modified sequence
MAASTSMVPVAVTAAVAPVLSINSDFSDLREIKKQLLLIAGLTRERGLLHSSKWSAELAFSLPALPLAELQPPPPITEEDAQDMDAYTLAKAYFDVKEYDRAAHFLHGCNSKKAYFLYMYSRYLSGEKKKDDETVDSLGPLEKGQVKNEALRELRVELSKKHQARELDGFGLYLYGVVLRKLDLVKEAIDVFVEATHVLPLHWGAWLELCNLITDKEMLKFLSLPDTWMKEFFLAHIYTELQLIEEALQKYQNLIDVGFSKSSYIVSQIAVAYHNIRDIDKALSIFNELRKQDPYRIENMDTFSNLLYVRSMKSELSYLAHNLCEIDKYRVETCCVIGNYYSLRSQHEKAALYFQRALKLNPRYLGAWTLMGHEYMEMKNTSAAIQAYRHAIEVNKRDYRAWYGLGQTYEILKMPFYCLYYYRRAHQLRPNDSRMLVALGECYEKLNQLVEAKKCYWRAYAVGDVEKMALVKLAKLHEQLTESEQAAQCYIKYIQDIYSCGEIVEHLEESTAFRYLAQYYFKCKLWDEASTCAQKCCAFNDTREEGKALLRQILQLRNQGETPTTEVPAPFFLPASLSANNTPTRRVSPLNLSSVTP

SEQ ID NO: 148529 - DNA, 456 bp, Artificial Sequence
  derived and/or modified sequence
atggcggccagcacttcaatggtacccgtggctgtgaccgccgctgtggcacccgtcctctccatcaacagcgactttagtgacctgcgcgagataaagaaacagttactgctgatcgccggccttacccgggagcgtgggctgcttcacagctctaagtggtctgcggagctcgctttctccctacctgctttgcctttggcagagcttcagcccccaccaccaatcactgaggaggacgcccaagatatggatgcttacacgctggcaaaagcctactttgatgtcaaggagtatgacagggctgcccactttttgcacggttgcaactctaaaaaagcatacttcctctatatgtactcaagatatctggtgcgggccatcttgaaatgccactccgctttttcagagacaagcatattccgaactaacggcaaggttaagtcctttaagtag

SEQ ID NO: 148530 - DNA, 1794 bp, Artificial Sequence
  derived and/or modified sequence
atggcagcctctacttccatggtccctgtggctgtgacagccgcggtggctcccgtgctttcaatcaactctgatttttccgatctgagggagatcaaaaaacagctgctgcttatcgccgggctgactagggagagaggcttgcttcatagcagcaagtggtccgctgagctagccttcagcctccctgccttaccattggccgagttacagcctcccccccccattacggaggaggacgctcaggacatggacgcatacacattagctaaagcgtatttcgatgtgaaggagtatgaccgtgccgcacacttcttgcatggctgcaatagcaagaaggcatattttttgtacatgtatagccgctatctgtcaggagagaaaaaaaaagacgacgagacagtcgacagcctggggcctctggaaaagggacaggtcaaaaacgaagcactccgggaactgagagtggagctgtctaagaagcatcaggcacgggagttggatggctttggcctgtatctttatggggtcgtgctgcggaaactggatctggtgaaagaggctattgacgtatttgtggaggctacccacgtccttccgcttcactggggagcctggttagagctatgtaatctgataaccgacaaagagatgcttaaatttctttccctgccagatacctggatgaaggagttctttctcgcacatatctatactgagttgcagctgattgaggaggcactccagaaataccaaaacttgatcgacgtgggtttttctaagtcttcttatatcgtgagtcagattgcagtcgcttatcataacatccgagatattgataaggctctaagcatctttaatgaactgcgtaagcaggatccctatcgcatcgagaacatggatacattctcaaaccttctgtacgtgcggtccatgaagtctgagttgtcctatcttgcccacaatctgtgcgagattgacaaatatagagttgaaacttgctgtgttatcggtaactactactccttgagaagtcagcatgagaaagctgccttgtacttccagagggccctgaagctgaatccgagatacctcggggcctggaccctcatgggccatgagtacatggaaatgaagaacacttctgctgccatccaggcctaccggcacgccatcgaggtgaacaaaagagactaccgagcgtggtacggcttgggccagacctacgagatcctgaagatgccattttattgcttatattattataggagggcacaccagttgcggcctaacgactctagaatgttggttgctttgggcgaatgttatgagaagttgaaccagttggtcgaggccaaaaagtgctactggagggcgtacgcagtgggggatgttgagaaaatggcactggtcaagcttgcgaagctgcacgaacagctcacggaatcagagcaggcagcacagtgctacattaagtatatccaggacatttacagctgcggtgagatagtggagcacctggaagagagcaccgcttttagatacctggcccagtactatttcaaatgcaagctgtgggatgaagcctcaacatgtgcgcagaagtgttgcgcctttaatgacacccgagaggagggcaaagccctgttgcgccagatcctccagttgcgtaatcagggcgaaactcctactactgaggttcctgcgccatttttcttacccgccagcttaagcgccaataataccccgacccggagggtgtcaccactgaatctgtctagcgttaccccgtag

SEQ ID NO: 148531 - DNA, 456 bp, Artificial Sequence
  derived and/or modified sequence
atggccgccagcacctccatggtgcctgtggccgtgacagctgctgtggcccctgtgctgagcatcaacagcgacttcagtgacctgcgggagatcaagaagcagctgctgctgattgctggcctgacccgggagcggggcctgctgcacagcagcaagtggagcgctgagctggccttcagcctgcctgccctgcccctggccgagctgcagcccccaccacccatcacagaagaagatgcccaggacatggatgcctacaccctggccaaggcctactttgatgtgaaggagtatgaccgggccgcccacttcctgcacggctgcaacagcaagaaggcctacttcctgtacatgtacagccgctacctggtgcgggccatcctgaagtgccacagcgccttcagcgagaccagcatcttccgcaccaacgggaaggtgaagagcttcaagtag

SEQ ID NO: 148532 - DNA, 1794 bp, Artificial Sequence
  derived and/or modified sequence
atggccgccagcacctccatggtgcctgtggccgtgacagctgctgtggcccctgtgctgagcatcaacagcgacttcagtgacctgcgggagatcaagaagcagctgctgctgattgctggcctgacccgggagcggggcctgctgcacagcagcaagtggagcgctgagctggccttcagcctgcctgccctgcccctggccgagctgcagcccccaccacccatcacagaagaagatgcccaggacatggatgcctacaccctggccaaggcctactttgatgtgaaggagtatgaccgggccgcccacttcctgcacggctgcaacagcaagaaggcctacttcctgtacatgtacagccgctacctgtctggagagaagaagaaggatgatgagaccgtggacagcctgggccccctggagaagggccaggtgaagaatgaggccctgcgggagctgcgggtggagctgagcaagaagcaccaggcccgggagctggatggcttcggcctgtacctgtatggagtggtgctgaggaagctggacctggtgaaggaggccattgatgtgtttgtggaggccacccacgtgctgcccctgcactggggcgcctggctggagctgtgcaacctgatcacagacaaggagatgctgaagttcctgagcctgcctgacacctggatgaaggagttcttcctggcccacatctacacagagctgcagctgattgaggaggccctgcagaagtaccagaacctgattgatgtgggcttcagcaagagcagctacatcgtgtcccagattgctgtggcctaccacaacatccgggacatcgacaaggccctgagcatcttcaatgagctgaggaagcaggacccctacagaattgagaacatggacaccttcagcaacctgctgtatgtgcgctccatgaagtctgagctgagctacctggcccacaacctgtgtgaaattgacaagtacagagtggagacctgctgcgtgattggcaactactacagcctgcggagccagcacgagaaggccgccctgtacttccagagggccctgaagctgaacccccgctacctgggcgcctggaccctgatgggccacgagtacatggagatgaagaacaccagcgctgccatccaggcctacagacatgccatcgaggtgaacaagagggactaccgggcctggtacggcctgggccagacctatgagatcctgaagatgcccttctactgcctgtactactacagaagagcccaccagctgcggcccaatgacagcaggatgctggtggccctgggagaatgttatgagaagctgaaccagctggtggaggccaagaagtgctactggagggcctatgctgtgggagatgtggagaagatggccctggtgaagctggccaagctgcacgagcagctgacagaaagtgagcaggccgcccagtgctacatcaagtacatccaggacatctacagctgtggggagatcgtggagcacctggaggagagcacagccttccgctacctggcccagtactacttcaagtgcaagctgtgggatgaggccagcacctgtgcccagaagtgctgtgccttcaatgacacccgggaggagggcaaggccctgctgcggcagatcctgcagctgaggaaccagggcgagacccccaccacagaggtgcctgcccccttcttcctgcctgccagcctgagcgccaacaacacccccaccaggagagtgagccccctgaacctgagctctgtgaccccctag

SEQ ID NO: 148533 - DNA, 456 bp, Artificial Sequence
  derived and/or modified sequence
atggccgccagcaccagcatggtgcccgtggccgtgaccgccgccgtagcccctgtgctgagcatcaactctgacttctcagatctgagagaaattaagaagcagctattgctaatagcaggactgactagggaaaggggtttgctgcactcttctaagtggtctgcagagctcgccttctcgttgcccgctctcccccttgccgagttgcagcctccaccaccaatcacagaagaagatgctcaagatatggatgcttacacactggctaaagcatatttcgatgttaaagagtacgatcgagctgcgcacttcttacatgggtgcaatagcaagaaggcatatttcctctatatgtacagtcggtatctcgtgcgggccattctcaagtgccacagcgctttttctgaaacctctatcttcaggactaatggtaaagttaagtctttcaaatag

SEQ ID NO: 148534 - DNA, 1794 bp, Artificial Sequence
  derived and/or modified sequence
atggccgccagcaccagcatggtgcccgtggccgtgaccgccgccgtcgccccagtgctcagcattaactccgatttctcagatttacgcgagattaagaagcagctgctgctcatagccggcctgacccgggagcgcgggctcttgcattcttcaaaatggtcggccgagttggccttctcgctccctgcattgcctttggcggaactgcagcctccacctccaattaccgaagaggacgcccaagatatggatgcatacaccttggctaaagcctactttgacgtaaaggaatatgacagagctgcacatttcctccatggctgtaattcaaagaaggcatacttcctgtatatgtacagtaggtacctaagtggcgaaaaaaagaaagatgacgaaacggtcgattccctgggccctctggaaaaaggtcaggtgaagaacgaagcattaagagagttacgcgtggagctgtccaaaaagcaccaggcccgtgagctcgacgggtttggactttatctgtatggggtggtgctccggaaattggacctggtgaaggaagctatcgacgtgttcgtggaggcaacccatgtgctgcctcttcattggggagcttggttagagctgtgcaacctaattacggataaggagatgctgaagttcctttctctaccagatacttggatgaaagaattcttccttgcgcatatctatacagaattgcagctgatagaagaggcactccagaaatatcagaatttgattgatgtaggtttttctaaatcaagctatatcgtctcacagattgcagtggcataccataacatccgggatattgacaaagctctgagcatatttaacgagctccggaaacaggatccttaccgtattgagaatatggacacttttagtaacttgctgtatgtgcggtcaatgaagtctgagttgagctatctggctcacaacttatgcgagattgataaatacagagtggagacctgttgtgtgatcggcaattattactctctgagaagccagcatgaaaaggctgcgctctactttcagcgggccctgaaactcaacccgagatatctaggtgcatggacacttatgggccacgagtatatggagatgaaaaacaccagcgcagcaatccaggcttatcgccatgcaatcgaggtcaataagagagattacagagcctggtacggcctcggccagacatatgagatacttaaaatgccattttactgcttgtactattacaggcgcgcgcatcagctgcggccgaatgatagtcggatgctcgtggccctaggtgagtgttatgagaaactcaatcaacttgtggaggccaagaaatgttactggcgcgcttacgccgttggtgacgttgaaaagatggctctggtgaagctagcgaagctgcacgaacagctgaccgagtcagaacaggctgctcaatgttacattaagtacatacaggacatctactcatgcggtgaaatagtggaacaccttgaggagagcaccgctttccggtacctggctcagtactattttaagtgcaaactgtgggacgaggccagtacctgcgcccagaaatgttgtgccttcaatgatacccgagaggagggtaaggcccttctgcgacagattctgcagctgaggaaccagggcgagacccccacgaccgaggtacccgctcccttttttttgccagcatccctgagtgccaacaacacacccacccggcgggtatccccactaaatttgagttctgtcacaccatag

SEQ ID NO: 148535 - DNA, 456 bp, Artificial Sequence
  derived and/or modified sequence
atggctgcaagtacctctatggtccctgtggccgtgaccgcagcagtagctcccgtactgtctattaattccgacttttcagatctacgagaaataaaaaagcaactgttgctcatagcaggcctaacgcgcgagcgcggactcctgcatagctccaagtggtccgcagagctggccttttctctgcccgctctgcccctagctgaactccagccacctcctcctatcacagaggaggatgcacaggacatggacgcctacactctggccaaagcctattttgatgttaaagagtacgatcgtgccgctcacttcctgcacggctgcaattctaagaaggcttatttcctgtacatgtactcccgatacctggtgagggcgatcttgaaatgtcattccgcattctcagagacttctatcttcagaaccaatggaaaggtcaagagcttcaagtag

SEQ ID NO: 148536 - DNA, 1794 bp, Artificial Sequence
  derived and/or modified sequence
atggccgctagtacaagcatggttcctgtggctgtgactgcggcagtggcccctgttctctctatcaattcggacttcagcgacttaagagaaatcaagaagcagctgctgcttattgctggtttgactcgagagcgagggctgctccactcttccaagtggtcagctgaactcgccttctcattgccagcattacccttggcagaactccagccacctcctcccattactgaggaagacgcacaagatatggacgcttacacacttgccaaagcctatttcgatgtcaaagagtacgaccgcgctgcacacttcctccacgggtgcaatagcaagaaggcttactttttatacatgtattcaaggtacctcagtggggagaagaaaaaagatgacgaaactgtggattctctgggcccactggaaaagggtcaggtcaaaaatgaagccctcagagagcttcgagtcgaactctccaagaaacaccaggcaagagaactggacgggtttggcctgtacctgtatggtgttgtactaaggaaactggatctagtcaaagaagcaattgatgtatttgtcgaggctactcacgtccttccccttcactggggtgcatggttggagttatgtaacctgattacagataaggagatgttgaaatttctgagcctgcccgacacgtggatgaaggaattcttcctcgcgcacatttatacagagctgcagttaattgaagaggcactgcaaaaatatcagaaccttatcgacgttggcttttcaaagtcctcatatatcgtctcgcaaattgctgtggcgtaccataacattcgggacatagacaaggctctgagcatttttaatgaacttcggaaacaagatccctataggatcgaaaacatggacaccttcagcaatctgctctacgtaagatccatgaaatccgagttgtcatatctggcacacaacctctgcgagatcgacaagtacagagtcgagacttgttgcgtcatcggcaactactacagtctgagaagtcagcacgagaaagctgctctgtattttcagcgggctcttaagctgaaccctcggtacttaggagcctggactctgatgggacatgaatatatggaaatgaaaaatacaagcgccgcaatacaggcataccgccatgccatcgaggtgaataagagggattatcgggcttggtacggattaggacaaacatacgaaatccttaagatgcccttttactgtctgtactattataggcgcgctcatcaactgaggcccaatgactcgcgtatgctggtagccctaggcgaatgctatgagaagctgaatcagcttgtggaggcaaaaaagtgctactggcgagcctacgcagtgggagatgtcgagaagatggcgttagtcaagttagctaaattacacgaacagcttaccgagtccgaacaggccgcacagtgctatatcaaatacattcaggacatctacagctgcggcgagattgtggaacatcttgaagagtctactgcattcagatatctcgcccaatactactttaaatgtaagctgtgggatgaggctagcacatgcgcccagaagtgctgcgccttcaacgacacccgtgaggaaggcaaggcccttctgcgccaaattctgcagttgcgcaaccagggtgagacccctactacagaggtccctgccccattcttcctgccagcttctctgtccgccaataatacccccactagaagagtgagccccctgaatctgagttccgtgaccccctag

SEQ ID NO: 148537 - DNA, 1079 bp, Artificial Sequence
  derived and/or modified sequence
atgattggctggagtggcccgagtcgggaaaatggctgcgagtacctccatggtcccggtggctgtgacggcggcagtggcgcctgtcctgtccataaacagcgatttctcagatttgcgggaaattaaaaagcaactgctgcttattgcgggccttacccgggagcggggcctactacacagtagcaaatggtcggcggagttggctttctctctccctgcattgcctctggccgagctgcaaccgcctccgcctattacagaggaagatgcccaggatatggatgcctataccctggccaaggcctactttgacgttaaagagtatgatcgggcagcacatttcctgcatggctgcaatagcaagaaagcctattttctgtatatgtattccagatatctggtgagggccattttaaaatgtcattctgcctttagtgaaacatccatatttagaaccaatggaaaagttaaatcttttaaatagcttagcagtgggccactgaatgaatgtactttatacatagcaataataaaaaaaagatatcataaataaagttaaaaaggatggtagagaagaaaatattcttaggaatgactaacaggataagtaacaacctgattatttatttactttaggttatataaggttcttcatgcctgtgaattaatattattgtgtaagaattaagttaaaaagcctgggctgacttttaaatttataaattcatttatcatgtttatagtatatttattgtttttctttcatggctattaaaaagtatgactgtaaaggacaatgcaagtaaaccaacttaatactgtattgaataataagtacaatttattattttactttgaaacattatgaatttactttcctactttttcttagttgttatctatataaattgattaaaaaaacattttatgtacttctcatttcctagtacaggttgagtatcccttatttgaagtgcttgggaccaaaagtgtttcagatttcagatttttttcagattttggtatatttgcattatacttactggttgaaataaaaaatgctgcagtgagtgtca

SEQ ID NO: 148538 - DNA, 3153 bp, Artificial Sequence
  derived and/or modified sequence
atgattggctggagtggcccgagtcgggaaaatggctgcgagtacctccatggtcccggtggctgtgacggcggcagtggcgcctgtcctgtccataaacagcgatttctcagatttgcgggaaattaaaaagcaactgctgcttattgcgggccttacccgggagcggggcctactacacagtagcaaatggtcggcggagttggctttctctctccctgcattgcctctggccgagctgcaaccgcctccgcctattacagaggaagatgcccaggatatggatgcctataccctggccaaggcctactttgacgttaaagagtatgatcgggcagcacatttcctgcatggctgcaatagcaagaaagcctattttctgtatatgtattccagatatctgtctggagaaaaaaagaaggacgatgaaacagttgatagcttaggccccctggaaaaaggacaagtgaaaaatgaggcgcttagagaattgagagtggagctcagcaaaaaacaccaagctcgagaacttgatggatttggactttatctgtatggtgtggtgcttcgaaaactggacttggttaaagaggccattgatgtgtttgtggaagctactcatgttttgcccttgcattggggagcctggttagaactctgtaacctgatcacagacaaagagatgctgaagttcctgtctttgccagacacctggatgaaagagttttttctggctcatatatacacagagttgcagttgatagaggaggccctgcaaaagtatcagaatctcattgatgtgggcttctctaagagctcgtatattgtttcccaaattgcagttgcctatcacaatatcagagatattgacaaagccctctccatttttaatgagctaaggaaacaagacccttacaggattgaaaatatggacacattctccaaccttctttatgtcaggagcatgaaatcggagttgagttatctggctcataacctctgtgagattgataaatatcgtgtagaaacgtgctgtgtaattggcaattattacagtttacgttctcagcatgagaaagcagccttatatttccagagagccctgaaattaaatcctcggtatcttggtgcctggacactaatgggacatgagtacatggagatgaagaacacgtctgctgctatccaggcttatagacatgccattgaggtcaacaaacgggactacagagcttggtatggcctcgggcagacctatgaaatccttaagatgccattttactgcctttattattatagacgggcccaccagcttcgacccaatgattctcgcatgctggttgctttaggagaatgttacgagaaactcaatcaactagtggaagccaaaaagtgttattggagagcttacgccgtgggagatgtggagaaaatggctctggtgaaactggcaaagcttcatgaacagttgactgagtcagaacaggctgcccagtgttacatcaaatatatccaagatatctattcctgtggggaaatagtagaacacttggaggaaagcactgcctttcgctatctggcccagtactattttaagtgcaaactgtgggatgaagcttcaacttgtgcacaaaagtgttgtgcatttaatgatacccgggaagaaggtaaggccttactccggcaaatcctacagcttcggaaccaaggcgagactcctaccaccgaggtgcctgctccctttttcctacctgcttcactctctgctaacaatacccccacacgcagagtttctccactcaacttgtcttctgtcacgccatagttggctactctcaagccagcacattgttagacccatcttaattaagccttacctccatgtaaagaacagcacgtctgttccaaggacctcagctcttcttgtttctacagatggcaacagctccatagggacagcttgtataattaccttcagaggccaactgacagaatcctggcaggaacagacattatcttgccagttagaagtacttctgtctcacttatgtccaaagagtggctatagatcttggccttcttccctgaatgctttttttttttggcccccaagaaagtcccttttatagcactttagcacaggcaatgctacaggaacaaagtttcaatgctgctgagagtgaaagaaaggaggaaagtctgccactctaccctgagctggcagtagggcactgagtaccctaggaagaagtcagagcaatggatacaaatgaccttgctcttggatttgctgagcatgatccctattctgatgtcagagattaggtttaaatggaatagagctatccatttgttcttactctctagggagacaatcttccaaaacagttttgggggggtcttctaaagctttcaaattggaagtaactttattcaactagagttgaataaaagaagggcaaaaataatctcacagagcttggaactgctgatagcccttactgagggcaaaagatggctatattgttagctatactcctaccaaagcaagcaaggagataggattatagataatttcacggacatttggaaataacattggtgattatacagacaagaataaactcacttcaagctggtctgttttaataaattttcaacgtaattgtctatttttttccctcccatctgcaacagaatacatttttttcagcctttatctagatgaggtaaagggaatcattcttatggtgctcttggagagtttcaggcctgtgcatgtgtgtacagcaggaggtaatatgctataatgtctgctgtaatatatttgcacagtagatgctatggatcattctgagctcagggtccagactttattcttattcccagaattttgtgttacgtttttacctcctaacatatgacacttcatcttatattaaggaaggtttagaatatctaatacgacttgaattcatttgttactaagccttctcaggcaagctgtatactagttactggtctccactgccatgccttttcaaggttcccatggtccagaatgatgtttgattcttaatttttctgtcccttttataatttgttttaatgattttgctacatttggaattcaataaaaaatgtgaacaataa

SEQ ID NO: 148539 - DNA, 456 bp, Artificial Sequence
  derived and/or modified sequence
atggccgccagcaccagcatggtgcccgtggccgtgaccgccgccgtggcccccgtgctgagcatcaacagcgacttcagcgacctgagagagatcaagaagcagctgctgctgatcgccggcctgaccagagagagaggcctgctgcacagcagcaagtggagcgccgagctggccttcagcctgcccgccctgcccctggccgagctgcagccccccccccccatcaccgaggaggacgcccaggacatggacgcctacaccctggccaaggcctacttcgacgtgaaggagtacgacagagccgcccacttcctgcacggctgcaacagcaagaaggcctacttcctgtacatgtacagcagatacctggtgagagccatcctgaagtgccacagcgccttcagcgagaccagcatcttcagaaccaacggcaaggtgaagagcttcaagtag

SEQ ID NO: 148540 - DNA, 1794 bp, Artificial Sequence
  derived and/or modified sequence
atggccgccagcaccagcatggtgcccgtggccgtgaccgccgccgtggcccccgtgctgagcatcaacagcgacttcagcgacctgagagagatcaagaagcagctgctgctgatcgccggcctgaccagagagagaggcctgctgcacagcagcaagtggagcgccgagctggccttcagcctgcccgccctgcccctggccgagctgcagccccccccccccatcaccgaggaggacgcccaggacatggacgcctacaccctggccaaggcctacttcgacgtgaaggagtacgacagagccgcccacttcctgcacggctgcaacagcaagaaggcctacttcctgtacatgtacagcagatacctgagcggcgagaagaagaaggacgacgagaccgtggacagcctgggccccctggagaagggccaggtgaagaacgaggccctgagagagctgagagtggagctgagcaagaagcaccaggccagagagctggacggcttcggcctgtacctgtacggcgtggtgctgagaaagctggacctggtgaaggaggccatcgacgtgttcgtggaggccacccacgtgctgcccctgcactggggcgcctggctggagctgtgcaacctgatcaccgacaaggagatgctgaagttcctgagcctgcccgacacctggatgaaggagttcttcctggcccacatctacaccgagctgcagctgatcgaggaggccctgcagaagtaccagaacctgatcgacgtgggcttcagcaagagcagctacatcgtgagccagatcgccgtggcctaccacaacatcagagacatcgacaaggccctgagcatcttcaacgagctgagaaagcaggacccctacagaatcgagaacatggacaccttcagcaacctgctgtacgtgagaagcatgaagagcgagctgagctacctggcccacaacctgtgcgagatcgacaagtacagagtggagacctgctgcgtgatcggcaactactacagcctgagaagccagcacgagaaggccgccctgtacttccagagagccctgaagctgaaccccagatacctgggcgcctggaccctgatgggccacgagtacatggagatgaagaacaccagcgccgccatccaggcctacagacacgccatcgaggtgaacaagagagactacagagcctggtacggcctgggccagacctacgagatcctgaagatgcccttctactgcctgtactactacagaagagcccaccagctgagacccaacgacagcagaatgctggtggccctgggcgagtgctacgagaagctgaaccagctggtggaggccaagaagtgctactggagagcctacgccgtgggcgacgtggagaagatggccctggtgaagctggccaagctgcacgagcagctgaccgagagcgagcaggccgcccagtgctacatcaagtacatccaggacatctacagctgcggcgagatcgtggagcacctggaggagagcaccgccttcagatacctggcccagtactacttcaagtgcaagctgtgggacgaggccagcacctgcgcccagaagtgctgcgccttcaacgacaccagagaggagggcaaggccctgctgagacagatcctgcagctgagaaaccagggcgagacccccaccaccgaggtgcccgcccccttcttcctgcccgccagcctgagcgccaacaacacccccaccagaagagtgagccccctgaacctgagcagcgtgaccccctag

SEQ ID NO: 148541 - protein, 216 aa, Artificial Sequence
  derived and/or modified sequence
MGTRDDEYDYLFKVVLIGDSGVGKSNLLSRFTRNEFNLESKSTIGVEFATRSIQVDGKTIKAQIWDTAGQERYRAITSAYYRGAVGALLVYDIAKHLTYENVERWLKELRDHADSNIVIMLVGNKSDLRHLRAVPTDEARAFAEKNGLSFIETSALDSTNVEAAFQTILTEIYRIVSQKQMSDRRENDMSPSNNVVPIHVPPTTENKPKVQCCQNI

SEQ ID NO: 148542 - DNA, 651 bp, Artificial Sequence
  derived and/or modified sequence
atgggaactagagatgatgagtacgattacctctttaaagtggttctgataggggatagtggcgtgggcaagagcaatttactttccaggtttaccagaaacgaattcaacctagagagtaagtccacaattggtgtggagttcgccaccaggtcaatccaagtggacggaaagacaatcaaagcccagatctgggataccgccgggcaggagaggtatcgcgcgatcacatcagcatattatagaggtgccgtcggagccctgctggtatacgacatcgccaagcatctgacgtatgaaaacgtagagcggtggctcaaagaattgagggaccacgcggatagcaatatcgtcatcatgctggtcggtaacaagtcagatctccggcacctccgtgccgtccccacagacgaagcccgcgcctttgccgaaaagaatggcctctcgtttattgaaactagcgcattggactccacgaacgttgaggcagccttccaaacgattttaaccgagatttatagaattgtcagccagaagcagatgtccgatagacgggaaaatgatatgagcccatcaaataatgttgtacctatccacgtccctccgaccactgagaacaaaccaaaggtgcagtgctgccagaacatttag

SEQ ID NO: 148543 - DNA, 651 bp, Artificial Sequence
  derived and/or modified sequence
atgggcaccagagatgatgaatatgactacctgttcaaggtggtgctgattggagacagcggcgtgggcaagagcaacctgctgagccgcttcaccagaaatgagttcaacctggagagcaagagcaccatcggcgtggagtttgccaccaggagcatccaggtggatggcaagaccatcaaggcccagatctgggacacagctggccaggagcgctaccgggccatcaccagcgcctactacagaggagctgtgggcgccctgctggtgtatgacatcgccaagcacctgacctatgaaaatgtggagcgctggctgaaggagctgcgggaccatgctgacagcaacatcgtcatcatgctggtgggcaacaagagtgacctgcggcacctgcgggctgtgcccacagatgaggcccgggcctttgctgagaagaatggcctgtccttcatcgagaccagcgccctggacagcaccaacgtggaggccgccttccagaccatcctgacagagatctacagaattgtgtcccagaagcagatgtctgaccggcgggagaatgacatgagccccagcaacaacgtggtgcccatccacgtgccccccaccacagagaacaagcccaaggtgcagtgctgccagaacatctag

SEQ ID NO: 148544 - DNA, 651 bp, Artificial Sequence
  derived and/or modified sequence
atgggcacccgggacgacgagtacgactacctgttcaaggtggtgctcatcggcgacagcggcgtaggaaaatccaatctgctctcccgcttcacccggaacgagtttaacctggagtctaaatcaaccattggcgtcgaattcgctacccggagtatccaggtcgatggcaagaccatcaaggcacagatttgggatacggctgggcaggaacggtacagggcaatcacgagtgcatattaccggggcgccgtgggggcgctcctcgtatacgatatcgccaagcacctgacttatgaaaatgtcgagcgctggctcaaagaattgcgtgatcacgccgattcgaacattgtcatcatgctggttggaaacaaatcagacctcagacaccttcgtgctgtcccaaccgacgaagcccgagcatttgcagagaagaatggcctgtcattcattgaaacatccgcattggacagtacaaacgtggaggcggcattccagaccatcctcacggagatctaccgcattgtgagccaaaaacagatgagtgaccgtagggagaatgatatgagtcccagtaataatgtggtgcccattcatgtccctccaacgaccgaaaacaagccaaaggtacaatgctgtcagaacatctag

SEQ ID NO: 148545 - DNA, 651 bp, Artificial Sequence
  derived and/or modified sequence
atggggacgcgcgatgatgagtacgattacctgttcaaagtggtactgatcggggattccggggttggaaagtcaaacctgttgtcccgattcacaaggaatgaattcaatctggagtctaagagcactattggagttgaatttgccaccagaagcattcaggtagacggtaagactatcaaagcacagatctgggatacagccggtcaggaaaggtacagggccattacatccgcctattaccgtggagccgtaggcgcactactggtctatgatattgctaagcatcttacatatgaaaacgtggagcgctggctcaaggagttgcgagaccatgcagattccaatattgtgatcatgctggtgggcaataagagcgacctcagacacttgagagcggtaccgactgacgaggccagggccttcgcagagaaaaatggtctgagctttatcgaaacttccgccctggatagtactaacgtggaggcagccttccagaccatcctgacagagatctacaggatcgtgagccagaagcagatgtctgacaggagggaaaacgatatgagtccatctaacaatgtggtgcctatccatgtgcctcccaccaccgaaaacaaaccaaaagtgcagtgctgtcagaacatctag

SEQ ID NO: 148546 - DNA, 4930 bp, Artificial Sequence
  derived and/or modified sequence
agcggcagggaggggctcttcacccagtccggcagttgaagctcggcgctcgggttacccctgcagcgacgccccctggtcccacagataccactgctgctcccgccctttcgctcctcggccgcgcaatgggcacccgcgacgacgagtacgactacctctttaaagttgtccttattggagattctggtgttggaaagagtaatctcctgtctcgatttactcgaaatgagtttaatctggaaagcaagagcaccattggagtagagtttgcaacaagaagcatccaggttgatggaaaaacaataaaggcacagatatgggacacagcagggcaagagcgatatcgagctataacatcagcatattatcgtggagctgtaggtgccttattggtttatgacattgctaaacatctcacatatgaaaatgtagagcgatggctgaaagaactgagagatcatgctgatagtaacattgttatcatgcttgtgggcaataagagtgatctacgtcatctcagggcagttcctacagatgaagcaagagcttttgcagaaaagaatggtttgtcattcattgaaacttcggccctagactctacaaatgtagaagctgcttttcagacaattttaacagagatttaccgcattgtttctcagaagcaaatgtcagacagacgcgaaaatgacatgtctccaagcaacaatgtggttcctattcatgttccaccaaccactgaaaacaagccaaaggtgcagtgctgtcagaacatctaaggcatttctcttctcccctagaaggctgtgtatagtccatttcccaggtctgagatttaaatatatttgtaattcttgtgtcacttttgtgttttattacttcatacttatgaatttttccatgtcctaagtcttttgattttagctttataaaatcatccacttgtcccgaatgactgcagctttttttcatgctatggcttcactagccttagtttaataaactgaatgtttggattcctcagttattgtttacttttcatcatggaagcctgtcactgtatgtaggacataatagaacttgatcacttgaagctcagacctattggtcttgatcaaatcaaactaagaagaccttagaaataagctaccattttgccacagagcagcttataggtaatacactcttctctcagtgcagtgtacatttccacaaatctaagaattgccctataaacatagcaggattttgagagcttgaaaattttccattattctggacatgaatttctaaaatgccttaataggtttatgtagttgagtaaattttgttttttaatttttgtaagcatcaaagttgattagagaggggggcactttttctggagaattctcttagtaaacacaaaagattgttacggtttcattagtagtatggttgtggggccataagttaaacagtgctgcctggtaggctgggaactgaagagacttgtggtattccatctcgggtgcctctgttggcaatgatcaggcagcccaaaagatttaaatgatctataataatttccaagcggtagattatgtggcattttattgctcaggcaataattggtttaatgctggtagtgtcaaattttgaagtgttaattttgtcttagaaccttccagtaagtgaaatacaacctagttttatcaccatatccaccagcaggcatggataattattttaacaatgctaatatttgagttttgcagtatattatagaatatagtccagttaaatctttggtttcagtatgtctgaagagtacagtgagaggttaatttctgctcaagtggtaccacttaaaggcatgtattcttttagtatgtaaaatgaaatagtaccttgagtttaaatagaatgcatttaggcattgtagagatctgaaatagttttcttccactacattgttgaaatcaatgaagcaattagtttctcattcagaaatgtgcacactaatatttagttttgctttctcgtggataatattaagcacttactctgcagtttcctggaagttgtgtcaactgcagtgatactattcaggatggtgggaaatccccaaaaatatgtatgtgtgggcttgcttagattactatatttcatagttaatcttttgtctcttgcggtgctcatgatgtgtggggcacacggaaggcattgctgtagtcagtcattttggttttcttctatagccattttattattttagtgtattagttatgaagataatattatctatttgtaaattgctactttgtattttatgcatgctctgtaatttgatttttttttagttattgatttggattatattcacattctaataaacagttatagggggattatttcttatgctgtcagattacatttttcctttgagtgctttgggtgcagccgtggaatcctgatgtaaaagcataggttcttgcattactgagtaaacattgaattgggagcatcagtgtgtgaattcagctttgattttagaactgcagttcaattatgctttccttggaaaaagtatgtccaaaaacattaggaaagtagtgtgtattttcatatataacagtgtcaccagacccaggaaaagaaaccatctctattttattgaaagttggtggtagattttttacaaagtaaggagaaaagagaaaaactaaatagtgaattgaaaatgaataaagtaaacttagaatttttacccaagtgtagacttaaatgttgctttgagtatggctggatcttgggagaattccaggaaatattaggtattagaaaatgactttgattgcatttcagcaggtgtctttattctgagtagtatcttaggagacaaactgtctcaagcaagaaacaataaatttttaaatattatgacagttcagggcttaaggcagtttagaagtattttgctacttgaccttgattttcagttattttaactttgaatttttttttttttttttgagacggagtcttgctctgttgcccaggctggagtacaatggcaccatctcagctcactgcaagctccacctccagggttcatgccattctcctgcctcagcctcccgagtagctgggattataggcgccagccaccacgactggctaattttttgtatttttagtagagacggggtttcaccatgttagccagggtggtctcgatctcctgacctggtgatacacccacctcggcctcccaaagtgctgggattaaaggcgtgagccaccgtgcctggccttgaatttttttttaacctgttatatagtctcctgaatagttagccatggtgccttgatttaatcttatgtcattgttctcaaatgccatgatttctctttaatagtagttgtcattatgtaagggtaagttattgcccatttaattgtaattataagaagaggtgccagctagtgaccttacatcagtgatcttttaagttctgaagggttctgcagaaaagttacacttcttgagtttgggttgcccatcagagctggtcacatttctttgatcattgaaaaaatgaatatcttaatttttgtctttgctgactggtatttataaaatacaaatgcttttagtgggttgagctgttgtgataatctcttccatctaccttagagaagaagctgtactatttagacagttttggccaacactagaagcaaaagaattcaaaggctgggtggatatttaagaacttattctaacctgtcaggtttcaatttgtggggcttggtttaacagaggaaaaaaatataaattgattttctgatgtctcacaaatatcacatacctggaaaaaaattaaaacaaaaaatgaattttgtaaaaggttatgtatgacttccatttgctctgtaaaaaaatgaacaaagattgtgaaaggatcctcttccaccacatcatttaatgggttagcggaacagatagggagctatgacactagcaccaaagagagatttttcttctggttgggtggtgctggtgccacgcccctttctgggatttgacaagtctttcccactcacctatacaatatgccaaatcaactggagttgtcattctaatgttttaaagaatgattgggttcccccaaactgtaggaggtcgatggtaacaataaagtgatacaaaatgcttatgtcattataatttatgtaagggagaccattaggctgagaatcaatatgattgaggttatctattctcctgaaaagtgaattggagaataaagaaagaatatttgaaaggatgttgtgtactaggcaatatactagcatgtattagaaaatacggtaaactgtgggttagaagagtgaaagtagctggtatgatagagcactggactgagtaacgaagagattctagtcatggctcttgtggtcatttcatttttgagcctcacattcttccaattaatgagggtaccagattaaataaactctggggattcatcccaattcgaactctgtaattctctgaatgaactctctcttcaattaaagccaaattattaacattttaactcaagtttaaatttaatagagaagtcaaaatgaggtatgcactttgtggaatgtttttggtcttatcacaataacctgattaaaatggtgcctttatttccatgtttactcctttaaataagatgaaagctttcagaacatttatttgcaaaatgactgtcaatatcaacaatatgcatcaaagtaccatatatgctaagggagaggagcacttgatgggctgctatgttaactgtaaattgagaactgcttgttttatggcttttgctgttaaaaaaaaactgctggcttttaatatgtactttaaaatatactcatgtctgggagagaacttttaaaaaca

SEQ ID NO: 148547 - DNA, 651 bp, Artificial Sequence
  derived and/or modified sequence
atgggcaccagagacgacgagtacgactacctgttcaaggtggtgctgatcggcgacagcggcgtgggcaagagcaacctgctgagcagattcaccagaaacgagttcaacctggagagcaagagcaccatcggcgtggagttcgccaccagaagcatccaggtggacggcaagaccatcaaggcccagatctgggacaccgccggccaggagagatacagagccatcaccagcgcctactacagaggcgccgtgggcgccctgctggtgtacgacatcgccaagcacctgacctacgagaacgtggagagatggctgaaggagctgagagaccacgccgacagcaacatcgtgatcatgctggtgggcaacaagagcgacctgagacacctgagagccgtgcccaccgacgaggccagagccttcgccgagaagaacggcctgagcttcatcgagaccagcgccctggacagcaccaacgtggaggccgccttccagaccatcctgaccgagatctacagaatcgtgagccagaagcagatgagcgacagaagagagaacgacatgagccccagcaacaacgtggtgcccatccacgtgccccccaccaccgagaacaagcccaaggtgcagtgctgccagaacatctag

SEQ ID NO: 148548 - protein, 233 aa, Artificial Sequence
  derived and/or modified sequence
MLKPSVTSAPTADMATLTVVQPLTLDRDVARAIELLEKLQESGEVPVHKLQSLKKVLQSEFCTAIREVYQYMHETITVNGCPEFRARATAKATVAAFAASEGHSHPRVVELPKTDEGLGFNVMGGKEQNSPIYISRIIPGGVAERHGGLKRGDQLLSVNGVSVEGEHHEKAVELLKAAKDSVKLVVRYTPKVLEEMEARFEKLRTARRRQQQQLLIQQQQQQQQQQTQQNHMS

SEQ ID NO: 148549 - DNA, 702 bp, Artificial Sequence
  derived and/or modified sequence
atgctgaagcccagcgtgaccagcgcccccaccgccgacatggccaccctgaccgtggtgcagcccctgaccctggacagagacgtggccagagccatcgagctgctggagaagctgcaggagagcggcgaggtgcccgtgcacaagctgcagagcctgaagaaggtgctgcagagcgagttctgcaccgccatcagagaggtgtaccagtacatgcacgagaccatcaccgtgaacggctgccccgagttcagagccagagccaccgccaaggccaccgtggccgccttcgccgccagcgagggccacagccaccccagagtggtggagctgcccaagaccgacgagggcctgggcttcaacgtgatgggcggcaaggagcagaacagccccatctacatcagcagaatcatccccggcggcgtggccgagagacacggcggcctgaagagaggcgaccagctgctgagcgtgaacggcgtgagcgtggagggcgagcaccacgagaaggccgtggagctgctgaaggccgccaaggacagcgtgaagctggtggtgagatacacccccaaggtgctggaggagatggaggccagattcgagaagctgagaaccgccagaagaagacagcagcagcagctgctgatccagcagcagcagcagcagcagcagcagcagacccagcagaaccacatgagctag

SEQ ID NO: 148550 - DNA, 702 bp, Artificial Sequence
  derived and/or modified sequence
atgctcaaaccaagcgtcacttccgcgcccacagctgacatggccacactcacagtcgtacagcccctcacacttgaccgggacgtggccagagccatcgagctcttggaaaagctccaggagtccggagaggtgcctgttcacaaactgcagtccctgaaaaaggtgttacagtctgaattttgtaccgcaatccgtgaagtgtatcaatatatgcatgagaccattacagtgaatggttgcccagaatttcgggctcgggcaactgccaaggccactgtagctgcatttgcagccagtgaggggcactcgcacccacgagtggtggagctgcctaagacagatgaggggctcggtttcaatgtgatgggcggtaaggaacaaaattctcctatatatatatctaggattatcccggggggcgtggccgagaggcatggcggtctgaagcggggtgaccagcttctgtccgtgaacggagtcagcgtggagggcgagcaccacgagaaggccgtggaattgctcaaggccgcgaaagatagcgtgaaactggtggtccggtacaccccaaaggtcctggaggaaatggaggctagatttgaaaaattgagaacagccagaagacgccagcagcaacagttgctgattcaacagcagcagcagcagcagcaacagcagactcagcaaaaccatatgtcctag

SEQ ID NO: 148551 - DNA, 6112 bp, Artificial Sequence
  derived and/or modified sequence
cggatacctgctcagctccgcaccgcaactgaagatctgccgccgcggaacagttgcgtctccatctggctaccaacccacccaagctttcttctccaccaccaccaccttccttccttccccctcctccccctcctttccgtcttccctctccacccccgcccccaatctcctcctttttttctcactacgagcggttgctgatgctgaagccgagcgtcacttcggctcccacggcagacatggcgacattgacagtggtccagccgctcaccctggacagagatgttgcaagagcaattgaattactggaaaaactacaggaatctggagaagtaccagtgcacaagctacaatccctcaaaaaagtgcttcagagtgagttttgtacagctattcgagaggtgtatcaatatatgcatgaaacgataactgttaatggctgtcccgaattccgtgcgagggcaacagcaaaggcaacagttgcagcttttgcagctagtgaaggccactcccaccctcgagtagttgaactgccaaagactgatgaaggccttggttttaatgtgatgggaggaaaggagcaaaattcccccatttatatctctcgcataattcctggaggggtggctgaaagacacggaggcctcaaaagaggagaccagctgctatcagtgaacggagtgagtgtggaaggagaacaccatgagaaagctgtggaactactcaaggctgctaaagacagcgtcaagctggtggtgcgatacaccccaaaagttctggaagaaatggaggctcgctttgaaaagctacgaacagccaggcgtcggcagcagcagcaattgctaattcagcagcagcaacagcagcagcagcaacaaacacaacaaaaccacatgtcataggcccttgagggaaagctacttgatcaaacatccgatagtcacaaatttgaaaccgtgcttcagaatcccagcacatagtaaaagacaacactgataattatacctgtcaagaagctgtgaacacatggtgtataaattctttaccaaggcaactcaacaccttctttctctgggcttgaaccgccactgctcacgtgggctttacatacattgaccttccattcactgcagtgggaattctcagtgtgcagagggagaggttttctagtctgcaaactgaaacagtgtaagaagaataaagtctatgacttttaaataaatcaccagggccaagattgagtgaatcttgggtccatagcttttccagatattagcaaacccctcattaggctataattcaaactgcatcagttcaaagtgaaacctacacattgctccttaccctcacctgctccacaatccatagtgctgagttgtctgaattggaattccagttaattgcaagttcaacctgttttcctcttgaaaatcgcaaggtatcatactatatttatattttcttcaggttctagaagcaatcggctttttcttttgtttccatgaattttattatgcattaatagaatggaccaattttagctcaacttttagtttgttagaagcaagtgtaggaactctagcactgtagtttttaattattgcttgtatctattattattaattccaacagagtataatgtatatttattctataaaatatatattatcagagtgcatttgttacaacttaggttcttttcttaccaagtattaagaatctagtaagagaatactagcaaaggacctagccctgtgaacagattctcgtatgttatatacataaacccactctcaatattttttgagttttatactttttgattgataaacactgaagaaatctaaactctactcacactgatgtgctgtcatagaagcctatttcatattttaaagcttagcaaaactaaattatatgtgcatatatattcaaatatttgtgtcacacaaagtttaggtcaatttccccaaatataaaccagatatttttggcactctcagataaacaagtattatttctcttataattgggcaggtggaaaccagtgatatcaatattgtgaatggcagatgctgcttcctctagaaaaataaaataaaatcaccaactttaatatattcccataggtaaatagacaatgagatatcatttttcagaaaatatcattcactggaaaataatctgttataactacatttacaggtcataatttttggtttatggtaaatctaggcacctaagtctgattttactttatgaaataaataggaagcaataattgtttgggcatttgaataccttaagcacataaatgaacctaagaaaagaataattgcttagttgaagtattcaaaatagatcagtaaaccacaggcaaatatttgaatgttcccttttctcaaatacagaaattgattccccaagatacaatacaatttgacacttcagataatcccccaaaatagaaatgtatgaagctcagtttagactgtcttcttgaaaataaaacaaaaccaatcaaaactacccagcacattttattatgccctgttgggtgatagtattgtcaataccaggttttccctgctcttcacaatgcatccctcaccagaggaaaaacagcaagaaaactaggacatttgctaatttcaacaatacacccctgtgataacagattcccatccttgaatacatatcattttttactagagagaacgggggtggtgaggtgggggcagttaggaccctgtatgttatgtaaaatagatttacaaaaaggacaagcatgataaaagggaatgaatggagacgatgtattattcagtttgaaagagatagttcacatttttataagaaaaatttaataaaacatatattttagttatcatttaacaaagatatattaaagctattcaggcaatgccacaggattctcatgaagggaaatcactgaacccttgtcatgagaaaatggtcatttcaacacatttcaatacattgtataaatttggagcttaaggtgagtgagtatgttttcacttagtcataaatgtttggtcaaaattaaagttatcatatggtttcacatcaatacaaatattgtcacagtgttacagaaacaactatcaaatggtaagatagtttacatttgtgttttctagaaacctttgtatttatgcttcatttggttaatgttaagtgctgataaaggcataccagattgtttgtcaaagtaaagaagcaatccatcacacctaggacatctaaggatggattatacgtcagagtggtctcatatacaaatgaccattttccttcagtaaaatcttgttggttgaaatgtaagtcttttcctaaagttttaatcagaggtagccatcactaagacttaagccacctgtggttctcttaagtttcactgaagccagaagaaggaaattaccacaacttgtattatactaattatcttcattattaacgatcatattagagccactgacatgtcccaaattatattaaaataaaaacctgcattgctctgacatgaagctcaattcaatgtaataaacaaattaggtattaaacgttataatttaaaaaacttctacgatatcaccagaaatcctggtgaaatttaattttttcccttttttaggtcagtggccggtgggatagatttttctaaactttttcctgctatgattttgaaggcaaatacatagagcacagttcagtaaaagagtttccaagccttttcactggagcatttacattttgattctgttgtcatttgaaatagaacatctgcagggagataatgagcttaagttacaattgactttggaaagaataacagacttttgtgtttcctcaatcatgtagtcaatagggaattctccagttatgtgaacaatcacagtcttttaagacaatacttagatctaaatgcaaaatctagcatgcagaggctttttaaggattttagactgtctccaaagaacttggctcgagatggattacacagatttacaaatgcagttttcaactgtgacatcaaactgatcttatctcatttcatgttactcaactgtgcccgtaggaccccaagaggtggaatattttgtctacattattttaaacatctatagatatgtgtggatgtgtgaataatgcctaaatttctcatcttttaactagtttgtttttatcatacagacacagcctgttcataagaccagctttagacaacttagaactcaatgctctgaagattcagggaggccaacatagaaaaagatcttccaaaatatggggtggtccaacccatctcatccctctctagctggaaaactatagagaaagggctgtgactgccttgaccactgcctggcacaatgtaggcactcggtatttgttggatgaataagtggctgaatcagtgaatagacaaaaaacatggattttgccttctgaaaatctcacaaattttaccagcttatattatactgattgtcactatgatttctaagtttcatggttagaaccatattttgagtctatataaaaactttttagatgtatgaatttgaaatttcattaattactttaaaggcttcaaagatttgaggacatttgaacagtggataaggaacaatgtttggggatacagagtttttatgctgagttgaactcaacctttctagttctttatacaagcttcctgaattatctggcaggaatgattcaaacataaaaccccatttttaaattttataaaagatattttcatttttatataaaaagatcatcaggcatattatcccctttgatatttattaacaaccattctctaagaaattcataataattggagacaccatccctaaatctcttcctattttcaaaagatcatttatcctttcatatttgattcctggaatacactaagctgaagtttaatcacatacttactcagatgtttccatgtgtttattcatttaacaaatacttattgtgtacctagtgcatgctaggttctggaaatgcaacagcaaacaagacagacacaatccctcttggaggttactgtgagaaactctccaacatttactctagcaataactagagagtttactgtccattgggtcctcttcacacctgatagaaaaaataaaattcctcaccccatggaagtcatgaaatactccctgcacagatttgtgtgagcttgcttttctaaaaccactgctcaaaaatgctgcttagtttatctataaaccacggttataccccagtgaggtaggtaagtaatttattcataactaacatttatgcagctctattttctagccactgtgctgagtgcttttatggactatctcaccaaatcccttcaacaactctattcagtaggttccattttatagatacaaaaactgaagcacagatatattatgtgacttgtccaaggtcacacagctagcaggtggaactgggatttgaacccatgcaatctgacacaagagttcatgtgtctaatcattatctgtggtttgggggacaccattacattaaaatgaatgagtcactaagtgagtcactgtatataaaatacttggaaattgtaaagtaatatacaaaagatattaacaaagtattattcatggtaaacaaatcacatcagtagcaaacacagggtgggaactcaatcttatgttatagcttactcttaagaagaatatgtgaagccaggaacatggttaaaggtacagaccagaaaatttctgacatgtgataaatatttcagtgacttttcagatttatttcttgttagccgctgtgtctatttggtgctacaaaaactgaaagaaacaaaatccctgatgtaagggcttataataaatacacagtttggagatgaactaaggatattttacatttacgggaaaggattggacaatagtatcattttctcaccatttgcatgtacatcatgtctttccaattgttttcattatttttctgaaagagctgcaaaattgtgcagtggttcaacctgaccaaagtggtattatgctgctgggaagtaaaagtattagacaccaaa

SEQ ID NO: 148552 - DNA, 702 bp, Artificial Sequence
  derived and/or modified sequence
atgctgaagcccagcgtgaccagcgcccccacagctgacatggccaccctgactgtggtgcagcccctgaccctggacagagatgtggcccgggccatcgagctgctggagaagctgcaggagagcggggaggtgcctgtgcacaagctgcagagcctgaagaaggtgctgcagagcgagttctgcacagccatccgggaggtgtaccagtacatgcatgagaccatcaccgtgaatggctgcccagagttccgggcccgggccacagccaaggccaccgtggccgcctttgctgccagcgagggccacagccacccccgggtggtggagctgcccaagacagatgagggcctgggcttcaacgtgatgggcggcaaggagcagaacagccccatctacatcagccgcatcatccctggaggagtggccgagcggcacggcggcctgaagagaggagaccagctgctgtctgtgaatggagtgtctgtggagggggagcaccacgagaaggctgtggagctgctgaaggccgccaaggacagcgtgaagctggtggtgcgctacacccccaaggtgctggaggagatggaggccaggtttgagaagctgaggacagcccggcggcggcagcagcagcagctgctgatccagcagcagcagcagcagcagcagcagcagacccagcagaaccacatgtcctag

SEQ ID NO: 148553 - DNA, 702 bp, Artificial Sequence
  derived and/or modified sequence
atgctgaagcccagcgtgaccagcgcccccaccgccgacatggccacactgactgttgtccagccccttacgctggaccgagatgtggctcgcgctatcgaattacttgagaaactgcaggaaagtggagaagtcccagtccacaagctgcagagcctgaagaaagtgctgcagtccgagttctgcacagcaatccgcgaagtgtatcagtacatgcacgaaactattacagtcaatggctgccctgaatttcgagctcgggctaccgcaaaggccaccgtcgccgcctttgctgcttccgaaggtcatagccatccaagagtggtggaacttcccaagacagacgagggactaggcttcaatgtgatgggggggaaggaacagaattcaccaatttatataagtcggattataccagggggagtagccgagcggcatggcggactgaagcgcggcgatcagcttctgtccgtgaatggagtctccgtggagggtgaacaccatgagaaagcggtcgagctccttaaggccgcaaaggattccgtgaagctcgtggtcaggtatacccctaaggttctggaagagatggaggctcgcttcgaaaaacttaggaccgcccgcagaaggcagcagcagcaacttttaattcagcagcaacaacagcagcagcaacaacagacccagcagaaccacatgtcttag

SEQ ID NO: 148554 - DNA, 702 bp, Artificial Sequence
  derived and/or modified sequence
atgcttaaaccaagcgttacaagcgctccaacggcagacatggccacactaacggtggtccagccgctgaccctcgatcgggacgtggccagagctatcgaactgttagagaaactgcaggagtccggggaagtcccggttcacaagcttcagtctcttaaaaaagtcctgcagtcagaattttgcaccgctatccgagaggtatatcagtatatgcacgagactatcaccgttaatggttgccctgagtttagggccagggcgactgcaaaagctacagtagctgccttcgccgctagtgaagggcactcacatcccagagtggtcgagttaccaaaaacagatgagggcttgggattcaatgtaatgggaggtaaagaacagaacagtccgatctatatctcccggatcattcccggaggtgtggccgaacgacatggtgggcttaaaaggggcgaccagctgctctcagtgaacggggtgagcgtggagggcgagcaccatgaaaaggccgttgaactgttgaaagcagcaaaggattctgtcaagctggtggttcgctacaccccaaaggtgctggaggagatggaagctcggttcgaaaagctccgtacagctagaaggcgccagcagcagcagcttctgatccagcagcagcagcagcaacaacagcaacagacacagcagaatcacatgtcatag

SEQ ID NO: 148555 - protein, 520 aa, Artificial Sequence
  derived and/or modified sequence
MVTSSFPISVAVFALITLQVGTQDSFIAAVYEHAVILPNKTETPVSQEDALNLMNENIDILETAIKQAAEQGARIIVTPEDALYGWKFTRETVFPYLEDIPDPQVNWIPCQDPHRFGHTPVQARLSCLAKDNSIYVLANLGDKKPCNSRDSTCPPNGYFQYNTNVVYNTEGKLVARYHKYHLYSEPQFNVPEKPELVTFNTAFGRFGIFTCFDIFFYDPGVTLVKDFHVDTILFPTAWMNVLPLLTAIEFHSAWAMGMGVNLLVANTHHVSLNMTGSGIYAPNGPKVYHYDMKTELGKLLLSEVDSHPLSSLAYPTAVNWNAYATTIKPFPVQKNTFRGFISRDGFNFTELFENAGNLTVCQKELCCHLSYRMLQKEENEVYVLGAFTGLHGRRRREYWQVCTLLKCKTTNLTTCGRPVETASTRFEMFSLSGTFGTEYVFPEVLLTEIHLSPGKFEVLKDGRLVNKNGSSGPILTVSLFGRWYTKDSLYSSCGTSNSAITYLLIFILLMIIALQNIVML

SEQ ID NO: 148556 - protein, 467 aa, Artificial Sequence
  derived and/or modified sequence
MNENIDILETAIKQAAEQGARIIVTPEDALYGWKFTRETVFPYLEDIPDPQVNWIPCQDPHRFGHTPVQARLSCLAKDNSIYVLANLGDKKPCNSRDSTCPPNGYFQYNTNVVYNTEGKLVARYHKYHLYSEPQFNVPEKPELVTFNTAFGRFGIFTCFDIFFYDPGVTLVKDFHVDTILFPTAWMNVLPLLTAIEFHSAWAMGMGVNLLVANTHHVSLNMTGSGIYAPNGPKVYHYDMKTELGKLLLSEVDSHPLSSLAYPTAVNWNAYATTIKPFPVQKNTFRGFISRDGFNFTELFENAGNLTVCQKELCCHLSYRMLQKEENEVYVLGAFTGLHGRRRREYWQVCTLLKCKTTNLTTCGRPVETASTRFEMFSLSGTFGTEYVFPEVLLTEIHLSPGKFEVLKDGRLVNKNGSSGPILTVSLFGRWYTKDSLYSSCGTSNSAITYLLIFILLMIIALQNIVML

SEQ ID NO: 148557 - protein, 500 aa, Artificial Sequence
  derived and/or modified sequence
MIISHFPKCVAVFALLALSVGALDTFIAAVYEHAVILPNRTETPVSKEEALLLMNKNIDVLEKAVKLAAKQGAHIIVTPEDGIYGWIFTRESIYPYLEDIPDPGVNWIPCRDPWRFGNTPVQQRLSCLAKDNSIYVVANIGDKKPCNASDSQCPPDGRYQYNTDVVFDSQGKLLARYHKYNLFAPEIQFDFPKDSELVTFDTPFGKFGIFTCFDIFSHDPAVVVVDESIDSILYPTAWYNTLPLLSAVPFHSAWAKAMGVNLLAANTHNTSMHMTGSGIYAPEAVKVYHYDMETESGQLLLSELKSRPRREPTYPAAVDWHAYASSVKPFSSEQSDFLGMIYFDEFTFTKLKRNTGNYTACQKDLCCHLTYKMSEKRTDEIYALGAFDGLHTVEGQYYLQICALLKCQTTDLETCGEPVGSAFTKFEDFSLSGTFGTRYVFPQIILSGSQLAPERHYEISRDGRLRSRSGAPLPVLVMALYGRVFEKDPPRLGQGSGKFQ

SEQ ID NO: 148558 - protein, 274 aa, Artificial Sequence
  derived and/or modified sequence
MIISHFPKCVAVFALLALSVGALDTFIAAVYEHAVILPNRTETPVSKEEALLLMNKNIDVLEKAVKLAAKQGAHIIVTPEDGIYGWIFTRESIYPYLEDIPDPGVNWIPCRDPWRFGNTPVQQRLSCLAKDNSIYVVANIGDKKPCNASDSQCPPDGRYQYNTDVVFDSQGKLLARYHKYNLFAPEIQFDFPKDSELVTFDTPFGKFGIFTCFDIFSHDPAVVVVDEFQLTAFSTPQHGTTRCPSSRLFPSIQHGPRPWESIYLLQIPTTPACT

SEQ ID NO: 148559 - DNA, 1563 bp, Artificial Sequence
  derived and/or modified sequence
atggtgaccagcagcttccccatcagcgtggccgtgttcgccctgatcaccctgcaggtgggcacccaggacagcttcatcgccgccgtgtacgagcacgccgtgatcctgcccaacaagaccgagacccccgtgagccaggaggacgccctgaacctgatgaacgagaacatcgacatcctggagaccgccatcaagcaggccgccgagcagggcgccagaatcatcgtgacccccgaggacgccctgtacggctggaagttcaccagagagaccgtgttcccctacctggaggacatccccgacccccaggtgaactggatcccctgccaggacccccacagattcggccacacccccgtgcaggccagactgagctgcctggccaaggacaacagcatctacgtgctggccaacctgggcgacaagaagccctgcaacagcagagacagcacctgcccccccaacggctacttccagtacaacaccaacgtggtgtacaacaccgagggcaagctggtggccagataccacaagtaccacctgtacagcgagccccagttcaacgtgcccgagaagcccgagctggtgaccttcaacaccgccttcggcagattcggcatcttcacctgcttcgacatcttcttctacgaccccggcgtgaccctggtgaaggacttccacgtggacaccatcctgttccccaccgcctggatgaacgtgctgcccctgctgaccgccatcgagttccacagcgcctgggccatgggcatgggcgtgaacctgctggtggccaacacccaccacgtgagcctgaacatgaccggcagcggcatctacgcccccaacggccccaaggtgtaccactacgacatgaagaccgagctgggcaagctgctgctgagcgaggtggacagccaccccctgagcagcctggcctaccccaccgccgtgaactggaacgcctacgccaccaccatcaagcccttccccgtgcagaagaacaccttcagaggcttcatcagcagagacggcttcaacttcaccgagctgttcgagaacgccggcaacctgaccgtgtgccagaaggagctgtgctgccacctgagctacagaatgctgcagaaggaggagaacgaggtgtacgtgctgggcgccttcaccggcctgcacggcagaagaagaagagagtactggcaggtgtgcaccctgctgaagtgcaagaccaccaacctgaccacctgcggcagacccgtggagaccgccagcaccagattcgagatgttcagcctgagcggcaccttcggcaccgagtacgtgttccccgaggtgctgctgaccgagatccacctgagccccggcaagttcgaggtgctgaaggacggcagactggtgaacaagaacggcagcagcggccccatcctgaccgtgagcctgttcggcagatggtacaccaaggacagcctgtacagcagctgcggcaccagcaacagcgccatcacctacctgctgatcttcatcctgctgatgatcatcgccctgcagaacatcgtgatgctgtag

SEQ ID NO: 148560 - DNA, 1503 bp, Artificial Sequence
  derived and/or modified sequence
atgatcatcagccacttccccaagtgcgtggccgtgttcgccctgctggccctgagcgtgggcgccctggacaccttcatcgccgccgtgtacgagcacgccgtgatcctgcccaacagaaccgagacccccgtgagcaaggaggaggccctgctgctgatgaacaagaacatcgacgtgctggagaaggccgtgaagctggccgccaagcagggcgcccacatcatcgtgacccccgaggacggcatctacggctggatcttcaccagagagagcatctacccctacctggaggacatccccgaccccggcgtgaactggatcccctgcagagacccctggagattcggcaacacccccgtgcagcagagactgagctgcctggccaaggacaacagcatctacgtggtggccaacatcggcgacaagaagccctgcaacgccagcgacagccagtgcccccccgacggcagataccagtacaacaccgacgtggtgttcgacagccagggcaagctgctggccagataccacaagtacaacctgttcgcccccgagatccagttcgacttccccaaggacagcgagctggtgaccttcgacacccccttcggcaagttcggcatcttcacctgcttcgacatcttcagccacgaccccgccgtggtggtggtggacgagagcatcgacagcatcctgtaccccaccgcctggtacaacaccctgcccctgctgagcgccgtgcccttccacagcgcctgggccaaggccatgggcgtgaacctgctggccgccaacacccacaacaccagcatgcacatgaccggcagcggcatctacgcccccgaggccgtgaaggtgtaccactacgacatggagaccgagagcggccagctgctgctgagcgagctgaagagcagacccagaagagagcccacctaccccgccgccgtggactggcacgcctacgccagcagcgtgaagcccttcagcagcgagcagagcgacttcctgggcatgatctacttcgacgagttcaccttcaccaagctgaagagaaacaccggcaactacaccgcctgccagaaggacctgtgctgccacctgacctacaagatgagcgagaagagaaccgacgagatctacgccctgggcgccttcgacggcctgcacaccgtggagggccagtactacctgcagatctgcgccctgctgaagtgccagaccaccgacctggagacctgcggcgagcccgtgggcagcgccttcaccaagttcgaggacttcagcctgagcggcaccttcggcaccagatacgtgttcccccagatcatcctgagcggcagccagctggcccccgagagacactacgagatcagcagagacggcagactgagaagcagaagcggcgcccccctgcccgtgctggtgatggccctgtacggcagagtgttcgagaaggacccccccagactgggccagggcagcggcaagttccagtag

SEQ ID NO: 148561 - DNA, 1563 bp, Artificial Sequence
  derived and/or modified sequence
atggtcaccagtagctttcctatctcagtggccgtcttcgcactgattacactccaggttggtacccaagattcgttcatagccgctgtttatgagcacgctgtcatccttccaaacaagaccgagactccagtaagccaggaggatgccttgaaccttatgaatgaaaatatagacatcctagagacggctatcaaacaagcagccgaacagggagcacgcatcatagtcactcctgaagatgctctgtacgggtggaaatttactagggaaactgtgtttccctatctcgaagatatcccagacccgcaggtgaattggattccttgccaggatccacacagattcggccacacccccgttcaggcccgactgagctgtctagcaaaagacaacagtatttacgtcctagctaacctgggcgataagaaaccatgcaacagtcgcgacagcacatgcccccccaacggctattttcagtataacaccaacgtggtgtataacaccgaagggaagctggtggcccgctatcacaagtatcacctgtactccgaacctcagtttaacgtgcctgagaagcctgaactcgtgaccttcaacactgctttcggcaggttcggcatctttacgtgctttgacatttttttctacgacccaggcgtgactctcgtgaaggactttcacgttgacacaattctgtttccgacagcttggatgaacgttcttcccctgctgacagccattgagtttcattccgcctgggccatgggcatgggggtgaatctgctggtggccaatacccatcatgtctcattgaatatgaccgggagtggtatctacgcgcctaatggtcctaaggtgtaccactacgatatgaagactgagctcggaaagctccttctgagcgaagtggactcgcatcctctcagtagtctggcatatcccacggcggttaactggaacgcctacgccacaactatcaagcccttcccagtccagaagaatacgttccgcggcttcatttctagagacggttttaatttcaccgaattgttcgagaacgctggcaacctaactgtgtgccagaaggagttgtgttgtcacctgagttaccgcatgcttcagaaggaagagaatgaggtatatgtgctcggtgcattcaccggactccacgggagacgaagacgagaatattggcaagtgtgcactttgctcaagtgtaagacgacaaatctgaccacgtgtggcagacctgtggagacggcaagcacacgttttgagatgtttagcctgtcagggacatttgggacggagtacgtgttcccagaggtcctactgacagagattcacctgtcccctggaaaatttgaggtgttgaaagacgggcgtctggttaataaaaatggttcatctggacccatcctcacagtatctttatttgggaggtggtacacaaaagactcactctactcttcatgtgggacctcgaacagcgccatcacttatttgttaatctttatcctccttatgataattgccctgcagaacatcgtgatgctctag

SEQ ID NO: 148562 - DNA, 1503 bp, Artificial Sequence
  derived and/or modified sequence
atgatcatttcacactttccaaagtgtgtggcagtgttcgctctgttagctcttagtgtgggggccctggatacttttatcgcagcagtctatgagcacgccgtaattctgcccaatagaactgagacacctgtgtcaaaggaagaggcgctgcttttaatgaacaaaaacatcgatgttctggaaaaagcagtcaaactcgcggcaaaacagggcgcacacatcatcgtcaccccagaagatggaatttacggatggatattcacccgcgaatcaatttatccctacttggaagacattccagatcctggagtgaactggatcccatgccgtgacccatggcgatttggaaatacacctgtccagcagagacttagttgcttagccaaagacaacagtatttatgttgtggctaatatcggtgacaaaaaaccatgtaacgcttctgactctcaatgccccccggacggccgctatcaatataacaccgacgtggttttcgactctcagggtaaattgcttgcgcgctaccacaaatacaaccttttcgcccctgagatccaattcgactttccaaaagactcagaactcgtgacgttcgacacaccattcggcaagtttgggatatttacatgttttgatatcttttcccatgatcctgcagtcgtggtggtcgatgaaagtatcgactcaattttgtaccccactgcctggtacaatacactgccccttttgtctgctgtgcccttccactcagcatgggccaaggcaatgggcgtgaacctgcttgcggctaacactcacaacacctctatgcatatgacgggtagcggcatatacgctccagaggccgtgaaagtttaccactacgatatggaaacagaatcgggacaactactgctgtcggagctcaagtcccgaccccggcgtgaacccacttatcccgccgcagtggactggcacgcttatgcaagtagtgtaaagccatttagcagtgagcagagtgacttcctgggcatgatttacttcgacgaattcaccttcacgaaactgaaacgcaacacaggaaactatactgcctgccagaaggatctctgttgccacctcacctataaaatgagcgagaagcgcaccgatgagatctacgccctaggagcctttgacgggttacatacagtggagggccagtactatctccaaatttgtgctctcctgaaatgtcagaccacagatctcgaaacctgtggagaacccgtgggtagcgcgtttacaaagttcgaggatttctctctgtcaggaaccttcggaactcggtacgtgttcccccagataatcctctcaggctctcagttggcacccgaacgccattacgagataagcagagacggacggctgcgctcccggtctggcgcccccttgccagtgctcgttatggcgctgtatggtcgggtctttgaaaaggaccctcctcgattaggacagggttccggaaaattccagtag

SEQ ID NO: 148563 - DNA, 1563 bp, Artificial Sequence
  derived and/or modified sequence
atggtgaccagcagcttccccatctctgtggccgtgtttgccctgatcaccctgcaggtgggcacccaggacagcttcatcgctgctgtgtatgaacatgctgtgatcctgcccaacaagacagagacccctgtgtcccaggaggatgccctgaacctgatgaatgaaaacatcgacatcctggagacagccatcaagcaggccgctgagcagggcgcccgcatcatcgtgaccccagaagatgccctgtatggctggaagttcacccgggagaccgtcttcccctacctggaggacatcccagacccccaggtgaactggatcccctgccaggacccccaccgcttcggccacacccctgtgcaggcccggctgagctgcctggccaaggacaacagcatctacgtgctggccaacctgggggacaagaagccctgcaacagccgggacagcacctgcccccccaacggctacttccagtacaacaccaacgtggtgtacaacacagagggcaagctggtggcccgctaccacaagtaccacctgtacagcgagccccagttcaacgtgcctgagaagccagagctggtgaccttcaacacagccttcggccgcttcggcatcttcacctgctttgacatcttcttctatgaccccggggtgaccctggtgaaggacttccacgtggacaccatcctcttccccacagcctggatgaatgtgctgcccctgctgacagccatcgagttccacagcgcctgggccatgggcatgggcgtgaacctgctggtggccaacacccaccacgtgtccctgaacatgactggaagtggcatctatgccccaaatggccccaaggtgtaccactatgacatgaagacagagctgggcaagctgctgctgtctgaggtggacagccaccccctgagcagcctggcctaccccacagctgtgaactggaatgcctatgccaccaccatcaagcccttccctgtgcagaagaacaccttccggggcttcatcagcagagatggcttcaacttcacagagctgtttgaaaatgccggcaacctgactgtgtgccagaaggagctgtgctgccacctgagctacaggatgctgcagaaggaggagaatgaggtgtatgtgctgggcgccttcaccggcctgcatggaagaagaagaagagagtactggcaggtgtgcaccctgctgaagtgcaagaccaccaacctgaccacctgtggccggcctgtggagacagccagcaccaggtttgagatgttcagcctgagcggcacctttggaacagaatatgtgtttcctgaggtgctgctgacagagatccacctgagccctgggaagtttgaggtgctgaaggatggccgcctggtgaacaagaatggcagcagcggccccatcctgactgtgtccctgtttggccgctggtacaccaaggacagcctgtacagcagctgtggcaccagcaacagcgccatcacctacctgctgatcttcatcctgctgatgatcatcgccctgcagaacatcgtgatgctgtag

SEQ ID NO: 148564 - DNA, 1503 bp, Artificial Sequence
  derived and/or modified sequence
atgatcatcagccacttccccaagtgtgtggccgtgtttgccctgctggccctgtctgtgggcgccctggacaccttcatcgctgctgtgtatgaacatgctgtgatcctgcccaacagaacagagacccctgtgtccaaggaggaggccctgctgctgatgaacaagaacattgatgtgctggagaaggctgtgaagctggccgccaagcagggcgcccacatcatcgtgaccccagaagatggcatctacggctggatcttcacccgggagagcatctacccctacctggaggacatcccagaccccggggtgaactggatcccctgccgggacccctggaggtttggaaacacccctgtgcagcagaggctgagctgcctggccaaggacaacagcatctacgtggtggccaacatcggggacaagaagccctgcaatgccagtgacagccagtgccccccagatggccgctaccagtacaacacagatgtggtgtttgacagccagggcaagctgctggcccgctaccacaagtacaacctgtttgcccctgagatccagtttgacttccccaaggacagcgagctggtgacctttgacaccccatttgggaagtttggcatcttcacctgctttgacatcttcagccatgaccctgctgtggtggtggtggatgagagcattgacagcatcctgtaccccacagcctggtacaacaccctgcccctgctgtctgctgtgcccttccacagcgcctgggccaaggccatgggcgtgaacctgctggccgccaacacccacaacacctccatgcacatgactggaagtggcatctatgcccctgaggccgtgaaggtgtaccactatgacatggagacagagagcggccagctgctgctgtctgagctgaagagccggccccggcgggagcccacctacccagctgctgtggactggcacgcctatgccagctctgtgaagcccttcagcagcgagcagagcgacttcctgggcatgatctactttgatgagttcaccttcaccaagctgaagagaaatactggaaactacacagcctgccagaaggacctgtgctgccacctgacctacaagatgtctgagaagaggacagatgagatctatgccctgggcgcctttgatggcctgcacacagtggagggccagtactacctgcagatctgtgccctgctgaagtgccagaccacagacctggagacctgtggggagcctgtgggcagcgccttcaccaagtttgaggacttcagcctgagcggcaccttcggcaccaggtatgtgttcccccagatcatcctgagcggcagccagctggcccctgagcggcactatgagatcagcagagatggccgcctgcggagccgcagcggggcccccctgcctgtgctggtgatggccctgtatggccgggtgtttgagaaggaccccccccggctgggccagggcagcggcaagttccagtag

SEQ ID NO: 148565 - DNA, 1563 bp, Artificial Sequence
  derived and/or modified sequence
atggtgaccagcagcttccccatcagcgtggccgtgttcgccctgataaccctgcaggtggggacccaggactcctttatcgctgcagtttacgaacatgctgtgatactgcccaacaaaaccgaaacccctgtcagccaggaggacgccctgaatctcatgaatgaaaatattgatatactcgaaactgcaataaagcaggccgctgagcagggcgcacggatcatcgtgacaccagaagacgcactgtacggttggaaatttacacgggaaactgtattcccctacctggaggatatccctgacccgcaggtcaattggatcccttgtcaggacccccaccgttttggccatactcccgtgcaagcccggttgagttgcctcgcgaaagacaattcaatctatgtcctcgctaatcttggggacaagaaaccttgtaattcaagagattccacctgcccccctaacggatacttccagtacaacacaaacgtcgtttacaacaccgaaggcaagctcgtcgcgcgctaccataagtaccatctgtattcagaacctcagttcaacgtgcctgagaaacctgagctggtgaccttcaataccgccttcggccgatttgggatttttacttgctttgatatcttcttttatgaccccggagtgaccctggtgaaggatttccacgtggatactatcctgtttcccaccgcctggatgaacgtattacctctcttgactgctattgagtttcactccgcctgggcaatgggcatgggagttaatctgctggtggcaaacacccatcacgtcagcctcaacatgaccgggagcgggatatatgcaccaaacggaccaaaggtgtaccactacgatatgaagacggagctgggcaagttgcttctctctgaggtggactcccaccccctgtccagtttagcctacccgaccgccgtgaattggaatgcatatgccaccaccataaagccgttcccagtccaaaaaaacacctttagagggtttatttccagggacggtttcaatttcactgagctgtttgagaacgctggcaatctaacagtctgccaaaaggagctgtgctgtcacctgtcatacaggatgttacaaaaagaagaaaatgaggtgtacgtgctgggtgcgttcactggcctgcatggtcggcggcggagggaatattggcaggtctgcactctcctcaagtgtaaaaccacgaaccttacaacatgcggccgaccggttgaaaccgcttctactcgatttgaaatgttctccctctctggtacttttggcactgagtatgtgttccccgaagtgttgcttacagagatccacctgtctcccggcaagtttgaagttctgaaggatggccgcctcgtgaataaaaatgggtcaagcggtcccattctgacagtgtcgcttttcgggcgctggtacaccaaggatagcctatatagtagctgcggtacttcaaacagtgcgatcacgtacttactcatattcatcctgttgatgattatcgcactgcaaaatatagtcatgctctag

SEQ ID NO: 148566 - DNA, 1503 bp, Artificial Sequence
  derived and/or modified sequence
atgatcatcagccacttccccaagtgcgtggccgtgttcgccctgctggctttatcggttggagccctggacaccttcatcgcagcggtatacgagcacgcggtaatcttacctaacagaaccgagacccctgtcagcaaagaagaagcattactgttaatgaataagaacattgatgtactggagaaagctgtgaaactggccgctaaacagggggcgcacataatcgttacaccggaggacggcatctatggctggatcttcactcgcgagtctatatatccgtacctggaggatatccctgatccgggagtaaattggattccctgtcgggacccctggcggtttggcaacaccccagtccaacagcgcctatcttgtctcgcgaaggataactcaatctacgttgtggcaaacattggagacaaaaagccatgcaatgcatctgacagtcagtgtccgcccgatggccggtaccagtataatacggatgtagtgtttgatagtcaagggaagttgcttgctaggtaccacaagtacaacctctttgcccccgagattcaattcgacttccctaaggattcagagctggttaccttcgacaccccattcggaaaattcggaatatttacctgctttgatatttttagccatgacccagccgtcgtggtcgtggacgagtccatcgatagtatactataccctacagcctggtataatactctgcccttgctgtccgcggtccctttccattccgcatgggcaaaggccatgggagtgaacctgcttgccgccaatacacacaatacatcaatgcacatgacgggctcaggcatatacgcacctgaagccgtgaaagtttaccattatgacatggagaccgaatctggacagctgctgttgagcgagctcaaatcaagacccagaagagagcccacatatcccgcggcggtagattggcatgcctacgcatcctccgtgaagcccttctcatcagagcaaagcgattttttaggcatgatctactttgatgaatttacatttactaaacttaaaagaaataccggcaactacaccgcgtgtcagaaggatctttgctgtcatctgacctataagatgagcgagaagcggacagatgagatttacgccctcggggcattcgatgggctacatacagtcgagggacagtattacttgcagatttgcgctctgctgaagtgccagacaactgacctcgaaacatgtggtgaaccggttgggtctgccttcactaaatttgaagacttcagcttgagtggaacctttggcactcggtatgtgttccctcaaatcatcctctcgggttcccagttagcccccgagagacactatgagatctcacgagacggcagactgaggtctaggagcggcgcccccctaccagttctcgtgatggcactatacggacgagtgttcgagaaagaccccccacgcttaggccagggtagcgggaaattccagtag

SEQ ID NO: 148567 - DNA, 1563 bp, Artificial Sequence
  derived and/or modified sequence
atggttacctcctccttccctattagtgttgccgtctttgcactgatcactctgcaggtggggacccaagactcttttatcgcagccgtttacgaacacgcggtaattctacccaataaaaccgagacaccagtctcccaagaagatgctcttaacttgatgaatgagaatatcgacatactggaaacagctataaagcaggccgctgaacagggagcgagaattatcgtgacgccagaggatgccctgtacggatggaagttcactagagagacagttttcccctacctggaagacattcctgaccctcaggtcaactggataccatgccaggacccacacaggttcggacacaccccagtgcaggcaagattatcatgcctcgccaaggataattccatttatgtgctggcaaaccttggggacaagaagccatgtaattccagggacagtacttgcccacccaatggatattttcagtataatacgaatgtggtttataacacggagggtaaactcgtcgccaggtaccacaagtaccacttatactctgagccccagttcaacgtgcctgaaaagcctgagctcgttacatttaacaccgcattcggaagattcggaattttcacctgtttcgatattttcttctatgatcccggagtgaccctagttaaagactttcacgtcgacacaatcctgttccctaccgcctggatgaatgtactgcccttactcaccgccatcgagttccatagcgcctgggctatggggatgggggttaacctcttggtcgcaaatacccaccatgtttccttaaatatgactggctctgggatctatgctcccaatggccctaaagtttatcactatgatatgaaaaccgaactcggaaagttgctcctgtccgaagtggatagccatcccttgagcagtcttgcttatcctacagcggtgaattggaacgcctatgcaacaacgattaagccctttccggtgcaaaagaacaccttccgcggatttatatctcgagacggcttcaattttacagaactattcgaaaatgcaggaaatctcaccgtgtgtcaaaaagagctctgctgtcacctatcctatcgaatgctgcagaaggaggagaacgaagtctacgtcctgggagccttcacagggctgcatggcaggcggaggcgggagtactggcaggtgtgtacgttgctgaaatgcaagacaactaatctgaccacatgcggcaggccagtggagacagcctcaacaaggtttgagatgttcagcctgtcagggacctttgggaccgaatacgtgttcccagaagtgctgctgaccgagattcacctgtcaccgggtaagttcgaagtcctgaaagatgggagactggtgaataaaaatggctctagcggtccaatcctcacagtgagcctgtttggcaggtggtacactaaagactctctctactcttcatgtgggacaagtaattctgccataacctatttactgatttttatcctgttgatgattattgccttgcagaatatagtgatgctttag

SEQ ID NO: 148568 - DNA, 1503 bp, Artificial Sequence
  derived and/or modified sequence
atgatcattagtcactttccaaagtgtgtggcggtgttcgcgctgctcgcactctcagttggggctctcgacacatttatcgctgccgtctatgagcatgccgtgatcctccctaataggactgaaacacccgtgtcgaaagaggaggcactgctacttatgaataagaatatcgatgtgctcgagaaagcagtaaagcttgcagctaagcagggcgcacatataattgttactcctgaggacgggatctatggctggatctttacgcgggagtccatatacccgtacctcgaggatatccctgatcccggagttaactggatcccttgccgggacccctggcggtttggcaacactcctgttcagcagcgattaagctgcctagcaaaggataacagtatctacgtggtcgcgaatataggcgacaagaagccctgcaatgcctccgattcacaatgccccccagacggtcggtatcaatacaacacggacgtggtgttcgacagtcaggggaagctccttgcgagataccacaaatacaacctgtttgccccagaaatccagttcgattttcccaaggactcggaactggtcacattcgacaccccttttgggaagtttgggatctttacttgcttcgatatattctcccatgatcctgcggtcgtggtagtggatgaatctatcgactctattctttatccaactgcatggtataataccctcccccttctttctgcggttccattccattcagcgtgggctaaggctatgggggtgaacctgctcgccgcaaatacgcataacacgtccatgcatatgacgggctcggggatctatgctcctgaggctgtcaaggtttaccattatgatatggaaacagagtcagggcagctgctcctctccgagcttaaatccagaccaaggagagagccgacgtaccctgcggctgtcgactggcacgcctatgcctcatccgtaaagcctttttcaagcgagcaatctgactttctggggatgatttattttgacgagttcacgtttaccaaactaaagcgtaacactgggaattatacagcatgtcagaaagacctctgctgccacctgacctataaaatgtcagagaaaagaacagacgagatctacgctcttggggcattcgatggcctgcacaccgtggaggggcagtactatctgcagatttgcgcgctactcaagtgtcagaccactgacttagaaacgtgcggagaacctgtggggagcgcctttaccaaattcgaagacttcagcctgtccggaaccttcggcacacgatacgtcttcccgcaaattattctgtctggttctcagttagcgcctgagagacactatgagatcagccgcgatggcagacttagaagtagatctggtgctccactccctgtcctcgtgatggccctatatggaagagtattcgagaaagatccacccagactcggacaggggagtgggaaattccagtag

SEQ ID NO: 148569 - DNA, 1503 bp, Artificial Sequence
  derived and/or modified sequence
atgattattagccatttccccaaatgtgttgccgtatttgcgcttctcgcactcagcgtaggcgctcttgacacgttcatcgcggcggtgtatgaacacgctgtcatcttgcccaaccgcacagagacccccgtgagcaaagaagaagccctgcttctcatgaataagaatatcgatgtcctagaaaaagccgtaaagctggccgcgaaacagggcgcccacattatcgtgacacccgaggatggtatctacggctggatatttacacgcgagagcatctacccctacctcgaagatatcccagaccctggcgtgaattggatcccatgccgtgatccttggaggttcgggaacacacctgttcaacagcgactttcttgtttggccaaggacaatagcatttatgtggttgctaacatcggggataagaaaccctgcaatgcttccgatagtcagtgtccacccgacggaagataccagtataacaccgacgtggtgtttgactctcagggtaaattgctggctcgatatcataagtacaacctctttgcccccgaaattcagtttgatttcccaaaggacagcgaactcgtcacattcgataccccatttggaaagttcggcattttcacttgctttgatatattctctcacgatccggcagtcgtggtggtggacgaatccattgactccatcctgtatcccactgcctggtacaacactcttcccctattaagcgcagtaccatttcacagtgcctgggctaaggcaatgggagtaaacctcctcgcagccaacacccataacacttcaatgcacatgaccggctccggcatctacgcacccgaagcagtgaaagtatatcattacgatatggagaccgaaagcggacagttgctgctttccgagctgaaaagtagaccccggcgggaaccaacctaccccgcagccgtggactggcacgcctacgcatcgtctgtcaaaccattctccagtgagcaatctgattttctgggcatgatctacttcgatgaatttacctttacgaagctaaaaagaaacacagggaattacaccgcctgccagaaggacctttgttgccatttgacttacaagatgtctgagaagaggacagacgagatttatgctctgggtgcattcgacggacttcataccgtcgagggacaatactatttacagatttgtgctttactaaagtgtcagaccacagacttggaaacctgcggagaacctgtgggctcagcctttacaaaatttgaggacttttctctctccgggacattcggcacacgatatgtgttcccccagatcatcctgtctggcagtcagctggctcccgaacgacactatgaaatcagccgcgacggtcggctgcgatctcgatccggagcacctctgcccgttcttgtcatggccctttacggccgggtcttcgaaaaagacccgccgagactcgggcagggaagcggaaaattccaatag

SEQ ID NO: 148570 - DNA, 1503 bp, Artificial Sequence
  derived and/or modified sequence
atgatcattagtcattttcctaagtgcgtggccgtattcgccctgctggcactgagtgtcggtgccctggacacattcatagcagccgtttacgagcatgccgtcatcctgcctaatcgcactgaaaccccagtcagcaaagaggaagcactactgctcatgaataaaaacatcgatgtgctcgaaaaagccgttaaactggccgcaaagcagggggctcatataattgtaacacctgaagatggaatatatggatggatctttacacgggaatcaatttacccatacctagaagacattcctgatccaggcgtcaattggatcccttgcagagacccgtggaggttcggtaacacacctgttcaacaaagactgtcatgtttggcgaaagataatagcatctacgtcgtcgctaatatcggagataagaagccctgcaacgcttccgattcccagtgccctccagacggcagataccaatataacacagacgtagtattcgattcccagggtaaactgctagctaggtaccataagtacaatctgttcgcccccgagattcaatttgatttccctaaggactcagaactggtgaccttcgataccccttttggcaaattcggaatttttacatgctttgatatcttttcgcacgatccagcagtcgttgttgttgatgagtcgatcgattctattctgtaccccacagcctggtataataccttgcctctgctctccgccgtgccgttccactccgcctgggcgaaggcaatgggagtcaatctcctcgccgcaaacacccataatacttctatgcacatgacaggatcaggaatctatgcaccagaagccgtcaaggtttaccattatgacatggaaactgaatccgggcagctgttactgtccgaattgaaatcccgcccacgccgagagcctacctatcctgccgcagtggactggcacgcttatgcctcaagtgttaagccctttagttcagagcagagcgacttcctcggtatgatttacttcgacgaatttacctttacgaaactgaaacgcaataccggtaattataccgcatgccaaaaagacctgtgctgtcacctgacatacaagatgagcgaaaagcgaacagatgagatatatgccctgggcgcttttgacggacttcacacagtagaggggcagtactatctccagatttgtgccctattgaagtgccagactaccgacctggaaacctgcggcgaaccagtgggatccgcatttaccaagtttgaggacttttctttgtccggcaccttcggaactagatatgtgttcccccagatcatcctgtctggctcccagttggctcccgaacgtcactacgagatatccagggacggtcgcttgagaagtagatcaggggcccccttacctgtcttagttatggcattatatggacgcgtttttgaaaaagaccccccacgcctggggcagggaagcggcaaattccaatag

SEQ ID NO: 148571 - DNA, 2118 bp, Artificial Sequence
  derived and/or modified sequence
aagaagaaaaatgatgataaagtaaaaggccagtaactggcagccacatgttatgcaaacattctcccctctgtaaatactacatgaatgttatttttgctttcagaaatcactaaaccttggccatggtcacttcctcttttccaatctctgtggcagtttttgccctaataaccctgcaggttggtactcaggacagttttatagctgcagtgtatgaacatgctgtcattttgccaaataaaacagaaacaccagtttctcaggaggatgccttgaatctcatgaacgagaatatagacattctggagacagcgatcaagcaggcagctgagcagggtgctcgaatcattgtgactccagaagatgcactttatggatggaaatttaccagggaaactgttttcccttatctggaggatatcccagaccctcaggtgaactggattccgtgtcaagacccccacagatttggtcacacaccagtacaagcaagactcagctgcctggccaaggacaactctatctatgtcttggcaaatttgggggacaaaaagccatgtaattcccgtgactccacatgtcctcctaatggctactttcaatacaataccaatgtggtgtataatacagaaggaaaactcgtggcacgttaccataagtaccacctgtactctgagcctcagtttaatgtccctgaaaagccggagttggtgactttcaacaccgcatttggaaggtttggcattttcacgtgctttgatatattcttctatgatcctggtgttaccctggtgaaagatttccatgtggacaccatactgtttcccacagcttggatgaacgttttgccccttttgacagctattgaattccattcagcttgggcaatgggaatgggagttaatcttcttgtggccaacacacatcatgtcagcctaaatatgacaggaagtggtatttatgcaccaaatggtcccaaagtgtatcattatgacatgaagacagagttgggaaaacttctcctttcagaggtggattcacatcccctatcctcgcttgcctacccaacagctgttaattggaatgcctacgccaccaccatcaaaccatttccagtacagaaaaacactttcaggggatttatttccagggatgggttcaacttcacagaactttttgaaaatgcaggaaaccttacagtctgtcaaaaggagctttgctgtcatttaagctacagaatgttacaaaaagaagagaatgaagtatacgttctaggagcttttacaggattacatggccgaaggagaagagagtactggcaggtctgcacactgctgaagtgcaaaactactaatttgacaacttgtggacggccagtagaaactgcttctacaagatttgaaatgttctccctcagtggcacatttggaacagagtatgtttttcctgaagtgctacttaccgaaattcatctgtcacctggaaaatttgaggtgctgaaagatgggcgtttggtaaacaagaatggatcatctgggcctatactaacagtgtcactctttgggaggtggtacacaaaggactcactttacagctcatgtgggaccagcaattcagcaataacttacctgctaatattcatattattaatgatcatagctttgcaaaatattgtaatgttatagggcgtctctttatcactcagcttctgcatcatatgcttggctgaatgtgtttatcggcttcccaagtttactaagaaactttgaagggctatttcagtagtatagaccagtgagtcctaaatattttttctcatcaataattattttttaagtattatgataatgttgtccatttttttggctactctgaaatgttgcagtgtggaacaatggaaagagcctgggtgtttgggtcagataaatgaagatcaaactccagctccagcctcatttgcttgagactttgtgtgtatgggggacttgtatgtatgggagtgaggagtttcagggccattgcaaacatagctgtgcccttgaagagaatagtaatgatgggaatttagaggtttatgactgaattccctttgacattaaagactatttgaattca

SEQ ID NO: 148572 - DNA, 1608 bp, Artificial Sequence
  derived and/or modified sequence
acaggccttggaaaggaaagcagctgagatccagaggagtggaaggctcccccttgactaaagctaaacaccagtttctcaggaggatgccttgaatctcatgaacgagaatatagacattctggagacagcgatcaagcaggcagctgagcagggtgctcgaatcattgtgactccagaagatgcactttatggatggaaatttaccagggaaactgttttcccttatctggaggatatcccagaccctcaggtgaactggattccgtgtcaagacccccacagatttggtcacacaccagtacaagcaagactcagctgcctggccaaggacaactctatctatgtcttggcaaatttgggggacaaaaagccatgtaattcccgtgactccacatgtcctcctaatggctactttcaatacaataccaatgtggtgtataatacagaaggaaaactcgtggcacgttaccataagtaccacctgtactctgagcctcagtttaatgtccctgaaaagccggagttggtgactttcaacaccgcatttggaaggtttggcattttcacgtgctttgatatattcttctatgatcctggtgttaccctggtgaaagatttccatgtggacaccatactgtttcccacagcttggatgaacgttttgccccttttgacagctattgaattccattcagcttgggcaatgggaatgggagttaatcttcttgtggccaacacacatcatgtcagcctaaatatgacaggaagtggtatttatgcaccaaatggtcccaaagtgtatcattatgacatgaagacagagttgggaaaacttctcctttcagaggtggattcacatcccctatcctcgcttgcctacccaacagctgttaattggaatgcctacgccaccaccatcaaaccatttccagtacagaaaaacactttcaggggatttatttccagggatgggttcaacttcacagaactttttgaaaatgcaggaaaccttacagtctgtcaaaaggagctttgctgtcatttaagctacagaatgttacaaaaagaagagaatgaagtatacgttctaggagcttttacaggattacatggccgaaggagaagagagtactggcaggtctgcacactgctgaagtgcaaaactactaatttgacaacttgtggacggccagtagaaactgcttctacaagatttgaaatgttctccctcagtggcacatttggaacagagtatgtttttcctgaagtgctacttaccgaaattcatctgtcacctggaaaatttgaggtgctgaaagatgggcgtttggtaaacaagaatggatcatctgggcctatactaacagtgtcactctttgggaggtggtacacaaaggactcactttacagctcatgtgggaccagcaattcagcaataacttacctgctaatattcatattattaatgatcatagctttgcaaaatattgtaatgttatagggcgtctctttatcactcagcttctgcatcatatgcttggctgaatgtgtttatcggcttcccaagtttactaagaaactttgaagggctatttcagtagtata

SEQ ID NO: 148573 - DNA, 1713 bp, Artificial Sequence
  derived and/or modified sequence
aatgtaaagtttttccagtgaaacaaaacgtaagaatctgagtttgtttttcaaagatcactaaattttagttatgattatatcacattttccaaaatgtgtggcagtttttgccctccttgctctgagtgttggtgcactggacacttttattgctgcagtatatgagcatgcggtgatattaccaaacagaacagaaacacctgtttcaaaagaagaagctttgctcctgatgaacaagaacatagatgttttggagaaagcagttaagctggcagcgaagcagggtgcacatatcattgtgaccccagaagatggaatctatggttggatcttcaccagggagagcatttacccctatctagaggatataccagaccctggagtgaactggattccatgtagagacccctggagattcggcaacacaccagtgcaacaaagactcagctgcctggccaaggacaactctatctatgtcgtggctaatattggggacaagaagccatgcaatgccagtgactctcagtgtccccctgatggccgttaccaatacaacactgatgtggtgtttgattctcagggaaaactgttggcacgctaccataagtacaatctttttgcacctgaaattcagtttgatttccccaaggattcagaacttgtgacttttgacactccctttgggaagtttggcatttttacttgctttgacattttttctcatgacccagctgtggtggtggtggatgagtcaattgacagcattctctaccccacagcatggtacaacacgctgcccctcctctcggctgttcccttccattcagcatgggccaaggccatgggagtcaatctacttgctgcaaatacccacaacaccagcatgcacatgacagggagtggaatctacgccccagaagcagtcaaggtgtaccactatgacatggaaacagagagtggtcagctgttgctatcagaactgaagtctcggccccgccgtgagcccacctaccctgcagctgttgactggcatgcgtatgccagcagtgtcaagccattttcctctgaacagtcagattttctggggatgatttattttgatgagtttaccttcaccaagcttaagagaaatacaggaaattacacagcttgccagaaagatctgtgttgtcacttaacttacaagatgtctgagaagcgaacagacgagatctatgccctaggtgcttttgatggactgcacacagtagaaggccaatattacttacagatatgtgcattactgaagtgtcaaaccactgacctggaaacgtgtggagaacctgtggggtcagcttttaccaagtttgaagacttctccctcagtggcacatttggaacgcgttatgttttcccacagatcattctaagtgggagtcagcttgcccctgaaagacattatgagatttcaagagatggacgcttgaggagccgaagtggagcccctttgcctgtcttagttatggccctgtatggaagagtgtttgagaaggaccctccacgcttagggcagggatctgggaaattccagtgatctcctttagcagagcccttttaggattagcctggctaagaaaggaagaaaaaaaagagatccgttagtgtctgtttagaaaagatgttataaacttacagaaacaaatataataaactgaagcagatttgaaaagc

SEQ ID NO: 148574 - protein, 513 aa, Artificial Sequence
  derived and/or modified sequence
MTTQLPAYVAILLFYVSRASCQDTFTAAVYEHAAILPNATLTPVSREEALALMNRNLDILEGAITSAADQGAHIIVTPEDAIYGWNFNRDSLYPYLEDIPDPEVNWIPCNNRNRFGQTPVQERLSCLAKNNSIYVVANIGDKKPCDTSDPQCPPDGRYQYNTDVVFDSQGKLVARYHKQNLFMGENQFNVPKEPEIVTFNTTFGSFGIFTCFDILFHDPAVTLVKDFHVDTIVFPTAWMNVLPHLSAVEFHSAWAMGMRVNFLASNIHYPSKKMTGSGIYAPNSSRAFHYDMKTEEGKLLLSQLDSHPSHSAVVNWTSYASSIEALSSGNKEFKGTVFFDEFTFVKLTGVAGNYTVCQKDLCCHLSYKMSENIPNEVYALGAFDGLHTVEGRYYLQICTLLKCKTTNLNTCGDSAETASTRFEMFSLSGTFGTQYVFPEVLLSENQLAPGEFQVSTDGRLFSLKPTSGPVLTVTLFGRLYEKDWASNASSGLTAQARIIMLIVIAPIVCSLSW

SEQ ID NO: 148575 - DNA, 1542 bp, Artificial Sequence
  derived and/or modified sequence
atgaccacccagctgcccgcctacgtggccatcctgctgttctacgtgagcagagccagctgccaggacaccttcaccgccgccgtgtacgagcacgccgccatcctgcccaacgccaccctgacccccgtgagcagagaggaggccctggccctgatgaacagaaacctggacatcctggagggcgccatcaccagcgccgccgaccagggcgcccacatcatcgtgacccccgaggacgccatctacggctggaacttcaacagagacagcctgtacccctacctggaggacatccccgaccccgaggtgaactggatcccctgcaacaacagaaacagattcggccagacccccgtgcaggagagactgagctgcctggccaagaacaacagcatctacgtggtggccaacatcggcgacaagaagccctgcgacaccagcgacccccagtgcccccccgacggcagataccagtacaacaccgacgtggtgttcgacagccagggcaagctggtggccagataccacaagcagaacctgttcatgggcgagaaccagttcaacgtgcccaaggagcccgagatcgtgaccttcaacaccaccttcggcagcttcggcatcttcacctgcttcgacatcctgttccacgaccccgccgtgaccctggtgaaggacttccacgtggacaccatcgtgttccccaccgcctggatgaacgtgctgccccacctgagcgccgtggagttccacagcgcctgggccatgggcatgagagtgaacttcctggccagcaacatccactaccccagcaagaagatgaccggcagcggcatctacgcccccaacagcagcagagccttccactacgacatgaagaccgaggagggcaagctgctgctgagccagctggacagccaccccagccacagcgccgtggtgaactggaccagctacgccagcagcatcgaggccctgagcagcggcaacaaggagttcaagggcaccgtgttcttcgacgagttcaccttcgtgaagctgaccggcgtggccggcaactacaccgtgtgccagaaggacctgtgctgccacctgagctacaagatgagcgagaacatccccaacgaggtgtacgccctgggcgccttcgacggcctgcacaccgtggagggcagatactacctgcagatctgcaccctgctgaagtgcaagaccaccaacctgaacacctgcggcgacagcgccgagaccgccagcaccagattcgagatgttcagcctgagcggcaccttcggcacccagtacgtgttccccgaggtgctgctgagcgagaaccagctggcccccggcgagttccaggtgagcaccgacggcagactgttcagcctgaagcccaccagcggccccgtgctgaccgtgaccctgttcggcagactgtacgagaaggactgggccagcaacgccagcagcggcctgaccgcccaggccagaatcatcatgctgatcgtgatcgcccccatcgtgtgcagcctgagctggtag

SEQ ID NO: 148576 - DNA, 1542 bp, Artificial Sequence
  derived and/or modified sequence
atgaccacccaactgcccgcctacgtggcgatcctgctgttttatgtgtccagagcaagttgtcaggacacttttaccgctgccgtttatgagcatgcggcgattctccctaacgccacgttaacccccgtgtcgcgggaggaagctctggccttgatgaacaggaatttagatattctggagggggctatcacgtctgctgccgatcaaggagctcatatcattgtgacccctgaggacgccatctacggatggaatttcaatcgggattcgttgtacccttatttggaggacattccggaccccgaggtcaactggatcccatgcaataaccggaaccggtttgggcaaactcctgtccaggaaaggctgtcctgtctggccaagaataacagcatctatgtcgttgctaacatcggagataaaaaaccttgcgatacatccgacccccagtgccctccggatgggaggtatcaatacaataccgacgtggtcttcgacagccagggaaagctggtggcccggtatcacaagcagaaccttttcatgggcgaaaaccagttcaacgtgccgaaggagcctgagattgttaccttcaataccactttcggcagtttcggcattttcacctgctttgacatactgttccacgatcccgccgtgacactggtcaaagattttcatgtggacacaatagttttccctactgcctggatgaacgtgctcccacacctcagcgcagttgaatttcacagcgcctgggcaatgggcatgcgggtaaatttcctggcctctaacattcactaccctagtaagaagatgactggatctggaatttatgccccaaattcaagcagagcctttcactatgatatgaagactgaggaaggtaagctcctactgtcccaactggatagccatccatcccatagtgccgtggtcaattggacatcttatgcttcatccatcgaggccctgtcctctgggaacaaagaattcaagggaaccgtcttctttgatgaatttacatttgtcaaactcacaggcgttgctggcaactatacagtatgtcagaaagacctctgctgtcacctttcttataagatgtcagagaacattcctaacgaagtatatgctctgggtgcattcgatgggttacacacagtggagggacggtattacctgcagatctgcaccttgcttaagtgcaaaactacaaacttaaatacctgtggcgatagtgcagaaactgcttcaacaaggtttgagatgttttccctctcaggcacctttggcactcaatacgtgttcccagaggttctcctgtcagaaaaccagctcgcccctggtgaatttcaggttagtactgacgggcggttattttccctcaaacctacctctggacccgtcctcactgtcactctgtttgggcgcctatacgaaaaagactgggcatctaatgcttcttccggtctgacggcacaggcccgaatcataatgttaatcgtgatcgctcccatagtctgtagtctgagctggtag

SEQ ID NO: 148577 - DNA, 1542 bp, Artificial Sequence
  derived and/or modified sequence
atgaccacccagctgcctgcctacgtggccatcctgctcttctacgtgtcccgggccagctgccaggacaccttcaccgctgctgtgtatgagcacgccgccatcctgcccaatgccaccctgacccctgtgtcccgggaggaggccctggccctgatgaacagaaacctggacatcctggagggcgccatcaccagcgctgctgaccagggcgcccacatcatcgtgaccccagaagatgccatctacggctggaacttcaacagagacagcctgtacccctacctggaggacatcccagaccctgaggtgaactggatcccctgcaacaacagaaacagatttggccagacccctgtgcaggagcggctgagctgcctggccaagaacaacagcatctacgtggtggccaacattggagacaagaagccctgtgacaccagtgacccccagtgccccccagatggccgctaccagtacaacacagatgtggtgtttgacagccagggcaagctggtggcccgctaccacaagcagaacctcttcatgggagagaaccagttcaacgtgcccaaggagcctgagatcgtgaccttcaacaccaccttcggcagctttggcatcttcacctgctttgacatcctcttccatgaccctgctgtgaccctggtgaaggacttccacgtggacaccatcgtgttccccacagcctggatgaatgtgctgccccacctgtctgctgtggagttccacagcgcctgggccatgggcatgagggtgaacttcctggccagcaacatccactaccccagcaagaagatgactggaagtggcatctatgcccccaacagcagccgggccttccactatgacatgaagacagaggagggcaagctgctgctgagccagctggacagccaccccagccacagcgctgtggtgaactggaccagctatgccagcagcattgaggccctgagcagcggcaacaaggagttcaagggcaccgtcttctttgatgagttcacctttgtgaagctgactggagtggccggcaactacacagtgtgccagaaggacctgtgctgccacctgagctacaagatgtctgagaacatccccaatgaggtgtatgccctgggcgcctttgatggcctgcacacagtggagggccgctactacctgcagatctgcaccctgctgaagtgcaagaccaccaacctgaacacctgtggggacagcgctgagacagccagcaccaggtttgagatgttcagcctgagcggcaccttcggcacccagtatgtgtttcctgaggtgctgctgtctgagaaccagctggcccctggagagttccaggtgtccacagatggccgcctcttcagcctgaagcccaccagcggccctgtgctgactgtgaccctgtttggccgcctgtatgagaaggactgggccagcaatgccagcagcggcctgacagcccaggcccgcatcatcatgctgattgtcatcgcccccatcgtgtgcagcctgtcctggtag

SEQ ID NO: 148578 - DNA, 1542 bp, Artificial Sequence
  derived and/or modified sequence
atgaccacccagctgcccgcctacgtggccatcctgctgttctacgtgagccgcgcgtcctgtcaagacacattcactgctgccgtttacgaacatgcagcgatcctgccaaacgctaccttgactccagtcagccgggaagaagcactagcactgatgaaccgcaacttggatatactggagggcgctattacatctgccgctgaccagggcgctcacatcatcgttaccccagaggacgcaatttatgggtggaattttaatagggactcactttatccatatttggaggatatccctgacccagaagtaaactggattccgtgcaacaatcggaaccggttcggacagacacctgttcaagagcgattgtcctgcctggcaaaaaacaattctatatatgtggtggccaacatcggggacaaaaagccttgcgatacttctgatccccaatgtccaccagacgggcgctatcagtacaacaccgacgtggtctttgacagtcagggaaaacttgtcgctagataccacaaacagaatctgttcatgggcgaaaatcagttcaacgtccctaaggagcctgagatcgttaccttcaatactacattcggctcattcggaatttttacctgctttgatattctgttccacgatcctgccgtgacgcttgtcaaggatttccacgttgacactatcgtgttcccaactgcctggatgaatgtcttaccacatctcagtgcagtggaattccactctgcctgggccatgggcatgagggttaactttctggctagtaacatccattatccatccaagaaaatgaccggttccgggatctatgcacccaattctagtcgggccttccactacgatatgaaaactgaggaaggtaaacttttgctttcgcagctggacagccacccatctcattcagccgtcgtgaattggacatcctacgcgtcctcaattgaggccctgtcatccggcaataaggagtttaaaggcaccgttttttttgatgaattcaccttcgtgaaactgacgggtgtggcggggaattacactgtgtgtcaaaaagatctctgttgccatctgtcatataaaatgtctgagaacattccaaatgaggtgtacgccctcggcgccttcgatgggttacatacagttgaggggcgatattatctgcagatctgcactcttctgaagtgtaaaacaacaaaccttaacacctgtggcgatagcgccgagacagctagtacacggttcgaaatgttcagcttgtcaggcacatttggcacacaatatgtgtttcctgaagttcttctctcggagaaccagctggccccaggggagttccaggtgagcacagatgggcggcttttctccctcaaacctacaagtggacctgtgttgaccgttacgctattcggaaggctctacgaaaaagattgggcaagtaacgcctcttctggcctaaccgctcaagccagaatcatcatgctgattgtaatcgctccgatcgtgtgttccctgagttggtag

SEQ ID NO: 148579 - DNA, 1542 bp, Artificial Sequence
  derived and/or modified sequence
atgactacgcaactgccggcatatgtcgctattcttctcttctacgtctcccgagccagttgtcaggatacctttacagccgctgtatatgagcacgctgccattctgccaaatgctaccctgacccccgtctccagagaagaagcactggccttaatgaacagaaacttggacatactggaaggcgctatcacgtctgccgctgatcagggagctcatattatcgttacaccagaagatgccatatacgggtggaattttaaccgtgattcactctacccttacctggaggatatccctgaccctgaggtaaactggatcccatgtaataaccgaaacagattcggacagacgccagtgcaagagcgactctcgtgtcttgcgaagaataactctatctacgtcgtcgcaaatattggagataagaaaccttgcgacacatcagacccacagtgcccacctgatggacggtaccaatataatactgacgtggtatttgactctcaggggaagcttgtggcacggtaccataagcagaatctatttatgggcgagaatcagttcaatgtgcctaaggaaccagagatcgtgacctttaacacaacatttggctcatttggtatatttacatgtttcgacatcctgttccacgacccagcagtcaccttggtcaaggattttcatgttgacacaatagtgttcccgacggcctggatgaatgtcctcccacatctgagtgctgtagagtttcacagcgcgtgggccatgggtatgcgtgtaaatttcttggccagcaatatccattatccctctaagaagatgaccggaagtgggatttatgcccctaactctagtagagcttttcattatgacatgaagaccgaagaaggcaagctcctgctctcacagctggactctcatccatcccactccgccgtcgtgaactggacgagttacgcctctagcatagaggccctgtcctcaggaaacaaggagtttaagggtaccgtcttttttgatgagttcacctttgtaaagctgactggtgtcgccggaaattataccgtctgccagaaggatttgtgctgtcacctgtcctataagatgtccgaaaacatcccaaacgaagtgtacgcactgggtgccttcgatgggctccacacagtggaaggcaggtattacttgcagatctgcaccctgttaaaatgcaaaacaactaacttgaacacatgcggagacagcgcggagaccgcatcgacccgcttcgagatgttctctttgtctgggacctttggtacccaatacgtcttcccggaagttctgctgtctgagaatcagctggcccctggcgaatttcaggtctcgacagatgggcgattgttctctctgaagcccactagcggccctgtgctgactgtaactctgttcggcaggctgtatgaaaaggactgggcttcgaacgccagttccgggttgaccgctcaggccaggattatcatgctaatcgttatagcccctatcgtgtgctcactatcatggtag

SEQ ID NO: 148580 - DNA, 3106 bp, Artificial Sequence
  derived and/or modified sequence
cattggacttcagcatgactactcagttgccagcttacgtggcaattttgcttttctatgtctcaagagccagctgccaggacactttcactgcagctgtttatgagcatgcagcgatattgcccaatgccaccctaacaccagtgtctcgtgaggaggctttggcattaatgaatcggaatctggacattttggaaggagcgatcacatcagcagcagatcagggtgcgcatattattgtgactccagaagatgctatttatggctggaacttcaacagggactctctctacccatatttggaggacatcccagaccctgaagtaaactggatcccctgtaataatcgtaacagatttggccagaccccagtacaagaaagactcagctgcctggccaagaacaactctatctatgttgtggcaaatattggggacaagaagccatgcgataccagtgatcctcagtgtccccctgatggccgttaccaatacaacactgatgtggtatttgattctcaaggaaaactggtggcacgctaccataagcaaaaccttttcatgggtgaaaatcaattcaatgtacccaaggagcctgagattgtgactttcaataccacctttggaagttttggcattttcacatgctttgatatactcttccatgatcctgctgttaccttggtgaaagatttccacgtggacaccatagtattcccaacagcttggatgaatgttttgccacatttgtcagctgttgaattccactcagcttgggctatgggcatgagggtcaatttccttgcatccaacatacattacccctcaaagaaaatgacaggaagtggcatctatgcacccaattcttcaagagcatttcattatgatatgaagacagaagagggaaaactcctcctctcgcaactggattcccacccatcccattctgcagtggtgaactggacttcctatgccagcagtatagaagcgctctcatcaggaaacaaggaatttaaaggcactgtctttttcgatgaattcacttttgtgaagctcacaggagttgcaggaaattatacagtttgtcagaaagatctctgctgtcatttaagctacaaaatgtctgagaacataccaaatgaagtgtacgctctaggggcatttgacggactgcacactgtggaagggcgctattatctacagatttgtaccctgttgaaatgtaaaacgactaatttaaacacttgcggtgactcagctgaaacagcttctaccaggtttgaaatgttctccctcagtggcactttcggaacccagtatgtctttcctgaggtgttgctgagtgaaaatcagcttgcacctggagaatttcaggtgtcaactgacggacgcttgtttagtctgaagccaacatccggacctgtcttaacagtaactctgtttgggaggttgtatgagaaggactgggcatcaaatgcttcatcaggcctcacagcacaagcaagaataataatgctaatagttatagcacctattgtatgctcattaagttggtagaatattgactttttctcttttttatttgggataatttaaaaaatgatggatgagaaaagaaagattggtccgggttaatattatcctctagtataagtgaattactagtttctctttatttagacaaacacacacacaccagataatataaacttaataaattatctgttaatgtagattttatttaaaaaactatatttgaacattggtctttcttggacgtgagctaattatatcaaataagtatcacaaatcttttacgcagaagaaataaaaactacgggtagaaaacataagaactatcataaaatttacttacaaggaggctgctcttgttaccacttttattatattacgtatcacttattcagctctgctgaaaatttccaatgactttgtttgtttgctctttttgttttttacctaaacaatacattttgattctcttgtgggttgataatgtctccccaaaatttacatgttgaagcacctcagaatgtgactgtatttggagacagggtctttaaagaggtaaaataaggtcattaggatagaccctaattcaatatgactgatgatcataaaagaagaggcgagtagggcacaacaggcacaaagggagaccataaggagacacagaggaaggacaactctttacaagctaagaagagagggcctcagaagaaaccaaccctgccaacaccttgatcttggacttccagcctccaaaactatgagaaataaatttctattgtttaagtcacccagtccatggtactttgttaggcagccctggcaaatgaatcaaagacccattcctgttcctctccccaccactactgttttctactgtaatctgaagcttcaacaaaaggcttacctggtaagaatattcagctggtctgggtcctcaagactccaatagacactcttagagaaggattgctgatggattgatagtgaaaccattagatcattgaattcctctggaattagaaaaccagagagtcccattttaagaaattagatatttaatatagcattgtgtgttctattttagtaacagcagaatctcttgacattacacaactcagtgaaacaacatcatttaagccaaaatatctcccaactgactgatagactctgagcactaatatcatagtgctgtgatgatggacaattacatagtaccgataacagccatgcactgtgcaaagcatgcccttctgcacaggagagcaaggcacttgcagtagtgatctatgccagcaaaacatcattttgagacaaacatttttgtggcagatgtttttcctaaaaagtactatatcatccaagaaatatttgagtaaaatcccttgttcttttgggtgacattaactgacatttgctttttttcaagacctaatagaaaataagaaagcccataatgtatttagaaacaggaatcctcagagcaattctctgtattctcatataatttcaatgtaaaacagaaaacatattgatgtgttggtgataggcttgaattattaaaaacttcaaaaaca

SEQ ID NO: 148581 - protein, 4834 aa, Artificial Sequence
  derived and/or modified sequence
MPSESFCLAAQARLDSKWLKTDIQLAFTRDGLCGLWNEMVKDGEIVYTGTESTQNGELPPRKDDSVEPSGTKKEDLNDKEKKDEEETPAPIYRAKSILDSWVWGKQPDVNELKECLSVLVKEQQALAVQSATTTLSALRLKQRLVILERYFIALNRTVFQENVKVKWKSSGISLPPVDKKSSRPAGKGVEGLARVGSRAALSFAFAFLRRAWRSGEDADLCSELLQESLDALRALPEASLFDESTVSSVWLEVVERATRFLRSVVTGDVHGTPATKGPGSIPLQDQHLALAILLELAVQRGTLSQMLSAILLLLQLWDSGAQETDNERSAQGTSAPLLPLLQRFQSIICRKDAPHSEGDMHLLSGPLSPNESFLRYLTLPQDNELAIDLRQTAVVVMAHLDRLATPCMPPLCSSPTSHKGSLQEVIGWGLIGWKYYANVIGPIQCEGLANLGVTQIACAEKRFLILSRNGRVYTQAYNSDTLAPQLVQGLASRNIVKIAAHSDGHHYLALAATGEVYSWGCGDGGRLGHGDTVPLEEPKVISAFSGKQAGKHVVHIACGSTYSAAITAEGELYTWGRGNYGRLGHGSSEDEAIPMLVAGLKGLKVIDVACGSGDAQTLAVTENGQVWSWGDGDYGKLGRGGSDGCKTPKLIEKLQDLDVVKVRCGSQFSIALTKDGQVYSWGKGDNQRLGHGTEEHVRYPKLLEGLQGKKVIDVAAGSTHCLALTEDSEVHSWGSNDQCQHFDTLRVTKPEPAALPGLDTKHIVGIACGPAQSFAWSSCSEWSIGLRVPFVVDICSMTFEQLDLLLRQVSEGMDGSADWPPPQEKECVAVATLNLLRLQLHAAISHQVDPEFLGLGLGSILLNSLKQTVVTLASSAGVLSTVQSAAQAVLQSGWSVLLPTAEERARALSALLPCAVSGNEVNISPGRRFMIDLLVGSLMADGGLESALHAAITAEIQDIEAKKEAQKEKEIDEQEANASTFHRSRTPLDKDLINTGICESSGKQCLPLVQLIQQLLRNIASQTVARLKDVARRISSCLDFEQHSRERSASLDLLLRFQRLLISKLYPGESIGQTSDISSPELMGVGSLLKKYTALLCTHIGDILPVAASIASTSWRHFAEVAYIVEGDFTGVLLPELVVSIVLLLSKNAGLMQEAGAVPLLGGLLEHLDRFNHLAPGKERDDHEELAWPGIMESFFTGQNCRNNEEVTLIRKADLENHNKDGGFWTVIDGKVYDIKDFQTQSLTGNSILAQFAGEDPVVALEAALQFEDTRESMHAFCVGQYLEPDQEIVTIPDLGSLSSPLIDTERNLGLLLGLHASYLAMSTPLSPVEIECAKWLQSSIFSGGLQTSQIHYSYNEEKDEDHCSSPGGTPASKSRLCSHRRALGDHSQAFLQAIADNNIQDHNVKDFLCQIERYCRQCHLTTPIMFPPEHPVEEVGRLLLCCLLKHEDLGHVALSLVHAGALGIEQVKHRTLPKSVVDVCRVVYQAKCSLIKTHQEQGRSYKEVCAPVIERLRFLFNELRPAVCNDLSIMSKFKLLSSLPRWRRIAQKIIRERRKKRVPKKPESTDDEEKIGNEESDLEEACILPHSPINVDKRPIAIKSPKDKWQPLLSTVTGVHKYKWLKQNVQGLYPQSPLLSTIAEFALKEEPVDVEKMRKCLLKQLERAEVRLEGIDTILKLASKNFLLPSVQYAMFCGWQRLIPEGIDIGEPLTDCLKDVDLIPPFNRMLLEVTFGKLYAWAVQNIRNVLMDASAKFKELGIQPVPLQTITNENPSGPSLGTIPQARFLLVMLSMLTLQHGANNLDLLLNSGMLALTQTALRLIGPSCDNVEEDMNASAQGASATVLEETRKETAPVQLPVSGPELAAMMKIGTRVMRGVDWKWGDQDGPPPGLGRVIGELGEDGWIRVQWDTGSTNSYRMGKEGKYDLKLAELPAAAQPSAEDSDTEDDSEAEQTERNIHPTAMMFTSTINLLQTLCLSAGVHAEIMQSEATKTLCGLLRMLVESGTTDKTSSPNRLVYREQHRSWCTLGFVRSIALTPQVCGALSSPQWITLLMKVVEGHAPFTATSLQRQILAVHLLQAVLPSWDKTERARDMKCLVEKLFDFLGSLLTTCSSDVPLLRESTLRRRRVRPQASLTATHSSTLAEEVVALLRTLHSLTQWNGLINKYINSQLRSITHSFVGRPSEGAQLEDYFPDSENPEVGGLMAVLAVIGGIDGRLRLGGQVMHDEFGEGTVTRITPKGKITVQFSDMRTCRVCPLNQLKPLPAVAFNVNNLPFTEPMLSVWAQLVNLAGSKLEKHKIKKSTKQAFAGQVDLDLLRCQQLKLYILKAGRALLSHQDKLRQILSQPAVQETGTVHTDDGAVVSPDLGDMSPEGPQPPMILLQQLLASATQPSPVKAIFDKQELEAAALAVCQCLAVESTHPSSPGFEDCSSSEATTPVAVQHIRPARVKRRKQSPVPALPIVVQLMEMGFSRRNIEFALKSLTGASGNASSLPGVEALVGWLLDHSDIQVTELSDADTVSDEYSDEEVVEDVDDAAYSMSTGAVVTESQTYKKRADFLSNDDYAVYVRENIQVGMMVRCCRAYEEVCEGDVGKVIKLDRDGLHDLNVQCDWQQKGGTYWVRYIHVELIGYPPPSSSSHIKIGDKVRVKASVTTPKYKWGSVTHQSVGVVKAFSANGKDIIVDFPQQSHWTGLLSEMELVPSIHPGVTCDGCQMFPINGSRFKCRNCDDFDFCETCFKTKKHNTRHTFGRINEPGQSAVFCGRSGKQLKRCHSSQPGMLLDSWSRMVKSLNVSSSVNQASRLIDGSEPCWQSSGSQGKHWIRLEIFPDVLVHRLKMIVDPADSSYMPSLVVVSGGNSLNNLIELKTININPSDTTVPLLNDCTEYHRYIEIAIKQCRSSGIDCKIHGLILLGRIRAEEEDLAAVPFLASDNEEEEDEKGNSGSLIRKKAAGLESAATIRTKVFVWGLNDKDQLGGLKGSKIKVPSFSETLSALNVVQVAGGSKSLFAVTVEGKVYACGEATNGRLGLGISSGTVPIPRQITALSSYVVKKVAVHSGGRHATALTVDGKVFSWGEGDDGKLGHFSRMNCDKPRLIEALKTKRIRDIACGSSHSAALTSSGELYTWGLGEYGRLGHGDNTTQLKPKMVKVLLGHRVIQVACGSRDAQTLALTDEGLVFSWGDGDFGKLGRGGSEGCNIPQNIERLNGQGVCQIECGAQFSLALTKSGVVWTWGKGDYFRLGHGSDVHVRKPQVVEGLRGKKIVHVAVGALHCLAVTDSGQVYAWGDNDHGQQGNGTTTVNRKPTLVQGLEGQKITRVACGSSHSVAWTTVDVATPSVHEPVLFQTARDPLGASYLGVPSDADSSAASNKISGASNSKPNRPSLAKILLSLDGNLAKQQALSHILTALQIMYARDAVVGALMPAAMIAPVECPSFSSAAPSDASAMASPMNGEECMLAVDIEDRLSPNPWQEKREIVSSEDAVTPSAVTPSAPSASARPFIPVTDDLGAASIIAETMTKTKEDVESQNKAAGPEPQALDEFTSLLIADDTRVVVDLLKLSVCSRAGDRGRDVLSAVLSGMGTAYPQVADMLLELCVTELEDVATDSQSGRLSSQPVVVESSHPYTDDTSTSGTVKIPGAEGLRVEFDRQCSTERRHDPLTVMDGVNRIVSVRSGREWSDWSSELRIPGDELKWKFISDGSVNGWGWRFTVYPIMPAAGPKELLSDRCVLSCPSMDLVTCLLDFRLNLASNRSIVPRLAASLAACAQLSALAASHRMWALQRLRKLLTTEFGQSININRLLGENDGETRALSFTGSALAALVKGLPEALQRQFEYEDPIVRGGKQLLHSPFFKVLVALACDLELDTLPCCAETHKWAWFRRYCMASRVAVALDKRTPLPRLFLDEVAKKIRELMADSENMDVLHESHDIFKREQDEQLVQWMNRRPDDWTLSAGGSGTIYGWGHNHRGQLGGIEGAKVKVPTPCEALATLRPVQLIGGEQTLFAVTADGKLYATGYGAGGRLGIGGTESVSTPTLLESIQHVFIKKVAVNSGGKHCLALSSEGEVYSWGEAEDGKLGHGNRSPCDRPRVIESLRGIEVVDVAAGGAHSACVTAAGDLYTWGKGRYGRLGHSDSEDQLKPKLVEALQGHRVVDIACGSGDAQTLCLTDDDTVWSWGDGDYGKLGRGGSDGCKVPMKIDSLTGLGVVKVECGSQFSVALTKSGAVYTWGKGDYHRLGHGSDDHVRRPRQVQGLQGKKVIAIATGSLHCVCCTEDGEVYTWGDNDEGQLGDGTTNAIQRPRLVAALQGKKVNRVACGSAHTLAWSTSKPASAGKLPAQVPMEYNHLQEIPIIALRNRLLLLHHLSELFCPCIPMFDLEGSLDETGLGPSVGFDTLRGILISQGKEAAFRKVVQATMVRDRQHGPVVELNRIQVKRSRSKGGLAGPDGTKSVFGQMCAKMSSFGPDSLLLPHRVWKVKFVGESVDDCGGGYSESIAEICEELQNGLTPLLIVTPNGRDESGANRDCYLLSPAARAPVHSSMFRFLGVLLGIAIRTGSPLSLNLAEPVWKQLAGMSLTIADLSEVDKDFIPGLMYIRDNEATSEEFEAMSLPFTVPSASGQDIQLSSKHTHITLDNRAEYVRLAINYRLHEFDEQVAAVREGMARVVPVPLLSLFTGYELETMVCGSPDIPLHLLKSVATYKGIEPSASLIQWFWEVMESFSNTERSLFLRFVWGRTRLPRTIADFRGRDFVIQVLDKYNPPDHFLPESYTCFFLLKLPRYSCKQVLEEKLKYAIHFCKSIDTDDYARIALTGEPAADDSSDDSDNEDVDSFASDSTQDYLTGH

SEQ ID NO: 148582 - DNA, 1216 bp, Artificial Sequence
  derived and/or modified sequence
gggtagcgagaggcgtcgggatcgcgggcgccggctgagccagcggctgctgggaggctgtgtgcgcacgcctgcggggcgaggaggccgggccctgcgcctcaggcctgagaactgggaggaagctggagaaaagatgccctctgaatatttgtgtttggctgcccaggctcgccttgactccaaatggttgaaaacagatatacagatggagtcttgctctgttgcccaggctagagtgcagtggtgccatctcggcttaccgcaagctccgcctcccgggttcacgccattgtcctgcctcagcgtcccgagtacctggaactataggtgtccaccatcatacctggccaattttttgtattttcagtagagacggggtttcactgtgtcagccaagatggtctccatcttctgacctcgtgatccaccggccttggcctcttagagtgctgggattacaggcataagccaccactcccggccgatatattggtttgtttatgaaaattatactggatctgttacagatgatagtgtcaaaccaagtggaacaaagaaagaagatctggatgacaaagagaaaaaagatgaaactcctgcacctgtatatagggccaagtcaattctggagagctgggtatgggagtaagcaaccagggatgttcacggaacgccaggcaccaaaaggccagaagcatgcccctgcaggaccagcacttggctctggccatcctgctggagctggctgtgcagagaggcacgctgagccaaatgttgtctgccatcctgttgttgcttcagctgtgggacagcagggcacaggaaactgacaatgagcgttctgcccagggcaccagcaccttgcttttgtccttgctgcaaacgttccagagcatcatttgcggtaaggatacgcccccctccgagggcaacatgcaccttttgtctggccctctgagccccagtgagagtttcctgaggtacctcaccctccacaagacaacgagcttgccattgatctgcaacaaacggcagttgttgtcatggcccatttagaagatctggctacaccctgtagatgcctctgccgtgtagctgtccgacgtctcataagagagtcatttttttacaggtcagaactgtagaaataatgaggaagtgacacttatatgcaaagctgatttggagaaccataataaagatggaggcttct

SEQ ID NO: 148583 - DNA, 14505 bp, Artificial Sequence
  derived and/or modified sequence
atgccttcggaatccttctgcctcgcagctcaggctcgtctggattctaaatggttgaaaacggacatacagttggccttcacccgtgatggattatgtggactctggaacgagatggtgaaggacggcgaaattgtatacacagggaccgagtccacacaaaacggggaacttccaccacgaaaagatgacagcgtcgagccctccggcaccaaaaaggaggacctgaacgataaggagaaaaaggatgaggaagaaacccctgccccaatttatagagccaagtctatcctggattcctgggtgtggggaaagcagcccgatgtcaatgagctaaaagagtgcctcagtgtactggtcaaggaacagcaggcattggcggtccagagcgccactacgacactctccgccctgcgcctgaagcaacgattagtgatcctggagaggtacttcatcgctctgaataggacggtgtttcaagagaacgtgaaggttaagtggaagagctctggcatttcgcttcccccagtcgacaagaagtcatcacggccagctggtaaaggggtcgaaggccttgcgcgcgtgggaagccgtgccgcactgtcattcgcttttgcgtttctgcgtagggcttggcgatctggcgaagacgctgatctgtgttccgagctgcttcaggagtcacttgatgctcttagggctctcccggaggcctcactgttcgatgaaagcaccgtttctagtgtttggctcgaggtggtggagcgggccactcgctttttaaggagtgtcgtgactggcgatgtccacggaactcccgccacaaaaggccccggaagtatacctctccaagatcagcatctggcactcgcgatactgctggagctagccgtgcagaggggaacactgagccaaatgctttcagccatcctgcttctgctccagctctgggactctggagcccaggagacggataatgaacggtctgcacaagggacgtcagcgcccctgctgccactgctgcaacggttccagtcaatcatctgccggaaggacgctcctcatagtgagggggatatgcacctcctttctggacctctctcacccaacgaaagtttcttgcgttacctcaccctgccacaggacaatgagcttgctatagacctcagacagactgcggtcgttgttatggctcacctcgatcggctggcaaccccctgtatgccccccttgtgctcaagccctacctcccataagggaagtctccaagaggttatcggctggggactgatagggtggaagtattacgccaacgtaatcggtccaattcagtgtgagggacttgccaacctcggtgtgactcaaattgcctgcgctgagaaacgctttctgatcctgtctcgcaatggaagagtttatacccaggcctacaactctgataccttggcaccgcagctcgtccaaggcttggccagccgtaatatagtaaaaatcgccgcacactcggatggtcaccattatctcgcgctggcggcgaccggagaagtctactcttggggctgcggggatggaggaaggctcggacacggcgatacggtgcccttagaggaaccaaaggttatctcggctttcagtggcaagcaggctggaaaacatgtcgtgcacatcgcttgtggaagtacatactctgcagcaatcaccgcagaaggtgagctgtacacctggggacgcgggaactacggcaggttgggccatgggtccagcgaggatgaggccatccccatgctggtggccggcctcaaaggtctcaaggtgatcgatgtcgcctgtggctcaggcgacgctcagactctagctgtgactgaaaacggccaggtgtggagctggggggacggagactacgggaaactgggcaggggtgggtcagacgggtgtaaaacacccaagctgatcgagaaattacaggatttggacgtcgtaaaagtgcgatgtggtagccagttctcaatcgctctcacgaaggacggacaagtgtattcttggggtaaaggggataaccagaggctggggcacgggaccgaagagcatgtgcggtatcctaagctgttggaaggtctgcagggaaaaaaagtgattgatgtggctgctggctctacacactgtttagcgttaactgaggatagcgaggttcactcatggggcagcaacgaccaatgccaacatttcgatactctgagagtcaccaagccagagccggcagcactgccgggactcgacactaagcacatcgttggcattgcttgcggccctgctcagtccttcgcctggtcgtcctgtagcgaatggtctataggactgagagtcccttttgtcgtggatatttgctcaatgacctttgagcagctggacttactcctacgacaggtcagcgaggggatggatgggagcgctgactggcctcccccccaggagaaggagtgtgtcgcagtggccaccttaaaccttctgagactgcaactccatgccgcaataagccatcaggtcgaccctgagttcctcggactcggcctgggctctatcctgctgaactctctcaaacagaccgtggtaacattggcttctagtgctggggttctctcgacagttcaatctgccgcgcaggccgtgctgcagtctgggtggtccgtcctgctgcctaccgcagaggagagagcccgcgctctgagtgccttgctgccttgcgcggtctcaggaaacgaagtgaatatttctcccgggcggaggtttatgatcgatttacttgtcgggtcattaatggccgacggagggttggaaagcgctctgcatgccgcgatcactgcagagattcaggacatcgaggctaagaaagaggcacagaaagagaaagaaatcgacgagcaggaggcaaatgcctctacttttcaccgctccagaacccccctcgacaaagaccttatcaatacgggtatctgcgaaagcagcggaaaacagtgcttgcctctggtccagttgattcagcaattgctgagaaatatcgcctcccagaccgtggccagactcaaggacgtagctcggagaatcagttcttgcctggactttgaacagcatagtcgagaacgcagtgcctcactcgacctgctgttgaggttccagagacttttgattagtaaactttatcccggcgagtccattggacaaacgtctgatattagttctcctgagctcatgggggtgggaagccttttaaagaaatacacagcgctcttatgtactcacataggcgacattctgccagtagctgcaagtatcgccagcacaagctggcgacacttcgctgaggtcgcctacatagtggagggtgactttaccggtgtgctgctgcctgagctcgtcgtgtccattgtgctacttctctctaaaaatgccggactcatgcaggaggccggagcggtgcctctgctgggcggactcttagaacatctggatagattcaatcacctggctccaggaaaggagcgtgacgatcatgaggaactggcctggcccggcatcatggagtccttttttaccggccagaactgccgtaataatgaagaggttactttgatcaggaaggcggacctggagaatcacaacaaggatggcggcttctggactgtgatagacgggaaggtatacgacattaaggactttcagacgcagtccttgacaggcaacagcatactggctcagtttgccggagaagatcctgtcgtcgctctggaggccgcattgcagtttgaggacactcgcgagtcaatgcacgccttctgcgttggacagtacttggagccagatcaggagatcgtaactatcccagacctgggaagtctctccagcccccttatcgacactgagagaaacctcggactgctgctgggtctgcacgcttcttaccttgcgatgtctacaccactctccccggtagagatcgagtgtgctaagtggctgcagtccagcatcttttccggcggactccagacatctcagatccactactcctacaacgaggaaaaagacgaagaccattgctcatctcccgggggcactccagcctctaagtcaagactatgcagtcacaggcgcgcacttggtgatcattctcaggccttcttgcaggcaattgcggataacaatatccaggaccacaatgtgaaggatttcctgtgccagatcgagagatactgccgccagtgtcacttgacaaccccgattatgttcccgcctgagcatccagtcgaggaggtgggcagactgctgctctgttgtttgctgaaacacgaagatctcgggcacgttgctctctccttagtgcacgccggagcactcggcatcgagcaggtcaaacatagaactctgcccaagagtgtggtcgatgtctgtagagtagtgtatcaagctaagtgctctctcatcaaaacacaccaagagcagggtagatcctataaagaagtgtgtgcaccagttatcgagcggctgagattcctcttcaacgagcttcgacccgccgtgtgcaacgatctgtctatcatgagcaaattcaaattactttcttctctgccacgctggcgcaggattgcacagaagattatccgggagagacgtaaaaagagggtccctaagaaacctgaatctacagacgacgaagaaaagatcgggaatgaggaatctgatctggaggaggcctgcatcttgcctcactctccgataaatgtggataagcggcccatcgccattaagtctccaaaggacaagtggcagcctttattgtccacggttacgggtgtacacaagtacaagtggctgaagcaaaacgtgcaggggctgtaccctcagagtcccttactgtccaccatcgctgaatttgccttgaaggaggagccggtggatgtggagaagatgagaaagtgcctgctgaagcaactggaacgcgctgaggtgcgcctggaaggcatcgacaccatcctgaaattggcgtctaaaaacttcctgcttccaagcgtgcagtacgccatgttctgcggctggcagcgactgatccctgaggggattgacattggagagcctttaacagattgcctgaaggacgtggatctaattcctcctttcaatcggatgctcctagaggtgacatttggcaagctctacgcctgggccgtgcagaacattcgcaacgttcttatggacgcgagtgccaagtttaaagaactaggcatccaacctgtgcccctgcagaccatcacgaacgaaaatccttctggcccttccctgggtactattccccaggcccgcttcctcctcgttatgctcagcatgttgactctgcaacatggtgcaaataatctcgatttgctgctgaatagcgggatgctggcattgactcagactgcgctacgcctgatcgggccatcttgtgataacgtcgaggaagacatgaatgcctcagctcagggagcctccgccaccgtactggaggaaacaaggaaggagacggcccccgtccagctccccgtgagcgggcctgagctcgccgccatgatgaagattgggactcgggtgatgagaggagtagattggaaatggggggaccaagatggtcctccccccggcctcggcagggttatcggcgaacttggagaagatgggtggattagagtgcagtgggataccgggagtaccaacagctaccgtatgggcaaggaaggaaaatacgatctgaaattggcggagctccccgcggctgcacagccatcagccgaagattcagataccgaggacgacagcgaagctgagcaaactgagagaaacatccatcccactgccatgatgtttacaagtacaatcaatctgctgcagactttatgcctgagtgcaggggtacatgccgaaatcatgcagtctgaagccacaaaaacactttgcggattactgcgcatgttagtggagagtggaactacggacaagacttcttcaccaaataggctggtctatcgagaacagcatagatcctggtgcactctgggatttgttagatcgattgctctgacaccacaagtctgcggcgccttgtcctcaccacagtggatcaccctgctgatgaaggtcgtcgaggggcatgctcccttcaccgccacatctctccaacggcagatcctcgcagtacaccttctccaagctgtgctacctagttgggataagaccgaacgtgccagagacatgaagtgcctggtggagaaattatttgacttcctggggtcattgctgaccacatgttcaagcgacgtcccacttttgcgcgaaagcactttgaggaggagaagagtccgccctcaagccagcttgacagctacacacagcagcactctggctgaagaggtcgtggcccttctccggacactacattcactgacccaatggaacggcctgatcaataaatacatcaattcccaattaaggtccattacccactctttcgtgggcaggcctagcgaaggagcccagttggaggactactttcctgactccgagaatccagaagtcggaggtctgatggctgtcctcgcggtgattggtggcattgatggtcgattaagattgggcggtcaggtgatgcacgacgagtttggcgaaggtacagtgaccagaattacgccaaaagggaagattactgtgcagttctccgacatgcggacttgtagggtctgtcctcttaatcagctcaaacctttgcccgcagtggcgtttaatgtcaacaacctaccattcacagaacctatgttgtctgtgtgggcgcagttggtcaatctcgcaggatctaagctggagaaacacaaaataaagaagagtactaagcaggcgtttgccggacaggtagatctggatctgctgcgctgccaacagctgaaattgtacatcctgaaggccggcagggcactgctatcacaccaggataagctccggcaaatcctctctcagccagctgtgcaagaaacaggcaccgttcacacagatgatggggctgtagtaagtcctgaccttggggatatgtctcccgagggtccccaaccaccgatgattctcctgcagcagctcctagccagcgccacccagccctcccccgttaaggcaatctttgacaagcaggaactcgaagccgccgccctggcagtgtgccagtgcttagccgtggagtccacacatccgagctctccgggcttcgaggactgttctagctccgaagctacgacccccgtggcggtacagcacatcaggccagcccgggtgaaacgccggaagcagtctcctgttccagctctgcctattgtcgttcagctgatggagatggggttttctaggagaaatattgagtttgctttgaaatcccttacaggggcctccggaaacgcctcttcattgccgggcgtcgaagccctagtgggatggctcttagaccactccgacatccaggtgaccgaactgtcagacgccgatacagtgagcgacgagtactccgatgaggaggtggtagaggatgtggatgacgccgcgtacagtatgtctacaggcgccgttgtcaccgagtcgcaaacatataagaagcgagcagacttcctgtctaacgacgattacgccgtttacgtacgtgaaaacattcaggttggcatgatggtgcgatgctgccgggcatacgaagaggtttgcgagggcgatgtggggaaggtgattaagttggaccgagatggcctccatgaccttaatgtgcagtgcgactggcaacagaagggggggacttattgggtcagatatatccacgtagagcttatcggctacccccccccatcaagctcttctcatatcaaaattggggataaagttcgagttaaagcttctgtgaccaccccaaaatacaagtgggggtccgtgacccaccagagcgtgggagtagtcaaagccttctcagccaacgggaaggatattatcgttgattttccgcagcaaagtcattggacgggcttgttatccgagatggaactcgtgccaagtatccatccgggcgttacatgcgacgggtgccagatgttcccaatcaatggatcacgttttaaatgccgcaattgcgatgacttcgatttttgtgaaacatgttttaaaaccaagaagcataatacaagacatacgttcggacggatcaatgaaccagggcagtccgctgtgttctgtgggaggtccggtaagcagctgaagcgatgtcacagttctcaacccggaatgctgctggattcttggagtagaatggtgaaatctctcaatgtgagcagttctgtaaaccaggcgtcccggttaatcgacggaagcgagccctgttggcagtcatctggttctcagggtaagcactggatacggctcgaaattttccccgatgtgttagtacatagactaaagatgatcgtcgatcccgccgattcatcatatatgccttcactggttgttgtgtcaggagggaactctcttaataaccttatcgagttgaagaccattaacatcaacccctcagatacaaccgtgcctctgctgaatgattgtaccgaataccatcgctatatcgagattgctatcaaacaatgccggtcctccgggatagattgtaagatccatggtctgattctattggggcgaatccgcgcagaggaggaggatctggccgctgttcctttcctggcctccgataacgaagaagaggaagatgagaaaggcaattctggatcactaattaggaagaaagctgccggcctagagtctgccgcaaccatacgcacaaaagtctttgtttggggcttgaacgacaaggatcagctgggaggactgaaaggaagtaagatcaaagtcccctccttctcagagacactctcggctcttaacgttgtgcaggtcgcgggaggatccaagtcactgtttgcggttacagttgaagggaaggtctacgcctgcggagaggcaaccaatgggagactggggctgggcatcagttcaggtaccgtcccaattccaagacagatcacggcgttaagttcttatgttgtcaaaaaagttgcggtacacagtggcggccgtcatgctacagcattaacagtcgatggaaaagtgttttcttggggcgagggcgacgatggtaagctggggcacttttccagaatgaactgcgacaagcctcggctcattgaggcactcaagacaaaacgcatcagggatattgcttgtggcagctctcattccgccgcactgacctcatctggggagctgtatacatgggggctgggcgagtacgggcggcttggacacggggacaacactactcagctgaaaccaaagatggtcaaggttctgctcggccacagagtcattcaggttgcgtgcggatccagagacgctcagaccctcgcactcaccgacgaaggcttggtgttttcttggggtgatggggacttcggcaaactcggacgagggggatctgaaggctgcaatatcccccagaacatcgagcgcttgaatggccagggggtgtgccagatcgagtgcggcgcccagttcagtctggctctgaccaaatctggtgttgtatggacctggggcaaaggcgattacttccgactcggccatggctccgatgtgcacgttcgcaagccacaggtcgtggagggtctcaggggaaagaagatagtgcacgtggccgtcggagcactccactgcttagcagttacggattcggggcaggtctatgcctggggagacaacgatcatggccagcagggcaatggaacaacgaccgttaacagaaagccaaccctcgtgcagggacttgaggggcagaaaataacgcgagtggcctgtggttcctctcactccgtggcctggactaccgtcgacgtagcaactccttccgtgcatgaaccggtgctgttccagaccgccagagatcctctgggcgcgtcctatttaggagtgccgagcgatgctgacagcagcgccgccagcaacaaaattagtggagcaagcaacagcaagcccaacaggcctagcctggccaagattttgttgtcgctagacggtaacttagccaagcagcaggcacttagtcatatactgacagctcttcaaatcatgtatgccagggacgcggtagtcggagccctgatgccagccgcgatgatcgcccctgtcgagtgcccgagtttcagttcagccgctccctccgatgctagcgccatggccagtcccatgaacggcgaggagtgcatgctggccgtagacattgaggacaggttgtctccaaacccctggcaagagaagcgggaaatcgtgtcaagcgaggatgctgtgaccccctcggcggtcaccccctctgctccctcagcaagtgcccggccctttattccagtgacggacgatttgggagctgcgagcatcattgccgagacaatgacaaaaaccaaggaggatgtcgaatcgcagaataaagccgcaggtccagagccccaggcacttgacgagtttacgtccttactgattgccgacgatacgagggtggtcgtcgaccttctgaagttatcggtgtgcagcagagccggggaccgagggagagatgtactgtcagccgtgctgtccgggatgggcactgcatacccacaagtggccgacatgctgcttgaattgtgcgtgaccgagctggaggatgtggccactgacagccaaagcggacggctgtccagccagcccgtcgtggtagagagtagccacccatacacggatgacacttccacttccggcaccgtgaagatcccaggagctgagggactgcgagttgaatttgacaggcagtgctctacagaaagacgccacgatcccctaacagttatggatggagtgaacaggattgtcagcgtccggagcggcagagagtggagtgactggtcctctgaattaagaatacctggagacgaacttaaatggaagttcatctctgacggtagcgtcaacgggtggggttggcgctttaccgtgtaccccattatgcccgccgccggtccgaaagagctgttgagcgatcggtgtgtcctgtcttgtccatctatggacttggtaacctgtttgctggacttccggctaaaccttgcgagtaaccgctccattgtccctcgtctcgccgcctccctggccgcttgcgcccagctttctgctcttgcggcaagtcatcggatgtgggctctccaaagactcagaaaactgctcaccaccgaatttggccagagcattaatatcaatcggctcctcggggagaatgacggggaaactagggcgctgagcttcacaggctccgcgttagctgcactggttaaggggttacccgaggccttgcagaggcagtttgagtacgaggatcccatcgtgcgaggcggaaagcaactgctgcactcgccattctttaaggtgctagtcgcgctggcttgcgacctcgaactggacactctgccatgttgtgccgagacacacaaatgggcttggtttagacggtattgtatggcaagccgggtggccgtggccttggacaagcggacgccccttccacgcttgtttctggatgaagtcgccaaaaagattagagagctcatggccgactcggaaaacatggacgtcctccacgagtcacatgacatcttcaagcgggaacaggacgaacaacttgtccagtggatgaatagacgcccagacgattggactctatcagcagggggatccggtactatttatggctgggggcacaaccacagggggcagctcggaggcatcgagggggccaaagttaaggttcccaccccctgtgaagcactggctaccttgaggccagttcagctgattggcggagaacaaactttgtttgctgtaacggcagacggcaaactgtacgctaccgggtatggagccggaggtcgtctgggcattgggggcacggagtccgtcagtactcccactctgttagagtccattcaacacgtattcattaaaaaggtggccgtcaacagtgggggaaagcactgtctggcccttagttccgaaggggaggtttacagttggggggaggccgaagatgggaaactggggcacggcaatagatccccttgcgataggccccgtgtgatcgaatccctccgcggcattgaggtagtagacgtggccgcaggaggtgcccacagcgcttgcgtcacggccgctggagacctgtacacttgggggaagggtcgctatggacgactgggtcactccgatagtgaagatcagctcaaacccaaactggtcgaggctcttcagggtcatagagtggtggatatcgcatgtggcagcggagatgcgcagaccctttgcctaaccgatgacgatacagtgtggtcatggggggacggtgactacggaaagcttgggcggggtggcagcgatggatgtaaggtgccgatgaagatcgacagcctcaccggcctaggtgtagtcaaagtggaatgtgggtctcagttttccgtcgccttaaccaaatctggagcggtgtacacatggggaaagggggattaccataggctcggccatggatctgacgaccatgtccgcagacccaggcaggtgcagggtctgcaggggaagaaggttatcgcaatagccaccgggtcactccattgtgtgtgctgcacggaggacggcgaggtctacacgtggggggacaatgatgaagggcagttaggcgacggcacaaccaacgctattcagagaccaaggctggtggctgctctacagggcaagaaagtaaatagagtcgcctgtggatccgcccataccttggcctggagcacatcaaaacccgcctccgctggtaagctgcccgctcaagtaccaatggagtataaccatcttcaggagatccctatcatcgcactgcgaaaccggttgctcctgctgcatcatctgagtgaactgttttgcccgtgtatcccaatgttcgatctggaggggtctctcgatgagacgggacttggcccctccgtcggctttgacacattgcggggcattttaataagccagggaaaagaagccgcctttcggaaggtggttcaggcaacaatggtccgggacaggcagcatgggcctgtcgtcgagctgaacagaatacaggttaagcgctcaagatcaaaggggggtttggccggaccggatggcacaaaatctgtctttggacaaatgtgtgcaaaaatgtcatcgtttggcccggattcccttctcctccctcaccgggtttggaaggttaaatttgtcggtgagagcgtggacgactgtggcggagggtattccgagtccatcgccgagatatgtgaggagctacaaaacggactgacaccactgttgattgtaactcccaatggaagggatgaaagtggcgctaaccgcgactgctatctcctgtcccccgccgcaagggcacctgtccattccagcatgttccggtttttgggagtgttactgggaattgcgatcaggaccggatcccctctcagtctgaatcttgctgaaccagtatggaaacaactggccggaatgtccctgaccattgccgacttgtcagaggtcgacaaagacttcatcccgggtcttatgtacattagagataatgaggctacatctgaagagtttgaggccatgtctctccctttcaccgtgccatctgcttctggacaagacatccagctctcatcaaaacatacccatattacccttgacaaccgagcggagtatgtgcgcctggcgatcaactaccgactgcatgaattcgatgaacaggtcgctgctgtgcgggaaggcatggccagagtggtgcctgtacctctgctgtcactgttcacggggtacgagctggagactatggtgtgtggatccccagacattcccctgcatctgctgaagtccgtggctacgtacaaagggatcgagccaagtgcatctctcatacagtggttctgggaagtcatggagagttttagcaacacggagagaagcctctttcttcgtttcgtttggggccggaccaggctcccccgcacaattgctgattttcgaggacgtgacttcgtgatccaggtgctggataaatacaatccgcctgatcactttctgcccgaatcatacacgtgctttttccttctgaagctgcccaggtacagctgcaagcaggtattggaggaaaagctaaagtacgctatccatttctgtaaatcaattgataccgatgactacgcccgaattgccctgaccggagaaccggccgccgacgactcctcagacgactccgacaatgaagatgttgactcattcgcctctgattcgacacaggactatctgaccgggcattag

SEQ ID NO: 148584 - DNA, 15337 bp, Artificial Sequence
  derived and/or modified sequence
gcgccggctgagccagcggctcttgggaggctgcgtccgcgcgccggcgaggcgaggcggccgggccctgcgcgtcaggcctgagacctgggaggaagctggagaaaagatgccctctgaatctttctgtttggctgcccaggctcgcctcgactccaaatggttgaaaacagatatacagcttgcattcacaagagatgggctctgtggtctgtggaatgaaatggttaaagatggagaaattgtatacactggaacagaatcaacccagaacggagagctccctcctagaaaagatgatagtgtcgaaccaagtggaacaaagaaagaagatctgaatgacaaagagaaaaaagatgaagaagaaactcctgcacctatatatagggccaagtcaattctggacagctgggtatggggcaagcaaccagatgtgaatgaactgaaggagtgtctttctgtgctggttaaagagcagcaggccctggccgtccagtcagccaccaccaccctctcagccctgcgactcaagcagaggctggtgatcttggagcgctatttcattgccttgaatagaaccgtttttcaggagaatgtcaaagttaagtggaaaagcagcggtatttctctgcctcctgtggacaaaaaaagttcccggcctgcgggcaaaggtgtggaggggctcgccagagtgggatcccgagcggcgctgtcttttgcctttgccttcctgcgcagggcctggcgatcaggcgaggatgcggacctctgcagtgagctgttgcaggagtccctggacgccctgcgagcacttcccgaggcctcgctctttgacgagagcaccgtgtcctctgtgtggctggaggtggtggagagagcgaccaggttcctcaggtccgtcgtgacgggggatgttcacggaacgccagccaccaaagggccaggaagcatccccctgcaggaccagcacttggccctggccatcctgctggagctggctgtgcagagaggcacgctgagccaaatgttgtctgccatcctgttgttgcttcagctgtgggacagcggggcacaggagactgacaatgagcgttccgcccagggcaccagcgccccacttttgcccttgctgcaaaggttccagagcatcatttgcaggaaggatgcaccccactccgagggcgacatgcaccttttgtctggccctctgagccccaatgagagtttcctgaggtacctcacccttccacaagacaacgagcttgccattgatctgcgacaaacggcggttgttgtcatggcccatttagaccgtctggctacgccctgtatgcctccgctgtgtagctctccgacatctcataagggatcattgcaagaggtcataggttgggggttaataggatggaaatactatgccaatgtgattggtccaatccagtgcgaaggcctggccaacctgggagtcacacagattgcctgtgcagagaagcgtttcctgattctgtcacgcaatggccgcgtgtacacacaggcctataatagtgacacgctggccccacagctggtccaaggccttgcctccagaaacattgtaaaaattgctgcccattctgatggtcaccactacctagccttggctgctactggagaggtgtactcctggggctgtggggacggcggacggctgggccatggggacactgtgcctttggaggagcctaaggtgatctccgccttctctggaaagcaggccgggaagcacgtggtgcacatcgcttgcgggagcacttacagtgcggccatcactgccgagggggagctgtacacctggggccgcgggaactacggccggctgggccatggctccagtgaggacgaggccattccgatgctggtagccgggcttaaaggactgaaggtcatcgatgtggcgtgtgggagtggggatgctcaaaccctggctgtcactgagaacgggcaagtgtggtcttggggagatggtgactatgggaaattgggcagaggtggtagtgatggctgcaaaaccccaaagctgattgaaaagcttcaagacttggatgtggtcaaagtccgctgtggaagtcagttttccattgctttgacgaaagatggccaagtttattcatggggaaaaggtgacaaccagagacttggacatggaacagaggaacatgttcgttatccaaaactcttagaaggcttgcaagggaagaaggtgattgatgtggctgcaggctccacccactgcctggctctgactgaggacagcgaggtccacagctgggggagcaacgaccagtgccagcactttgacaccttgcgcgtgaccaagccagaacctgcagcattgccaggactggacaccaaacacatagtgggaattgcctgtgggcctgcccagagctttgcttggtcatcatgttctgagtggtccattggcctccgtgtcccttttgtggtggacatctgctcaatgacttttgagcagctggatctcctgcttcggcaggtgagtgaggggatggatggttccgcggactggcccccgccccaggagaaagagtgtgtggccgtggcaacgctgaatcttctacgacttcagttgcatgctgccattagtcaccaggttgacccggaattccttggtttaggtctgggcagcatcctcctgaacagcctgaagcagacggtggtgaccctggccagcagtgcgggcgtgctgagcaccgtgcagtcggccgcccaggccgtgctgcagagtggctggtccgtgctgctgcccaccgcggaggagcgggcccgggcactctctgctctcctgccctgcgcagtttcaggcaatgaagtgaacataagtccaggtcgtcgattcatgattgatcttctggtgggcagcttgatggctgatggagggttggagtcagccttacacgcagccattactgcagagatccaggatattgaagccaaaaaagaagcacagaaggaaaaagaaattgatgaacaggaagcgaatgcctcaacatttcatagaagcaggactccactggataaagaccttattaatacggggatctgtgagtcttctggcaaacagtgtttgcctctggttcagctcatacaacagcttcttagaaacattgcttctcagactgtagccagattgaaagatgttgcccgtcggatttcatcatgtctggactttgagcaacacagtcgtgaaagatctgcttcattggatttgttactgcgttttcaacgtttgcttattagtaaactttatccaggagaaagtattggtcagacctcagatatttctagtccagagctaatgggtgttggttccttgctgaagaagtacacagccctcctgtgcacgcacattggagatatactgcctgtggccgccagcattgcttctaccagctggcggcacttcgcggaggtggcttacattgtggaaggggactttactggtgttctccttccagaactagtagtttctatagtgcttctgctcagtaaaaatgctggtctcatgcaagaggctggagctgtacctctgctgggtggcctgttggaacatctggatcggttcaaccatctggcaccaggaaaggaacgggatgatcatgaagagttagcctggcctggcataatggagtcattttttacaggtcagaactgtagaaataatgaggaagtgacacttatacgcaaagctgatttggagaaccataataaagatggaggcttctggactgtgattgacgggaaggtgtatgatataaaggacttccagacacagtcgttaacaggaaatagtattcttgctcagtttgcaggggaagacccagtggtagctttggaagctgctttgcagtttgaagacacccgggaatccatgcacgcgttttgtgttggccagtatttggagcctgaccaagaaatcgtcaccataccagatctggggagtctctcttcacctctgatagacacagagaggaatctgggcctgcttctcggattacacgcttcgtatttggcaatgagcacaccgctgtctcctgtcgagattgaatgtgccaaatggcttcagtcatccatcttctctggaggcctgcagaccagccagatccactacagctacaacgaggagaaagacgaggaccactgcagctccccagggggcacacctgccagcaaatctcgactctgctcccacagacgggccctgggggaccattcccaggcatttctgcaagccattgcagacaacaacattcaggatcacaacgtgaaggactttttgtgtcaaatagaaaggtactgtaggcagtgccatttgaccacaccgatcatgtttccccccgagcatcccgtggaagaggtcggtcgcttgttgttatgttgcctcttaaaacatgaagatttaggtcatgtggcattatctttagttcatgcaggtgcacttggtattgagcaagtaaagcacagaacgttgcctaagtcagtggtggatgtttgtagagttgtctaccaagcaaaatgttcgctcattaagactcatcaagaacagggccgttcttacaaggaggtctgcgctcctgtcatcgaacgtttgagattcctctttaatgaattgagacctgctgtttgtaatgacctctctataatgtctaagtttaaattgttaagttctttgccccgttggaggaggatagctcaaaagataattcgagaacgaaggaaaaagagagttcctaagaagccagaatctacggatgatgaagaaaaaattggaaacgaagagagtgatttagaagaagcttgcattttgcctcatagtccaataaatgtggacaagagacccattgcaattaaatcacccaaggacaaatggcagccgctgttgagtactgttacaggtgttcacaaatacaagtggttgaagcagaatgtgcagggtctttatccgcagtctccactcctcagtacaattgctgaatttgcccttaaagaagagccagtggatgtggaaaaaatgagaaagtgcctactaaaacagttggagagagcagaggttcgcctggaagggatagatacaattttaaaactggcgagcaagaatttcttacttccatctgtgcagtatgcgatgttttgtggatggcaaagacttattcctgagggaatcgatataggggaacctcttactgattgtttaaaggatgttgatttgatcccgccttttaatcggatgctgctggaagtcacctttggcaagctgtacgcttgggctgtacagaacattcgaaatgttttgatggatgccagtgccaaatttaaagagcttggtatccagccggttcccctgcaaaccatcaccaatgagaacccgtcaggaccgagcctggggaccatcccgcaagcccgcttcctcctggtgatgctcagcatgctcaccctgcagcacggcgcaaacaacctcgaccttctgctcaattccggcatgctggccctcacgcagacggcactgcgcctgattggccccagttgtgacaacgttgaggaagatatgaatgcttctgctcaaggtgcttctgccacagttttggaagaaacaaggaaggaaacggctcctgtgcagctccctgtttcaggaccagaactggctgccatgatgaagattggaacaagggtcatgagaggtgtggactggaaatggggcgatcaggatgggcctcctccaggcctaggccgcgtgattggtgagctgggagaggacggatggataagagtccagtgggacacaggcagcaccaactcctacaggatggggaaagaaggaaaatacgacctcaagctggcagagctgccggctgctgcacagccctcagcagaggattcggacacagaggatgactctgaagccgaacaaactgaaaggaacattcaccccactgcaatgatgtttaccagcactattaacttactgcagactctttgtctgtctgctggagttcatgctgagatcatgcagagcgaagccaccaagactttatgcggactgctgcgaatgttagtggaaagcggaacgacggacaagacatcttctccaaacaggctggtgtacagggagcaacaccggagctggtgcacgctggggtttgtgcggagcatcgctctcacgccgcaggtatgcggcgccctcagctccccgcagtggatcacgctgctcatgaaggtcgtggaagggcacgcacccttcactgccacctcgctgcagaggcagatcttagctgtgcatttgttgcaagcagtccttccatcatgggacaagaccgaaagggcgagggacatgaaatgcctcgtggagaagctgtttgacttcttgggaagcttgctcactacctgctcctctgacgtgccattactcagagagtccacgctgaggcggcgcagggtgcgcccgcaggcctcgctgactgccacccacagcagcacactggcggaggaggtggtggcactgctgcgcacgctgcactccctgactcagtggaatgggctcatcaacaagtacatcaactcccagctccgctccatcacccacagctttgtgggaaggccttccgaaggggcccagttagaggactacttccccgactccgagaaccctgaagtggggggcctcatggcagtcctggctgtgattggaggcatcgatggtcgcctgcgcctgggcggtcaagttatgcacgatgagtttggagaaggcactgtgactcgcatcaccccaaagggcaaaatcaccgtgcagttctctgacatgcggacgtgtcgcgtttgcccattgaatcagctgaaaccactccctgccgtggcctttaatgtgaacaacctgcccttcacagagcccatgctgtctgtctgggctcagttggtgaacctcgctggaagcaagttagaaaagcacaaaataaagaaatcgactaaacaggcctttgcaggacaagtggacctggacctgctgcggtgccagcagttgaagctatacatcctgaaagcaggtcgggcgctgctctcccaccaggataaactgcggcagatcctgtctcagccagctgttcaggagactggaactgttcacacagatgatggagcagtggtatcacctgaccttggggacatgtctcctgaagggccgcagccccccatgatcctcttgcagcagctgctggcctcggccacccagccgtctcctgtgaaggccatatttgataaacaggaacttgaggctgctgcactggccgtttgccagtgcttggctgtggagtccactcacccttcgagcccaggatttgaagactgcagctccagtgaggccaccacgcctgtcgccgtgcagcacatccgccctgccagagtgaagaggcgcaagcagtcgcccgttcccgctctgccgatcgtggtgcagctcatggagatgggattttccagaaggaacatcgagtttgccctgaagtctctcactggtgcttccgggaatgcatccagcttgcctggtgtggaagccttggtcgggtggctgctggaccactccgacatacaggtcacggagctctcagatgcagacacggtgtccgacgagtattctgacgaggaggtggtggaggacgtggatgatgccgcctactccatgtctactggtgctgttgtgacggagagccagacgtacaaaaaacgagctgatttcttgagtaatgatgattatgctgtatatgtgagagagaatattcaggtgggaatgatggttagatgctgccgagcgtatgaagaagtgtgcgaaggtgatgttggcaaagtcatcaagctggacagagatggattgcatgatctcaatgtgcagtgtgactggcagcagaaagggggcacctactgggttaggtacattcatgtggaacttataggctatcctccaccaagttcttcttctcacatcaagattggtgataaagtgcgggtcaaagcctctgtcaccacaccaaaatacaaatggggatctgtgactcatcagagtgtgggggttgtgaaagctttcagtgccaatggaaaagatatcattgtcgactttccccagcagtctcactggactgggttgctatcagaaatggagttggtacccagtattcatcctggggttacgtgtgatggatgtcagatgtttcctatcaatggatccagattcaaatgcagaaactgtgatgactttgatttttgtgaaacgtgtttcaagaccaaaaaacacaataccaggcatacatttggcagaataaatgaaccaggtcagtctgcggtattttgtggccgttctggaaaacagctgaagcgttgccacagcagccagccaggcatgctgctggacagctggtcccgcatggtgaagagcctgaatgtgtcgtcctccgtgaaccaggcatcccgtctcattgacggcagcgagccctgctggcagtcatcggggtcgcaaggaaagcactggattcgtttggagattttcccagatgttcttgttcatagattaaaaatgatcgtagatcctgctgacagtagctacatgccgtccctggttgtagtgtcaggtggaaattccctgaataaccttattgaactaaagacaatcaatattaacccttctgacaccacagtgccccttctgaatgactgcacagagtatcacaggtatattgaaattgctataaagcagtgcaggagctcaggaatcgattgtaaaatccatggtctcatcctgctgggacggatccgtgcagaagaggaagatttggctgcagttcctttcttagcttcggataatgaagaggaggaggatgagaaaggcaacagcggaagcctcattagaaagaaggctgctgggctggaatcagcagctacgataagaaccaaggtgtttgtgtggggcctgaatgacaaggaccagctgggcgggctgaaaggctccaagataaaggttccttcgttctctgagacactgtcagctttgaatgtggtacaggtggctggtggatctaaaagtttgtttgcagtgactgtggaagggaaggtgtatgcctgtggagaagccacgaatggccggctggggctgggcatttccagcgggacggtgcccatcccacggcagatcacagctctcagcagctacgtggtcaagaaggtggctgttcactcaggtggccggcacgcgacggctttaactgtcgatggaaaagtgttttcgtggggcgaaggtgacgatggaaaacttggacacttcagcagaatgaactgtgacaaaccaaggctgatcgaggccctgaaaaccaagcgtatccgggatatcgcctgtgggagctcgcacagcgcagccctcacatccagcggagaactgtacacctggggcctcggcgagtacggccggctgggacatggggataatacgacacagctaaagcccaaaatggtgaaagtccttctcggtcacagagtaatccaggttgcatgtgggagtagagacgcgcagaccctggctctgaccgatgaaggtttggtattttcctggggtgatggtgactttggaaaactgggccggggcggaagtgaaggctgtaacattccccagaacattgagagactaaatggacagggggtgtgccagattgagtgtggagctcagttctccctggcgctcaccaagtctggagtggtgtggacatggggaaagggggattacttcagattgggccacggctctgacgtgcacgtgcggaaaccacaggtggtggaagggctgagagggaagaagatcgtgcatgtggctgtcggggccctgcactgcctggcggtcacggactcggggcaggtgtatgcttggggtgacaacgaccacggccagcagggcaatggcacgaccacggttaacaggaagcccacactcgtgcaaggcttagaaggccagaagatcacacgcgtggcttgtgggtcgtcccacagtgtggcgtggacaactgtggatgtggccacgccctctgtccacgagcccgtcctcttccagactgcaagagaccctttaggtgcttcctatttaggcgtgccttcagatgctgattcttctgctgccagtaataaaataagtggtgcaagtaattctaagccaaatcgcccttctcttgccaagattctcttgtcattggatggaaatctggccaaacagcaggccttatcacatattcttacagcattgcaaatcatgtatgccagagatgctgttgtcggggccctgatgccggccgccatgatcgccccggtggagtgcccctcgttctcctcggcggccccttccgacgcatctgcgatggctagtcccatgaatggagaagaatgcatgctggctgttgatatcgaagacagactgagtccaaatccatggcaagaaaagagagagattgtttcctctgaggacgcagtgaccccctctgcagtgactccgtcggccccctcagcctccgctcggccttttatcccagtgacggatgacctgggagccgcaagcatcattgcagaaaccatgaccaaaaccaaagaggatgttgaaagccaaaataaagcagcaggtccggagcctcaggccttggatgagttcaccagtctgctgattgcggatgacactcgtgtggtggtagacctgctcaagctgtcagtgtgcagccgggccggggacaggggcagggatgtgctctccgcggtgctttccggcatggggaccgcctacccacaggtggcagatatgctgttggagctctgtgtcaccgagttggaggatgtggccacagactcgcagagcggccgcctctcttctcagcctgtggtggtggagagtagccacccttacaccgacgacacctccaccagtggcacagtgaagataccaggtgcagaaggactcagggtagaatttgaccggcagtgctccacagagaggcgccacgaccctctcacagtcatggacggcgtcaacaggatcgtctccgtgcggtcaggccgagagtggtccgactggtccagcgagctgcgcatcccaggggatgagttaaagtggaagttcatcagcgatgggtctgtgaatggctggggctggcgcttcaccgtctatcccatcatgccagctgctggccctaaagaactcctctctgaccgctgcgtcctctcctgtccatccatggacttggtgacgtgtctgttagacttccgactcaaccttgcctctaacagaagcatcgtccctcgccttgcggcctcgctggcagcttgtgcacagctgagtgccctagctgccagtcacagaatgtgggcccttcagagactgaggaagctgcttacaactgaatttgggcagtcaattaacataaataggctgcttggagaaaatgatggggaaacaagagctttgagttttacaggtagtgctcttgctgctttggtgaaaggtcttccagaagctttgcaaaggcagtttgaatatgaagatcctattgtgaggggtggcaaacagctgctccacagcccattctttaaggtactggtagctcttgcttgtgacctggagctggacactctgccttgctgtgccgagacgcacaagtgggcctggttccggaggtactgcatggcctcccgtgttgctgtggcccttgacaaaagaacaccgttgccccgtctgtttcttgatgaggtggctaagaaaattcgtgaattaatggcagacagcgaaaacatggatgttctgcatgagagccatgacatttttaaaagagagcaagacgaacaacttgtgcagtggatgaacaggcgaccagatgactggactctctctgctggtggcagtggaacaatttatggatggggacataatcacaggggccagctcgggggcattgaaggcgcaaaagtcaaagttcccactccctgtgaagcccttgcaactctcagacccgtgcagttaatcggaggggaacagaccctctttgctgtgacggctgatgggaagctgtatgccactgggtatggtgcaggtggcagactaggcattggagggacagagtcggtgtccaccccaacattgcttgaatccattcagcatgtgtttattaagaaagtagctgtgaactctggaggaaagcactgccttgccctgtcttcagaaggagaagtttactcttggggtgaggcagaagatgggaagttggggcatggcaacagaagtccgtgtgaccgccctcgtgtcatcgagtctctgagaggaattgaagtggtcgatgttgctgctggcggagcccacagcgcctgtgtcacagcagccggggacctctacacatggggcaaaggccgctacggccggctggggcacagcgacagtgaggaccagctgaagccgaagctggtggaggcgctgcagggccaccgtgtggttgacatcgcctgtggcagtggagatgcccagaccctctgcctcacagatgacgacactgtctggtcctggggggacggggactacggcaagctcggccggggaggcagcgatggctgtaaagtgcctatgaagattgattctcttactggtcttggagtagttaaagtggaatgcggatcccagttttctgttgcccttaccaaatctggagctgtttatacctggggcaaaggcgattatcacaggttgggccatggatcagatgaccatgttcgaaggcctcggcaggtccaagggttgcaggggaagaaagtcatcgccatcgccactggctccctgcactgtgtgtgctgcacagaggatggtgaggtttatacatggggcgacaatgatgagggacaactgggagacggaaccaccaatgccatccagaggcctcggttggtagctgcccttcagggtaagaaggtcaaccgtgtggcctgtggctcagcacataccctcgcctggtcgaccagcaagcccgccagtgctggcaaactccctgcacaggtccccatggagtacaatcacctgcaggagatccccatcattgcgctgaggaaccgtctgctgctgctgcaccacctctccgagctcttctgcccctgcatccccatgttcgacctggaaggctcgctcgacgaaactggactcgggccttctgttgggttcgacactctccgaggaattctgatatcccagggaaaggaggcggctttccggaaagtagtacaagcaactatggtacgcgatcgtcagcatggccccgtcgtggagctgaaccgcatccaggtcaaacgatcaaggagcaaaggcgggctggccggccccgacggcaccaagtctgtctttgggcagatgtgtgctaagatgagctcgtttggtcccgacagcctcctccttcctcaccgtgtctggaaagtcaagtttgtgggtgaatctgtggatgactgtgggggcggctacagcgagtccatagctgagatctgtgaggagctgcagaacggactcacgcccctgctgatcgtgacacccaacgggagggatgagtctggggccaaccgagactgctacctgctcagcccggccgccagagcacccgtgcacagcagcatgttccgcttcctgggtgtgttgctgggcattgccatccgaaccgggagtcccctgagcctcaaccttgccgagcctgtctggaagcagctggctgggatgagcctcaccatcgcggacctcagtgaggttgataaggattttattcctggactcatgtacatccgagacaatgaagccacctcagaggagtttgaagccatgagcctgcccttcacagtgccaagtgccagtggccaggacattcagttgagctccaagcacacacacatcaccctggacaaccgcgcggagtacgtgcggctggcgataaactatagactccatgaatttgatgagcaggtggctgctgttcgggaaggaatggcccgcgttgtgcctgttcccctcctctctctgttcaccggctacgaactggagacgatggtgtgtggcagccctgacatcccgctgcaccttctcaagtcggtggccacctataaaggcatcgagccttccgcatcgctgatccagtggttctgggaggtgatggagtccttctccaacacagagcgctctcttttccttcgcttcgtctggggccggacgaggctgcccaggaccatcgccgacttccggggccgagacttcgtcatccaggtgttggataaatacaaccctccagaccacttcctccctgagtcctacacctgtttcttcttgctgaagctgcccaggtattcctgcaagcaggtgctggaggagaagctcaagtacgccatccacttctgcaagtccatagacacagatgactacgctcgcatcgcacttacaggagagccagccgccgacgacagcagcgacgattcagataacgaggatgtcgactcctttgcttcggactctacacaagattatttaacaggacactaagatggggaaacgtcctcgtgagatgagagcctgagccaggcagcagagcgctcgctgctgtgtagactgtaggctgcctggtgtgtctgatgagaagcgtccgtcctcgagccaggcgggaggagggagtggagagactgactggccgtgatgggaatgacagtgagaaggtccgcctgtgcgcgtggaacactgtggacgctcgacttccaagggtcttctcacccgtaatgctgcattacatgtaggactgtgtttactaaagtgtgtaaatgtttatataaataccaaattgcagcatccccaaaatgaataaagcctttttacttgtgggtgcaatcgattttttttctttctcctttctttcaagtgtcgtgagtcgtcttgattgtatattggaaataactgtgtaacaaatcgtattataaatatttcaattaattttactctgaatttgtttattaaaagacttttgaacatgaaatgattagtattacttgaatgcatccagaggatatttaaaccaaaatgaaaaaccagaaggccatttggtgtcccccctcccaggtgtccccttgtagcatatgcattatgtcatctgaattgaggcctttctgtgaacagcatcataacttctatcatggaaagtgtactatatataatgtttgtgtcatgtatatgcctaaattttaattatctataaataaaacatctgacataaaa

SEQ ID NO: 148585 - DNA, 14505 bp, Artificial Sequence
  derived and/or modified sequence
atgcccagcgagagcttctgcctggccgcccaggcccggctggacagcaagtggctgaagacagacatccagctggccttcaccagagatggcctgtgtggcctgtggaatgagatggtgaaggatggagaaattgtgtacacaggaacagagagcacccagaatggagagctgccccccaggaaggatgattctgtggagcccagcggcaccaagaaggaggacctgaatgacaaggagaagaaggatgaggaggagaccccagcccccatctaccgggccaagagcatcctggacagctgggtgtggggcaagcagccagatgtgaatgagctgaaggagtgcctgtctgtgctggtgaaggagcagcaggccctggccgtgcagagcgccaccaccaccctgagcgccctgcggctgaagcagaggctggtgatcctggagcgctacttcatcgccctgaacagaacagtgttccaggagaatgtgaaggtgaagtggaagagcagcggcatcagcctgccccctgtggacaagaagagcagcaggcctgctggaaaaggagtggagggcctggcccgggtgggcagcagagctgccctgagctttgcctttgccttcctgcggcgggcctggaggtctggagaagatgctgacctgtgcagcgagctgctgcaggagagcctggatgccctgcgggccctgcctgaggccagcctgtttgatgagagcacagtgtcctctgtgtggctggaggtggtggagcgggccacccgcttcctgcggtctgtggtgactggagatgtgcacggcaccccagccaccaagggccctggcagcatccccctgcaggaccagcacctggccctggccatcctgctggagctggccgtgcagaggggcaccctgagccagatgctgagcgccatcctgctgctgctgcagctgtgggacagcggggcccaggagacagacaatgaaagaagtgcccagggcaccagcgcccccctgctgcccctgctgcagcgcttccagagcatcatctgcaggaaggatgccccccacagcgagggggacatgcacctgctgagcggccccctgagccccaatgaaagcttcctgcgctacctgaccctgccccaggacaatgagctggccatcgacctgcggcagacagctgtggtggtgatggcccacctggaccggctggccaccccctgcatgccacccctgtgcagcagccccaccagccacaagggcagcctgcaggaggtgattggctggggcctgattggctggaagtactatgccaacgtcatcggccccatccagtgtgagggcctggccaacctgggcgtgacccagatcgcctgtgccgagaagcgcttcctgatcctgagcagaaatggccgggtgtacacccaggcctacaacagcgacaccctggccccccagctggtgcagggcctggccagcagaaatattgtgaagattgctgcccacagtgatggccaccactacctggccctggccgccactggagaggtgtacagctggggctgtggagatggcggccgcctgggccatggagacacagtgcccctggaggagcccaaggtgatcagcgccttcagcggcaagcaggccggcaagcacgtggtgcacatcgcctgtggcagcacctacagcgctgccatcacagctgagggggagctgtacacctggggccggggcaactacggccgcctgggccacggcagcagtgaagatgaggccatccccatgctggtggccggcctgaagggcctgaaggtgattgatgtggcctgtggcagcggagatgcccagaccctggccgtgacagaaaatggccaggtgtggagctggggagatggagactatggcaagctgggccggggcggcagtgatggctgcaagacccccaagctgattgagaagctgcaggacctggatgtggtgaaggtgcgctgtggcagccagttcagcatcgccctgaccaaggatggccaggtgtacagctggggcaaaggagacaaccagaggctgggccatggaacagaggagcacgtgcgctaccccaagctgctggagggcctgcagggcaagaaggtgattgatgtggccgccggcagcacccactgcctggccctgacagaggacagcgaggtgcacagctggggcagcaatgaccagtgccagcactttgacaccctgcgggtgaccaagccagagcctgctgccctgcccggcctggacaccaagcacatcgtgggcatcgcctgtggccctgcccagagctttgcctggagcagctgcagcgagtggagcatcggcctgcgggtgccctttgtggtggacatctgcagcatgacctttgagcagctggacctgctgctgcggcaggtgtctgagggcatggatggcagcgctgactggcccccaccccaggagaaggaatgtgtggccgtggccaccctgaacctgctgcggctgcagctgcacgccgccatcagccaccaggtggaccctgagttcctgggcctgggcctgggcagcatcctgctgaacagcctgaagcagacagtggtgaccctggccagcagcgctggggtgctgagcacagtgcagagcgctgcccaggccgtgctgcagagcggctggagcgtgctgctgcccacagctgaggagcgggcccgggccctgagcgccctgctgccctgtgctgtgtctggaaatgaggtgaacatcagccctggaagacgcttcatgattgacctgctggtgggcagcctgatggctgatggcggcctggagagcgccctgcacgccgccatcacagctgagatccaggacatcgaggccaagaaggaggcccagaaggagaaggagattgatgagcaggaggccaatgccagcaccttccacaggagcaggacccccctggacaaggacctgatcaacacaggcatctgtgagagcagcggcaagcagtgcctgcccctggtgcagctgatccagcagctgctgagaaatattgccagccagacagtggcccggctgaaggatgtggcccggcgcatcagcagctgcctggactttgagcagcacagccgggagaggtctgccagcctggacctgctgctgcgcttccagaggctgctgatcagcaagctgtacccaggagagagcatcggccagaccagtgacatcagcagccctgagctgatgggcgtgggcagcctgctgaagaagtacacagccctgctgtgcacccacatcggggacatcctgcctgtggccgccagcatcgccagcacctcctggaggcactttgctgaggtggcctacatcgtggagggggacttcaccggggtgctgctgcctgagctggtggtgtccatcgtgctgctgctgagcaagaatgccggcctgatgcaggaggccggggctgtgcccctgctgggcggcctgctggagcacctggaccgcttcaaccacctggcccctgggaaggagagagatgaccacgaggagctggcctggccaggcatcatggagagcttcttcaccggccagaactgcaggaacaatgaggaggtgaccctcatcaggaaggctgacctggagaaccacaacaaggatggcggcttctggacagtgattgatggcaaggtgtatgacatcaaggacttccagacccagagcctgaccggcaacagcatcctggcccagtttgctggagaagatcctgtggtggccctggaggccgccctgcagtttgaggacacccgggagagcatgcacgccttctgtgtgggccagtacctggagccagaccaggagatcgtgaccatcccagacctgggcagcctgagcagccccctgattgacacagaaagaaacctgggcctgctgctgggcctgcacgccagctacctggccatgagcacccccctgagccctgtggagattgaatgtgccaagtggctgcagagcagcatcttcagcggcggcctgcagaccagccagatccactacagctacaatgaggagaaggatgaggaccactgcagcagccctgggggcaccccagccagcaagagccggctgtgcagccacagaagagccctgggggaccacagccaggccttcctgcaggccatcgctgacaacaacatccaggaccacaacgtgaaggacttcctgtgccagatcgagcgctactgccggcagtgccacctgaccacccccatcatgttccccccagagcaccctgtggaggaggtgggccgcctgctgctgtgctgcctgctgaagcatgaggacctgggccacgtggccctgagcctggtgcacgccggggccctgggcatcgagcaggtgaagcacaggaccctgcccaagtctgtggtggatgtgtgccgggtggtgtaccaggccaagtgcagcctcatcaagacccaccaggagcagggccgcagctacaaggaggtgtgtgcccctgtgattgaaaggctgcgcttcctgttcaatgagctgcggcctgctgtgtgcaatgacctgagcatcatgagcaagttcaagctgctgagcagcctgccccgctggaggcgcatcgcccagaagatcatccgggagaggaggaagaagagggtgcccaagaagccagagagcacagatgatgaggagaagattggaaatgaggagagtgacctggaggaggcctgcatcctgccccacagccccatcaacgtggacaagaggcccatcgccatcaagagccccaaggacaagtggcagcccctgctgagcacagtgactggagtgcacaagtacaagtggctgaagcagaatgtgcagggcctgtacccccagagccccctgctgagcaccatcgccgagtttgccctgaaggaggagcctgtggatgtggagaagatgaggaagtgcctgctgaagcagctggagagagctgaggtgcggctggagggcatcgacaccatcctgaagctggccagcaagaacttcctgctgcccagcgtgcagtatgccatgttctgtggctggcagaggctcatccctgagggcatcgacatcggggagcccctgacagactgcctgaaggatgtggacctgatcccccccttcaacaggatgctgctggaggtgaccttcggcaagctgtatgcctgggccgtgcagaacatcagaaatgtgctgatggatgccagcgccaagttcaaggagctgggcatccagcctgtgcccctgcagaccatcaccaatgaaaaccccagcggccccagcctgggcaccatcccccaggcccgcttcctgctggtgatgctgtccatgctgaccctgcagcacggggccaacaacctggacctgctgctgaacagcggcatgctggccctgacccagacagccctgcggctgattggccccagctgtgacaacgtggaggaggacatgaatgccagcgcccagggcgccagcgccaccgtgctggaggagaccaggaaggagacagcccctgtgcagctgcctgtgtctggccctgagctggccgccatgatgaagattggcaccagggtgatgaggggcgtggactggaagtggggagaccaggacggccccccacctggcctgggccgggtgattggagagctgggggaggatggctggatccgggtgcagtgggacaccggcagcaccaacagctacaggatgggcaaggagggcaagtatgacctgaagctggccgagctgcctgctgctgcccagcccagcgctgaggacagcgacacagaagatgacagcgaggccgagcagacagaaagaaacatccaccccacagccatgatgttcaccagcaccatcaacctgctgcagaccctgtgcctgtctgctggggtgcacgccgagatcatgcagagcgaggccaccaagaccctgtgtggcctgctgaggatgctggtggagagcggcaccacagacaagaccagcagccccaaccggctggtgtaccgggagcagcaccgctcctggtgcaccctgggctttgtgcgcagcatcgccctgaccccccaggtgtgtggggccctgagcagcccccagtggatcaccctgctgatgaaggtggtggagggccacgcccccttcaccgccaccagcctgcagaggcagatcctggccgtgcacctgctgcaggccgtgctgcccagctgggacaagacagagcgggcccgggacatgaagtgcctggtggagaagctgtttgacttcctgggcagcctgctgaccacctgcagcagtgatgtgcccctgctgcgggagagcaccctgcggcggcggcgggtgcggccccaggccagcctgacagccacccacagcagcaccctggccgaggaggtggtggccctgctgcggaccctgcacagcctgacccagtggaatggcctcatcaacaagtacatcaacagccagctgcggagcatcacccacagctttgtgggccggcccagcgagggcgcccagctggaggactacttcccagattctgagaaccctgaggtgggcggcctgatggctgtgctggccgtcatcggcggcattgatggccgcctgcggctgggcggccaggtgatgcatgatgaatttggagagggcaccgtgacccgcatcacccccaagggcaagatcaccgtgcagttcagtgacatgaggacctgccgggtgtgccccctgaaccagctgaagcccctgcctgctgtggccttcaacgtgaacaacctgcccttcacagagcccatgctgtctgtgtgggcccagctggtgaacctggccggcagcaagctggagaagcacaagatcaagaagagcaccaagcaggcctttgctggccaggtggacctggacctgctgcgctgccagcagctgaagctgtacatcctgaaggccggccgggccctgctgagccaccaggacaagctgcggcagatcctgagccagcctgctgtgcaggagactggaacagtgcacacagatgatggagctgtggtgtccccagacctgggggacatgagccctgagggcccccagccccccatgatcctgctgcagcagctgctggccagcgccacccagcccagccctgtgaaggccatctttgacaagcaggagctggaggccgccgccctggccgtgtgccagtgcctggccgtggagagcacccaccccagcagccctggctttgaggactgcagcagcagcgaggccaccacccctgtggccgtgcagcacatccggcctgcccgggtgaagaggaggaagcagagccctgtgcctgccctgcccatcgtggtgcagctgatggagatgggcttcagcagaagaaatattgaatttgccctgaagagcctgactggagccagcggaaatgccagcagcctgcccggggtggaggccctggtgggctggctgctggaccacagcgacatccaggtgacagagctgagtgatgctgacacagtgtctgatgagtacagtgatgaggaggtggtggaggatgtggatgatgctgcctacagcatgagcactggagctgtggtgacagagagccagacctacaagaagagagctgacttcctgagcaatgatgattatgctgtgtatgtgcgggagaacatccaggtgggcatgatggtgcgctgctgccgggcctatgaggaggtgtgtgaaggagatgtgggcaaggtgatcaagctggacagagatggcctgcatgacctgaatgtgcagtgtgactggcagcagaagggcggcacctactgggtgcgctacatccacgtggagctgattggctaccccccacccagcagcagcagccacatcaagattggagacaaggtgcgggtgaaggcctctgtgaccacccccaagtacaagtggggctctgtgacccaccagagcgtgggcgtggtgaaggccttcagcgccaacgggaaggacatcatcgtggacttcccccagcagagccactggacaggcctgctgtctgagatggagctggtgcccagcatccaccctggggtgacctgtgatggctgccagatgttccccatcaatggcagccgcttcaagtgcaggaactgtgatgactttgacttctgtgagacctgcttcaagaccaagaagcacaacaccaggcacaccttcggccgcatcaatgaacctggccagagcgctgtgttctgtggccgcagcggcaagcagctgaagcgctgccacagcagccagcccggcatgctgctggacagctggagcaggatggtgaagagcctgaatgtgagcagctctgtgaaccaggccagccggctgattgatggcagcgagccctgctggcagagcagcggcagccagggcaagcactggatccggctggagatcttcccagatgtgctggtgcaccggctgaagatgattgtggaccctgctgacagcagctacatgcccagcctggtggtggtgtctgggggcaacagcctgaacaacctgattgagctgaagaccatcaacatcaaccccagcgacaccaccgtgcccctgctgaatgactgcacagagtaccaccgctacatcgagatcgccatcaagcagtgccgcagcagcggcatcgactgcaagatccacggcctcatcctgctgggccgcatccgggcagaggaggaggacctggccgctgtgcccttcctggccagtgacaatgaggaggaggaggatgagaagggcaacagcggcagcctcatcaggaagaaggctgctggcctggagagcgctgccaccatccgcaccaaggtgtttgtgtggggcctgaatgacaaggaccagctgggcggcctgaagggcagcaagatcaaggtgcccagcttcagcgagaccctgagcgccctgaatgtggtgcaggtggccggcggcagcaagagcctgtttgctgtgacagtggagggcaaggtgtatgcctgtggggaggccaccaacggccgcctgggcctgggcatcagcagcggcaccgtgcccatcccccggcagatcacagccctgagcagctatgtggtgaagaaggtggccgtgcacagcggcggcagacatgccacagccctgactgtggatggcaaggtgttctcctggggcgagggagatgatggcaagctgggccacttcagcaggatgaactgtgacaagccccggctgattgaggccctgaagaccaagaggatccgggacatcgcctgtggcagcagccacagcgctgccctgaccagcagtggagagctgtacacctggggcctgggggagtatggccgcctgggccatggagacaacaccacccagctgaagcccaagatggtgaaggtgctgctgggccacagggtcatccaggtggcctgtggcagcagagatgcccagaccctggccctgacagatgagggcctggtgttctcctggggagatggagactttgggaagctgggccggggcggcagcgagggctgcaacatcccccagaacatcgagcggctgaatggccagggcgtgtgccagattgaatgtggggcccagttcagcctggccctgaccaagtctggagtggtgtggacctggggcaaaggagactacttccggctgggccacggcagtgatgtgcacgtgaggaagccccaggtggtggagggcctgcggggcaagaagatcgtgcacgtggccgtgggcgccctgcactgcctggccgtgacagattctggccaggtgtatgcctggggagacaatgaccacggccagcagggcaatggcaccaccaccgtgaacaggaagcccaccctggtgcagggcctggagggccagaagatcaccagggtggcctgtggcagcagccacagcgtggcctggaccaccgtggatgtggccaccccatctgtgcatgagcctgtgctcttccagacagcccgggaccccctgggcgccagctacctgggcgtgcccagtgatgctgacagcagcgctgccagcaacaagatcagcggggccagcaacagcaagcccaaccggcccagcctggccaagatcctgctgagcctggatggcaacctggccaagcagcaggccctgagccacatcctgacagccctgcagatcatgtatgccagagatgctgtggtgggcgccctgatgcctgctgccatgattgcccctgtggagtgccccagcttcagcagcgctgcccccagtgatgccagcgccatggccagccccatgaatggagaggagtgcatgctggccgtggacatcgaggaccggctgagccccaacccctggcaggagaagcgggagatcgtgtccagtgaagatgctgtgacccccagcgctgtgaccccatctgcccccagcgccagcgcccggcccttcatccctgtgacagatgacctgggcgccgccagcatcatcgccgagaccatgaccaagaccaaggaggatgtggagagccagaacaaggctgctggccctgagccccaggccctggatgagttcaccagcctgctgattgctgatgacaccagggtggtggtggacctgctgaagctgtctgtgtgcagcagagctggggaccggggcagagatgtgctgtctgctgtgctgagcggcatgggcacagcctacccccaggtggccgacatgctgctggagctgtgtgtgacagagctggaggatgtggccacagacagccagagcggccgcctgagcagccagcctgtggtggtggagagcagccacccctacacagatgacaccagcaccagcggcaccgtgaagatccctggagctgagggcctgcgggtggagtttgaccggcagtgcagcacagagaggagacatgaccccctgactgtgatggatggagtgaaccgcatcgtgtctgtgcgcagcggccgggagtggagcgactggagcagcgagctgcgcatccctggagatgagctgaagtggaagttcatcagtgatggctctgtgaatggctggggctggaggttcaccgtgtaccccatcatgcctgctgctggccccaaggagctgctgagtgacagatgtgtgctgagctgccccagcatggacctggtgacctgcctgctggacttccggctgaacctggccagcaacagaagcatcgtgccccggctggccgccagcctggccgcctgtgcccagctgagcgccctggccgccagccacaggatgtgggccctgcagaggctgaggaagctgctgaccacagaatttggccagagcatcaacatcaaccggctgctgggggagaatgatggagagacccgggccctgtccttcaccggcagcgccctggccgccctggtgaagggcctgcctgaggccctgcagaggcagtttgaatatgaggaccccatcgtgcggggcggcaagcagctgctgcacagccccttcttcaaggtgctggtggccctggcctgtgacctggagctggacaccctgccctgctgtgccgagacccacaagtgggcctggttccgccgctactgcatggccagccgggtggccgtggccctggacaagaggacccccctgcccaggctcttcctggatgaggtggccaagaagatccgggagctgatggctgacagcgagaacatggatgtgctgcacgagagccatgacatcttcaagcgggagcaggatgagcagctggtgcagtggatgaacagaagaccagatgactggaccctgtctgctgggggcagcggcaccatctacggctggggccacaaccaccggggccagctgggcggcatcgagggcgccaaggtgaaggtgcccaccccctgtgaggccctggccaccctgcggcctgtgcagctgattggaggagagcagaccctgtttgctgtgacagcagatggcaagctgtatgccaccggctatggagctgggggccgcctgggcattggaggaacagagagcgtgtccacccccaccctgctggagagcatccagcacgtgttcatcaagaaggtggccgtgaacagcggcggcaagcactgcctggccctgagcagcgagggggaggtgtacagctggggcgaggctgaagatggcaagctgggccacggcaacagaagcccctgtgaccggccccgggtgattgagagcctgcggggcatcgaggtggtggatgtggccgccggcggggcccacagcgcctgtgtgacagctgctggggacctgtacacctggggcaagggccgctatggccgcctgggccacagcgacagcgaggaccagctgaagcccaagctggtggaggccctgcagggccaccgggtggtggacatcgcctgtggcagcggagatgcccagaccctgtgcctgacagatgatgacacagtgtggagctggggagatggagactatggcaagctgggccggggcggcagtgatggctgcaaggtgcccatgaagattgacagcctgaccggcctgggcgtggtgaaggtggagtgtggcagccagttctctgtggccctgaccaagtctggagctgtgtacacctggggcaaaggagactaccaccggctgggccacggcagtgatgaccacgtgcggcggccccggcaggtgcagggcctgcagggcaagaaggtgattgccatcgccaccggcagcctgcactgtgtgtgctgcacagaagatggagaggtgtacacctggggagacaatgatgagggccagctgggagatggcaccaccaatgccatccagaggccccggctggtggccgccctgcagggcaagaaggtgaacagagtggcctgtggcagcgcccacaccctggcctggagcaccagcaagccagccagcgctgggaagctgcctgcccaggtgcccatggagtacaaccacctgcaggagatccccatcatcgccctgaggaaccggctgctgctgctgcaccacctgtctgagctgttctgcccctgcatccccatgtttgacctggagggcagcctggatgagaccggcctgggccccagcgtgggctttgacaccctgcggggcatcctgatcagccagggcaaggaggccgccttcaggaaggtggtgcaggccaccatggtgcgggaccggcagcacggccctgtggtggagctgaaccgcatccaggtgaagaggagccgcagcaaaggaggcctggccggcccagatggcaccaagtctgtgtttggccagatgtgtgccaagatgagcagctttggaccagacagcctgctgctgccccaccgggtgtggaaggtgaagtttgtgggggagagcgtggatgactgtggcggcggctacagcgagagcattgctgagatctgtgaggagctgcagaatggcctgacccccctgctgattgtgacccccaacggcagagatgaaagtggggccaacagagactgctacctgctgagccctgctgcccgggcccctgtgcacagctccatgttccgcttcctgggcgtgctgctgggcatcgccatcagaacaggcagccccctgagcctgaacctggccgagcctgtgtggaagcagctggccggcatgagcctgaccatcgctgacctgtctgaggtggacaaggacttcatccctggcctgatgtacatccgggacaatgaggccaccagcgaggagtttgaggccatgagcctgcccttcaccgtgcccagcgccagcggccaggacatccagctgagcagcaagcacacccacatcaccctggacaacagagcagaatatgtgcggctggccatcaactaccgcctgcacgagtttgatgagcaggtggccgctgtgcgggagggcatggcccgggtggtgcctgtgcccctgctgagcctcttcaccggctatgagctggagaccatggtgtgtggcagcccagacatccccctgcacctgctgaagtctgtggccacctacaagggcatcgagcccagcgccagcctcatccagtggttctgggaggtgatggagagcttcagcaacacagagaggagcctcttcctgcgctttgtgtggggccgcacccggctgcccaggaccatcgctgacttccggggccgggactttgtgatccaggtgctggacaagtacaaccccccagaccacttcctgcctgagagctacacctgcttcttcctgctgaagctgccccgctacagctgcaagcaggtgctggaggagaagctgaagtatgccatccacttctgcaagagcattgacacagatgattatgccagaattgccctgaccggggagcctgctgctgatgacagcagtgatgacagcgacaatgaagatgtggacagctttgccagtgacagcacccaggactacctgaccggccactag

SEQ ID NO: 148586 - DNA, 14505 bp, Artificial Sequence
  derived and/or modified sequence
atgcccagcgagagcttctgcctggccgcccaggcccggctggactcaaaatggttaaaaactgacattcaactggcttttactcgagacggcttatgcgggctctggaatgagatggttaaggacggtgagatagtttatactggtacggaaagcactcagaacggagaacttccacccaggaaggatgacagtgtggaaccctcagggactaagaaggaggatctgaacgataaagagaagaaggacgaggaggaaacccctgctcctatttatcgcgctaagtcaatacttgattcctgggtctgggggaaacagccggacgtaaacgagctgaaggaatgtctctctgttctggtgaaggagcaacaggccctagctgtccagagtgcaactaccacactctcagcgctgcggttgaaacaacgcttggtcatcctggagcgctactttattgcactcaatagaacagtgttccaggagaatgtcaaagtgaagtggaaatcttcaggcataagtctcccaccagtcgacaagaaatcctcaaggcctgcgggaaagggtgtggagggtctggcaagagtggggtctcgcgcagccctttcttttgcttttgcattcctcagacgcgcatggcgctccggcgaagatgccgatctgtgcagcgagctgctccaggagtccctagatgcattgcgagcactgcctgaggctagcctgtttgatgaatctacagtgtctagcgtgtggctcgaggtggtcgagcgcgccaccaggtttttgcgttctgtggtgacaggagatgtccatggtacacctgcgacaaaaggcccaggcagtattccattacaggatcagcatctcgcgctagccattctgcttgagctggctgtacagcggggcacgttgtcccagatgcttagcgcaatcctgttgctgctccagctttgggactctggagctcaggaaacagataacgagagaagcgctcaaggcacctcagcccccctgctcccactgctccagcgcttccagtccatcatttgtaggaaagatgcgccgcatagcgagggagatatgcatctgctgtccggtccactgtcacccaacgaaagcttcctcagatatctaacactgccccaagataacgaactggccattgacctcaggcagacagctgtggtcgtgatggctcacctcgatcggctggcaacaccctgcatgcctcccctctgctcttcccctacaagtcacaaaggcagcctccaggaggtgattggctggggactgattggatggaaatattatgctaatgtcattggaccgatacaatgtgaggggctcgcaaatcttggcgtaacccagattgcctgtgccgagaagagattcctgattctgagcaggaacggaagagtgtacactcaggcatataattctgacacccttgcaccccagttggtgcagggcctcgctagtaggaacattgtgaaaatcgcagcacacagtgatggccatcattatctcgccctggcagctaccggagaggtgtacagttgggggtgcggagatggtggtcgtctcggccacggagatacagtaccccttgaggagcctaaagttatctctgcattcagcggcaagcaggcagggaagcacgttgtacacatagcttgcggctccacctattccgccgcaataaccgcggagggagagctgtacacctggggcaggggcaactacggcagacttggccatggttcatccgaggacgaagccataccaatgctggtagccggcctgaaaggtctgaaggtgatcgatgtggcttgcgggtcaggcgatgcccagacactggcagtcaccgaaaatggacaagtgtggagctggggggacggtgattatggtaaacttggtcgaggcggctctgacgggtgtaaaacaccgaaattgatcgagaaacttcaggatctggacgttgtcaaagtccgatgcgggtcccagttttccatcgcactgaccaaggatggacaggtgtacagctgggggaaaggggacaaccagcggctcggccacgggacggaggagcacgtacggtaccctaagctactggaggggctccaggggaaaaaggtcattgacgtggccgccggttcaacacattgcctagccctgaccgaggacagtgaagttcattcgtggggctcgaacgaccagtgtcaacacttcgatactctgcgggttaccaaaccggaacctgctgccctgcccggactcgacaccaaacacatagttggtatagcatgtggcccagcccaatccttcgcttggagcagctgctctgaatggtccataggcctacgagttcctttcgtggtggacatctgctccatgacttttgaacagttggatctgctgctcagacaggtcagtgagggcatggacgggagcgctgactggcctcctcctcaagagaaggagtgcgtggcagttgcaactctgaacttgctccggttgcagttgcacgcagcgatcagccatcaggttgatcctgagttcctcgggctcggtctggggagcattctgctgaactcactgaagcagactgtcgtcacactggcaagttcagccggtgtactttctactgtgcagtccgccgcccaggccgtcctacagtccggctggtccgtccttctccccacagcagaagaaagggccagagccctgtccgccctcctgccttgtgccgtatcgggtaacgaagtgaatataagcccaggacgtcgattcatgattgacctgcttgtgggtagtctgatggccgacggtggcctcgaatctgccttgcatgctgctattaccgcagaaattcaggatattgaggcaaaaaaagaagcgcagaaagaaaaggagattgatgagcaggaggcaaatgcaagtacgtttcaccgcagccgcaccccgctggacaaagatctaatcaatactggtatttgtgaaagcagcgggaagcagtgcctgccactcgtacaactgattcagcagctgcttaggaacatagccagccaaaccgttgccagactgaaagatgttgctaggagaatttccagctgccttgacttcgagcagcacagcagagaacggagcgccagtctagatctgctcctgagattccagagactgctgatctctaaactgtaccccggcgagtccataggtcagacctctgacattagttcaccggagctgatgggggtaggaagtctcctgaagaagtacacggcgttactgtgcacacacattggagacattttacctgtcgcagcttccatcgcttcaaccagctggcgacactttgctgaagtcgcttacatcgtcgaaggggacttcaccggcgttctgcttcccgaactggtcgtgagtatcgtgttgttgctgtccaagaatgctgggctcatgcaagaagctggggcagtgcccctgctggggggccttctggagcacttggaccgctttaaccacctcgctcctggaaaggaacgcgacgatcatgaagaactggcatggcctgggataatggagagtttctttacgggacagaactgcagaaataacgaggaggtgactttgattaggaaagctgatttagaaaaccacaataaagacggaggtttctggacagtcatcgacgggaaggtgtatgacattaaggacttccagacccagagcctaaccggtaatagtatcctcgcccagtttgctggcgaggacccagtggttgccctagaagctgcactacaattcgaggacactcgggaaagcatgcacgcattctgcgttggacaatatctagagccagaccaagaaatcgtgaccatacctgatctgggctcactgagctcacctctgatagacacagaaagaaatttgggacttctgttggggttgcacgcctcatacctcgctatgagtacacccttgtccccagtggagattgagtgcgcaaagtggctgcagtcttccatttttagcggcggccttcagaccagtcaaatccactactcgtacaatgaagaaaaagatgaagatcattgcagcagtcccggaggcacacccgctagcaagagccgactctgtagtcataggagggccctcggcgatcactcacaggcatttctccaggcaattgccgacaacaatattcaggaccacaacgtgaaagacttcctttgccagatcgaaagatactgtagacagtgccacctgacaacaccaattatgtttcctcctgaacatcctgttgaagaggtgggtagactgctgttgtgctgcttgcttaagcacgaggatctcggccatgtggctctttcactggttcacgcaggggctctcgggatcgaacaggttaaacacaggacgctacccaaatcggtggtagacgtatgcagagtggtctatcaggccaagtgctctttgatcaagacccaccaggaacagggacggtcttataaagaggtgtgcgcgcctgtgatcgaacgccttcggttccttttcaacgagctgagaccagctgtttgtaatgatctgtccattatgtctaagttcaagttgctgagcagcctacctagatggaggagaatagcccagaagataatacgggagaggaggaaaaagagggtcccaaaaaaaccagagagcacagacgatgaggagaaaattgggaacgaggaatcagatctggaagaagcgtgcattctgccccactccccgatcaacgtcgataagagacctattgcgattaagtcccctaaagacaagtggcagcctcttctgtccacggtgaccggggtgcataaatataaatggctgaaacaaaatgtgcagggcctttatccgcagagccccctgctgtctacaatcgccgagttcgccctgaaggaggagcctgtggacgtcgagaaaatgcgaaaatgcttgctgaagcaactggagagggccgaagtgagactggagggtatcgacacaatactgaagctagcaagcaagaattttctgctcccctcagtgcagtatgccatgttttgtgggtggcagcggctgatccctgaaggaatcgatattggagagccccttactgattgtttaaaagacgtagacctcattcccccattcaaccggatgctgctggaggtcacatttgggaagctttacgcatgggcagtgcagaatatccggaatgtgcttatggacgctagcgcaaaattcaaggagctgggcattcagccggtgccgttgcagaccatcacaaatgagaacccatccgggcctagtctcggcaccattccacaggcaaggttcttgctcgtgatgctgtctatgctcaccttgcagcacggcgcaaacaatttggatctgctgctaaatagcggaatgcttgccttgacacagactgccctgcgcctcatcggcccgagctgtgacaacgtggaagaggatatgaacgctagcgctcaaggggcctccgccaccgttttggaagagacacggaaagagacagccccagtacagctccccgtttctggcccagagctcgccgctatgatgaaaatcggcacaagagtcatgaggggagtggattggaagtggggcgaccaggacggaccccccccaggcctcggacgcgtaatcggagagcttggagaagatggctggatccgggttcagtgggatactggatctaccaacagctatcgcatgggcaaggaaggcaaatacgaccttaaacttgccgaactgccagccgcggcacagccgagcgcggaggactcagacactgaagatgacagcgaagcagaacagaccgagagaaacatccatcctacggctatgatgtttacctctacaattaacttgctgcagaccctgtgcttgagcgctggcgtccacgctgagatcatgcagtccgaagccactaagactctatgcggattgctgagaatgctggtggagtccggtaccactgacaaaacctcatccccaaatcggcttgtctaccgagagcaacaccgatcatggtgtaccttaggtttcgttcggtcgatcgctctgacgcctcaagtctgtggcgctctgagtagtccccagtggatcacactgctgatgaaggtggtagaaggacatgctccatttaccgcgacctccctgcagcgccagatcctggctgtccacttacttcaggccgtattaccgagctgggataagacagaaagagcccgggacatgaagtgtttagtggagaaactcttcgacttcctgggctccctgttgaccacctgttcttcagatgtgccattgctccgtgaatccactctgcgacgccgaagggtgcgaccccaggcctccctgacagccacacacagtagcactttggcagaggaggtggtagctctgctgcggaccctgcattccctaacccagtggaatgggttgatcaacaagtatatcaactcccagcttcggtctattacgcatagctttgtcggccgaccctccgagggtgcacaactggaggactacttcccggattcagagaaccccgaagttgggggcttgatggcagtcttagctgttatcggggggatcgacggaagacttcgccttggggggcaggtcatgcatgatgagttcggggagggcacagtgacccggattacaccgaaaggcaaaattaccgtgcagttcagtgacatgcgcacctgccgtgtgtgtcctctcaatcagctgaaacccctgccagcggtggcctttaacgtcaacaacttgccctttactgaacccatgttgagcgtgtgggctcagcttgtaaaccttgccggctctaaacttgagaagcataaaatcaagaagtcaaccaaacaggcattcgccggtcaggtggatctcgatctcctcaggtgtcagcagctgaaactttacatcttgaaagcaggaagagcgcttctgtcgcaccaggataaactgcgtcagatattgtcccagccagcagtgcaggaaacgggaactgtgcacacagatgacggcgcggtcgtatccccggacctgggcgatatgtcccccgaaggtcctcagccccctatgatcttacttcagcaactacttgcctccgctacccagccatctcctgtgaaagctatatttgataagcaagaacttgaagccgccgctctagctgtgtgtcagtgtctggccgtcgagtcaactcatccttccagcccaggcttcgaggattgctcgtcctcagaggccactacacccgtggctgtgcagcacatccggccggctcgggtaaaaaggagaaaacagagtcctgttcctgcattgcccatcgtggtgcagctgatggagatgggctttagcaggcgtaatattgaatttgcgctgaaaagcctaactggagcatccggaaatgccagcagcctaccaggcgtcgaggcccttgtgggctggttattagaccatagtgatatccaagtcaccgaactgtctgacgccgacactgtcagcgacgagtactctgatgaagaggtagtggaggacgtagacgatgctgcatacagcatgagcacaggagccgttgtcacggagtctcaaacttacaagaagcgggccgatttcctttcaaatgatgattacgccgtctatgtacgagagaatatccaggtgggaatgatggtcaggtgttgtagagcatacgaagaggtttgcgaaggggacgtgggcaaggttataaagctagacagggatggactgcacgatctgaacgtccagtgcgattggcagcaaaaggggggtacatactgggtaagatacatacacgtggaattaattggatacccccctccaagctcctcaagccatatcaaaatcggggacaaggtgcgggtgaaggcgagcgtgacaacccctaagtacaagtgggggtctgtcactcatcagtccgtgggagtggttaaagcgttttcggccaacggaaaggatatcatcgtcgattttcctcagcaatcacattggaccggccttttgtctgagatggagctcgtgccgagtatacaccctggagttacttgcgacgggtgtcagatgttcccgataaatggctcccggttcaagtgcagaaattgtgatgatttcgacttctgcgaaacatgtttcaaaacaaaaaagcacaacactcgccatactttcggaaggatcaatgaaccagggcaatccgctgtgttctgtggacgctctgggaagcagcttaagcggtgtcacagctcacaacctgggatgctgttggacagttggtctcgaatggttaagtcgctgaatgtcagctcgagcgtgaaccaagcctcaaggttgatcgacggcagtgaaccgtgctggcagtcttctgggagccaggggaagcactggatccgcttggagatttttcctgacgtcttagttcacaggcttaaaatgattgtagatccagccgattcctcatatatgccatctctggtggtcgtatccggaggcaactccctcaataaccttattgagttaaagactatcaacatcaatccgtccgatacaacggtgccgctactaaatgattgtacagagtatcatcgttatatcgagatcgccattaaacagtgtcggtcttccgggatagactgtaagattcacggactgatcttgctgggtcgtatccgcgcagaagaagaagatctcgctgcggtcccttttctcgcttctgacaatgaggaggaggaagatgaaaaagggaattccggctcgctgattcggaaaaaagccgcaggactcgagtcagctgctaccatacggaccaaggtctttgtgtggggacttaacgacaaagatcaattgggcggcttgaaggggagcaaaattaaagtcccctctttctccgaaactctttcagcactcaatgtggttcaagtcgccggcggttccaaaagtttgttcgccgttaccgtagagggaaaggtgtatgcatgcggagaggctacgaacggcagactcggattgggaatcagctccggcaccgtcccaattccaagacagatcaccgcactctcaagctatgtggtgaaaaaagtggccgtacattccggcgggagacacgcgactgctctaacagttgacggcaaagtctttagttggggcgagggagacgacggaaagctcggtcactttagcagaatgaattgcgataagcccaggctcatcgaggcccttaagacaaaaagaatccgcgacatagcatgtggctcaagccattccgctgcccttacctcaagtggcgagctgtatacttgggggttgggagaatatggtcggctcgggcatggcgacaataccacacagctgaagcccaagatggtaaaggtccttctcggtcatcgagtgattcaggttgcttgtggcagccgtgatgcgcagactcttgccctcacggatgaggggctggtcttctcatggggcgacggagacttcggtaagttggggagggggggatctgaggggtgtaacataccccagaacattgagagattgaacggacagggtgtttgtcagatcgaatgcggggcacagttttctcttgcacttaccaaaagtggggtggtctggacctggggaaaaggggactatttccgcttgggacatggcagcgatgtacacgtccgaaaacctcaggttgtggaaggtcttaggggcaaaaaaatcgtccacgttgctgtgggggcactccattgccttgcagtcacagatagcggacaagtttatgcctggggggacaatgatcatgggcagcaagggaatggcaccactaccgtaaataggaagccaaccctggtccaagggctggagggccagaagatcacccgagtggcctgtggatcatcccactccgtcgcctggaccactgttgacgtcgcaacgccatccgtgcacgaaccagtcctgttccaaacagctcgggatccactgggggcctcctatttgggcgtaccttctgacgctgactccagtgctgcttccaacaaaatctcaggagcaagcaactctaagcctaatagacccagcctcgctaagatcctgttatcactggatgggaacctcgcaaaacagcaggcactgtctcacattttgaccgccctgcagatcatgtatgcccgtgacgccgtggtcggcgccctgatgccggccgcgatgatcgcacctgtcgagtgccccagtttctctagtgctgccccgtctgatgcgagtgcaatggcgagcccaatgaatggtgaggaatgtatgctggctgtcgatatagaggaccgactgtccccaaacccctggcaggagaaacgggagatcgtgagtagtgaagatgcggtgacccctagcgccgttacgcccagcgctccatctgcttctgcacgccccttcataccagttaccgacgatttgggagctgcctccatcattgcagagacgatgactaagaccaaggaggacgtcgaaagccagaacaaggcagctggccccgaaccacaagctctggacgagttcacctctttattaatcgcagatgacacgcgggtggtcgtggacttactgaaactgagcgtgtgtagcagagccggggatcgaggacgggacgtactgtctgcagtcctctctggcatgggcacagcctatccacaagtcgccgacatgctgctagaattatgcgtgacagaactcgaggacgttgcaacagattcacagagtggacggttaagcagccagccggtcgtcgtggaatcaagccacccgtacacagacgatactagcaccagcggcactgtaaagattcccggggccgagggcttgagggttgaatttgacagacagtgcagtactgagcggcgtcacgacccccttacagtgatggacggagtcaatcggatcgtctccgtgaggtcagggagggagtggtcagactggtcaagcgagctcagaatccctggtgacgaattaaagtggaagttcatctctgatggcagcgtgaacggctggggttggagattcacagtgtacccaataatgccagctgccggtccaaaggagctcctcagcgatcgatgcgtgctgtcttgcccatctatggatctggttacctgccttctcgattttaggctcaacctggcctctaaccgcagcattgttccccgcctcgcagcctccttggcggcatgtgctcagcttagtgcccttgccgctagtcatagaatgtgggctttacagagactcagaaagctgctgactactgagtttggacaaagcattaacatcaatcgccttttgggcgaaaacgatggggagacccgggctctgtctttcaccggatcagctctagccgcgctagtgaagggcctgcctgaggctctccaaaggcaattcgagtacgaggaccccattgtgcgaggtgggaagcagctgctccactctcccttcttcaaagtcctggttgctcttgcctgcgacctggagcttgacactctgccctgctgcgcagaaactcacaaatgggcctggttcaggaggtactgtatggcctcccgcgtggcagtcgctctggacaaaaggacacctctgcctcgcctgttcctcgacgaagtggccaaaaagatcagggaactcatggctgatagcgaaaacatggatgtgcttcacgaatctcacgatatcttcaagagggagcaagacgaacaactcgtgcagtggatgaacagaaggccagatgattggacactatccgcgggaggctctggaacaatctacgggtggggtcataatcatcgaggtcagctgggcggaattgagggggctaaggtgaaggtgcccactccatgcgaagccctggctaccctgcgacccgtgcagctcatcggcggcgagcagacgcttttcgccgtgacagccgatggaaagctgtacgctacaggatatggcgccggagggaggctgggcattgggggaactgagtccgtttcgactccgaccttgctagagtcgatccagcacgtctttatcaaaaaagtcgcagttaattccggaggcaagcattgtctcgcccttagctctgagggtgaggtctactcttggggggaggcagaagacggaaaactcggtcatggtaatagaagcccctgcgaccgtccgcgagttattgagagtctccgtggcatcgaggtcgtggacgtagctgctggtggcgcgcacagtgcttgtgtaaccgctgccggagatctatatacttggggcaagggccggtatggccgcctaggacacagtgattcagaggaccagttgaaaccaaaactcgtcgaggccctgcagggccaccgcgtggttgacattgcctgcgggtcgggggacgcacaaaccttatgcttaaccgacgatgacaccgtatggtcttggggggatggcgattacggcaaactgggtcggggaggcagcgacggctgcaaggtcccgatgaaaatagatagccttacaggcctgggagtcgtgaaggtggaatgcggctctcaatttagtgtcgcgctgaccaagtcgggcgccgtttacacctggggtaagggtgattatcacaggttgggccacggatccgacgatcatgtcaggcgcccgcgccaagtgcagggcctccaaggaaagaaggtgatcgcaattgctacagggtccctccactgcgtgtgttgcaccgaggatggggaggtgtacacatggggtgataacgatgaaggtcagttgggcgatgggacgactaacgcgatacaacggccgaggttagtggctgctctgcaggggaagaaggtgaaccgcgtggcctgcggctcagcacatacactcgcttggtcaacctcaaaacctgctagcgccggcaagctgccggcacaggtgcctatggagtacaatcacttgcaagagatacccatcatcgcgctgcggaacaggctgctcctgcttcatcaccttagcgagctgttctgtccgtgtattcccatgtttgacctggaaggcagtctggacgaaaccggcctcggacctagcgttgggtttgacacgttgagaggcattctgatcagccagggcaaagaggcggcattcaggaaggttgtccaggctacaatggtaagggataggcagcacggccccgtggtggagctgaataggatccaggtgaaacgcagtaggtctaaaggaggtctggcgggacctgatggcacaaagagcgtgtttggccagatgtgtgcaaaaatgtcctcttttggccccgacagtctccttctgccacacagggtgtggaaggtgaaatttgtaggcgagtcggtcgatgattgtggcggggggtattcagaaagcatcgccgaaatttgcgaggaactgcaaaatggattaactccgctgctcatagttacccccaacggtagggatgaatcaggagcgaatagagattgttacctgttatcgcctgcagctagagcgccagtacactctagcatgtttcgcttcttgggcgtgctgctcgggatagcaatccggacaggctcaccattgagtttgaacctagccgaacccgtgtggaaacaactcgcaggaatgtcccttaccatcgccgacctctccgaggtggacaaggactttatccctggcctgatgtatatcagggacaacgaagccaccagtgaggaatttgaagccatgtccctgcctttcaccgtgccaagcgccagtggtcaggacattcaactgagctccaagcacacccatattacactggacaatcgagcagagtacgtccgactggcgataaactatcggctgcacgagttcgatgagcaggtggcagccgtgagagaagggatggcacgcgtcgtccccgtccctctgctcagcctgttcactggctatgagctcgagacaatggtgtgcggcagcccagacattcctctgcatcttctgaaaagcgtggcgacgtacaaggggatcgagcccagtgcttctttgatccagtggttttgggaagtcatggaaagtttctctaacactgagaggtccctcttcctgagattcgtttggggaagaacgcgattgcccaggaccattgccgactttcgaggcagagatttcgtcatacaagtactggataagtataatcctccggaccactttctgcccgaaagttatacttgtttctttctactgaagctgcccagatactcctgtaaacaggttctggaagaaaaacttaagtatgccatacatttttgcaaatcaatcgacactgatgattatgctaggatcgctctcaccggcgagcctgcagctgacgactccagcgacgacagtgataatgaggatgttgatagttttgcatccgactctacacaagattacttgaccgggcattag

SEQ ID NO: 148587 - DNA, 14505 bp, Artificial Sequence
  derived and/or modified sequence
atgccatctgaaagcttctgtctggccgcacaagcaaggttagactctaaatggcttaaaacagatatccagctggcttttaccagagacggcctttgcggcctttggaatgaaatggttaaggacggcgagatagtgtatactgggacagagtccacccagaacggcgaactccccccacgcaaggatgattccgtagagccttccggcacaaagaaagaagacttgaatgacaaggaaaaaaaagacgaagaggagactccagctccaatttatagagccaagagtattctggatagctgggtgtggggtaagcagcccgacgttaacgaacttaaggaatgtttgtcagtgctggttaaagagcagcaggctctggccgtgcagagcgccacgacaacactgagtgctctccgacttaaacagcgcctggttatcttggaacggtatttcatcgcgcttaaccggacggtcttccaggaaaatgtgaaggtcaagtggaagtcctccggtatctccttaccacctgtggacaagaagtcatccaggcctgccggtaagggggtggaggggctggcaagagttggctcccgagcggcattatcgttcgctttcgcatttttaaggagagcctggcgctcaggcgaggacgccgacctgtgtagtgaacttctccaggagtctctggatgcattgcgggctctgccagaggcgagcctgtttgatgaatctacagtctcatctgtgtggttggaagtggtcgagcgggctacacgttttctgcgcagtgttgtgacgggggacgtgcacggcacacccgctactaagggaccgggaagcatccctttacaggatcagcacctcgccctagctatcctgcttgagctcgcagttcaacgcggtaccctgtcccaaatgttatcagccatcctgctgcttctgcagttatgggactccggtgcccaagaaactgacaacgagcggtctgcccagggcacgagtgccccattgcttccactactccagcgcttccagagcatcatctgccgtaaggatgctccacactcagaaggggatatgcacctcctgagcggacccctaagtcccaatgaatccttcctccgatatctgactctgccgcaggacaatgaattggccatcgaccttaggcaaacagcagtcgttgtaatggctcatctcgatcgcttggctacaccttgtatgccccctctctgctcgagtccaacatcccataaaggaagtttgcaagaggtgatcggctggggcctcatcggatggaagtactacgctaacgtgatcggcccaatacagtgcgagggcctcgcaaatttaggcgttacgcagatagcctgtgccgaaaagagattcctgatcctgagtcgcaatggacgagtctacacgcaggcctataactcggatactttggctccccagttagtccagggtctggcaagccgcaacatcgtcaaaattgcggctcattccgacggacaccactacctggccctggcggctacaggcgaagtgtactcctggggctgtggggacggaggcagactgggacacggtgacactgtccccttagaggagccgaaagtgatttctgctttctcaggaaaacaggccggtaaacatgtagtgcacattgcatgtggcagtacatactcagcagcaattaccgctgagggagagctgtatacatggggccgtggcaattacggcaggctggggcatgggtccagtgaagacgaggctatcccaatgttggtcgccggactaaaagggctaaaggttatagacgtagcgtgcgggagcggagatgcccagacactggcggtcaccgaaaacggacaagtgtggtcttggggcgacggggattatggcaaactgggccgtggcggatccgatgggtgcaagacccccaagctcatagaaaagctccaggatttggatgtcgtgaaagttagatgcggttctcagttctccatcgctctgactaaagacggccaggtttatagttggggcaaaggagacaaccagcgccttggccatggcacagaggaacacgtccgttatcctaagctgctcgagggactgcagggaaaaaaagtgatcgatgtggcagccggttccactcattgtctggccctgacagaggattcagaggttcattcctggggctctaatgatcaatgtcagcatttcgacacccttagggtgaccaagcccgaacccgcagctctccctggattagatactaagcatattgttggtatcgcgtgtgggcctgctcagagttttgcatggtcgtcttgcagcgagtggagcatcggcctgcgtgtgcccttcgtcgttgacatctgctccatgacatttgagcagctggacctcctgctgcggcaggtgtcagaagggatggacggtagcgcggactggcctcccccacaagaaaaggagtgcgttgcagtggccactctgaatctgctgaggctgcaacttcatgcggctatcagccatcaggtcgacccggagtttttgggtctgggactaggtagtatcctgctgaattcgctgaagcagacagtggtgaccctcgcctccagcgccggtgtgctcagcactgtccagagcgccgctcaggccgttttgcagagcgggtggtccgtgttgctgcctaccgccgaggagagggcgagagccctgtccgcactactcccctgtgcagtgagcggtaatgaggtaaatatctcaccaggacggaggtttatgatcgatctgctggtcggatctttgatggcagacgggggactggagagcgctctgcacgccgctatcaccgctgaaattcaagacatcgaagctaaaaaggaagcccaaaaagaaaaggagatcgatgagcaagaggcaaacgcaagtacctttcacagatcaagaactccactggacaaagatttgattaacactggaatctgcgagtcctcaggcaagcagtgtctgcctctcgtgcaactaatccaacagctattacggaacatcgcttcgcagacagtggcacggcttaaggacgtggcgagaagaatttcttcatgcctggactttgagcaacactctcgggaacggtctgcctctctggacctcttgttgaggttccagagactgctaatcagcaagctgtaccctggggaaagcataggccagaccagtgacatatcttctccggagctgatgggggtgggctccttgctgaagaagtataccgctctcctatgtacgcacattggggacatactgcctgtggccgcttctattgcctcaactagttggaggcattttgccgaggtagcctatatagtggaaggtgactttaccggggttctgctgccagaactggtggtttccatcgtgctactgttatctaaaaacgcaggattgatgcaggaagcaggggcagtgccattactgggagggctgctggagcacttggatagatttaatcatctggcccctggcaaagaacgagacgatcacgaggaacttgcatggccaggaataatggagagcttctttacgggccagaattgccgaaataatgaagaagttacactgattaggaaggccgatttagagaatcacaataaggatgggggattttggacggtcattgacggtaaggtttacgatatcaaggactttcagacacagtccctcaccggcaatagcatacttgcccaattcgccggtgaagatcccgtcgttgcacttgaggctgcactccaattcgaagacacaagggaatccatgcacgcattctgtgtggggcagtatctggaacccgatcaggaaattgtgaccatccccgatctaggttctctaagcagcccgttgattgacactgagcgcaatctggggttgctgctgggtctacatgccagttacctggctatgtcaacgccactgtcacccgtagagattgagtgcgctaaatggctgcagtccagtatattttctggcggactgcaaacctcacaaattcactattcatacaacgaggagaaagacgaagatcactgttcctcaccaggtggcacacccgcatcgaagagccgcctctgttcccatagacgcgcactcggagaccatagtcaggcgtttctgcaggcaatcgctgataataacatccaggaccacaacgtgaaagattttctctgtcaaatagagcgttactgccgccagtgccacttgacaaccccaattatgtttcctcctgaacacccagtggaagaagtgggacgcctgcttctttgctgtctcctgaaacacgaggacctgggtcacgtggctctgtccctcgtgcatgcaggtgccttgggcatagaacaagtaaagcacaggaccttgccaaagtccgtcgtcgatgtctgcagggtcgtataccaagcaaagtgtagcttgatcaaaactcatcaggagcagggtcgatcctacaaggaggtatgtgcaccggttattgaaagactccggttcctcttcaacgagctgagaccggctgtctgtaatgacctatccatcatgtccaaattcaaactgttgtcttcactaccccgttggaggcgcatcgcccagaaaatcatcagggagcgacgcaaaaaaagggtacctaagaaacctgaatccacagatgacgaagaaaaaattggaaatgaagaaagcgacctcgaggaggcttgcatactcccccatagccctatcaacgtggacaagaggcccatcgcgattaagtctcctaaggacaaatggcaacctctcctgagtacagtgaccggcgtacataagtataaatggttgaagcagaatgtgcagggactgtacccccagtcgccccttttgtccactatcgcagaatttgccctcaaagaagaacctgttgatgtggagaagatgaggaaatgcctactgaagcaattggaacgagccgaggtgcggctggagggaattgatacgatcctgaagcttgcaagcaaaaatttccttctgcctagtgttcagtacgccatgttttgtggatggcagcggctcataccagagggtatcgacattggtgagccacttacagattgcctcaaggacgtcgacctgattccacccttcaaccggatgctacttgaagtgacatttggtaagctgtacgcatgggccgttcagaacatcaggaacgtcctcatggatgcttctgccaagtttaaggagcttggcatccagccagtgccactgcagaccatcaccaacgagaatccctccggccctagcctcggcacaattccccaggcgcgatttctcctagttatgctctcaatgctgaccttgcaacatggcgcaaataaccttgatctccttttgaattcaggcatgctggcactgacccagaccgctctgcgtttgatagggccttcttgcgacaacgtggaagaggatatgaatgcctccgcccagggggcatcagccaccgtgttagaggagactagaaaggagacagcaccagtccagttacccgtgtcgggcccagagctcgcagccatgatgaagattggcacacgtgtgatgagaggggtcgactggaagtggggggatcaggacggcccaccaccaggacttggtagggttatcggggaactgggagaagatggctggataagagtgcagtgggacaccggtagcaccaattcttataggatgggaaaagaaggcaagtacgaccttaaactggccgagctaccagcggctgcacagcccagtgcagaggacagcgatactgaggatgactcagaggccgagcagaccgagcggaatatccatcctactgcaatgatgtttacttctaccatcaatctgctccagacactgtgcctgagtgctggcgttcacgctgagatcatgcagtccgaagccacaaagacgctttgcggtctactgcgaatgctggttgaaagcggcactactgacaaaaccagctctcccaaccggcttgtttaccgggagcagcacagaagctggtgtactctgggttttgtgcggagcatcgcactgaccccacaggtatgtggcgctctatcaagtccccagtggattacgctcctgatgaaggttgttgagggacacgcgccatttacggcaaccagtttgcagcgccagattctagctgtgcatctgctacaagccgttctgccgagctgggacaaaaccgagcgtgccagggacatgaaatgcctggtggaaaagctcttcgacttccttggtagcctcctgaccacatgctccagtgatgtgccgctgctgagagaaagcaccctaagacgtaggagagtcaggccccaggctagcctgacagcgacccactccagtacgctagctgaagaggttgtggcattgcttcgaaccctccattctcttacccagtggaatggtcttatcaataagtacattaattcacagctgcgcagcatcacacactcgtttgtcggaagaccctccgagggggcacagctggaggactatttcccagactccgaaaatccagaagtaggaggcctcatggccgtactggctgtgattggaggtatcgatgggagattaaggcttggaggacaggtgatgcacgatgaattcggcgagggcaccgttacgcgcattacaccgaaaggaaagataaccgtgcaattttccgatatgcgcacatgcagagtgtgtccgctgaaccagctgaaacccctgccagccgtggcttttaacgtgaacaacctgccattcacagagcccatgttgagtgtgtgggctcagctggtcaatctggcgggatccaagctggaaaagcataaaatcaaaaagagcaccaaacaagccttcgccggacaggtggaccttgatctgctcaggtgtcagcaacttaaactgtatatcctgaaggcagggagggcactgctcagccatcaggataagctgcggcaaatcctcagccagcctgctgtgcaagaaacaggaaccgtccatacggacgacggcgcagtggttagtcccgatctcggcgacatgagcccagagggccctcagcctcccatgattctgttgcaacagcttctggcctcagccacccagcctagtcctgtcaaagctatcttcgataagcaagagctcgaagccgcagccctggctgtatgtcagtgtcttgctgtggagtcaacccacccaagtagtcccggatttgaagactgctccagctccgaagctacaactccagtcgctgtccagcacattcgtccagccagagtgaagagacgaaagcagtcccccgtgcctgcactgccgatcgtggtacagctgatggagatggggttcagtcggagaaacattgaattcgccctgaagagcctcaccggtgcttccggcaatgccagcagcttgccaggggtcgaggccctcgttggttggttgttggatcactccgatatacaagtgacagagctgtcagacgccgacacagtgagcgatgagtattcagatgaggaagtcgtggaagatgtggacgacgccgcatactccatgtcaacgggtgccgtggtcaccgaatctcagacttataagaagcgcgctgatttcctgtcaaatgacgactacgccgtgtatgtgagagagaacattcaggtcggaatgatggtccgctgctgcagggcgtatgaggaagtctgcgagggagacgtgggtaaggtgattaagctggatagagacggcttgcatgacttgaatgtgcagtgcgactggcagcagaagggaggaacctactgggtcagatacattcacgtcgaactgatcgggtatcccccaccgtctagcagcagtcatatcaagattggtgataaagtgagagtaaaagcctctgtgacaacacctaaatataaatggggaagtgtgacgcaccagtcagttggcgtcgtgaaagccttcagcgcaaatggtaaggacattatcgtcgatttccctcagcagagtcattggaccggtctcctgtctgaaatggagctggtgccttccatccacccaggggtcacctgcgatggttgccagatgtttcctattaatgggtccagatttaagtgcaggaattgtgatgactttgacttctgtgagacctgtttcaaaaccaagaaacacaatacccggcatacattcgggaggatcaacgagcctggacagagcgccgtattttgtggtcggtctggaaaacagctcaagcggtgccactctagccagccgggtatgcttctcgatagctggtctcggatggtgaagtcactgaacgtgtcctcttcggttaatcaggcctcccggctgatcgatggctccgagccatgttggcagtctagcggctcccaaggcaagcactggatacgcctcgagatttttccagatgtcctcgtccaccgtctgaagatgatcgtggatcctgccgactcttcttatatgccgtctctggtggtcgtctccggaggcaacagtcttaataacctcatcgagttgaagactatcaatatcaaccccagcgacacaacggtccccctgctgaatgattgcaccgagtatcacagatatattgagatcgctataaagcagtgtcgttcatctggaattgattgtaagatccacggccttatcttattggggagaatcagagccgaagaagaagatctggcggctgttcccttcttagcctcagataatgaggaggaggaagatgagaaaggtaactctggctccttgatcaggaaaaaggcagcaggtctcgagtccgccgctactatcagaaccaaggtgttcgtatggggtctgaatgacaaagatcaactgggaggcttgaaaggaagcaagataaaagttccaagtttttcagagaccctgagcgctttaaacgtcgttcaggtggctggaggtagtaaatcactcttcgctgtcaccgttgaggggaaggtatatgcctgcggtgaagccactaacgggagattgggcttaggcattagcagcggaacagtgcctataccccgacagatcacggctctaagcagttatgtggtaaagaaagtcgcagtacattctgggggaagacatgctaccgctctgacagtcgatggcaaagttttctcctggggggagggcgatgatggcaagctgggccacttctcccgcatgaattgcgacaagccacgcctgatcgaagcactgaagactaaacgcattagagatatcgcatgtggctcttcccacagtgccgctctcacgtccagcggggagctgtacacatggggtctgggcgaatacggcaggctcggtcacggcgacaatactacacagctaaaaccgaagatggttaaagtactgctcggccacagagtcatccaagtggcctgtggatctcgggacgcgcaaaccttagctcttacggacgagggcctagtcttcagctggggtgacggcgactttgggaagttaggtcgaggagggagcgaaggttgcaacattcctcagaacattgagcgtctgaatggccagggcgtttgccagatcgaatgtggggctcaatttagcctcgccttaacgaagagtggggttgtgtggacctggggaaagggggactactttagactgggacatggatcggacgttcatgtgcgcaagccacaggtggtggagggcctgcgaggaaaaaaaatcgtgcacgtggctgtgggagcactgcactgcctggcagtgaccgattctggacaggtctacgcatggggtgacaatgatcatggccagcagggcaatgggacaaccactgtaaatcgtaagcccacattggtacaggggctggagggccagaaaatcaccagggtcgcgtgtggttcgtcccattctgtcgcttggacgacagtagatgtggccaccccttctgtccacgagcctgttctgtttcagactgctcgagacccgctgggcgctagctatctgggggtaccctctgacgccgatagcagcgcagcttcaaacaagattagcggggcaagcaacagtaagccaaataggccctctttggccaaaattctgctcagtttggatggaaacctggccaagcagcaggcgctctctcacattctgactgcactacagattatgtatgcgagagacgctgtggtgggcgcactcatgcctgccgctatgatagctccagtggaatgcccctctttctcatctgccgcaccttccgacgcgtccgccatggcatccccaatgaatggggaggagtgtatgctcgccgtcgacatcgaggaccgcctctctccgaatccttggcaggagaaaagggaaatagtgtcatccgaagatgccgttaccccttccgcggtgaccccatctgcaccttccgcttccgccagacctttcatacctgtcacagacgacctgggtgctgcttccattatagcggaaacgatgacaaagactaaggaggacgtggagtcacagaataaagccgcaggacccgagccgcaggcgctggatgagttcacctccctcttgattgccgacgatacccgggtggtcgtcgaccttctgaagctgtccgtgtgttcacgggctggagaccgcggacgagacgtcctgagtgctgtcctgtctggaatgggcaccgcttatccacaggtagccgacatgctgctggagctctgcgtgaccgaactggaagacgtcgcaactgattcccaaagcggccgtctttcctcccagcccgtcgttgtagaatccagtcatccctacacagacgatacatccacaagcggcacggtcaagatccccggagccgaaggcctccgcgtggagttcgatcggcaatgctccaccgagcgccgtcacgatcctctgacggttatggacggtgtcaaccggatcgtttctgttaggagcggcagggagtggagtgattggtcttccgagctcagaattccaggcgatgagcttaaatggaaattcatctcagatggctctgttaacggctggggatggaggttcacagtctacccgataatgcctgcagcaggacccaaagaactgctgtcagatcgctgcgtcttgtcctgtcccagcatggatttggtgacatgcctcctagattttagactgaacctggcctctaaccggtcaattgtccctagattggctgcttccctggctgcctgcgcgcagctctctgctcttgccgcatctcatcggatgtgggcactccagagattgcgcaaactgctcactactgagttcgggcagagcataaacattaacaggcttctgggcgagaatgacggcgagactagagctctctcctttaccgggtccgcactcgccgcattggtgaaaggactgcccgaagccctgcaacgtcaattcgaatacgaggatccaatcgtgagggggggaaagcagctgctacactccccatttttcaaggtgctggtcgcactagcgtgcgacctggagctggatacactgccctgttgcgcagaaacgcacaaatgggcttggttccggcgatactgcatggcgagtagagttgctgtggctttagataagcggacacctctgccgaggctgttcttagatgaagtagcaaaaaaaattagggagcttatggctgattccgagaatatggacgtcctacacgagtcccacgatatttttaagcgcgagcaggatgagcagctggtgcagtggatgaatcgccgtcccgatgattggactctctcagccggagggtcaggcacgatctacggatgggggcacaatcatcgaggccaacttggcggtatcgagggcgcaaaggtgaaggtgcccactccctgcgaggcgctggcaaccctccgtcctgtccagctcatcgggggagaacagactcttttcgccgtcaccgcagacgggaaattgtacgctaccgggtatggagcagggggtcgtctagggatcggtggcaccgagagcgtctccaccccaactctacttgagtccatacagcacgtgttcatcaaaaaggttgccgtaaatagtggtggcaaacactgtctggcactgtccagcgagggcgaagtttactcatggggcgaagcagaagacggaaaattggggcacgggaatcggagtccttgtgatcgacctcgagttatcgaaagcctgagaggcatagaggtcgttgacgtcgccgctgggggagctcatagcgcatgtgtgacagccgctggcgatttatacacctggggtaagggcaggtacggtagactcggccacagcgatagcgaggaccagctgaagcccaaactcgtggaggcccttcagggacaccgagtggttgacatcgcctgcggatctggcgatgcccagacactgtgccttacagacgacgatacagtgtggagctggggagatggagattacgggaagctcggccgtggtggaagtgacggctgtaaggtccccatgaaaatcgacagcctgaccggcctcggggttgtgaaggttgagtgcggctctcagttctcagttgctctcacaaaaagtggcgcagtatatacttggggcaagggcgactaccatcggcttgggcatgggagcgacgaccatgtgagacggccaagacaggtgcagggactgcagggcaagaaagtcatcgctattgcaacaggcagtctgcattgcgtgtgctgcaccgaggacggagaggtttatacttggggcgataatgacgaaggccagttaggtgatgggacaacgaacgctatccagaggcctcggcttgttgctgccctgcagggtaaaaaggtgaacagagtcgcatgtggcagcgcccacacactcgcctggtcaacctcgaagcctgcgtcggccggaaagctaccagcgcaagtgcctatggaatataaccatttacaggagatccccatcattgccctgcgcaatcgcctcctgcttctacaccatctctccgaactattttgtccatgcatccccatgttcgatctggaagggtccctcgacgaaaccgggctagggccaagtgtggggttcgacacacttcgcggtatcctgatcagccagggaaaggaggcggcattcaggaaagtggtgcaggccaccatggtcagggaccgccagcatggaccagtggtagagttgaaccgcatacaggtgaagcgctcacgttcaaagggaggcctggctggaccggatggaaccaagtcggtctttggccagatgtgcgcaaaaatgtcttcattcggtcccgactccctactgctccctcacagggtctggaaagtcaagtttgtgggtgagtctgtagacgactgtgggggagggtactccgagtctatcgctgagatatgtgaagagctgcagaatggtctgactccactgctgatcgtgacgccaaacggacgcgatgaaagtggtgccaatcgggattgctatttgttgagtcccgctgccagagctcccgttcattccagcatgttccgcttcctgggtgtgcttttgggcatcgccatccgcacagggtctcctctgtctctaaatctggcagagcctgtgtggaaacaactagcaggtatgagcctcacaatcgctgacctgtctgaggtggataaggactttattccgggacttatgtacattagagacaacgaggcaacttcagaggagtttgaggctatgtctctcccattcacggtgccatcagcgagcggtcaggacatccagctatctagcaagcacacccacataacactggacaatcgggctgagtacgttcggttggccataaactaccggctgcatgaattcgacgagcaggtcgcagcagtgcgcgaaggcatggctagagtcgtacctgtgcccctactgagcctctttactggatatgaattggaaactatggtgtgcggatctcccgatattcccctccacctactcaagtccgttgcaacctacaaggggatcgagccatctgcttctctcatacagtggttctgggaggtcatggagtcctttagcaacaccgagaggtccctcttcctccgcttcgtctggggcagaacacgtctgcccaggacgatcgccgactttcgaggacgggattttgtcattcaggtattggacaagtacaatcctccagaccactttctgccagagtcctacacctgcttttttctgctgaagttgcccagatatagctgtaagcaagtgctggaagagaagctgaagtacgcaattcacttctgcaagagcattgatacagacgactatgcacggatcgctctgacaggagagcccgctgccgatgatagttctgatgactccgacaacgaggacgttgactcattcgcatcagattcaacccaggattacctcaccggccattat

SEQ ID NO: 148588 - DNA, 14505 bp, Artificial Sequence
  derived and/or modified sequence
atgcccagcgagagcttctgcctggccgcccaggccagactggacagcaagtggctgaagaccgacatccagctggccttcaccagagacggcctgtgcggcctgtggaacgagatggtgaaggacggcgagatcgtgtacaccggcaccgagagcacccagaacggcgagctgccccccagaaaggacgacagcgtggagcccagcggcaccaagaaggaggacctgaacgacaaggagaagaaggacgaggaggagacccccgcccccatctacagagccaagagcatcctggacagctgggtgtggggcaagcagcccgacgtgaacgagctgaaggagtgcctgagcgtgctggtgaaggagcagcaggccctggccgtgcagagcgccaccaccaccctgagcgccctgagactgaagcagagactggtgatcctggagagatacttcatcgccctgaacagaaccgtgttccaggagaacgtgaaggtgaagtggaagagcagcggcatcagcctgccccccgtggacaagaagagcagcagacccgccggcaagggcgtggagggcctggccagagtgggcagcagagccgccctgagcttcgccttcgccttcctgagaagagcctggagaagcggcgaggacgccgacctgtgcagcgagctgctgcaggagagcctggacgccctgagagccctgcccgaggccagcctgttcgacgagagcaccgtgagcagcgtgtggctggaggtggtggagagagccaccagattcctgagaagcgtggtgaccggcgacgtgcacggcacccccgccaccaagggccccggcagcatccccctgcaggaccagcacctggccctggccatcctgctggagctggccgtgcagagaggcaccctgagccagatgctgagcgccatcctgctgctgctgcagctgtgggacagcggcgcccaggagaccgacaacgagagaagcgcccagggcaccagcgcccccctgctgcccctgctgcagagattccagagcatcatctgcagaaaggacgccccccacagcgagggcgacatgcacctgctgagcggccccctgagccccaacgagagcttcctgagatacctgaccctgccccaggacaacgagctggccatcgacctgagacagaccgccgtggtggtgatggcccacctggacagactggccaccccctgcatgccccccctgtgcagcagccccaccagccacaagggcagcctgcaggaggtgatcggctggggcctgatcggctggaagtactacgccaacgtgatcggccccatccagtgcgagggcctggccaacctgggcgtgacccagatcgcctgcgccgagaagagattcctgatcctgagcagaaacggcagagtgtacacccaggcctacaacagcgacaccctggccccccagctggtgcagggcctggccagcagaaacatcgtgaagatcgccgcccacagcgacggccaccactacctggccctggccgccaccggcgaggtgtacagctggggctgcggcgacggcggcagactgggccacggcgacaccgtgcccctggaggagcccaaggtgatcagcgccttcagcggcaagcaggccggcaagcacgtggtgcacatcgcctgcggcagcacctacagcgccgccatcaccgccgagggcgagctgtacacctggggcagaggcaactacggcagactgggccacggcagcagcgaggacgaggccatccccatgctggtggccggcctgaagggcctgaaggtgatcgacgtggcctgcggcagcggcgacgcccagaccctggccgtgaccgagaacggccaggtgtggagctggggcgacggcgactacggcaagctgggcagaggcggcagcgacggctgcaagacccccaagctgatcgagaagctgcaggacctggacgtggtgaaggtgagatgcggcagccagttcagcatcgccctgaccaaggacggccaggtgtacagctggggcaagggcgacaaccagagactgggccacggcaccgaggagcacgtgagataccccaagctgctggagggcctgcagggcaagaaggtgatcgacgtggccgccggcagcacccactgcctggccctgaccgaggacagcgaggtgcacagctggggcagcaacgaccagtgccagcacttcgacaccctgagagtgaccaagcccgagcccgccgccctgcccggcctggacaccaagcacatcgtgggcatcgcctgcggccccgcccagagcttcgcctggagcagctgcagcgagtggagcatcggcctgagagtgcccttcgtggtggacatctgcagcatgaccttcgagcagctggacctgctgctgagacaggtgagcgagggcatggacggcagcgccgactggccccccccccaggagaaggagtgcgtggccgtggccaccctgaacctgctgagactgcagctgcacgccgccatcagccaccaggtggaccccgagttcctgggcctgggcctgggcagcatcctgctgaacagcctgaagcagaccgtggtgaccctggccagcagcgccggcgtgctgagcaccgtgcagagcgccgcccaggccgtgctgcagagcggctggagcgtgctgctgcccaccgccgaggagagagccagagccctgagcgccctgctgccctgcgccgtgagcggcaacgaggtgaacatcagccccggcagaagattcatgatcgacctgctggtgggcagcctgatggccgacggcggcctggagagcgccctgcacgccgccatcaccgccgagatccaggacatcgaggccaagaaggaggcccagaaggagaaggagatcgacgagcaggaggccaacgccagcaccttccacagaagcagaacccccctggacaaggacctgatcaacaccggcatctgcgagagcagcggcaagcagtgcctgcccctggtgcagctgatccagcagctgctgagaaacatcgccagccagaccgtggccagactgaaggacgtggccagaagaatcagcagctgcctggacttcgagcagcacagcagagagagaagcgccagcctggacctgctgctgagattccagagactgctgatcagcaagctgtaccccggcgagagcatcggccagaccagcgacatcagcagccccgagctgatgggcgtgggcagcctgctgaagaagtacaccgccctgctgtgcacccacatcggcgacatcctgcccgtggccgccagcatcgccagcaccagctggagacacttcgccgaggtggcctacatcgtggagggcgacttcaccggcgtgctgctgcccgagctggtggtgagcatcgtgctgctgctgagcaagaacgccggcctgatgcaggaggccggcgccgtgcccctgctgggcggcctgctggagcacctggacagattcaaccacctggcccccggcaaggagagagacgaccacgaggagctggcctggcccggcatcatggagagcttcttcaccggccagaactgcagaaacaacgaggaggtgaccctgatcagaaaggccgacctggagaaccacaacaaggacggcggcttctggaccgtgatcgacggcaaggtgtacgacatcaaggacttccagacccagagcctgaccggcaacagcatcctggcccagttcgccggcgaggaccccgtggtggccctggaggccgccctgcagttcgaggacaccagagagagcatgcacgccttctgcgtgggccagtacctggagcccgaccaggagatcgtgaccatccccgacctgggcagcctgagcagccccctgatcgacaccgagagaaacctgggcctgctgctgggcctgcacgccagctacctggccatgagcacccccctgagccccgtggagatcgagtgcgccaagtggctgcagagcagcatcttcagcggcggcctgcagaccagccagatccactacagctacaacgaggagaaggacgaggaccactgcagcagccccggcggcacccccgccagcaagagcagactgtgcagccacagaagagccctgggcgaccacagccaggccttcctgcaggccatcgccgacaacaacatccaggaccacaacgtgaaggacttcctgtgccagatcgagagatactgcagacagtgccacctgaccacccccatcatgttcccccccgagcaccccgtggaggaggtgggcagactgctgctgtgctgcctgctgaagcacgaggacctgggccacgtggccctgagcctggtgcacgccggcgccctgggcatcgagcaggtgaagcacagaaccctgcccaagagcgtggtggacgtgtgcagagtggtgtaccaggccaagtgcagcctgatcaagacccaccaggagcagggcagaagctacaaggaggtgtgcgcccccgtgatcgagagactgagattcctgttcaacgagctgagacccgccgtgtgcaacgacctgagcatcatgagcaagttcaagctgctgagcagcctgcccagatggagaagaatcgcccagaagatcatcagagagagaagaaagaagagagtgcccaagaagcccgagagcaccgacgacgaggagaagatcggcaacgaggagagcgacctggaggaggcctgcatcctgccccacagccccatcaacgtggacaagagacccatcgccatcaagagccccaaggacaagtggcagcccctgctgagcaccgtgaccggcgtgcacaagtacaagtggctgaagcagaacgtgcagggcctgtacccccagagccccctgctgagcaccatcgccgagttcgccctgaaggaggagcccgtggacgtggagaagatgagaaagtgcctgctgaagcagctggagagagccgaggtgagactggagggcatcgacaccatcctgaagctggccagcaagaacttcctgctgcccagcgtgcagtacgccatgttctgcggctggcagagactgatccccgagggcatcgacatcggcgagcccctgaccgactgcctgaaggacgtggacctgatcccccccttcaacagaatgctgctggaggtgaccttcggcaagctgtacgcctgggccgtgcagaacatcagaaacgtgctgatggacgccagcgccaagttcaaggagctgggcatccagcccgtgcccctgcagaccatcaccaacgagaaccccagcggccccagcctgggcaccatcccccaggccagattcctgctggtgatgctgagcatgctgaccctgcagcacggcgccaacaacctggacctgctgctgaacagcggcatgctggccctgacccagaccgccctgagactgatcggccccagctgcgacaacgtggaggaggacatgaacgccagcgcccagggcgccagcgccaccgtgctggaggagaccagaaaggagaccgcccccgtgcagctgcccgtgagcggccccgagctggccgccatgatgaagatcggcaccagagtgatgagaggcgtggactggaagtggggcgaccaggacggccccccccccggcctgggcagagtgatcggcgagctgggcgaggacggctggatcagagtgcagtgggacaccggcagcaccaacagctacagaatgggcaaggagggcaagtacgacctgaagctggccgagctgcccgccgccgcccagcccagcgccgaggacagcgacaccgaggacgacagcgaggccgagcagaccgagagaaacatccaccccaccgccatgatgttcaccagcaccatcaacctgctgcagaccctgtgcctgagcgccggcgtgcacgccgagatcatgcagagcgaggccaccaagaccctgtgcggcctgctgagaatgctggtggagagcggcaccaccgacaagaccagcagccccaacagactggtgtacagagagcagcacagaagctggtgcaccctgggcttcgtgagaagcatcgccctgaccccccaggtgtgcggcgccctgagcagcccccagtggatcaccctgctgatgaaggtggtggagggccacgcccccttcaccgccaccagcctgcagagacagatcctggccgtgcacctgctgcaggccgtgctgcccagctgggacaagaccgagagagccagagacatgaagtgcctggtggagaagctgttcgacttcctgggcagcctgctgaccacctgcagcagcgacgtgcccctgctgagagagagcaccctgagaagaagaagagtgagaccccaggccagcctgaccgccacccacagcagcaccctggccgaggaggtggtggccctgctgagaaccctgcacagcctgacccagtggaacggcctgatcaacaagtacatcaacagccagctgagaagcatcacccacagcttcgtgggcagacccagcgagggcgcccagctggaggactacttccccgacagcgagaaccccgaggtgggcggcctgatggccgtgctggccgtgatcggcggcatcgacggcagactgagactgggcggccaggtgatgcacgacgagttcggcgagggcaccgtgaccagaatcacccccaagggcaagatcaccgtgcagttcagcgacatgagaacctgcagagtgtgccccctgaaccagctgaagcccctgcccgccgtggccttcaacgtgaacaacctgcccttcaccgagcccatgctgagcgtgtgggcccagctggtgaacctggccggcagcaagctggagaagcacaagatcaagaagagcaccaagcaggccttcgccggccaggtggacctggacctgctgagatgccagcagctgaagctgtacatcctgaaggccggcagagccctgctgagccaccaggacaagctgagacagatcctgagccagcccgccgtgcaggagaccggcaccgtgcacaccgacgacggcgccgtggtgagccccgacctgggcgacatgagccccgagggcccccagccccccatgatcctgctgcagcagctgctggccagcgccacccagcccagccccgtgaaggccatcttcgacaagcaggagctggaggccgccgccctggccgtgtgccagtgcctggccgtggagagcacccaccccagcagccccggcttcgaggactgcagcagcagcgaggccaccacccccgtggccgtgcagcacatcagacccgccagagtgaagagaagaaagcagagccccgtgcccgccctgcccatcgtggtgcagctgatggagatgggcttcagcagaagaaacatcgagttcgccctgaagagcctgaccggcgccagcggcaacgccagcagcctgcccggcgtggaggccctggtgggctggctgctggaccacagcgacatccaggtgaccgagctgagcgacgccgacaccgtgagcgacgagtacagcgacgaggaggtggtggaggacgtggacgacgccgcctacagcatgagcaccggcgccgtggtgaccgagagccagacctacaagaagagagccgacttcctgagcaacgacgactacgccgtgtacgtgagagagaacatccaggtgggcatgatggtgagatgctgcagagcctacgaggaggtgtgcgagggcgacgtgggcaaggtgatcaagctggacagagacggcctgcacgacctgaacgtgcagtgcgactggcagcagaagggcggcacctactgggtgagatacatccacgtggagctgatcggctaccccccccccagcagcagcagccacatcaagatcggcgacaaggtgagagtgaaggccagcgtgaccacccccaagtacaagtggggcagcgtgacccaccagagcgtgggcgtggtgaaggccttcagcgccaacggcaaggacatcatcgtggacttcccccagcagagccactggaccggcctgctgagcgagatggagctggtgcccagcatccaccccggcgtgacctgcgacggctgccagatgttccccatcaacggcagcagattcaagtgcagaaactgcgacgacttcgacttctgcgagacctgcttcaagaccaagaagcacaacaccagacacaccttcggcagaatcaacgagcccggccagagcgccgtgttctgcggcagaagcggcaagcagctgaagagatgccacagcagccagcccggcatgctgctggacagctggagcagaatggtgaagagcctgaacgtgagcagcagcgtgaaccaggccagcagactgatcgacggcagcgagccctgctggcagagcagcggcagccagggcaagcactggatcagactggagatcttccccgacgtgctggtgcacagactgaagatgatcgtggaccccgccgacagcagctacatgcccagcctggtggtggtgagcggcggcaacagcctgaacaacctgatcgagctgaagaccatcaacatcaaccccagcgacaccaccgtgcccctgctgaacgactgcaccgagtaccacagatacatcgagatcgccatcaagcagtgcagaagcagcggcatcgactgcaagatccacggcctgatcctgctgggcagaatcagagccgaggaggaggacctggccgccgtgcccttcctggccagcgacaacgaggaggaggaggacgagaagggcaacagcggcagcctgatcagaaagaaggccgccggcctggagagcgccgccaccatcagaaccaaggtgttcgtgtggggcctgaacgacaaggaccagctgggcggcctgaagggcagcaagatcaaggtgcccagcttcagcgagaccctgagcgccctgaacgtggtgcaggtggccggcggcagcaagagcctgttcgccgtgaccgtggagggcaaggtgtacgcctgcggcgaggccaccaacggcagactgggcctgggcatcagcagcggcaccgtgcccatccccagacagatcaccgccctgagcagctacgtggtgaagaaggtggccgtgcacagcggcggcagacacgccaccgccctgaccgtggacggcaaggtgttcagctggggcgagggcgacgacggcaagctgggccacttcagcagaatgaactgcgacaagcccagactgatcgaggccctgaagaccaagagaatcagagacatcgcctgcggcagcagccacagcgccgccctgaccagcagcggcgagctgtacacctggggcctgggcgagtacggcagactgggccacggcgacaacaccacccagctgaagcccaagatggtgaaggtgctgctgggccacagagtgatccaggtggcctgcggcagcagagacgcccagaccctggccctgaccgacgagggcctggtgttcagctggggcgacggcgacttcggcaagctgggcagaggcggcagcgagggctgcaacatcccccagaacatcgagagactgaacggccagggcgtgtgccagatcgagtgcggcgcccagttcagcctggccctgaccaagagcggcgtggtgtggacctggggcaagggcgactacttcagactgggccacggcagcgacgtgcacgtgagaaagccccaggtggtggagggcctgagaggcaagaagatcgtgcacgtggccgtgggcgccctgcactgcctggccgtgaccgacagcggccaggtgtacgcctggggcgacaacgaccacggccagcagggcaacggcaccaccaccgtgaacagaaagcccaccctggtgcagggcctggagggccagaagatcaccagagtggcctgcggcagcagccacagcgtggcctggaccaccgtggacgtggccacccccagcgtgcacgagcccgtgctgttccagaccgccagagaccccctgggcgccagctacctgggcgtgcccagcgacgccgacagcagcgccgccagcaacaagatcagcggcgccagcaacagcaagcccaacagacccagcctggccaagatcctgctgagcctggacggcaacctggccaagcagcaggccctgagccacatcctgaccgccctgcagatcatgtacgccagagacgccgtggtgggcgccctgatgcccgccgccatgatcgcccccgtggagtgccccagcttcagcagcgccgcccccagcgacgccagcgccatggccagccccatgaacggcgaggagtgcatgctggccgtggacatcgaggacagactgagccccaacccctggcaggagaagagagagatcgtgagcagcgaggacgccgtgacccccagcgccgtgacccccagcgcccccagcgccagcgccagacccttcatccccgtgaccgacgacctgggcgccgccagcatcatcgccgagaccatgaccaagaccaaggaggacgtggagagccagaacaaggccgccggccccgagccccaggccctggacgagttcaccagcctgctgatcgccgacgacaccagagtggtggtggacctgctgaagctgagcgtgtgcagcagagccggcgacagaggcagagacgtgctgagcgccgtgctgagcggcatgggcaccgcctacccccaggtggccgacatgctgctggagctgtgcgtgaccgagctggaggacgtggccaccgacagccagagcggcagactgagcagccagcccgtggtggtggagagcagccacccctacaccgacgacaccagcaccagcggcaccgtgaagatccccggcgccgagggcctgagagtggagttcgacagacagtgcagcaccgagagaagacacgaccccctgaccgtgatggacggcgtgaacagaatcgtgagcgtgagaagcggcagagagtggagcgactggagcagcgagctgagaatccccggcgacgagctgaagtggaagttcatcagcgacggcagcgtgaacggctggggctggagattcaccgtgtaccccatcatgcccgccgccggccccaaggagctgctgagcgacagatgcgtgctgagctgccccagcatggacctggtgacctgcctgctggacttcagactgaacctggccagcaacagaagcatcgtgcccagactggccgccagcctggccgcctgcgcccagctgagcgccctggccgccagccacagaatgtgggccctgcagagactgagaaagctgctgaccaccgagttcggccagagcatcaacatcaacagactgctgggcgagaacgacggcgagaccagagccctgagcttcaccggcagcgccctggccgccctggtgaagggcctgcccgaggccctgcagagacagttcgagtacgaggaccccatcgtgagaggcggcaagcagctgctgcacagccccttcttcaaggtgctggtggccctggcctgcgacctggagctggacaccctgccctgctgcgccgagacccacaagtgggcctggttcagaagatactgcatggccagcagagtggccgtggccctggacaagagaacccccctgcccagactgttcctggacgaggtggccaagaagatcagagagctgatggccgacagcgagaacatggacgtgctgcacgagagccacgacatcttcaagagagagcaggacgagcagctggtgcagtggatgaacagaagacccgacgactggaccctgagcgccggcggcagcggcaccatctacggctggggccacaaccacagaggccagctgggcggcatcgagggcgccaaggtgaaggtgcccaccccctgcgaggccctggccaccctgagacccgtgcagctgatcggcggcgagcagaccctgttcgccgtgaccgccgacggcaagctgtacgccaccggctacggcgccggcggcagactgggcatcggcggcaccgagagcgtgagcacccccaccctgctggagagcatccagcacgtgttcatcaagaaggtggccgtgaacagcggcggcaagcactgcctggccctgagcagcgagggcgaggtgtacagctggggcgaggccgaggacggcaagctgggccacggcaacagaagcccctgcgacagacccagagtgatcgagagcctgagaggcatcgaggtggtggacgtggccgccggcggcgcccacagcgcctgcgtgaccgccgccggcgacctgtacacctggggcaagggcagatacggcagactgggccacagcgacagcgaggaccagctgaagcccaagctggtggaggccctgcagggccacagagtggtggacatcgcctgcggcagcggcgacgcccagaccctgtgcctgaccgacgacgacaccgtgtggagctggggcgacggcgactacggcaagctgggcagaggcggcagcgacggctgcaaggtgcccatgaagatcgacagcctgaccggcctgggcgtggtgaaggtggagtgcggcagccagttcagcgtggccctgaccaagagcggcgccgtgtacacctggggcaagggcgactaccacagactgggccacggcagcgacgaccacgtgagaagacccagacaggtgcagggcctgcagggcaagaaggtgatcgccatcgccaccggcagcctgcactgcgtgtgctgcaccgaggacggcgaggtgtacacctggggcgacaacgacgagggccagctgggcgacggcaccaccaacgccatccagagacccagactggtggccgccctgcagggcaagaaggtgaacagagtggcctgcggcagcgcccacaccctggcctggagcaccagcaagcccgccagcgccggcaagctgcccgcccaggtgcccatggagtacaaccacctgcaggagatccccatcatcgccctgagaaacagactgctgctgctgcaccacctgagcgagctgttctgcccctgcatccccatgttcgacctggagggcagcctggacgagaccggcctgggccccagcgtgggcttcgacaccctgagaggcatcctgatcagccagggcaaggaggccgccttcagaaaggtggtgcaggccaccatggtgagagacagacagcacggccccgtggtggagctgaacagaatccaggtgaagagaagcagaagcaagggcggcctggccggccccgacggcaccaagagcgtgttcggccagatgtgcgccaagatgagcagcttcggccccgacagcctgctgctgccccacagagtgtggaaggtgaagttcgtgggcgagagcgtggacgactgcggcggcggctacagcgagagcatcgccgagatctgcgaggagctgcagaacggcctgacccccctgctgatcgtgacccccaacggcagagacgagagcggcgccaacagagactgctacctgctgagccccgccgccagagcccccgtgcacagcagcatgttcagattcctgggcgtgctgctgggcatcgccatcagaaccggcagccccctgagcctgaacctggccgagcccgtgtggaagcagctggccggcatgagcctgaccatcgccgacctgagcgaggtggacaaggacttcatccccggcctgatgtacatcagagacaacgaggccaccagcgaggagttcgaggccatgagcctgcccttcaccgtgcccagcgccagcggccaggacatccagctgagcagcaagcacacccacatcaccctggacaacagagccgagtacgtgagactggccatcaactacagactgcacgagttcgacgagcaggtggccgccgtgagagagggcatggccagagtggtgcccgtgcccctgctgagcctgttcaccggctacgagctggagaccatggtgtgcggcagccccgacatccccctgcacctgctgaagagcgtggccacctacaagggcatcgagcccagcgccagcctgatccagtggttctgggaggtgatggagagcttcagcaacaccgagagaagcctgttcctgagattcgtgtggggcagaaccagactgcccagaaccatcgccgacttcagaggcagagacttcgtgatccaggtgctggacaagtacaacccccccgaccacttcctgcccgagagctacacctgcttcttcctgctgaagctgcccagatacagctgcaagcaggtgctggaggagaagctgaagtacgccatccacttctgcaagagcatcgacaccgacgactacgccagaatcgccctgaccggcgagcccgccgccgacgacagcagcgacgacagcgacaacgaggacgtggacagcttcgccagcgacagcacccaggactacctgaccggccactag

SEQ ID NO: 148589 - protein, 185 aa, Artificial Sequence
  derived and/or modified sequence
MARKKLKKFTTLEIVLSVLLLVLFIISIVLIVLLAKESLKSTAPDPGTTGTPDPGTTGTPDPGTTGTTHARTTGPPDPGTTGTTPVSAECPVVNELERINCIPDQPPTKATCDQRGCCWNPQGAVSVPWCYYSKNHSYHVEGNLVNTNAGFTARLKNLPSSPVFGSNVDNVLLTAEYQTSNRFHF

SEQ ID NO: 148590 - protein, 1857 aa, Artificial Sequence
  derived and/or modified sequence
MARKKLKKFTTLEIVLSVLLLVLFIISIVLIVLLAKESLKSTAPDPGTTGTPDPGTTGTPDPGTTGTTHARTTGPPDPGTTGTTPVSAECPVVNELERINCIPDQPPTKATCDQRGCCWNPQGAVSVPWCYYSKNHSYHVEGNLVNTNAGFTARLKNLPSSPVFGSNVDNVLLTAEYQTSNRFHFKLTDQTNNRFEVPHEHVQSFSGNAAASLTYQVEISRQPFSIKVTRRSNNRVLFDSSIGPLLFADQFLQLSTRLPSTNVYGLGEHVHQQYRHDMNWKTWPIFNRDTTPNGNGTNLYGAQTFFLCLEDASGLSFGVFLMNSNAMEVVLQPAPAITYRTIGGILDFYVFLGNTPEQVVQEYLELIGRPALPSYWALGFHLSRYEYGTLDNMREVVERNRAAQLPYDVQHADIDYMDERRDFTYDSVDFKGFPEFVNELHNNGQKLVIIVDPAISNNSSSSKPYGPYDRGSDMKIWVNSSDGVTPLIGEVWPGQTVFPDYTNPNCAVWWTKEFELFHNQVEFDGIWIDMNEVSNFVDGSVSGCSTNNLNNPPFTPRILDGYLFCKTLCMDAVQHWGKQYDIHNLYGYSMAVATAEAAKTVFPNKRSFILTRSTFAGSGKFAAHWLGDNTATWDDLRWSIPGVLEFNLFGIPMVGPDICGFALDTPEELCRRWMQLGAFYPFSRNHNGQGYKDQDPASFGADSLLLNSSRHYLNIRYTLLPYLYTLFFRAHSRGDTVARPLLHEFYEDNSTWDVHQQFLWGPGLLITPVLDEGAEKVMAYVPDAVWYDYETGSQVRWRKQKVEMELPGDKIGLHLRGGYIFPTQQPNTTTLASRKNPLGLIIALDENKEAKGELFWDNGETKDTVANKVYLLCEFSVTQNRLEVNISQSTYKDPNNLAFNEIKILGTEEPSNVTVKHNGVPSQTSPTVTYDSNLKVAIITDIDLLLGEAYTVEWSIKIRDEEKIDCYPDENGASAENCTARGCIWEASNSSGVPFCYFVNDLYSVSDVQYNSHGATADISLKSSVYANAFPSTPVNPLRLDVTYHKNEMLQFKIYDPNKNRYEVPVPLNIPSMPSSTPEGQLYDVLIKKNPFGIEIRRKSTGTIIWDSQLLGFTFSDMFIRISTRLPSKYLYGFGETEHRSYRRDLEWHTWGMFSRDQPPGYKKNSYGVHPYYMGLEEDGSAHGVLLLNSNAMDVTFQPLPALTYRTTGGVLDFYVFLGPTPELVTQQYTELIGRPVMVPYWSLGFQLCRYGYQNDSEIASLYDEMVAAQIPYDVQYSDIDYMERQLDFTLSPKFAGFPALINRMKADGMRVILILDPAISGNETQPYPAFTRGVEDDVFIKYPNDGDIVWGKVWPDFPDVVVNGSLDWDSQVELYRAYVAFPDFFRNSTAKWWKREIEELYNNPQNPERSLKFDGMWIDMNEPSSFVNGAVSPGCRDASLNHPPYMPHLESRDRGLSSKTLCMESQQILPDGSLVQHYNVHNLYGWSQTRPTYEAVQEVTGQRGVVITRSTFPSSGRWAGHWLGDNTAAWDQLKKSIIGMMEFSLFGISYTGADICGFFQDAEYEMCVRWMQLGAFYPFSRNHNTIGTRRQDPVSWDVAFVNISRTVLQTRYTLLPYLYTLMHKAHTEGVTVVRPLLHEFVSDQVTWDIDSQFLLGPAFLVSPVLERNARNVTAYFPRARWYDYYTGVDINARGEWKTLPAPLDHINLHVRGGYILPWQEPALNTHLSRQKFMGFKIALDDEGTAGGWLFWDDGQSIDTYGKGLYYLASFSASQNTMQSHIIFNNYITGTNPLKLGYIEIWGVGSVPVTSVSISVSGMVITPSFNNDPTTQVLSIDVTDRNISLHNFTSLTWISTL

SEQ ID NO: 148591 - DNA, 5574 bp, Artificial Sequence
  derived and/or modified sequence
atggcacgtaaaaaactaaagaaatttactaccctggaaatcgtactatccgttctccttttggtcctgtttatcatatctatcgtcctgatcgtgctccttgccaaggagagcctgaaaagtactgctccggatcctgggacaaccggcacgcctgatcctggcaccaccgggacccctgatcccggcaccacaggcacaacccacgctaggactactggcccgccagaccccggaacaacaggcacgacaccggttagcgcagaatgtcccgttgtcaacgagctagagagaatcaattgtatcccagatcaaccccccactaaggccacatgtgatcaacggggatgttgctggaacccccaaggcgcagtctctgtgccatggtgctattactcaaagaatcactcatatcatgtggaagggaacctcgtgaacacaaatgccggcttcaccgcccgcctgaaaaaccttcctagctcccccgtgtttggttctaacgtggataacgtcctgctgacagccgagtatcagacatccaaccggttccattttaagcttacggaccaaaccaacaacagattcgaggtgcctcatgagcacgtgcagagtttttctggtaatgctgcagcttctctcacttaccaggttgagatttcacgacaaccattttccattaaagtaactcggagaagtaataatcgggttctgtttgattcgtccatcgggccacttctgtttgcagatcagttcctgcagcttagcacacggctcccatcaactaacgtgtacggactgggggagcatgtgcaccagcagtacaggcacgatatgaactggaagacgtggcccatttttaacagagacactacccccaacggcaatgggactaacctgtacggagcccaaacattctttctctgtctggaggatgcatccggtctctcatttggtgtgtttctcatgaatagcaatgcaatggaggtggttctccagcctgccccagctatcacttatcggaccattggaggcattctcgacttttacgtgttccttggcaacaccccagagcaggtcgttcaggaatacttggagctaatcgggcggcctgctctgccatcatactgggcactggggtttcatctcagcagatacgagtatgggactctcgataacatgagagaggttgttgaacgcaatagggccgcccaacttccttacgatgtgcagcatgcagatatagattacatggatgaacggcgggacttcacctacgacagtgtggatttcaaaggatttcctgaatttgtgaatgagctccacaataatgggcagaagctggtgattatcgttgaccctgccatttccaacaactcgagctcatccaaaccctacggaccctatgatcggggcagcgatatgaaaatttgggtcaactctagcgatggggttactccactgattggggaggtctggccaggtcagactgtgtttccagattacactaatccaaactgcgctgtctggtggaccaaagagttcgagttgttccacaaccaagtggagttcgatggcatatggatcgatatgaatgaggtgtctaacttcgtagacgggtcagtgtccggctgtagtaccaataatctcaacaaccctcctttcactccaaggatcctagatggatatctgttctgcaagaccctctgcatggatgcagttcagcactggggaaagcagtacgatatccataacctctatggttactccatggctgtggccacagccgaagctgcaaagacggtattccccaataagaggagctttatactgaccagaagtacgttcgcgggatccggcaaattcgccgcacattggctaggggacaacaccgcaacctgggacgacttgcgctggtcaattcccggcgttcttgagttcaacctgttcgggattcctatggtaggcccggacatctgcggatttgccctggatacaccagaggagttgtgccgccggtggatgcagctcggcgccttttaccctttttcccgtaatcacaacgggcaggggtacaaggatcaagacccggcgtctttcggggccgatagccttttgctgaactcaagtagacactatcttaatatccgatacacgcttcttccttatctctataccttgttcttccgggcgcattcgcggggtgacaccgtagctcgtcccctccttcacgaattttacgaggataacagtacctgggatgtacaccagcagtttctgtgggggcccgggctgctaattacgcccgtcctggacgagggagcagagaaagtaatggcctatgtgcccgatgccgtctggtacgattatgagacaggttcccaagtgcgatggcgtaagcaaaaagtggaaatggaactgccaggtgacaaaataggactccatcttcgtggaggatatatatttccgactcaacagccaaacaccacaaccctggcctctcggaaaaatccactcgggctaattattgctctggacgagaataaggaggctaagggagagctgttttgggataacggagagactaaagatactgtcgccaacaaagtgtatctgttatgcgagttcagtgttacacagaatcggctggaagtaaacatctcccaaagtacctataaagaccccaacaatctagcattcaacgaaatcaagattctggggaccgaagagccctccaacgttaccgtgaaacacaacggggttccttctcagacttcaccaaccgtgacctatgactctaacctaaaggtcgcaatcattaccgacatagacctgctgctcggggaagcctacaccgtcgagtggtccattaaaatccgagacgaagagaagattgactgctatcctgatgagaacggagccagcgccgagaattgcactgctcgtggttgcatttgggaagcctccaattctagcggcgtcccgttttgctacttcgtgaatgatctgtacagtgtgtcagacgtacaatacaatagtcacggagctacagctgacatctctttaaaatcatccgtgtacgctaacgcttttccctctacccccgttaatcctttgcgactggacgtgacttaccacaagaatgagatgttgcagttcaagatctatgatcccaacaagaaccggtacgaagtgccggtgcctctcaacataccctccatgccctcttctactccagagggccagctgtatgatgtcttgatcaaaaagaatccttttggcattgagatccggagaaagagcacgggaactattatctgggattcccagctgctgggttttacattttctgatatgttcatccgaatatctacgagactaccatctaaatatttatatgggttcggggagacagaacacagatcatacagacgggatctggagtggcacacgtggggaatgttctcgcgagatcagccaccggggtacaagaagaactcctacggcgtccatccttattatatggggcttgaggaggacggtagcgcgcacggtgtcctgctgctgaactctaatgccatggacgttacttttcagccactgcctgcactcacttatcgcaccaccggtggcgttctggacttttatgtgtttctggggccaacccccgaactggtgacccagcagtacaccgaactaatcggacgtcctgtaatggttccatactggtcgcttggatttcagttgtgtcggtatggctaccagaacgacagtgagatcgcatcactctacgatgagatggtcgccgcccagatcccctacgacgtgcagtactccgatatagactatatggagagacaattggatttcactctgtctcctaaatttgccggatttccagccttgattaatagaatgaaagccgatggaatgcgggtcatcctcattctcgaccccgctatcagcgggaatgaaacccagccctaccccgcttttacccggggtgtggaagacgatgtcttcataaaataccccaacgacggagatatcgtatggggtaaggtttggccagacttcccagatgtcgttgtgaacggaagcctggattgggactcccaagtggagttgtatcgcgcctatgtggccttccctgacttctttaggaattccacagccaaatggtggaaaagagagattgaggagttgtataacaacccccagaacccagagcggtctttaaagtttgacgggatgtggattgacatgaatgagccatccagctttgtgaacggggctgttagtcctggttgcagagatgcatctctcaatcaccccccatacatgccgcacctcgagtcccgagatcgtggcctttcatctaaaactctgtgcatggaaagccagcagatccttcctgacggaagcctggtacagcattataacgttcacaacctctatggctggtcccagacccgccccacttatgaggccgtgcaggaagtgaccggccagcgtggagtggtgataactaggtcaacatttccgagttctggtaggtgggccgggcactggctgggagacaatacagcggcctgggatcaactcaaaaaaagcattattggaatgatggagttttccctatttggaatctcttacaccggggctgatatctgcggattcttccaggacgctgaatatgaaatgtgcgtgaggtggatgcaactcggcgcgttttacccattttctcgcaaccacaacaccatcgggaccaggcggcaggacccggtttcgtgggatgttgcctttgtcaatatatcccgtactgtcctgcagacaagatataccctgctaccctacctgtatacacttatgcataaggcacacacagagggcgttacagtggtgcgcccactcctgcacgagttcgtcagtgaccaggtaacttgggatatcgacagccagttcttgctcggacccgcctttcttgttagccccgtcctggagagaaacgctcgcaacgtaaccgcttacttccccagagcacgctggtacgattactatactggagtggacattaacgctagaggggagtggaaaacactgcccgctccattggaccatatcaatctgcacgtgagaggagggtatatccttccctggcaagagccagctctgaatactcatctttcgcgccagaagttcatgggctttaaaattgcgctcgacgacgaagggactgccggtgggtggttattttgggatgacggccagtcgattgacacttacggaaaggggctgtactatttggcatcatttagtgcctcacagaacaccatgcaaagccatatcattttcaacaattatattaccggtacaaaccctcttaagcttggatacatagagatctggggagtgggatccgtgccggtaacatcagtgtcaatcagcgtgagcggaatggtcattaccccaagttttaacaacgatcctacaacccaggtcctgtccattgacgtgaccgacagaaacatctctctgcacaacttcacatcgctgacgtggatcagtacgttgtag

SEQ ID NO: 148592 - DNA, 5574 bp, Artificial Sequence
  derived and/or modified sequence
atggccaggaagaagctgaagaagttcaccaccctggagatcgtgctgtctgtgctgctgctggtgctcttcatcatcagcatcgtgctgattgtgctgctggccaaggagagcctgaagagcacagccccagaccccggcaccaccggcaccccagaccccggcaccaccggcaccccagaccccggcaccaccggcaccacccacgcccggaccactggacctccagaccccggcaccaccggcaccacccctgtgtctgcagaatgtcctgtggtgaatgagctggagcgcatcaactgcatcccagaccagccccccaccaaggccacctgtgaccagaggggctgctgctggaacccccagggcgctgtgtctgtgccctggtgctactacagcaagaaccacagctaccacgtggagggcaacctggtgaacaccaatgccggcttcaccgcccggctgaagaacctgcccagcagccctgtgtttggcagcaatgtggacaacgtgctgctgacagctgagtaccagaccagcaaccgcttccacttcaagctgacagaccagaccaacaacagatttgaggtgccccatgaacatgtgcagagcttctctggaaatgctgctgccagcctgacctaccaggtggagatcagccggcagcccttcagcatcaaggtgacccggcgcagcaacaacagagtgctgtttgacagcagcatcggccccctgctgtttgctgaccagttcctgcagctgagcacccggctgcccagcaccaacgtgtatggcctgggggagcacgtgcaccagcagtacagacatgacatgaactggaagacctggcccatcttcaacagagacaccaccccaaatggaaatggcaccaacctgtatggagcccagaccttcttcctgtgcctggaggatgccagcggcctgagctttggagtcttcctgatgaacagcaatgccatggaggtggtgctgcagcctgccccagccatcacctaccgcaccatcggcggcatcctggacttctacgtgttcctgggcaacaccccagagcaggtggtgcaggagtacctggagctgattggccggcctgccctgcccagctactgggccctgggcttccacctgagccgctatgaatatggcaccctggacaacatgagggaggtggtggagaggaacagagctgcccagctgccctatgatgtgcagcacgccgacatcgactacatggatgagcggcgggacttcacctatgattctgtggacttcaagggcttccctgagtttgtgaatgagctgcacaacaacggccagaagctggtgatcatcgtggaccctgccatcagcaacaacagcagcagcagcaagccctacggcccctatgaccggggcagtgacatgaagatctgggtgaacagcagtgatggagtgacccccctcatcggggaggtgtggccaggccagaccgtcttcccagactacaccaaccccaactgtgctgtgtggtggaccaaggagtttgagctgttccacaaccaggtggagtttgatggcatctggattgacatgaatgaggtgagcaactttgtggatggctctgtgtctggctgcagcaccaacaacctgaacaacccccccttcaccccccgcatcctggatggctacctgttctgcaagaccctgtgcatggatgctgtgcagcactggggcaagcagtatgacatccacaacctgtatggctacagcatggctgtggccacagctgaggccgccaagacagtgttccccaacaagaggagcttcatcctgaccaggagcacctttgctggcagcggcaagtttgctgcccactggctgggggacaacacagccacctgggatgacctgcgctggagcatccctggggtgctggagttcaacctgtttggcatccccatggtgggccctgacatctgtggctttgccctggacaccccagaggagctgtgccgccgctggatgcagctgggcgccttctaccccttcagcaggaaccacaacggccagggctacaaggaccaggaccctgccagctttggagctgacagcctgctgctgaacagcagccgccactacctgaacatccgctacaccctgctgccctacctgtacaccctcttcttccgggcccacagcagaggagacacagtggcccggcccctgctgcacgagttctatgaggacaacagcacctgggatgtgcaccagcagttcctgtggggccctggcctgctgatcacccctgtgctggatgaaggagctgagaaggtgatggcctacgtgcctgatgctgtgtggtatgactatgaaacaggcagccaggtgcgctggaggaagcagaaggtggagatggagctgcccggggacaagattggcctgcacctgcggggcggctacatcttccccacccagcagcccaacaccaccaccctggccagcaggaagaaccccctgggcctcatcatcgccctggatgagaacaaggaggccaagggggagctgttctgggacaacggggagaccaaggacacagtggccaacaaggtgtacctgctgtgtgagttctctgtgacccagaaccggctggaggtgaacatcagccagagcacctacaaggaccccaacaacctggccttcaatgagatcaagatcctgggcacagaggagcccagcaatgtgacagtgaagcacaacggggtgcccagccagaccagccccaccgtgacctatgacagcaacctgaaggtggccatcatcacagacatcgacctgctgctgggggaggcctacacagtggagtggagcatcaagatcagagatgaggagaagattgactgctacccagatgaaaatggagccagcgctgagaactgcacagcccggggctgcatctgggaggccagcaacagcagtggagtgcccttctgctactttgtgaatgacctgtacagcgtgtctgatgtgcagtacaacagccatggagccacagctgacatcagcctgaagagctctgtgtatgccaatgccttccccagcacccctgtgaaccccctgcggctggatgtgacctaccacaagaatgagatgctgcagttcaagatctatgaccccaacaagaacagatatgaggtgcctgtgcccctgaacatccccagcatgcccagcagcaccccagagggccagctgtatgatgtgctgatcaagaagaaccccttcggcatcgagatccggaggaagagcacaggcaccatcatctgggacagccagctgctgggcttcaccttcagtgacatgttcatccgcatcagcacccggctgcccagcaagtacctgtatggctttggagaaacagagcacaggagctacagaagagacctggagtggcacacctggggcatgttcagccgggaccagcccccaggctacaagaagaacagctatggagtgcacccctactacatgggcctggaggaggatggcagcgcccatggagtgctgctgctgaacagcaatgccatggatgtgaccttccagcccctgcctgccctgacctaccgcaccaccggcggcgtgctggacttctacgtgttcctgggccccaccccagagctggtgacccagcagtacacagagctgattggccggcctgtgatggtgccctactggagcctgggcttccagctgtgccgctatggctaccagaatgattctgaaattgccagcctgtatgatgagatggtggccgcccagatcccctatgatgtgcagtacagcgacatcgactacatggagcggcagctggacttcaccctgagccccaagtttgctggcttccctgccctgatcaacaggatgaaggcagatggcatgagggtcatcctgatcctggaccctgccatctctggaaatgagacccagccctacccagccttcacccggggcgtggaggatgatgtgttcatcaagtacccaaatgatggagacatcgtgtggggcaaggtgtggccagacttcccagatgtggtggtgaatggcagcctggactgggacagccaggtggagctgtaccgggcctacgtggccttcccagacttcttcaggaacagcacagccaagtggtggaagcgggagattgaggagctgtacaacaacccccagaaccctgagaggagcctgaagtttgatggcatgtggattgacatgaatgagcccagcagctttgtgaatggagctgtgtccccaggctgcagagatgccagcctgaaccaccccccctacatgccccacctggagagccgggaccggggcctgagcagcaagaccctgtgcatggagagccagcagatcctgcctgatggcagcctggtgcagcactacaacgtgcacaacctgtatggctggagccagacccggcccacctatgaggccgtgcaggaggtgacaggccagaggggcgtggtgatcaccaggagcaccttccccagcagcggccgctgggccggccactggctgggggacaacacagctgcctgggaccagctgaagaagagcatcatcggcatgatggagttcagcctgtttggcatctcctacaccggggctgacatctgtggcttcttccaggatgctgaatatgagatgtgtgtgcgctggatgcagctgggcgccttctaccccttcagcaggaaccacaacaccatcggcacccggcggcaggaccctgtgtcctgggatgtggcctttgtgaacatcagcaggacagtgctgcagacccgctacaccctgctgccctacctgtacaccctgatgcacaaggcccacacagagggcgtgacagtggtgcggcccctgctgcatgaatttgtgtctgaccaggtgacctgggacatcgacagccagttcctgctgggccctgccttcctggtgtcccctgtgctggagagaaatgccagaaatgtgacagcctacttcccccgggcccgctggtatgactactacacaggagtggacatcaatgcccggggggagtggaagaccctgcctgcccccctggaccacatcaacctgcacgtgcggggcggctacatcctgccctggcaggagcccgccctgaacacccacctgagccggcagaagttcatgggcttcaagatcgccctggatgatgagggcacagctgggggctggctgttctgggatgatggccagagcattgacacctacggcaagggcctgtactacctggccagcttcagcgccagccagaacaccatgcagagccacatcatcttcaacaactacatcaccggcaccaaccccctgaagctgggctacatcgagatctggggcgtgggctctgtgcctgtgacctctgtgtccatctctgtgtctggcatggtgatcacccccagcttcaacaatgaccccaccacccaggtgctgagcattgatgtgacagacaggaacatcagcctgcacaacttcaccagcctgacctggatcagcaccctgtag

SEQ ID NO: 148593 - DNA, 6525 bp, Artificial Sequence
  derived and/or modified sequence
agatctttggttgctttggtggactgtgctcctctgcttttattgctaagccatccttcagacagagagggagcggctgcaagaggtaatgagagatggcaagaaagaagctgaaaaaatttactactttggagattgtgctcagtgttcttctgcttgtgttgtttatcatcagtattgttctaattgtgcttttagccaaagagtcactgaaatcaacagccccagatcctgggacaactggtaccccagatcctgggacaactggtaccccagatcctggaacaactggtaccacacatgctaggacaacgggtcccccagatcctggaacaactggtaccactcctgtttctgctgaatgtccagtggtaaatgaattggaacgaattaattgcatccctgaccagccgccaacaaaggccacatgtgaccaacgtggctgttgctggaatccccagggagctgtaagtgttccctggtgctactattccaagaatcatagctaccatgtagagggcaaccttgtcaacacaaatgcaggattcacagcccggttgaaaaatctgccttcttcaccagtgtttggaagcaatgttgacaatgttcttctcacagcagaatatcagacatctaatcgtttccactttaagttgactgaccaaaccaataacaggtttgaagtgccccacgaacacgtgcagtccttcagtggaaatgctgctgcttctttgacctaccaagttgaaatctccagacagccatttagcatcaaagtgaccagaagaagcaacaatcgtgttttgtttgactcgagcattgggcccctactgtttgctgaccagttcttgcagctctccactcgactgcctagcactaacgtgtatggcctgggagagcatgtgcaccagcagtatcggcatgatatgaattggaagacctggcccatatttaacagagacacaactcccaatggaaacggaactaatttgtatggtgcgcagacattcttcttgtgccttgaagatgctagtggattgtcctttggggtgtttctgatgaacagcaatgccatggaggttgtccttcagcctgcgccagccatcacttaccgcaccattgggggcattctcgacttctatgtgttcttgggaaacactccagagcaagttgttcaagaatatctagagctcattgggcggccagcccttccctcctactgggcgcttggatttcacctcagtcgttacgaatatggaaccttagacaacatgagggaagtcgtggagagaaatcgcgcagcacagctcccttatgatgttcagcatgctgatattgattatatggatgagagaagggacttcacttatgattcagtggattttaaaggcttccctgaatttgtcaacgagttacacaataatggacagaagcttgtcatcattgtggatccagccatctccaacaactcttcctcaagtaaaccctatggcccatatgacaggggttcagatatgaagatatgggtgaatagttcagatggagtgactccactcattggggaggtctggcctggacaaactgtgtttcctgattataccaatcccaactgtgctgtttggtggacaaaggaatttgagctttttcacaatcaagtagagtttgatggaatctggattgatatgaatgaagtctccaactttgttgatggttcggtctcaggatgttccacaaacaacctaaataatcccccattcactcccagaatcctggatgggtacctgttctgcaagactctctgtatggatgcagtgcagcactggggcaagcagtatgacattcacaatctgtatggctactccatggcggtcgccacagcagaagctgccaagactgtgttccctaataagagaagcttcattctgacccgttctacctttgcgggctctggcaagtttgcagcacattggttaggagacaacactgccacctgggatgacctgagatggtccatccctggcgtgcttgagttcaacctttttggcatcccaatggtgggtcctgacatatgtggctttgctttggacacccctgaggagctctgtaggcggtggatgcagttgggtgcattttatccgttttctagaaatcacaatggccaaggctacaaggaccaggatcctgcctcctttggagctgactccctgctgttgaattcctccaggcactaccttaacatccgctatactctattgccctacctatacaccctcttcttccgtgctcacagccgaggggacacggtggccaggccccttttgcatgagttctacgaggacaacagcacttgggatgtgcaccaacagttcttatgggggcccggcctcctcatcactccagttctggatgaaggtgcagagaaagtgatggcatatgtgcctgatgctgtctggtatgactacgagactgggagccaagtgagatggaggaagcaaaaagtcgagatggaacttcctggagacaaaattggacttcaccttcgaggaggctacatcttccccacacagcagccaaatacaaccactctggccagtcgaaagaaccctcttggtcttatcattgccctagatgagaacaaagaagcaaaaggagaacttttctgggataatggggaaacgaaggatactgtggccaataaagtgtatcttttatgtgagttttctgtcactcaaaaccgcttggaggtgaatatttcacaatcaacctacaaggaccccaataatttagcatttaatgagattaaaattcttgggacggaggaacctagcaatgttacagtgaaacacaatggtgtcccaagtcagacttctcctacagtcacttatgattctaacctgaaggttgccattatcacagatattgatcttctcctgggagaagcatacacagtggaatggagcataaagataagggatgaagaaaaaatagactgttaccctgatgagaatggtgcttctgccgaaaactgcactgcccgtggctgtatctgggaggcatccaattcttctggagtccctttttgctattttgtcaacgacctatactctgtcagtgatgttcagtataattcccatggggccacagctgacatctccttaaagtcttccgtttatgccaatgccttcccctccacacccgtgaacccccttcgcctggatgtcacttaccataagaatgaaatgctgcagttcaagatttatgatcccaacaagaatcggtatgaagttccagtccctctgaacatacccagcatgccatccagcacccctgagggtcaactctatgatgtgctcattaagaagaatccatttgggattgaaattcgccggaagagtacaggcactataatttgggactctcagctccttggctttaccttcagtgacatgtttatccgcatctccacccgccttccctccaagtacctctatggctttggggaaactgagcacaggtcctataggagagacttggagtggcacacttgggggatgttctcccgagaccagcccccagggtacaagaagaattcctatggtgtccacccctactacatggggctggaggaggacggcagtgcccatggagtgctcctgctgaacagcaatgccatggatgtgacgttccagcccctgcctgccttgacataccgcaccacagggggagttctggacttttatgtgttcttggggccgactccagagcttgtcacccagcagtacactgagttgattggccggcctgtgatggtaccttactggtctttggggttccagctgtgtcgctatggctaccagaatgactctgagatcgccagcttgtatgatgagatggtggctgcccagatcccttatgatgtgcagtactcagacatcgactacatggagcggcagctggacttcaccctcagccccaagtttgctgggtttccagctctgatcaatcgcatgaaggctgatgggatgcgggtcatcctcattctggatccagccatttctggcaatgagacacagccttatcctgccttcactcggggcgtggaggatgacgtcttcatcaaatacccaaatgatggagacattgtctggggaaaggtctggcctgattttcctgatgttgttgtgaatgggtctctagactgggacagccaagtggagctatatcgagcttatgtggccttcccagactttttccgtaattcaactgccaagtggtggaagagggaaatagaagaactatacaacaatccacagaatccagagaggagcttgaagtttgatggcatgtggattgatatgaatgaaccatcaagcttcgtgaatggggcagtttctccaggctgcagggacgcctctctgaaccaccctccctacatgccacatttggagtccagggacaggggcctgagcagcaagaccctttgtatggagagtcagcagatcctcccagacggctccctggtgcagcactacaacgtgcacaacctgtatgggtggtcccagaccagacccacatacgaagccgtgcaggaggtgacgggacagcgaggggtcgtcatcacccgctccacatttccctcttctggccgctgggcaggacattggctgggagacaacacggccgcatgggatcagctgaagaagtctatcattggcatgatggagttcagcctcttcggcatatcctatacgggagcagatatctgtgggttctttcaagatgctgaatatgagatgtgtgttcgctggatgcagctgggggccttttaccccttctcaagaaaccacaacaccattgggaccaggagacaagaccctgtgtcctgggatgttgcttttgtgaatatttccagaactgtcctgcagaccagatacaccctgttgccatatctgtataccttgatgcataaggcccacacggagggcgtcactgttgtgcggcctctgctccatgagtttgtgtcagaccaggtgacatgggacatagacagtcagttcctgctgggcccagccttcctggtcagccctgtcctggagcgtaatgccagaaatgtcactgcatatttccctagagcccgctggtatgattactacacgggtgtggatattaatgcaagaggagagtggaagaccttgccagcccctcttgaccacattaatcttcatgtccgtgggggctacatcctgccctggcaagagcctgcactgaacacccacttaagccgccagaaattcatgggcttcaaaattgccttggatgatgaaggaactgctgggggctggctcttctgggatgatgggcaaagcattgatacctatgggaaaggactctattacttggccagcttttctgccagccagaatacgatgcaaagccatataattttcaacaattacatcactggtacaaatcctttgaaactgggctacattgaaatctggggagtgggcagtgtccccgttaccagtgtcagcatctctgtgagtggcatggtcataacaccctccttcaacaatgaccccacgacacaggtattaagcatcgatgtgactgacagaaacatcagcctacataattttacttcattgacgtggataagcactctgtgaatttttacagcaagattctaactaactatgaatgactttgaaactacttatacttcatactcataaaaattattgtgtgttgctaatttgttcatacccactattggtgaaatatttctgttaattttgttatatgttttttgtgtgaaccctaaaggttaaaccttagccctgtgggataggcagttagggaggtgtggaaaatctatgcattaccttaatgtctctgtgtggttagtatggtagtgactgttcatcatatgacatttactgaagatgaactgggtccatgatgaagtgtgtgtatgtccacgtttgtaatcatagaatggaccccattcttttgttaaatacacaagagaaagctttctgtgacagttccaggtcttgaagctaatcagcatctcaagaaagtatccagaaagaacatctgctagttggttataggcggtgggaggaataatatacctaattggttataggtggggggagcatgataagcaaagaaaaggcaaacacaaggaaagatcagatgaaacagaagatgatagtaaaagtgatcctaagtaagaacataatgtaaaattgtcagcagcctcatggggaggaaaaaggaagagtcaactcacttgaagaagagggtcttgagaaatccttagcataaagggctactggtgagattgagatctgagcaggcaaagctcaaaagagagtttggaggttaaaaataatttatttttgcagtagtgtgctttgaaatgtgtaaatcttatttctaatgtatacaaccacatttcacataaaaatatgcaatttatatgccagataaaaataaaacaagtgaatttgcaagtga

SEQ ID NO: 148594 - DNA, 5574 bp, Artificial Sequence
  derived and/or modified sequence
atggcccggaagaagctgaagaagttcaccaccctggagatcgtgctgtctgttctactcctagtacttttcataatcagcatcgtcctgattgtcctgttggctaaagaaagtctgaagagcactgcacccgaccctggtacaaccggtacgcccgacccagggacgaccggcacgccagatcctgggaccaccggcacaactcatgcacggacaacaggtcccccggacccaggaacaacaggcaccaccccagtgtccgctgaatgccccgtcgtgaatgaactggagagaattaactgcattcctgatcagcctccaactaaagccacttgtgatcagaggggatgctgttggaatccccagggagccgtctcagtgccatggtgctactacagtaaaaatcacagctaccatgtggaagggaacttggtcaacactaacgccgggttcacagctaggctcaagaatctgccctcctcccccgtgtttggtagcaatgtcgacaacgtgctgctgaccgctgaatatcagacttcaaatcgattccactttaagctgacggatcagactaataatagatttgaggtcccccatgaacatgttcagtcgttttccggcaacgccgctgcctcactcacataccaggtcgaaatcagtcgacagccttttagcattaaagtcacccgacgctctaacaatcgggtactcttcgactctagcattggccccctgctgtttgctgaccagtttctgcagctgtccactcggctgccctccaccaatgtgtatggcctgggagagcatgtgcatcagcaataccggcatgatatgaactggaagacctggcctatatttaatagggacacaacaccaaacggcaatggaaccaatctgtacggggcccaaaccttcttcttgtgcctggaggacgccagcggactgtcttttggtgtcttcttgatgaattccaacgccatggaagtagtgttacaacctgcacccgccatcacgtatcgaacaattggcggcatcttggatttctacgtttttctcggaaacacacctgaacaggtggtccaggaatacctcgaattgattggaaggccagctctccccagttactgggcactgggattccacttgtccagatacgagtacgggaccctagataatatgcgtgaagtcgttgagagaaaccgggctgcccagctgccctacgacgttcagcatgcagacattgattacatggacgaaaggcgcgattttacctacgatagcgtcgatttcaaaggattccccgaattcgtaaacgagttgcataataatggacagaaactcgtcatcattgtcgacccagctattagcaataattcttcgtcctctaaaccttatgggccttatgaccggggctcagatatgaagatctgggtgaattcgtcggacggggttaccccgctgatcggtgaggtgtggccaggccagacagtgttccctgactacacaaaccccaattgcgcagtctggtggacgaaggagtttgagttgtttcataatcaggttgaattcgacggtatttggatcgatatgaatgaggtgtccaattttgttgacggaagtgtgtctggatgtagtaccaataacttaaataatccaccatttactccccggatactcgatggctaccttttttgcaaaactctgtgtatggatgccgtccagcactgggggaagcagtatgacatccataatttgtatggctatagcatggccgtcgctactgcagaggccgctaaaacagtatttccgaacaagcggtctttcatcctgacccgctcaacctttgctggaagtgggaagttcgccgcccactggctgggcgacaacaccgcgacctgggacgatttgagatggagcattccaggagtgctcgagttcaatctgtttggtatccccatggtgggacctgatatttgcggtttcgcattggacacaccagaagagctgtgtcgaaggtggatgcagctaggcgccttctatcctttctcgagaaatcacaacggacagggctataaagaccaggacccggcctcatttggtgctgatagcctgctcctcaactcatcccgccattatctgaatatcaggtatactttgctgccgtacttatacacgctgttctttcgtgcgcacagcaggggtgacacagtagcccgcccccttttacacgaattttacgaagacaatagtacctgggacgttcaccagcagttcttatggggtccaggcctattgatcaccccagttctcgatgagggcgcagaaaaggtgatggcatacgttccagacgccgtgtggtatgactacgagaccggcagccaagtacgctggcgaaagcagaaggttgagatggagctgcccggagacaagatcgggttgcacctgcgcggcggatatatatttcctactcagcaacccaataccaccacccttgcttctagaaaaaacccccttggtctgattatcgccctcgacgagaacaaggaggctaagggcgaactgttctgggataacggtgaaacgaaagatacagtagctaataaggtgtatttgctctgcgagttctccgtcactcagaaccgcctagaggttaacatctcgcaaagtacctacaaggacccaaacaatttggccttcaacgagataaaaatcttaggcactgaggagccctccaacgtgacagtaaagcacaatggagtaccatcccagacatcccccaccgtgacctacgacagtaacctcaaggtcgccatcatcacagatatcgaccttctcctgggagaagcttataccgtcgaatggtctatcaaaattcgcgacgaggaaaaaatcgactgctaccctgacgaaaacggagcctctgccgaaaactgcacggcccgcggatgcatttgggaggcctccaatagctccggcgtgcccttctgctactttgtcaacgacctgtactccgtaagcgatgtacagtacaactcccatggtgcaaccgccgatatctctcttaagtccagtgtttatgccaacgcgtttccatccacaccagttaatccgctacgactcgatgtgacataccacaaaaacgagatgttacagtttaaaatttatgatccgaacaagaatcgttatgaggtaccggtaccactcaatattcctagtatgccctcctcaaccccagagggccaactgtacgatgtactcattaaaaagaaccctttcggcattgagatacgccgaaaatccacaggcacgatcatttgggacagccagttgctggggtttaccttctccgatatgtttatcagaattagcacaagactaccttctaagtatctctacgggtttggcgagaccgaacatcgctcctatcgtcgcgacctcgagtggcacacatggggcatgttcagtagagatcagcccccgggttacaagaaaaacagttacggagtccatccgtactacatgggcctcgaggaggatggatccgcccacggcgtgctgctactcaatagcaatgcaatggacgtgacatttcagcctttgcccgccctaacctatcgaactactggcggtgtactagatttttacgtttttttagggcccactcccgaactagtgacccagcaatacacagagctgatcggccggccggtcatggttccttattggagtctaggcttccagctgtgccgttatggataccagaacgactctgagatcgcctcactctacgatgagatggttgccgcacagatcccctacgatgtgcagtactcagatatagattacatggagaggcagctcgacttcactctaagtccaaaatttgctggatttccggcactcataaacagaatgaaagcagatggcatgcgtgtgattctgattctcgacccagctatttctggaaacgaaactcagccatatcctgccttcacaagaggagttgaagatgacgtgtttattaagtaccctaacgacggcgacatcgtgtggggaaaggtgtggcctgatttccctgatgtggtcgtgaacggatccttagactgggattcccaggtagaactatatcgcgcctacgtggctttccccgacttcttccggaattccaccgctaagtggtggaagagggagatcgaggagctgtacaacaaccctcagaaccccgagcgctctctgaagttcgacggtatgtggattgacatgaacgagcccagttcctttgtgaacggagccgtctcacccgggtgccgagatgcatccctgaatcacccaccctatatgccccacctggagtccagagaccgcgggctgtcttcgaaaaccttgtgcatggagtcacaacagattttgcccgatgggtctctggtacagcattacaacgtgcacaacctctatggatggtcccagacccgcccaacatacgaagccgtccaggaggtgacaggccagcgcggcgttgtcataacccggtcaacattccctagttccggtaggtgggctggtcattggctgggtgataataccgccgcatgggaccagttgaaaaaatccatcatcggcatgatggagttttcattgtttggaatctcttacacaggagctgacatatgtgggttcttccaggacgccgaatacgagatgtgcgtgcgctggatgcagctgggcgctttttaccctttcagtcgcaatcacaatacaattggcacccgccgccaagaccctgtctcatgggacgttgccttcgtaaacataagccgaacagtcctacagacccgatataccctcctgccttatctttacacacttatgcacaaggcgcataccgagggagttacggttgtccgtccattgctccacgaatttgtgtccgaccaagtgacctgggacatcgattcgcagtttctgctagggcccgcatttctggtcagccctgtgctggaaagaaacgcccggaacgtgacagcttacttcccccgggccagatggtacgactactatacgggcgtcgatataaacgctagaggcgagtggaaaactctacctgctcccctagatcacattaaccttcatgtcagaggcgggtacatcctcccgtggcaggagccagcactaaatacccacttgagcaggcagaagtttatggggtttaagatcgctttggatgatgagggaacagccggcggctggctcttctgggatgatggtcagagtatcgatacatatgggaagggcctctactacctggcgagcttctccgccagccagaatactatgcagagtcatattattttcaataactacattacaggaaccaatcctctgaaactcggctatatcgagatttggggagtgggaagtgtgcctgtgaccagcgtgtctatttcagtttctggtatggtcatcacaccgtcttttaataatgacccaaccacacaggttctgtcaattgacgtcactgacaggaacatttccctgcataacttcaccagcctcacgtggatctcaacactgtag

SEQ ID NO: 148595 - DNA, 5573 bp, Artificial Sequence
  derived and/or modified sequence
atggctcggaaaaagttgaaaaagtttacgaccctagagattgtcttgtcggtgctgcttcttgtgctgtttatcatatcaatcgtgctcatagtgctattggcaaaggagtcactcaagtctaccgccccagatccgggtactacagggacaccagaccctggaactaccggaactcctgacccaggcacaaccggaacaacccatgctcgcacaaccggcccaccggaccctgggacaaccggcacaacaccggtatccgctgaatgccccgtggtcaatgagctggaacgcatcaattgtatccccgaccaaccaccaacaaaggccacctgcgaccaaagaggctgttgttggaacccacaaggcgcagtatctgtgccctggtgctactactcaaagaaccactcatatcacgtcgagggaaatctcgtcaatacaaacgcagggtttacagctcgccttaagaatctcccatcatctccagtgttcggctctaacgtggacaatgtgctgcttacagcggaatatcagacctccaacagatttcattttaaactgactgatcaaactaataaccgctttgaagtacctcacgagcatgtgcagagcttttccggaaatgctgccgcatccttgacctatcaggttgagatttccagacagccattctccattaaggtgaccagaaggtctaacaatagggttctgttcgacagcagcatcgggccactcctttttgcagatcagtttctgcagctttccaccaggctgccttcaacaaatgtgtacggactgggggagcacgttcatcaacaatatcgacacgacatgaattggaaaacgtggcctattttcaatcgagacactactcccaacggtaatggcaccaatctttatggcgctcagacgttcttcttgtgtttagaggacgccagcggattgagcttcggcgtgttcctgatgaactctaatgcaatggaggtcgtgcttcaacctgctccagccattacttatcgcacaattgggggtatcctggatttttatgtatttctgggcaataccccggagcaggtagtgcaggaatacctggaactgatagggagaccggctctgccttcctattgggcacttggctttcatcttagtcggtatgaatacggcacactcgacaatatgcgcgaggtggtggaacgaaatcgtgcagcccagctcccatacgatgtgcaacatgcagacatcgactatatggacgaacgaagggacttcacatacgactcagtcgatttcaaggggttccccgagttcgtgaatgaactgcacaacaacggccagaaacttgtgataatcgtggatccggcaatctctaataatagcagcagttccaaaccatacggcccatacgaccggggttctgatatgaagatttgggtaaatagctccgacggagtgacccctttaattggagaagtatggcctggtcaaacagtgttccccgattacactaatccaaattgcgcggtatggtggactaaagagtttgagctctttcacaaccaggttgagttcgacgggatttggatagatatgaatgaggtttccaacttcgtcgacggatccgttagcggatgttcaaccaacaatctgaataacccgcctttcacccccaggatcttggatggctatctgttttgtaaaacgctgtgtatggacgccgttcaacactggggcaagcaatatgatatccataacctctacgggtactctatggcagtcgccactgctgaggcagccaaaactgtcttccctaataaacggtcatttatcttgacccgatcaacattcgccggttctgggaaatttgctgcccactggctcggagacaacaccgcgacgtgggacgacttacgttggtccatcccaggagtattggagtttaatctcttcggaattcctatggtgggcccagatatttgtggatttgctctggatactccagaggagctctgcaggaggtggatgcagttgggggcattttatccgttctccaggaatcacaatggccagggttacaaggatcaagatcctgcatcatttggggcagattctttgctcctcaattcctccaggcactatctcaacatcaggtacaccttgctcccgtacctttatactctcttcttccgggcacacagtcggggagacactgtggctagaccactgctacacgaattctatgaggataatagcacctgggacgttcaccagcagtttttatggggcccaggactcctcattacacctgttctggacgaaggcgcagaaaaggtcatggcttacgtgccagatgccgtgtggtatgactatgagactggatcccaggttaggtggcgcaagcaaaaggttgagatggagctcccaggggataagattggactgcacctccggggtgggtacatcttcccaactcagcagcctaacaccaccacgctggccagcagaaagaacccactggggctcattatcgccctggatgagaataaagaggcaaaaggcgaactcttctgggacaatggtgagactaaagacacagtagccaacaaggtataccttctctgcgagtttagtgtgacccaaaacaggcttgaagtgaatatctctcagtccacatataaagatcccaacaacctggccttcaacgaaatcaagattctcgggacagaggagccctccaacgttaccgtcaagcataacggggtcccgtcccaaacatctcccaccgtgacatacgattccaatctaaaagtggccattataaccgacatcgatcttcttctcggtgaagcatatacagttgagtggagcatcaagatccgagatgaggagaaaatcgactgctaccccgacgaaaatggcgcatccgcggagaattgtacggccagggggtgtatctgggaagcctcaaattcctccggcgtgcccttctgttactttgttaatgacttgtactctgtatctgatgtgcagtacaattcccacggggctaccgccgacatcagtctcaagtcttcagtgtacgccaacgctttcccgtctaccccagttaaccccctcagactagatgtgacctaccacaaaaacgagatgctacagttcaagatctacgatcccaataagaaccggtatgaggtccccgtcccactaaacatacctagcatgccctcttccactccggaaggacagctgtacgatgtgctcattaaaaagaaccctttcggcattgagatacgacgcaagtccaccggtacaataatctgggatagccagctgctcgggttcacattttccgatatgttcatccggataagtacaaggctgcctagcaagtatttgtacggatttggagaaacggagcatcgatcatatcggcgagatctggagtggcacacttgggggatgttctcaagggatcagcctcccggatataagaaaaattcttatggcgtgcacccgtattatatggggctcgaagaagatggcagcgcccatggagtgctgctgctcaacagcaatgctatggacgtgaccttccaacctctccctgcattgacataccgcactactggaggggttctggatttttacgtcttcctaggtccgacccctgagctggtgacacagcagtacacagagctgatcgggcgacccgtcatggtgccctactggagtcttgggttccagctttgtcgctatgggtaccagaacgactccgagattgcctccctgtacgacgagatggttgctgcgcaaatcccttacgacgtgcaatattctgatatagattacatggagaggcaactagattttactctaagtcccaaattcgccggtttccccgctttaatcaatcgcatgaaggctgacggaatgagggtgatcctgattctggacccggctatctctggcaatgagacacaaccctaccctgcctttacccggggagtcgaagacgacgtgttcatcaaatatcccaatgacggggacatcgtgtgggggaaagtctggccggactttcctgacgtcgtggtgaacggctcgctggactgggactctcaagtggagctctaccgggcatacgtggcctttccggatttcttcaggaacagcaccgccaagtggtggaagcgggagatcgaggagctctacaataatcctcagaatccagagcggtccttgaagtttgatgggatgtggatcgacatgaacgagccatcctccttcgtgaatggggctgtaagcccaggatgccgcgatgcgagcctgaaccatcccccatatatgccacacttggaaagccgggaccgcggattgagcagtaagaccctctgtatggagtcgcaacagatcctccctgatggaagtcttgtgcagcactataatgtacacaatctgtacggctggtctcagaccaggcccacttacgaggccgtgcaggaggtcacaggacaacgcggtgtcgtcatcacccgctcaaccttcccaagttctggcaggtgggcgggtcactggctgggtgataacaccgctgcttgggaccaactaaaaaagtccatcatcgggatgatggagttcagtctctttggtatcagctataccggagccgacatatgcggattttttcaggacgccgaatacgaaatgtgcgtgcgctggatgcagctgggcgcattttaccccttctctagaaaccacaacaccattgggacacgacgacaagacccggtatcctgggatgttgcgtttgtcaacatatcaaggaccgtgctgcagacaaggtacaccctgttgccttatctgtataccttgatgcacaaggcccacaccgaaggtgtgacggtggtgaggcctcttcttcatgagtttgtttccgatcaggtgacttgggacatagattctcagttcctgctcggccctgctttcctggtgagtcctgtgttagaacgaaatgctcggaatgtgaccgcgtactttcctagagccagatggtatgattattacacgggtgtggatattaatgctcgaggggagtggaaaacactccctgctccgctcgaccacataaacctgcatgtgaggggtggatatatacttccatggcaggaacccgctctgaatacccatttgagtcggcagaaatttatggggttcaaaattgcactggatgatgagggcaccgcaggcggttggcttttttgggacgacggtcagtccatagatacctatggcaaggggttatactatttggcttcattctctgcgtcacagaatacgatgcagtcccatataatcttcaataactacatcacggggacaaacccgttaaaacttggttacatcgagatctggggcgtgggcagcgtgcccgttacgagcgtgtctatttccgtgtctggcatggtgatcacgccttcctttaataatgatcctaccacccaggtcctgtccatcgacgtcacagatagaaacatctccctccataattttacgtcgttaacttggatctccactcttta

SEQ ID NO: 148596 - DNA, 5574 bp, Artificial Sequence
  derived and/or modified sequence
atggccagaaagaagctgaagaagttcaccaccctggagatcgtgctgagcgtgctgctgctggtgctgttcatcatcagcatcgtgctgatcgtgctgctggccaaggagagcctgaagagcaccgcccccgaccccggcaccaccggcacccccgaccccggcaccaccggcacccccgaccccggcaccaccggcaccacccacgccagaaccaccggcccccccgaccccggcaccaccggcaccacccccgtgagcgccgagtgccccgtggtgaacgagctggagagaatcaactgcatccccgaccagccccccaccaaggccacctgcgaccagagaggctgctgctggaacccccagggcgccgtgagcgtgccctggtgctactacagcaagaaccacagctaccacgtggagggcaacctggtgaacaccaacgccggcttcaccgccagactgaagaacctgcccagcagccccgtgttcggcagcaacgtggacaacgtgctgctgaccgccgagtaccagaccagcaacagattccacttcaagctgaccgaccagaccaacaacagattcgaggtgccccacgagcacgtgcagagcttcagcggcaacgccgccgccagcctgacctaccaggtggagatcagcagacagcccttcagcatcaaggtgaccagaagaagcaacaacagagtgctgttcgacagcagcatcggccccctgctgttcgccgaccagttcctgcagctgagcaccagactgcccagcaccaacgtgtacggcctgggcgagcacgtgcaccagcagtacagacacgacatgaactggaagacctggcccatcttcaacagagacaccacccccaacggcaacggcaccaacctgtacggcgcccagaccttcttcctgtgcctggaggacgccagcggcctgagcttcggcgtgttcctgatgaacagcaacgccatggaggtggtgctgcagcccgcccccgccatcacctacagaaccatcggcggcatcctggacttctacgtgttcctgggcaacacccccgagcaggtggtgcaggagtacctggagctgatcggcagacccgccctgcccagctactgggccctgggcttccacctgagcagatacgagtacggcaccctggacaacatgagagaggtggtggagagaaacagagccgcccagctgccctacgacgtgcagcacgccgacatcgactacatggacgagagaagagacttcacctacgacagcgtggacttcaagggcttccccgagttcgtgaacgagctgcacaacaacggccagaagctggtgatcatcgtggaccccgccatcagcaacaacagcagcagcagcaagccctacggcccctacgacagaggcagcgacatgaagatctgggtgaacagcagcgacggcgtgacccccctgatcggcgaggtgtggcccggccagaccgtgttccccgactacaccaaccccaactgcgccgtgtggtggaccaaggagttcgagctgttccacaaccaggtggagttcgacggcatctggatcgacatgaacgaggtgagcaacttcgtggacggcagcgtgagcggctgcagcaccaacaacctgaacaacccccccttcacccccagaatcctggacggctacctgttctgcaagaccctgtgcatggacgccgtgcagcactggggcaagcagtacgacatccacaacctgtacggctacagcatggccgtggccaccgccgaggccgccaagaccgtgttccccaacaagagaagcttcatcctgaccagaagcaccttcgccggcagcggcaagttcgccgcccactggctgggcgacaacaccgccacctgggacgacctgagatggagcatccccggcgtgctggagttcaacctgttcggcatccccatggtgggccccgacatctgcggcttcgccctggacacccccgaggagctgtgcagaagatggatgcagctgggcgccttctaccccttcagcagaaaccacaacggccagggctacaaggaccaggaccccgccagcttcggcgccgacagcctgctgctgaacagcagcagacactacctgaacatcagatacaccctgctgccctacctgtacaccctgttcttcagagcccacagcagaggcgacaccgtggccagacccctgctgcacgagttctacgaggacaacagcacctgggacgtgcaccagcagttcctgtggggccccggcctgctgatcacccccgtgctggacgagggcgccgagaaggtgatggcctacgtgcccgacgccgtgtggtacgactacgagaccggcagccaggtgagatggagaaagcagaaggtggagatggagctgcccggcgacaagatcggcctgcacctgagaggcggctacatcttccccacccagcagcccaacaccaccaccctggccagcagaaagaaccccctgggcctgatcatcgccctggacgagaacaaggaggccaagggcgagctgttctgggacaacggcgagaccaaggacaccgtggccaacaaggtgtacctgctgtgcgagttcagcgtgacccagaacagactggaggtgaacatcagccagagcacctacaaggaccccaacaacctggccttcaacgagatcaagatcctgggcaccgaggagcccagcaacgtgaccgtgaagcacaacggcgtgcccagccagaccagccccaccgtgacctacgacagcaacctgaaggtggccatcatcaccgacatcgacctgctgctgggcgaggcctacaccgtggagtggagcatcaagatcagagacgaggagaagatcgactgctaccccgacgagaacggcgccagcgccgagaactgcaccgccagaggctgcatctgggaggccagcaacagcagcggcgtgcccttctgctacttcgtgaacgacctgtacagcgtgagcgacgtgcagtacaacagccacggcgccaccgccgacatcagcctgaagagcagcgtgtacgccaacgccttccccagcacccccgtgaaccccctgagactggacgtgacctaccacaagaacgagatgctgcagttcaagatctacgaccccaacaagaacagatacgaggtgcccgtgcccctgaacatccccagcatgcccagcagcacccccgagggccagctgtacgacgtgctgatcaagaagaaccccttcggcatcgagatcagaagaaagagcaccggcaccatcatctgggacagccagctgctgggcttcaccttcagcgacatgttcatcagaatcagcaccagactgcccagcaagtacctgtacggcttcggcgagaccgagcacagaagctacagaagagacctggagtggcacacctggggcatgttcagcagagaccagccccccggctacaagaagaacagctacggcgtgcacccctactacatgggcctggaggaggacggcagcgcccacggcgtgctgctgctgaacagcaacgccatggacgtgaccttccagcccctgcccgccctgacctacagaaccaccggcggcgtgctggacttctacgtgttcctgggccccacccccgagctggtgacccagcagtacaccgagctgatcggcagacccgtgatggtgccctactggagcctgggcttccagctgtgcagatacggctaccagaacgacagcgagatcgccagcctgtacgacgagatggtggccgcccagatcccctacgacgtgcagtacagcgacatcgactacatggagagacagctggacttcaccctgagccccaagttcgccggcttccccgccctgatcaacagaatgaaggccgacggcatgagagtgatcctgatcctggaccccgccatcagcggcaacgagacccagccctaccccgccttcaccagaggcgtggaggacgacgtgttcatcaagtaccccaacgacggcgacatcgtgtggggcaaggtgtggcccgacttccccgacgtggtggtgaacggcagcctggactgggacagccaggtggagctgtacagagcctacgtggccttccccgacttcttcagaaacagcaccgccaagtggtggaagagagagatcgaggagctgtacaacaacccccagaaccccgagagaagcctgaagttcgacggcatgtggatcgacatgaacgagcccagcagcttcgtgaacggcgccgtgagccccggctgcagagacgccagcctgaaccaccccccctacatgccccacctggagagcagagacagaggcctgagcagcaagaccctgtgcatggagagccagcagatcctgcccgacggcagcctggtgcagcactacaacgtgcacaacctgtacggctggagccagaccagacccacctacgaggccgtgcaggaggtgaccggccagagaggcgtggtgatcaccagaagcaccttccccagcagcggcagatgggccggccactggctgggcgacaacaccgccgcctgggaccagctgaagaagagcatcatcggcatgatggagttcagcctgttcggcatcagctacaccggcgccgacatctgcggcttcttccaggacgccgagtacgagatgtgcgtgagatggatgcagctgggcgccttctaccccttcagcagaaaccacaacaccatcggcaccagaagacaggaccccgtgagctgggacgtggccttcgtgaacatcagcagaaccgtgctgcagaccagatacaccctgctgccctacctgtacaccctgatgcacaaggcccacaccgagggcgtgaccgtggtgagacccctgctgcacgagttcgtgagcgaccaggtgacctgggacatcgacagccagttcctgctgggccccgccttcctggtgagccccgtgctggagagaaacgccagaaacgtgaccgcctacttccccagagccagatggtacgactactacaccggcgtggacatcaacgccagaggcgagtggaagaccctgcccgcccccctggaccacatcaacctgcacgtgagaggcggctacatcctgccctggcaggagcccgccctgaacacccacctgagcagacagaagttcatgggcttcaagatcgccctggacgacgagggcaccgccggcggctggctgttctgggacgacggccagagcatcgacacctacggcaagggcctgtactacctggccagcttcagcgccagccagaacaccatgcagagccacatcatcttcaacaactacatcaccggcaccaaccccctgaagctgggctacatcgagatctggggcgtgggcagcgtgcccgtgaccagcgtgagcatcagcgtgagcggcatggtgatcacccccagcttcaacaacgaccccaccacccaggtgctgagcatcgacgtgaccgacagaaacatcagcctgcacaacttcaccagcctgacctggatcagcaccctgtag

SEQ ID NO: 148597 - protein, 167 aa, Artificial Sequence
  derived and/or modified sequence
MVLLLKGVPFTLTTVDTRRSPDVLKDFAPGSQLPILLYDSDAKTDTLQIEDFLEETLGPPDFPSLAPRYRESNTAGNDVFHKFSAFIKNPVPAQDEALYQQLLRALARLDSYLRAPLEHELAGEPQLRESRRRFLDGDRLTLADCSLLPKLHIVDTVCAHFRQAPIP

SEQ ID NO: 148598 - protein, 236 aa, Artificial Sequence
  derived and/or modified sequence
MAETKLQLFVKASEDGESVGHCPSCQRLFMVLLLKGVPFTLTTVDTRRSPDVLKDFAPGSQLPILLYDSDAKTDTLQIEDFLEETLGPPDFPSLAPRYRESNTAGNDVFHKFSAFIKNPVPAQDEALYQQLLRALARLDSYLRAPLEHELAGEPQLRESRRRFLDGDRLTLADCSLLPKLHIVDTVCAHFRQAPIPAELRGVRRYLDSAMQEKEFKYTCPHSAEILAAYRPAVHPR

SEQ ID NO: 148599 - DNA, 504 bp, Artificial Sequence
  derived and/or modified sequence
atggtcctgcttctgaagggggtgccattcaccctgacaaccgtagacactcgccggtcccccgacgtactgaaggactttgcccccggatcacagttgcctatcctgctctatgattcggacgcgaagactgatacgctgcagattgaggacttcctggaagaaacgcttggtcccccagactttccctctttggcgccaaggtaccgggagtcgaatacagccggcaacgacgttttccataagttttcagcgtttattaaaaatccggtccctgctcaggatgaggcactctaccagcagctgttgcgggcactcgcacgcctggactcatacctgagggctcctttggaacatgagctcgctggtgaaccacaactccgcgagagccgccgcagattcctcgatggggatcggcttactcttgcggattgttccttactgcctaagctccacattgtggacaccgtctgtgcccactttagacaagcacccataccctag

SEQ ID NO: 148600 - DNA, 711 bp, Artificial Sequence
  derived and/or modified sequence
atggcagagacgaagctgcaactatttgtcaaagcaagcgaagacggggagtctgttggacattgcccctcttgccagagactgttcatggtgttgctgcttaagggcgtccccttcactttaactaccgtagacactagacgaagtcccgacgtgctgaaagacttcgcacccggatcacagttgcctattttactgtacgactctgatgctaaaaccgataccctgcagattgaggatttcctggaggaaacccttggaccgcccgacttccccagcttagcaccgcgataccgcgaaagcaatactgcgggcaatgatgtattccacaaattcagtgcatttattaaaaatcctgtccctgctcaagatgaagccctgtaccaacagttgttaagggctttagcccggctggatagctacttgcgcgccccactggagcacgagttggcaggagagcctcagctgagagagagcagacgcagattcctagacggggatagacttacgctggccgattgctccctgctgcccaagctgcatatagtcgacaccgtctgcgcccattttcgccaggctccgattcccgccgagctacgcggagtacgcaggtacctggattccgctatgcaggagaaggagttcaagtacacgtgcccgcattctgccgagatcttagcggcctacaggcccgcagtccacccgaggtag

SEQ ID NO: 148601 - DNA, 504 bp, Artificial Sequence
  derived and/or modified sequence
atggtgctgctgctgaagggcgtgcccttcaccctgaccaccgtggacacccggcgcagcccagatgtgctgaaggactttgcccctggcagccagctgcccatcctgctgtatgacagtgatgccaagacagacaccctgcagatcgaggacttcctggaggagaccctgggccccccagacttccccagcctggccccccgctaccgggagagcaacacagctggaaatgatgtgttccacaagttcagcgccttcatcaagaaccctgtgcctgcccaggatgaggccctgtaccagcagctgctgcgggccctggcccggctggacagctacctgcgggcccccctggagcacgagctggccggggagccccagctgcgggagagcagaagacgcttcctggatggagaccggctgaccctggccgactgcagcctgctgcccaagctgcacatcgtggacacagtgtgtgcccacttccggcaggcccccatcccctag

SEQ ID NO: 148602 - DNA, 711 bp, Artificial Sequence
  derived and/or modified sequence
atggccgagaccaagctgcagctgtttgtgaaggcctctgaagatggagagagcgtgggccactgccccagctgccagaggctcttcatggtgctgctgctgaagggcgtgcccttcaccctgaccaccgtggacaccaggaggagcccagatgtgctgaaggactttgcccctggcagccagctgcccatcctgctgtatgacagtgatgccaagacagacaccctgcagatcgaggacttcctggaggagaccctgggccccccagacttccccagcctggccccccgctaccgggagagcaacacagctggaaatgatgtgttccacaagttcagcgccttcatcaagaaccctgtgcctgcccaggatgaggccctgtaccagcagctgctgcgggccctggcccggctggacagctacctgcgggcccccctggagcacgagctggccggggagccccagctgcgggagagcagaagacgcttcctggatggagaccggctgaccctggccgactgcagcctgctgcccaagctgcacatcgtggacacagtgtgtgcccacttccggcaggcccccatcccagctgagctgcggggcgtgcggcgctacctggacagcgccatgcaggagaaggagttcaagtacacctgcccccacagcgctgagatcctggccgcctacagacctgctgtgcaccccaggtag

SEQ ID NO: 148603 - DNA, 504 bp, Artificial Sequence
  derived and/or modified sequence
atggtgctgctgctgaagggcgtgcccttcaccctgaccaccgtggatactcgcagatcacctgacgtgcttaaagactttgctcccggatcacaactgcccattctgctatatgacagtgacgctaagacagataccctccagatcgaagactttctggaggaaaccctagggcctccagacttcccgtccctcgccccaaggtatagggaatccaataccgcaggaaacgatgtcttccacaagttcagcgctttcattaaaaatcctgtgcctgcacaagatgaagcactgtatcaacagctccttagagctctggccaggcttgattcataccttagagcccctctggaacacgagctcgctggggaacctcaattgcgggagtcacgccggcgctttttagatggagacagactgacacttgctgactgctcgctactgcctaaattgcatattgtggataccgtgtgtgctcacttccgacaggcgccgatcccttag

SEQ ID NO: 148604 - DNA, 711 bp, Artificial Sequence
  derived and/or modified sequence
atggccgagaccaagctgcagctgttcgtgaaggccagcgaggacggcgagtcagtgggtcattgtccctcttgtcagaggttgttcatggtgttactgcttaaaggcgtcccgttcacgctcactactgtcgacactaggagatctcctgatgtgcttaaagattttgctccaggaagccagttgccgattctgctttacgacagcgatgccaaaacagatactctccagattgaagacttcctggaagagactctgggtccacccgactttcccagcctggcaccacgataccgcgaaagtaataccgctggcaacgacgtttttcataagttttccgccttcattaaaaatcccgtgccagcccaagacgaggctctttaccagcagctgctgagagctctggctcgtctcgactcttatttgcgcgctcccctggaacacgaactggcaggcgagcctcagctcagggagtcccgtcggcggtttctggatggcgaccgcctgactctggcagattgctcactccttccaaagctccatatcgtggacaccgtatgcgcccacttccgccaggctccaatccctgcagaattacgcggtgttcgacggtatctcgactctgctatgcaggagaaagaatttaagtacacatgtccccattcagctgaaatcttagctgcgtaccgtccagctgtgcacccccggtag

SEQ ID NO: 148605 - DNA, 504 bp, Artificial Sequence
  derived and/or modified sequence
atggtgttgctcttaaagggggtgccctttaccttgacaaccgtagatacacggagatccccagacgtgcttaaggactttgcccctggttcacagttaccgattcttctgtatgatagtgatgcgaagactgacacactgcagatcgaagactttttagaggaaacattaggcccaccagactttccttccctcgcacctcggtatcgcgagagcaacactgcagggaatgacgtgttccacaagttctctgccttcatcaagaaccctgtgcctgcgcaggacgaagcattgtaccagcaactcttaagggctttggcaagattagattcctacttgagggccccactggagcacgagctggcaggcgagccgcagctgcgagagagccggaggagatttttggacggcgaccgattaaccctggccgattgcagcttgcttcctaaactccacatcgtggataccgtgtgcgcacatttccgccaagctccaattccctag

SEQ ID NO: 148606 - DNA, 711 bp, Artificial Sequence
  derived and/or modified sequence
atggctgagacgaagctgcagctgttcgtgaaagccagtgaagatggagaatccgtcggtcactgcccaagttgtcagcgcctgttcatggtcctgctcctgaaaggagtcccattcacactgacgacagtcgacactagaaggagcccagacgttcttaaggattttgcccctggctcgcagctgccaattcttctctacgattccgacgcaaagactgacactctacagattgaggatttcctggaagaaacattggggcctcctgattttccgtcgcttgctcccaggtaccgagagtccaataccgccggtaacgatgtatttcacaaattttcggcctttatcaagaatcccgtgcctgcccaggatgaggccttgtaccaacagctcctgagggccctagcccgacttgactcatacctgcgagcaccgctcgagcatgaactagcaggggaacctcagctccgggagtcgaggaggcgcttcctcgatggggacagattgaccttggctgactgttctctgctgccaaagctgcacatcgtagatactgtctgcgcccacttcaggcaggccccaattcccgcagagctccggggtgtaaggcgctatctcgatagcgcaatgcaggagaaagaattcaagtacacctgcccgcacagcgcagagattctggcagcctacagaccagccgtgcacccacgctag

SEQ ID NO: 148607 - DNA, 760 bp, Artificial Sequence
  derived and/or modified sequence
gcgcctgaccgcggcagctcccaccatggcggagaccaagctccagctgtttgtcaaggtgcagggcggactcagctgcggggagggtgtctgggaggaagcgcttttctgggctttgctttctgtggcaggctgtggggtgggcctcccagtaatgtctgagccccttcctgtgggtggctagggggactcaggcagccctacagaggctgagtaaagtgggacccagcgatcactgcccctcctgccagcggctcttcatggtcctgctcctcaagggcgtacctttcaccctcaccacggtggacacgcgcaggtccccggacgtgctgaaggacttcgcccccggctcgcagctgcccatcctgctctatgacagcgacgccaagacagacacgctgcagatcgaggactttctggaggagacgctggggccgcccgacttccccagcctggcgcctcgttacagggagtccaacaccgccggcaacgacgttttccacaagttctccgcgttcatcaagaacccggtgcccgcgcaggacgaagccctgtaccagcagctgctgcgcgccctcgccaggctggacagctacctgcgcgcgcccctggagcacgagctggcgggggagccgcagctgcgcgagtcccgccgccgcttcctggacggcgacaggctcacgctggccgactgcagcctcctgcccaagctgcacatcgtcgacacggtgtgcgcgcacttccgccaggcgcccatccc

SEQ ID NO: 148608 - DNA, 1017 bp, Artificial Sequence
  derived and/or modified sequence
ggatctccgtgcacaccagactcaagtccagggcagccccccacaccattccgccaccctgaggtcacaccctcaggctcagacaccccggggccgggctggcgttgctcaggcagctggttctgcgcgctgggcagcttcatctgcccgcctaggtggctccacggggcgggcccctcggccagggagggcggggcgcacagggagacttaaagagctccccaggtccccacccgcgcctgaccgcggcagctcccaccatggcggagaccaagctccagctgtttgtcaaggcgagtgaggacggggagagcgtgggtcactgcccctcctgccagcggctcttcatggtcctgctcctcaagggcgtacctttcaccctcaccacggtggacacgcgcaggtccccggacgtgctgaaggacttcgcccccggctcgcagctgcccatcctgctctatgacagcgacgccaagacagacacgctgcagatcgaggactttctggaggagacgctggggccgcccgacttccccagcctggcgcctcgttacagggagtccaacaccgccggcaacgacgttttccacaagttctccgcgttcatcaagaacccggtgcccgcgcaggacgaagccctgtaccagcagctgctgcgcgccctcgccaggctggacagctacctgcgcgcgcccctggagcacgagctggcgggggagccgcagctgcgcgagtcccgccgccgcttcctggacggcgacaggctcacgctggccgactgcagcctcctgcccaagctgcacatcgtcgacacggtgtgcgcgcacttccgccaggcgcccatccccgcggagctgcgcggcgtacgccgctacctggacagcgcgatgcaggagaaagagttcaaatacacgtgtccgcacagcgccgagatcctggcggcctaccggcccgccgtgcacccccgctagcgccccaccccgcgtctgtcgcccaataaaggcatctttgtcggga

SEQ ID NO: 148609 - DNA, 504 bp, Artificial Sequence
  derived and/or modified sequence
atggtgctgctgctgaagggcgtgcccttcaccctgaccaccgtggacaccagaagaagccccgacgtgctgaaggacttcgcccccggcagccagctgcccatcctgctgtacgacagcgacgccaagaccgacaccctgcagatcgaggacttcctggaggagaccctgggcccccccgacttccccagcctggcccccagatacagagagagcaacaccgccggcaacgacgtgttccacaagttcagcgccttcatcaagaaccccgtgcccgcccaggacgaggccctgtaccagcagctgctgagagccctggccagactggacagctacctgagagcccccctggagcacgagctggccggcgagccccagctgagagagagcagaagaagattcctggacggcgacagactgaccctggccgactgcagcctgctgcccaagctgcacatcgtggacaccgtgtgcgcccacttcagacaggcccccatcccctag

SEQ ID NO: 148610 - DNA, 711 bp, Artificial Sequence
  derived and/or modified sequence
atggccgagaccaagctgcagctgttcgtgaaggccagcgaggacggcgagagcgtgggccactgccccagctgccagagactgttcatggtgctgctgctgaagggcgtgcccttcaccctgaccaccgtggacaccagaagaagccccgacgtgctgaaggacttcgcccccggcagccagctgcccatcctgctgtacgacagcgacgccaagaccgacaccctgcagatcgaggacttcctggaggagaccctgggcccccccgacttccccagcctggcccccagatacagagagagcaacaccgccggcaacgacgtgttccacaagttcagcgccttcatcaagaaccccgtgcccgcccaggacgaggccctgtaccagcagctgctgagagccctggccagactggacagctacctgagagcccccctggagcacgagctggccggcgagccccagctgagagagagcagaagaagattcctggacggcgacagactgaccctggccgactgcagcctgctgcccaagctgcacatcgtggacaccgtgtgcgcccacttcagacaggcccccatccccgccgagctgagaggcgtgagaagatacctggacagcgccatgcaggagaaggagttcaagtacacctgcccccacagcgccgagatcctggccgcctacagacccgccgtgcaccccagatag

SEQ ID NO: 148611 - protein, 614 aa, Artificial Sequence
  derived and/or modified sequence
MSGIKKQKTENQQKSTNVVYQAHHVSRNKRGQVVGTRGGFRGCTVWLTGLSGAGKTTISFALEEYLVSHAIPCYSLDGDNVRHGLNRNLGFSPGDREENIRRIAEVAKLFADAGLVCITSFISPFAKDRENARKIHESAGLPFFEIFVDAPLNICESRDVKGLYKRARAGEIKGFTGIDSDYEKPETPERVLKTNLSTVSDCVHQVVELLQEQNIVPYTIIKDIHELFVPENKLDHVRAEAETLPSLSITKLDLQWVQVLSEGWATPLKGFMREKEYLQVMHFDTLLDDGVINMSIPIVLPVSAEDKTRLEGCSKFVLAHGGRRVAILRDAEFYEHRKEERCSRVWGTTCTKHPHIKMVMESGDWLVGGDLQVLEKIRWNDGLDQYRLTPLELKQKCKEMNADAVFAFQLRNPVHNGHALLMQDTRRRLLERGYKHPVLLLHPLGGWTKDDDVPLDWRMKQHAAVLEEGVLDPKSTIVAIFPSPMLYAGPTEVQWHCRSRMIAGANFYIVGRDPAGMPHPETKKDLYEPTHGGKVLSMAPGLTSVEIIPFRVAAYNKAKKAMDFYDPARHNEFDFISGTRMRKLAREGENPPDGFMAPKAWKVLTDYYRSLEKN

SEQ ID NO: 148612 - protein, 618 aa, Artificial Sequence
  derived and/or modified sequence
MIVLVTEWVDLSLENQQKSTNVVYQAHHVSRNKRGQVVGTRGGFRGCTVWLTGLSGAGKTTISFALEEYLVSHAIPCYSLDGDNVRHGLNRNLGFSPGDREENIRRIAEVAKLFADAGLVCITSFISPFAKDRENARKIHESAGLPFFEIFVDAPLNICESRDVKGLYKRARAGEIKGFTGIDSDYEKPETPERVLKTNLSTVSDCVHQVVELLQEQNIVPYTIIKDIHELFVPENKLDHVRAEAETLPSLSITKLDLQWVQVLSEGWATPLKGFMREKEYLQVMHFDTLLDDGVINMSIPIVLPVSAEDKTRLEGCSKFVLAHGGRRVAILRDAEFYEHRKEERCSRVWGTTCTKHPHIKMVMESGDWLVGGDLQVLEKIRWNDGLDQYRLTPLELKQKCKEMNADAVFAFQLRNPVHNGHALLMQDTRRRLLERGYKHPVLLLHPLGGWTKDDDVPLDWRMKQHAAVLEEGVLDPKSTIVAIFPSPMLYAGPTEVQWHCRSRMIAGANFYIVGRDPAGMPHPETKKDLYEPTHGGKVLSMAPGLTSVEIIPFRVAAYNKAKKAMDFYDPARHNEFDFISGTRMRKLAREGENPPDGFMAPKAWKVLTDYYRSLEKN

SEQ ID NO: 148613 - DNA, 1845 bp, Artificial Sequence
  derived and/or modified sequence
atgtccggcataaagaagcagaagacagaaaatcagcagaagagtaccaacgtggtgtaccaggcacaccacgtatcacgtaataaacgcgggcaggttgtcggaactagagggggctttcgaggatgcactgtgtggttaaccggtctctccggagcaggtaagaccactatctcctttgctctggaagagtatcttgtgagtcatgcaatcccctgttacagcctagatggagataatgtgagacatgggttgaatagaaatctgggattctctcctggggaccgagaggagaacatcaggaggatcgcagaggtggcgaagttgtttgccgatgcaggcctggtgtgcatcaccagcttcataagtccatttgccaaagatcgggaaaacgcccggaaaattcacgaatctgcgggtctgccttttttcgagatcttcgtcgacgcaccgttaaacatttgcgaatcgagagacgtaaaaggactctataagagagcaagggccggagagattaagggtttcaccggcatcgactctgattatgagaaacctgagacaccagaacgggtgctaaagaccaacctcagtacagtctctgactgcgtccatcaggtggttgaactactgcaagagcagaatatcgtgccttacaccattattaaagacattcacgaactgtttgtgcctgagaacaaactagaccacgtgagagcggaagctgagacgttaccatcgttgtccatcaccaagctggatttgcagtgggtgcaggtgctgtcggaaggctgggcaacaccgctgaaaggtttcatgcgggagaaggagtatctgcaggtgatgcacttcgacaccctgctggacgacggtgttatcaatatgtccatcccaatcgtgcttcctgtttctgcggaggataagaccagactggaagggtgcagtaagttcgttctcgcccatggagggaggagagtggccattttgcgggatgccgagttttacgaacaccgaaaagaagagcgctgctctcgggtctggggaactacatgtaccaagcatccccatatcaaaatggtcatggaatccggagactggttagtaggtggtgatctgcaagtcctggaaaagatcagatggaatgatggtctggatcagtatcgcctcactccgcttgaactgaagcagaaatgtaaggaaatgaatgctgatgccgtgttcgcattccagctgagaaatcccgtgcataacggccacgcactcctgatgcaggataccagacgtcgtttattagagcgggggtataagcatcctgttctgctgctgcaccccctgggaggctggacaaaagacgacgacgtgccactggactggaggatgaagcagcatgccgctgtgttagaggagggagtgctggaccctaagtctaccatcgtggcaatttttccctcaccgatgctgtatgccggacctaccgaggtacaatggcactgcaggagtcgaatgatcgcgggggcaaatttctatattgttggcagagatcctgcagggatgccgcaccctgagaccaagaaagacctttacgagcccacacacggtgggaaggtcctgtctatggctcccgggttaaccagtgtcgagatcattccattccgggtcgccgcctataataaagccaagaaagccatggatttttacgatccagcccggcataatgaattcgacttcatctcgggaacccgaatgaggaagcttgcgcgtgaaggtgaaaaccctcctgatggcttcatggcgccaaaagcctggaaggttctcaccgattactatagaagcctggaaaagaattag

SEQ ID NO: 148614 - DNA, 1857 bp, Artificial Sequence
  derived and/or modified sequence
atgattgtcttggtcaccgaatgggtcgacctgagcctggagaatcagcaaaagtcaacaaacgttgtctaccaggcacaccatgtcagccggaacaaaagagggcaggtcgttggtactaggggtgggtttcgcgggtgcactgtctggctgaccggcctgagcggcgctggcaagacaacaatctccttcgctctcgaagagtatctcgtatctcacgccataccctgctactctctcgatggggataatgtgaggcacggattgaatcgcaacctcggcttcagtccgggagatcgcgaagagaacatcaggcgtatcgcagaggtagctaagcttttcgctgatgccggactggtctgtatcacgtcttttatcagcccatttgctaaagatcgtgagaacgcccgaaaaatccatgaaagcgccggcctacccttttttgaaatcttcgtggatgccccactcaatatctgtgagagcagggacgttaagggactgtataagagggctcgggccggggaaatcaaaggcttcacaggcatcgattccgattatgagaagcccgaaaccccggaacgggtgctgaaaacaaatctgagcactgtgtctgattgtgtgcaccaggttgtggagctgctgcaagagcaaaacattgtgccctacaccatcattaaagacatccacgagttgtttgtccctgagaataaactggatcacgtgcgagccgaggccgaaactcttccctcccttagtatcacaaaactcgacctgcaatgggttcaagtgttaagcgagggatgggctacccctttgaaaggatttatgagggagaaggagtaccttcaagtcatgcactttgacactcttttagatgacggggtgattaacatgtcaataccgattgtgctgccggtatcagcagaggacaaaacccgattagagggctgcagcaaattcgtcctggcccatggcgggaggcgagtcgccatcctcagggacgcagaattttacgagcatagaaaggaggaaaggtgtagtcgcgtctggggcacgacatgtacgaagcaccctcatatcaaaatggtcatggaatcgggggattggcttgttggtggtgatctccaggtgcttgagaaaattaggtggaacgacggccttgatcagtacagacttacccccctcgaactgaagcagaagtgtaaggaaatgaacgccgacgctgttttcgcctttcagctgcgcaatccagtgcacaacgggcacgcccttttgatgcaggacaccaggcggaggttgttagaaaggggttataagcaccccgtgctactccttcaccccttgggaggctggaccaaggacgacgacgttccactggactggagaatgaagcagcatgctgctgttctggaggagggagttcttgatcccaagagcaccatcgttgcgattttcccttctccgatgctatacgccggtccgacagaagttcagtggcactgtcgaagccgcatgattgctggagcgaatttttatatcgtggggcgggatccggcaggaatgcctcacccagaaactaagaaggacttatatgagcctactcacggagggaaggtcctttccatggcacccggactgacctccgttgagataatcccctttcgagtggctgcttataataaggcaaagaaagccatggatttttacgaccctgctcgacacaacgagttcgacttcatcagcgggactagaatgcgcaaactcgccagagagggtgagaatccacccgacggattcatggcgccaaaagcctggaaggtccttaccgactattaccgttccctggaaaaaaactag

SEQ ID NO: 148615 - DNA, 1845 bp, Artificial Sequence
  derived and/or modified sequence
atgagcggcatcaagaagcagaagacagagaaccagcagaagagcaccaacgtggtgtaccaggcccaccacgtgtccaggaacaagaggggccaggtggtgggcacccggggcggcttccggggctgcaccgtgtggctgaccggcctgtctggagctgggaagaccaccatcagctttgccctggaggagtacctggtgtcccatgccatcccctgctacagcctggatggagacaacgtgagacatggcctgaacagaaacctgggcttcagccctggggaccgggaggagaacatcagaagaattgctgaggtggccaagctgtttgctgatgctggcctggtgtgcatcaccagcttcatcagcccctttgccaaggaccgggagaatgccaggaagatccacgagagcgctggcctgcccttctttgagatctttgtggatgcccccctgaacatctgtgagagcagagatgtgaagggcctgtacaagagggcccgggccggggagatcaagggcttcaccggcatcgacagcgactatgagaagccagagaccccagagcgggtgctgaagaccaacctgagcacagtgtctgactgtgtgcaccaggtggtggagctgctgcaggagcagaacatcgtgccctacaccatcatcaaggacatccacgagctgtttgtgcctgagaacaagctggaccacgtgcgggcagaggccgagaccctgcccagcctgagcatcaccaagctggacctgcagtgggtgcaggtgctgtctgagggctgggccacccccctgaagggcttcatgagggagaaggagtacctgcaggtgatgcactttgacaccctgctggatgatggagtcatcaacatgagcatccccatcgtgctgcctgtgtctgctgaggacaagacccggctggagggctgcagcaagtttgtgctggcccacggcggcagaagagtggccatcctgagagatgctgagttctatgagcacaggaaggaggagcgctgcagccgggtgtggggcaccacctgcaccaagcacccccacatcaagatggtgatggagagcggggactggctggtgggcggggacctgcaggtgctggagaagatccgctggaatgatggcctggaccagtaccgcctgacccccctggagctgaagcagaagtgcaaggagatgaatgctgatgctgtgtttgccttccagctgagaaatcctgtgcacaacggccacgccctgctgatgcaggacacccggcggcggctgctggagcggggctacaagcaccctgtgctgctgctgcaccccctgggcggctggaccaaggatgatgatgtgcccctggactggaggatgaagcagcacgccgctgtgctggaggagggcgtgctggaccccaagagcaccatcgtggccatcttccccagccccatgctgtatgccggccccacagaggtgcagtggcactgccgcagcaggatgattgctggggccaacttctacatcgtgggccgggaccctgctggcatgccccaccctgagaccaagaaggacctgtatgagcccacccatggaggcaaggtgctgtccatggcccctggcctgacctctgtggagatcatccccttccgggtggccgcctacaacaaggccaagaaggccatggacttctatgaccctgcccggcacaatgaatttgacttcatcagcggcaccaggatgaggaagctggcccgggagggagaaaatcctccagatggcttcatggcccccaaggcctggaaggtgctgacagactactaccgcagcctggagaagaactag

SEQ ID NO: 148616 - DNA, 1857 bp, Artificial Sequence
  derived and/or modified sequence
atgattgtgctggtgacagagtgggtggacctgagcctggagaaccagcagaagagcaccaacgtggtgtaccaggcccaccacgtgtccaggaacaagaggggccaggtggtgggcacccggggcggcttccggggctgcaccgtgtggctgaccggcctgtctggagctgggaagaccaccatcagctttgccctggaggagtacctggtgtcccatgccatcccctgctacagcctggatggagacaacgtgagacatggcctgaacagaaacctgggcttcagccctggggaccgggaggagaacatcagaagaattgctgaggtggccaagctgtttgctgatgctggcctggtgtgcatcaccagcttcatcagcccctttgccaaggaccgggagaatgccaggaagatccacgagagcgctggcctgcccttctttgagatctttgtggatgcccccctgaacatctgtgagagcagagatgtgaagggcctgtacaagagggcccgggccggggagatcaagggcttcaccggcatcgacagcgactatgagaagccagagaccccagagcgggtgctgaagaccaacctgagcacagtgtctgactgtgtgcaccaggtggtggagctgctgcaggagcagaacatcgtgccctacaccatcatcaaggacatccacgagctgtttgtgcctgagaacaagctggaccacgtgcgggcagaggccgagaccctgcccagcctgagcatcaccaagctggacctgcagtgggtgcaggtgctgtctgagggctgggccacccccctgaagggcttcatgagggagaaggagtacctgcaggtgatgcactttgacaccctgctggatgatggagtcatcaacatgagcatccccatcgtgctgcctgtgtctgctgaggacaagacccggctggagggctgcagcaagtttgtgctggcccacggcggcagaagagtggccatcctgagagatgctgagttctatgagcacaggaaggaggagcgctgcagccgggtgtggggcaccacctgcaccaagcacccccacatcaagatggtgatggagagcggggactggctggtgggcggggacctgcaggtgctggagaagatccgctggaatgatggcctggaccagtaccgcctgacccccctggagctgaagcagaagtgcaaggagatgaatgctgatgctgtgtttgccttccagctgagaaatcctgtgcacaacggccacgccctgctgatgcaggacacccggcggcggctgctggagcggggctacaagcaccctgtgctgctgctgcaccccctgggcggctggaccaaggatgatgatgtgcccctggactggaggatgaagcagcacgccgctgtgctggaggagggcgtgctggaccccaagagcaccatcgtggccatcttccccagccccatgctgtatgccggccccacagaggtgcagtggcactgccgcagcaggatgattgctggggccaacttctacatcgtgggccgggaccctgctggcatgccccaccctgagaccaagaaggacctgtatgagcccacccatggaggcaaggtgctgtccatggcccctggcctgacctctgtggagatcatccccttccgggtggccgcctacaacaaggccaagaaggccatggacttctatgaccctgcccggcacaatgaatttgacttcatcagcggcaccaggatgaggaagctggcccgggagggagaaaatcctccagatggcttcatggcccccaaggcctggaaggtgctgacagactactaccgcagcctggagaagaactag

SEQ ID NO: 148617 - DNA, 1845 bp, Artificial Sequence
  derived and/or modified sequence
atgagcggcatcaagaagcagaagaccgagaaccagcagaagagcaccaatgtggtttaccaggcgcatcacgtatcacgaaacaagagagggcaggtggtgggaacgagaggaggatttcggggctgcacagtctggcttactggtctgagtggggctggcaagactactatttcttttgccctggaagaatacctcgtttcccatgcaatcccctgctattctttggatggggacaatgttagacacggtctgaaccgcaaccttggtttctcccctggtgacagagaagaaaacatccgacggattgccgaggtcgctaagctttttgcagatgcaggcctggtctgcatcacaagtttcatcagcccatttgcgaaggatagggagaatgccaggaagattcatgagtccgccggactaccattcttcgagatctttgtggatgctcccctgaatatctgcgagtcacgtgacgtgaaagggctctacaagagggcaagggcgggcgaaatcaagggattcacaggtatcgactccgattatgagaaaccagagaccccggaacgggttctgaaaacaaacctgtctactgtcagcgattgcgtccatcaagtggtggagctcttacaggaacagaatattgtgccttacactattatcaaggatattcacgagctgttcgtgcctgaaaacaaactggatcatgtgcgcgccgaagctgaaaccctgccatcactgtctattactaagctggacctgcagtgggtgcaggtgctttccgaaggctgggctactccccttaagggtttcatgagagagaaagaatacctgcaggtgatgcattttgacacccttctggacgacggtgtgattaacatgtctattcccattgtgttacccgtcagcgcagaagataagacgcgtctagagggctgttccaagttcgtgttagctcacggcgggcgccgagtggctattctgagggatgctgaattttatgaacaccgaaaggaagagcgctgctctcgagtctggggcaccacctgcacgaagcatccccacatcaagatggtcatggagtccggagactggttggtcgggggagacctgcaggtgctcgaaaaaataagatggaacgacgggctggaccagtaccggctcacacccctggagctgaagcagaagtgcaaggagatgaacgctgacgccgtcttcgcctttcagttaagaaaccccgtgcataacggacatgctctgctgatgcaggatactcgccggcggctgctggaacgaggttataagcatcccgttttgcttttacatccacttggcggctggaccaaagacgacgatgtccctctcgattggagaatgaagcaacatgccgctgttcttgaagaaggggtgctggatcccaaaagtacaatcgtggctatcttcccaagtcccatgttgtacgcaggccctaccgaggtgcagtggcactgccggtccagaatgatagccggcgctaacttttatatagtaggtagggaccccgccggaatgccacatcccgagacaaagaaagacctttacgaacctactcacggagggaaagttctgtctatggcccccggcctgactagcgtggagattattccgttcagggtggccgcctacaataaggccaaaaaggccatggacttctatgaccctgcaagacacaacgaatttgactttatttctggcacgcgcatgcgcaaacttgcccgggaaggcgaaaatccaccggacgggttcatggctccaaaagcatggaaggtgctcaccgattattaccgctcactggaaaagaactag

SEQ ID NO: 148618 - DNA, 1857 bp, Artificial Sequence
  derived and/or modified sequence
atgatcgtgctggtgaccgagtgggtggacctgagcctggagaaccaacagaagtccacaaatgtagtgtatcaggcacaccacgtgagtcgaaacaaaagaggccaagtggtcggcaccaggggcggttttcggggctgcacagtatggcttaccggtctctcaggggcgggaaagactacgatatccttcgcattagaggaatacctagtctctcacgctattccctgttattctctcgacggcgacaatgtccgtcacggtctgaaccgcaacctcggattctctccgggcgatcgcgaggaaaacataaggcgaatagcagaggtggctaagctgttcgccgacgcagggttggtatgcatcacttccttcataagcccttttgccaaggaccgcgagaacgctcgtaagatacacgaatccgcaggattgcccttcttcgaaatctttgtggacgctccccttaatatctgcgaatcaagggacgtaaagggtttatataagagagctcgagcaggcgaaattaaagggtttacaggcatagactcagattacgagaaacctgaaacacccgagagagtgctcaaaacaaatctttcaacagtgtccgactgcgtgcatcaagtcgtcgagcttctgcaggagcaaaatatcgttccctacacaattatcaaggacattcatgaattattcgtgcctgaaaacaaactggatcatgtgagggcggaagccgagacactgccttctctctcaatcacaaaactggacctgcagtgggtccaggtgttgtccgaggggtgggctacgcccctgaaggggttcatgagagagaaggaatacctgcaagtaatgcacttcgacactctgcttgacgatggtgttataaatatgtcaatcccgattgtgttgccagtgtccgctgaagataagaccaggctggaagggtgttccaagttcgtgctcgctcacggaggtagacgcgttgcaattctccgcgatgctgagttctatgaacacagaaaggaagagcggtgttccagggtctggggaactacatgcactaagcaccctcatatcaaaatggtgatggagtctggcgactggttggtggggggcgacctacaggtacttgagaagatcaggtggaatgatggactggatcagtatcgcctgactccgcttgagcttaaacagaagtgtaaggagatgaatgcagatgcggtgttcgcgtttcagctgaggaatcccgtgcacaacggtcatgcactcctgatgcaggacacaaggagacgcctgcttgagagagggtataagcaccccgtcctgttactacaccctctaggtgggtggaccaaagatgatgacgtgcccctcgattggcgaatgaagcagcacgcggccgtgctcgaggagggtgtccttgaccccaagagcactatcgtggctatcttccccagccctatgctctacgccggacctacagaggtacagtggcactgtcggtcaaggatgatcgccggcgcaaacttctatattgtgggcagggatcctgcggggatgcctcaccccgagaccaaaaaagatttgtatgaacctacccacggtggaaaggtcctcagcatggcccccgggctcacatcagtcgaaatcatccccttccgagtagccgcttataacaaggcaaagaaagctatggatttttacgatcccgcaaggcacaatgaattcgactttattagcggaactcggatgagaaaactcgccagggagggcgaaaatccacctgacgggttcatggcccctaaggcctggaaagttctgaccgattattatcgaagcttagagaagaattag

SEQ ID NO: 148619 - DNA, 1845 bp, Artificial Sequence
  derived and/or modified sequence
atgtcaggcatcaaaaagcagaaaaccgaaaaccagcagaaatcaacaaacgttgtctatcaggcccaccatgtgtctcgtaacaaaagagggcaggttgttggaacaagaggcggatttcgtggatgcactgtctggctgaccggcctcagtggagcaggcaagaccactatatcctttgccctggaagaataccttgtctctcacgctatcccgtgctactcattggacggcgacaacgttagacatggcctgaaccgtaatctgggtttcagccctggcgacagagaggaaaacattagacgcatagcagaggttgcaaagctgtttgctgatgccggtctcgtgtgtattacgtcatttatcagccccttcgccaaggatagagagaatgctcgtaaaattcatgaaagcgcagggctgcctttttttgagatttttgtggacgctccactgaacatatgcgaatccagagatgtcaaaggtctgtacaagcgagcccgagccggagaaattaaggggtttacgggaatagactctgactatgaaaaacccgagaccccagaacgggttttaaaaaccaatctctccacggtgagcgactgcgtccatcaggttgtagagctcctgcaggagcaaaatatcgtgccctataccatcatcaaggatatccatgagctgtttgtcccagagaataagctcgatcatgtcagggcagaggccgagaccctgcccagcctgtccatcaccaaactggatctgcaatgggttcaggtcctctcagagggctgggccactccattgaaagggtttatgcgagagaaggagtatctgcaagtcatgcacttcgatacgctgctagatgatggggtgatcaatatgtccatccccatcgttctgcccgttagcgccgaagacaagacaagactcgaaggctgctccaagtttgtgttagcccacgggggaagaagagtggctatcctgagagatgctgaattctatgaacaccgcaaagaggagcgatgctctagggtgtgggggaccacatgcacaaagcacccgcacatcaaaatggtgatggaaagcggagactggcttgtgggaggtgatttacaagtgctcgagaagattaggtggaacgatggactggaccagtatcgccttacacctctggagcttaagcagaagtgcaaggagatgaatgccgacgccgtgtttgcctttcaactgcgaaacccagtccacaacgggcacgccttgctaatgcaagatacccggaggaggcttttagagaggggctacaagcatcctgttctattgctacatcctctgggaggatggaccaaggacgacgatgtcccgttagactggcgaatgaaacagcacgcagccgtgctggaggagggagttttggaccccaaatcgacgatcgtcgccatcttcccaagccccatgctgtacgcaggacccacagaggtgcagtggcactgtagatctaggatgatcgccggtgctaatttctatatcgttgggagggatccagctgggatgccccacccggagacaaaaaaagacctgtatgaaccaacccacggcggaaaggtgctgtctatggcgcctggtctcacttctgtcgaaatcataccctttagggtagcggcatataataaagctaaaaaggccatggacttctacgatccagctagacataatgagtttgacttcatttccggaacccgcatgcgaaaacttgctcgcgagggcgagaatcctcccgatggttttatggcaccgaaagcgtggaaggtcttgaccgattactatagatcactcgaaaagaactag

SEQ ID NO: 148620 - DNA, 1857 bp, Artificial Sequence
  derived and/or modified sequence
atgatcgtgctagtgaccgagtgggtggatcttagtcttgagaatcagcagaaatccacaaacgtggtttatcaggcccaccacgtttctagaaataaacggggtcaggtggtcggcacaaggggaggtttccgtgggtgcaccgtgtggctcacaggcttgtcaggcgctggcaaaactaccatatccttcgcactcgaggaatacctggtcagccacgccattccctgttattccctcgacggagataacgtgcggcacgggctaaaccgaaacctggggtttagcccaggtgatcgggaggaaaatataaggcggatcgcagaagtggcaaagctcttcgccgatgccggattggtatgcattaccagctttatctctcccttcgccaaggacagagaaaacgccagaaagatccatgagagtgcaggtctgccattcttcgaaatattcgtagatgcaccgctgaacatttgtgaaagtcgtgatgtaaagggactgtataaaagggccagggccggagagataaaaggcttcactggaatagacagtgattacgaaaagcccgaaaccccagagagggtgcttaaaacgaatctgagtaccgtgagcgactgcgtgcatcaggtcgtcgaactgcttcaggagcagaatattgtgccttataccatcattaaagacattcatgagctctttgtccccgagaacaagctcgaccatgttcgggcagaggctgaaaccttaccctctttatccatcactaaactggacctacaatgggtgcaagtgctgagcgaggggtgggctacaccattgaagggtttcatgagggagaaggagtatctgcaggttatgcacttcgatactctgctcgacgatggggtgattaacatgtctatcccaatcgttcttcccgtgtctgcagaggacaaaacaagactagaaggctgctctaagttcgtgcttgcccatgggggaaggcgggtggctattctgagggacgccgagttttatgaacaccggaaagaggagaggtgtagccgcgtatggggcacaacctgcacgaaacatccacacatcaagatggtgatggaatccggcgattggctggtcggcggagatctgcaggtgctggaaaaaatccggtggaatgacggcttggatcagtataggctgactccacttgagctgaagcagaagtgcaaggagatgaatgctgatgctgtcttcgccttccagttgcggaaccctgtgcacaatggacacgccctcctgatgcaggacaccaggcgaaggcttttggagagggggtataaacaccctgtcctgttgctccaccctttaggaggctggactaaagatgacgatgtcccgctggattggaggatgaaacagcacgccgcagtgctcgaggaaggcgtactagatcctaagtctacgatagtggccatcttcccttctcccatgctgtacgccggacccaccgaggttcaatggcattgtcgaagtcgtatgattgccggtgccaatttctatatagttgggagggaccctgctggtatgcctcaccctgaaactaagaaggacctttacgaaccgacccacggcggaaaagtgctatccatggctcctggcttgacatcagtggaaataataccatttcgggtggcagcatataacaaagctaagaaggcaatggacttctatgaccctgcgagacacaacgagttcgatttcattagtgggaccagaatgagaaaactcgcacgtgagggggagaatcctccagacggatttatggcccctaaggcctggaaagtcctaacagactactacagaagcctcgagaagaattag

SEQ ID NO: 148621 - DNA, 3949 bp, Artificial Sequence
  derived and/or modified sequence
ggccgcgtgccgggcgtgccatctgccgctccgctgcaaggtctcgcccgggaccggggctggcggagcgcgcgcccgcgagtaggggccgggccggggaccccgcctaggcggcggcggccgggtccccaaggctgggcgctgcttgcggaaccgacggggcggagaggagcgtggcgggaggaggagtaggagaagggggctggtcaagggaagtgcgacgtgtctgcggagcctttttatacctccttcccgggagtccggcagccgctgctgctgctgctgctgctgctgccgccgccgccgccgccgtccctgcgtccttcggtctctgctcccgggacccgggctccgccgcagccagccagcatgtcggggatcaagaagcaaaagacggagaaccagcagaaatccaccaatgtagtctatcaggcccaccatgtgagcaggaataagagagggcaagtggttggaacaaggggtgggttccgaggatgtaccgtgtggctaacaggtctctctggtgctggaaaaacaacgataagttttgccctggaggagtaccttgtctcccatgccatcccttgttactccctggatggggacaatgtccgtcatggccttaacagaaatctcggattctctcctggggacagagaggaaaatatccgccggattgctgaggtggctaagctgtttgctgatgctggtctggtctgcattaccagctttatttctccattcgcaaaggatcgtgagaatgcccgcaaaatacatgaatcagcagggctgccattctttgaaatatttgtagatgcacctctaaatatttgtgaaagcagagacgtaaaaggcctctataaaagggccagagctggggagattaaaggatttacaggtattgattctgattatgagaaacctgaaactcctgagcgtgtgcttaaaaccaatttgtccacagtgagtgactgtgtccaccaggtagtggaacttctgcaagagcagaacattgtaccctatactataatcaaagatatccacgaactctttgtgccggaaaacaaacttgaccacgtccgagctgaggctgaaactctcccttcattatcaattactaagctggatctccagtgggtccaggttttgagcgaaggctgggccactcccctcaaaggtttcatgcgggagaaggagtacttacaggttatgcactttgacaccctgctagatgatggcgtgatcaacatgagcatccccattgtactgcccgtctctgcagaggataagacacggctggaagggtgcagcaagtttgtcctggcacatggtggacggagggtagctatcttacgagacgctgaattctatgaacacagaaaagaggaacgctgttcccgtgtttgggggacaacatgtacaaaacacccccatatcaaaatggtgatggaaagtggggactggctggttggtggagaccttcaggtgctggagaaaataagatggaatgatgggctggaccaataccgtctgacacctctggagctcaaacagaaatgtaaagaaatgaatgctgatgcggtgtttgcattccagttgcgcaatcctgtccacaatggccatgccctgttgatgcaggacactcgccgcaggctcctagagaggggctacaagcacccggtcctcctactacaccctctgggcggctggaccaaggatgacgatgtgcctctagactggcggatgaagcagcacgcggctgtgctcgaggaaggggtcctggatcccaagtcaaccattgttgccatctttccgtctcccatgttatatgctggccccacagaggtccagtggcactgcaggtcccggatgattgcgggtgccaatttctacattgtggggagggaccctgcaggaatgccccatcctgaaaccaagaaggatctgtatgaacccactcatgggggcaaggtcttgagcatggcccctggcctcacctctgtggaaatcattccattccgagtggctgcctacaacaaagccaaaaaagccatggacttctatgatccagcaaggcacaatgagtttgacttcatctcaggaactcgaatgaggaagctcgcccgggaaggagagaatcccccagatggcttcatggcccccaaagcatggaaggtcctgacagattattacaggtccctggagaagaactaagcctttggctccagagtttctttctgaagtgctctttgattaccttttctatttttatgattagatgctttgtattaaattgcttctcaatgatgcattttaatcttttataatgaagtaaaagttgtgtctataattaaaaaaaaatatatatatatacacacacacatatacatacaaagtcaaactgaagaccaaatcttagcaggtaaaagcaatattcttatacatttcataataaaattagctctatgtattttctactgcacctgagcaggcaggtcccagatttcttaaggctttgtttgaccatgtgtctagttacttgctgaaaagtgaatatattttccagcatgtcttgacaacctgtactcttccaatgtcatttatcagttgtaaaatatatcagattgtgtcctcttctgtacaattgacaaaaaaaaaaatttttttttctcactctaaaagaggtgtggctcacatcaagattcttcctgatattttacctcatgctgtacaaagccttaatgttgtaatcatatcttacgtgttgaagacctgactggagaaacaaaatgtgcaataacgtgaattttatcttagagatctgtgcagcctatttctgtcacaaaagttatattgtctaataagagaagtcttaatggcctctgtgaataatgtaactccagttacacggtgacttttaatagcatacagtgatttgatgaaaggacgtcaaacaatgtggcgatgtcgtggaaagttatctttcccgctctttgctgtggtcattgtgtcttgcagaaaggatggccctgatgcagcagcagcgccagctgtaataaaaaataattcacactatcagactagcaaggcactagaactggaaaagaccacagaaaacaaagaatccaaccctttcatcttacaggtgaacaaactgtgatgatgcacatgtatgtgttttgtaagctgtgagcaccgtaacaaaatgtaaatttgccattattaggaagtgctggtggcagtgaagaagcacccaggccacttgactcccagtctggtgccctgtctacaccagacaacacaggagctgggtcagattcccctcagctgcttaacaaagttcctcgaacagaaagtgcttacaaagctgccttctcggatactgaaaggtcgagttttctgaactgcactgattttattgcagttgaaaaaaaaaaaaagctattccaaagatttcaagctgttctgagacatcttctgatggctttacttcctgagaggcaatgtttttactttatgcataattcattgttgccaaggaataaagtgaagaaacagcaccttttaatatataggtctctctggaagagacctaaattagaaagagaaaactgtgacaattttcatattctcattcttaaaaaacactaatcttaactaacaaaagttcttttgagaataagttacacacaatggccacagcagtttgtctttaatagtatagtgcctatactcatgtaatcggttactcactactgcctttaaaaaaaaaaaccagcatatttattgaaaacatgagacaggattatagtgccttaaccgatatattttgtgacttaaaaaatacatttaaaactgctcttctgctctagtaccatgcttagtgcaaatgattatttctatgtacaactgatgcttgttcttattttaataaatttatcagagtgaa

SEQ ID NO: 148622 - DNA, 1958 bp, Artificial Sequence
  derived and/or modified sequence
gaacattctatcttcagccaccaccctgcaagcctcagatgattgtactggttactgaatgggttgacctctctctagagaaccagcagaaatccaccaatgtagtctatcaggcccaccatgtgagcaggaataagagagggcaagtggttggaacaaggggtgggttccgaggatgtaccgtgtggctaacaggtctctctggtgctggaaaaacaacgataagttttgccctggaggagtaccttgtctcccatgccatcccttgttactccctggatggggacaatgtccgtcatggccttaacagaaatctcggattctctcctggggacagagaggaaaatatccgccggattgctgaggtggctaagctgtttgctgatgctggtctggtctgcattaccagctttatttctccattcgcaaaggatcgtgagaatgcccgcaaaatacatgaatcagcagggctgccattctttgaaatatttgtagatgcacctctaaatatttgtgaaagcagagacgtaaaaggcctctataaaagggccagagctggggagattaaaggatttacaggtattgattctgattatgagaaacctgaaactcctgagcgtgtgcttaaaaccaatttgtccacagtgagtgactgtgtccaccaggtagtggaacttctgcaagagcagaacattgtaccctatactataatcaaagatatccacgaactctttgtgccggaaaacaaacttgaccacgtccgagctgaggctgaaactctcccttcattatcaattactaagctggatctccagtgggtccaggttttgagcgaaggctgggccactcccctcaaaggtttcatgcgggagaaggagtacttacaggttatgcactttgacaccctgctagatgatggcgtgatcaacatgagcatccccattgtactgcccgtctctgcagaggataagacacggctggaagggtgcagcaagtttgtcctggcacatggtggacggagggtagctatcttacgagacgctgaattctatgaacacagaaaagaggaacgctgttcccgtgtttgggggacaacatgtacaaaacacccccatatcaaaatggtgatggaaagtggggactggctggttggtggagaccttcaggtgctggagaaaataagatggaatgatgggctggaccaataccgtctgacacctctggagctcaaacagaaatgtaaagaaatgaatgctgatgcggtgtttgcattccagttgcgcaatcctgtccacaatggccatgccctgttgatgcaggacactcgccgcaggctcctagagaggggctacaagcacccggtcctcctactacaccctctgggcggctggaccaaggatgacgatgtgcctctagactggcggatgaagcagcacgcggctgtgctcgaggaaggggtcctggatcccaagtcaaccattgttgccatctttccgtctcccatgttatatgctggccccacagaggtccagtggcactgcaggtcccggatgattgcgggtgccaatttctacattgtggggagggaccctgcaggaatgccccatcctgaaaccaagaaggatctgtatgaacccactcatgggggcaaggtcttgagcatggcccctggcctcacctctgtggaaatcattccattccgagtggctgcctacaacaaagccaaaaaagccatggacttctatgatccagcaaggcacaatgagtttgacttcatctcaggaactcgaatgaggaagctcgcccgggaaggagagaatcccccagatggcttcatggcccccaaagcatggaaggtcctgacagattattacaggtccctggagaagaactaagcctttggctccagagtttctttctgaagtgctctttgattaccttttctatttttatgatta

SEQ ID NO: 148623 - DNA, 1845 bp, Artificial Sequence
  derived and/or modified sequence
atgagcggcatcaagaagcagaagaccgagaaccagcagaagagcaccaacgtggtgtaccaggcccaccacgtgagcagaaacaagagaggccaggtggtgggcaccagaggcggcttcagaggctgcaccgtgtggctgaccggcctgagcggcgccggcaagaccaccatcagcttcgccctggaggagtacctggtgagccacgccatcccctgctacagcctggacggcgacaacgtgagacacggcctgaacagaaacctgggcttcagccccggcgacagagaggagaacatcagaagaatcgccgaggtggccaagctgttcgccgacgccggcctggtgtgcatcaccagcttcatcagccccttcgccaaggacagagagaacgccagaaagatccacgagagcgccggcctgcccttcttcgagatcttcgtggacgcccccctgaacatctgcgagagcagagacgtgaagggcctgtacaagagagccagagccggcgagatcaagggcttcaccggcatcgacagcgactacgagaagcccgagacccccgagagagtgctgaagaccaacctgagcaccgtgagcgactgcgtgcaccaggtggtggagctgctgcaggagcagaacatcgtgccctacaccatcatcaaggacatccacgagctgttcgtgcccgagaacaagctggaccacgtgagagccgaggccgagaccctgcccagcctgagcatcaccaagctggacctgcagtgggtgcaggtgctgagcgagggctgggccacccccctgaagggcttcatgagagagaaggagtacctgcaggtgatgcacttcgacaccctgctggacgacggcgtgatcaacatgagcatccccatcgtgctgcccgtgagcgccgaggacaagaccagactggagggctgcagcaagttcgtgctggcccacggcggcagaagagtggccatcctgagagacgccgagttctacgagcacagaaaggaggagagatgcagcagagtgtggggcaccacctgcaccaagcacccccacatcaagatggtgatggagagcggcgactggctggtgggcggcgacctgcaggtgctggagaagatcagatggaacgacggcctggaccagtacagactgacccccctggagctgaagcagaagtgcaaggagatgaacgccgacgccgtgttcgccttccagctgagaaaccccgtgcacaacggccacgccctgctgatgcaggacaccagaagaagactgctggagagaggctacaagcaccccgtgctgctgctgcaccccctgggcggctggaccaaggacgacgacgtgcccctggactggagaatgaagcagcacgccgccgtgctggaggagggcgtgctggaccccaagagcaccatcgtggccatcttccccagccccatgctgtacgccggccccaccgaggtgcagtggcactgcagaagcagaatgatcgccggcgccaacttctacatcgtgggcagagaccccgccggcatgccccaccccgagaccaagaaggacctgtacgagcccacccacggcggcaaggtgctgagcatggcccccggcctgaccagcgtggagatcatccccttcagagtggccgcctacaacaaggccaagaaggccatggacttctacgaccccgccagacacaacgagttcgacttcatcagcggcaccagaatgagaaagctggccagagagggcgagaacccccccgacggcttcatggcccccaaggcctggaaggtgctgaccgactactacagaagcctggagaagaactag

SEQ ID NO: 148624 - DNA, 1857 bp, Artificial Sequence
  derived and/or modified sequence
atgatcgtgctggtgaccgagtgggtggacctgagcctggagaaccagcagaagagcaccaacgtggtgtaccaggcccaccacgtgagcagaaacaagagaggccaggtggtgggcaccagaggcggcttcagaggctgcaccgtgtggctgaccggcctgagcggcgccggcaagaccaccatcagcttcgccctggaggagtacctggtgagccacgccatcccctgctacagcctggacggcgacaacgtgagacacggcctgaacagaaacctgggcttcagccccggcgacagagaggagaacatcagaagaatcgccgaggtggccaagctgttcgccgacgccggcctggtgtgcatcaccagcttcatcagccccttcgccaaggacagagagaacgccagaaagatccacgagagcgccggcctgcccttcttcgagatcttcgtggacgcccccctgaacatctgcgagagcagagacgtgaagggcctgtacaagagagccagagccggcgagatcaagggcttcaccggcatcgacagcgactacgagaagcccgagacccccgagagagtgctgaagaccaacctgagcaccgtgagcgactgcgtgcaccaggtggtggagctgctgcaggagcagaacatcgtgccctacaccatcatcaaggacatccacgagctgttcgtgcccgagaacaagctggaccacgtgagagccgaggccgagaccctgcccagcctgagcatcaccaagctggacctgcagtgggtgcaggtgctgagcgagggctgggccacccccctgaagggcttcatgagagagaaggagtacctgcaggtgatgcacttcgacaccctgctggacgacggcgtgatcaacatgagcatccccatcgtgctgcccgtgagcgccgaggacaagaccagactggagggctgcagcaagttcgtgctggcccacggcggcagaagagtggccatcctgagagacgccgagttctacgagcacagaaaggaggagagatgcagcagagtgtggggcaccacctgcaccaagcacccccacatcaagatggtgatggagagcggcgactggctggtgggcggcgacctgcaggtgctggagaagatcagatggaacgacggcctggaccagtacagactgacccccctggagctgaagcagaagtgcaaggagatgaacgccgacgccgtgttcgccttccagctgagaaaccccgtgcacaacggccacgccctgctgatgcaggacaccagaagaagactgctggagagaggctacaagcaccccgtgctgctgctgcaccccctgggcggctggaccaaggacgacgacgtgcccctggactggagaatgaagcagcacgccgccgtgctggaggagggcgtgctggaccccaagagcaccatcgtggccatcttccccagccccatgctgtacgccggccccaccgaggtgcagtggcactgcagaagcagaatgatcgccggcgccaacttctacatcgtgggcagagaccccgccggcatgccccaccccgagaccaagaaggacctgtacgagcccacccacggcggcaaggtgctgagcatggcccccggcctgaccagcgtggagatcatccccttcagagtggccgcctacaacaaggccaagaaggccatggacttctacgaccccgccagacacaacgagttcgacttcatcagcggcaccagaatgagaaagctggccagagagggcgagaacccccccgacggcttcatggcccccaaggcctggaaggtgctgaccgactactacagaagcctggagaagaactag

SEQ ID NO: 148625 - protein, 621 aa, Artificial Sequence
  derived and/or modified sequence
MADFEELRNMVSSFRVSELQVLLGFAGRNKSGRKHDLLMRALHLLKSGCSPAVQIKIRELYRRRYPRTLEGLSDLSTIKSSVFSLDGGSSPVEPDLAVAGIHSLPSTSVTPHSPSSPVGSVLLQDTKPTFEMQQPSPPIPPVHPDVQLKNLPFYDVLDVLIKPTSLVQSSIQRFQEKFFIFALTPQQVREICISRDFLPGGRRDYTVQVQLRLCLAETSCPQEDNYPNSLCIKVNGKLFPLPGYAPPPKNGIEQKRPGRPLNITSLVRLSSAVPNQISISWASEIGKNYSMSVYLVRQLTSAMLLQRLKMKGIRNPDHSRALIKEKLTADPDSEIATTSLRVSLMCPLGKMRLTIPCRAVTCTHLQCFDAALYLQMNEKKPTWICPVCDKKAAYESLILDGLFMEILNDCSDVDEIKFQEDGSWCPMRPKKEAMKVSSQPCTKIESSSVLSKPCSVTVASEASKKKVDVIDLTIESSSDEEEDPPAKRKCIFMSETQSSPTKGVLMYQPSSVRVPSVTSVDPAAIPPSLTDYSVPFHHTPISSMSSDLPGLDFLSLIPVDPQYCPPMFLDSLTSPLTASSTSVTTTSSHESSTHVSSSSSRSETGVITSSGSNIPDIISLD

SEQ ID NO: 148626 - protein, 621 aa, Artificial Sequence
  derived and/or modified sequence
MANFEEIINMVSSFRVSELQVLLGFAGRNKSGRKHDLLMRALHLLKSGCSPAVQIKIRELYRRRYPRTLEGLSDLSTIKSSVFSLDGGSSPVEPDLAVAGIHSLPSTSVTPHSPSSPVGSVLLQDTKPTFEMQQPSPPIPPVHPDVQLKNLPFYDVLDVLIKPTSLVQSSIQRFQEKFFIFALTPQQVREICISRDFLPGGRRDYTVQVQLRLCLAETSCPQEDNYPNSLCIKVNGKLFPLPGYAPPPKNGIEQKRPGRPLNITSLVRLSSAVPNQISISWASEIGKNYSMSVYLVRQLTSAMLLQRLKMKGIRNPDHSRALIKEKLTADPDSEIATTSLRVSLMCPLGKMRLTIPCRAVTCTHLQCFDAALYLQMNEKKPTWICPVCDKKAAYESLILDGLFMEILNDCSDVDEIKFQEDGSWCPMRPKKEAMKVSSQPCTKIESSSVLSKPCSVTVASEASKKKVDVIDLTIESSSDEEEDPPAKRKCIFMSETQSSPTKGVLMYQPSSVRVPSVTSVDPAAIPPSLTDYSVPFHHTPISSMSSDLPGLDFLSLIPVDPQYCPPMFLDSLTSPLTASSTSVTTTSSHESSTHVSSSSSRSETGVITSSGSNIPDIISLD

SEQ ID NO: 148627 - DNA, 1866 bp, Artificial Sequence
  derived and/or modified sequence
atggctgattttgaggagctccggaacatggtctcctcgttcagagtgagcgagttgcaagtcttattaggttttgctggcagaaataagtcaggacgaaaacatgacctactcatgagagccctgcatctgctgaaatcaggttgttcccctgctgtgcagattaaaatcagggagctgtacagacggcgatacccccgcacactggaaggcctgagcgacctgagtacaatcaagtcttccgtgtttagcctggacggtggcagcagcccagtagagcctgatctcgctgtcgctggtattcattccctaccctccacaagcgttactccccacagcccctcgagccccgtcggatccgtactactgcaggatacgaaacccacgtttgagatgcagcaacccagccctccaatccccccagtgcatcccgacgtacagcttaagaacctgccattctacgatgtgctagacgtgttaatcaaaccgacctcgcttgtgcagtcaagtattcagagattccaggaaaaatttttcatctttgcactcacgccccagcaagtacgggaaatctgtatttcccgcgactttctgcctggcggccgtagagactacacagtgcaggtacagctcagactctgcctcgcagaaacgtcctgtccccaggaggacaactacccaaactccttgtgcatcaaggtcaatggtaagctctttcccttgccagggtacgctcctcctccaaagaatggaattgaacagaaacgacccggcaggcccctgaacataacaagtcttgtgaggctgtccagcgctgttcccaaccaaatatctatttcctgggctagcgaaattggtaaaaattactctatgagcgtctatttggttaggcagttgacatccgcaatgcttctccagagactgaagatgaagggcatccggaatcccgatcatagtagagctctgattaaggaaaagctgaccgcagatcccgattccgagattgccaccacttcactgagggtctctctgatgtgccccctcggcaagatgcggctcactatcccctgcagggccgtgacctgtacccacctgcaatgctttgacgccgctctctacctgcagatgaacgaaaaaaagcccacatggatttgcccagtgtgcgacaaaaaagccgcctacgagtccctaatcctggatggattatttatggagatcctcaacgattgctctgacgtggacgagatcaagtttcaggaggacggctcttggtgtccgatgcgacccaaaaaggaggccatgaaggtttcctctcagccttgcactaagatcgaatcctcgtctgtgttgagcaagccatgttccgtaactgtggccagcgaagcatctaaaaaaaaagtggatgtgatcgaccttactatcgagtcctcatctgatgaggaggaagacccacctgctaaacgtaaatgtatatttatgtctgagacgcagagctcacctacaaagggggttctgatgtatcagccatcatccgtaagagttccctcggtcacttctgtggaccctgcagctattcctccctctctaaccgactacagcgtgccatttcaccacaccccaatatcatcaatgagctccgacctgcccggactcgacttcctatccctgattcctgtggacccccagtactgcccccctatgttcttggacagtctcacttccccccttacagcctcgagtacttcagttaccaccacctcaagccacgagtcctcaacacacgttagcagctcttctagtcggagcgaaacaggtgtgattacgtcatccggctcaaacattcctgacattatctccctcgactag

SEQ ID NO: 148628 - DNA, 1866 bp, Artificial Sequence
  derived and/or modified sequence
atggccaattttgaagagattatcaatatggtctcctcttttcgcgtctccgaactgcaagttctcttgggctttgccggaaggaataagagcggacgtaagcatgacctgttgatgcgtgctctgcacctgctgaagtccggctgcagtcctgctgttcagattaagattagggaactctacaggcgacggtatccccgaacgctcgagggcctgtccgacctgagtactatcaagagctcagtgttctccctggatggaggatcaagccccgtggagccagatctggccgttgctggcatccattccctaccaagcacctcggtaactccccactcccctagctctccggtgggatcagtcttactgcaggataccaaaccaactttcgagatgcaacagccgtccccccccattcccccagtccatccagatgtgcagctgaagaacctgccgttctatgacgtgctggatgtactcataaaacccacttcgctcgtgcagagcagcatccaacggttccaggagaagtttttcatctttgccctgactccccagcaggtccgcgagatctgtatcagtcgagattttttacctggcggtcgtcgagattataccgtgcaagtccagctgcggctatgtttagccgaaacatcctgcccccaagaagataattaccccaactctctgtgtatcaaagtgaatgggaagttattccccctgcccgggtacgctccgcctccaaagaatggcattgagcagaagcggccaggcaggccgctgaacatcaccagcttggtgaggctgtcatcagccgtaccaaaccagatctcaatcagctgggccagcgaaataggaaagaactatagtatgtccgtctatctggttcggcagctcacatcagcaatgctattgcagcgtctgaaaatgaagggtattcgtaatcctgaccactcacgggccctaatcaaggaaaaactcacagcggatccggactctgaaattgccacaacatccctcagggtgtctctgatgtgtccccttggaaagatgcgtctgactataccttgcagggcagttacatgcactcatctgcaatgcttcgatgccgctctgtatctccaaatgaacgaaaagaagcctacttggatctgccccgtgtgtgacaaaaaggctgcctatgaatcattgatactagatggtctcttcatggagatcttgaacgactgttctgacgttgatgagatcaaattccaggaagacgggtcttggtgccccatgcgcccgaaaaaagaggccatgaaagtttcctcccagccgtgcaccaaaatcgagtctagctctgtgttgtctaagccttgcagtgtaacagtcgcctctgaggccagcaaaaagaaagtcgacgtgatagatttgacaatcgagtccagcagcgatgaagaagaggaccccccagcgaagagaaagtgcatttttatgtctgaaactcagagtagtcctacaaagggggtgctcatgtatcaaccctctagcgtgcgagtgccttccgtgaccagtgttgatccagctgcaataccacccagcctgacagattattctgtgcctttccaccacacccctatttcatccatgtcaagtgacctgcccgggttggatttcctgagcctgattcctgtcgatccccagtactgccccccaatgttccttgattccttgacaagtcccctcactgcctcttcaacttccgtgaccacaacaagtagccacgaatcatccacccatgtatcgtcctcatcctctcggtcggaaacgggagtaatcacatcatctggttcaaacataccagacattatttccttggactag

SEQ ID NO: 148629 - DNA, 1866 bp, Artificial Sequence
  derived and/or modified sequence
atggcagattttgaggagctgaggaacatggtctcttccttccgggtctcagaacttcaagtgcttctgggttttgccggacgtaacaagagcgggaggaagcacgatctcttgatgagggcgctgcatcttctgaagtccggatgttcgccggccgtccagatcaaaattcgggaactgtatcgccgacgatatccaagaaccctggaagggctcagtgatctgagcacaatcaagtctagcgttttctcgctggacggcgggtcatctcccgtggaacccgaccttgctgtcgccggtatacactctctcccttccacaagcgtgacaccacactcccccagctcacctgtgggaagcgtgctccttcaagacaccaaacccaccttcgagatgcaacaaccttcaccccctattccacctgttcaccccgacgttcagctgaagaatttgccattttacgacgtcctggacgtgcttattaagcccactagcctggtgcagtcgtctatacagaggttccaggagaaattctttatctttgcattgacgccccagcaggttcgagagatatgtatcagtcgggactttctgcccggcgggcgccgcgactacactgttcaggtccagttgagactttgcttagcagagacctcttgcccacaagaggacaactatcccaacagcctgtgtataaaagttaacggtaagttgttccctctgccaggctacgctcccccccctaagaatggtatcgagcagaagcgtcccggccggccattgaatatcactagcctcgtgaggctgagctccgcagtgccgaatcagattagcatttcttgggcttccgaaataggcaagaactacagcatgagcgtgtatctggttagacaattgacatcagccatgctgttgcagagactgaagatgaaaggaatacgaaatcccgaccacagccgagctctcatcaaagagaagttgaccgcggaccccgattcagagattgccacaacatcactacgtgtcagcttaatgtgtcccctaggcaaaatgaggttgactataccctgcagggccgtcacctgcacccatctccaatgctttgatgctgcgctatacctccagatgaacgaaaagaaaccgacatggatttgcccggtgtgcgataagaaggcagcctatgagagtctgattctggacggtttgtttatggaaattcttaatgactgttctgatgtggacgagatcaagttccaggaagatggatcttggtgccccatgcgacctaagaaggaggcaatgaaagtgagctcacagccttgcacgaaaattgagagctcatcagtgctttccaagccttgctcagttaccgtagccagtgaggccagcaaaaaaaaggtcgacgtgatcgacctcaccatcgaaagttcctctgacgaggaggaggacccaccagcgaaaaggaagtgcatattcatgtccgaaactcagtcttctccaacaaagggggtactgatgtaccagccctccagcgtgagagtgcccagcgttactagcgtggatcccgccgctatcccaccttctttaacggactattctgtgccatttcatcatacccccatatcttcaatgtcctctgacctgcctggacttgacttccttagtttgattcccgttgatccgcagtattgtccaccaatgttcttagacagcctgacatcgcctctaaccgccagttctacctccgtgaccaccacatcctcacacgagagttctacacacgtttcttcttcttcctcgaggtcagaaaccggtgtcattacatccagtggctcgaacatccccgacattataagcctggattag

SEQ ID NO: 148630 - DNA, 1866 bp, Artificial Sequence
  derived and/or modified sequence
atggctgactttgaggagctgaggaacatggtgtcctccttccgggtgtctgagctgcaggtgctgctgggctttgctggcaggaacaagagcggcaggaagcatgacctgctgatgagggccctgcacctgctgaagagcggctgcagccctgctgtgcagatcaagatccgggagctgtacagaagacgctaccccaggaccctggagggcctgagtgacctgagcaccatcaagagctctgtgttcagcctggatggcggcagcagccctgtggagccagacctggccgtggccggcatccacagcctgcccagcacctctgtgaccccccacagccccagcagccctgtgggctctgtgctgctgcaggacaccaagcccacctttgagatgcagcagcccagcccccccatcccccctgtgcacccagatgtgcagctgaagaacctgcccttctatgatgtgctggatgtgctgatcaagcccaccagcctggtgcagagcagcatccagcgcttccaggagaagttcttcatctttgccctgaccccccagcaggtgcgggagatctgcatcagccgggacttcctgcccggcggccggcgggactacacagtgcaggtgcagctgcggctgtgcctggccgagaccagctgcccccaggaggacaactaccccaacagcctgtgcatcaaggtgaatggcaagctgttccccctgcccggctacgcccccccacccaagaatggcatcgagcagaagaggcctggccggcccctgaacatcaccagcctggtgcggctgagcagcgctgtgcccaaccagatcagcatctcctgggccagcgagatcggcaagaactacagcatgtctgtgtacctggtgcggcagctgaccagcgccatgctgctgcagaggctgaagatgaagggcatccggaacccagaccacagccgggccctgatcaaggagaagctgacagctgaccctgattctgaaattgccaccaccagcctgcgggtgtccctgatgtgccccctgggcaagatgaggctgaccatcccctgcagagctgtgacctgcacccacctgcagtgctttgatgctgccctgtacctgcagatgaatgagaagaagcccacctggatctgccctgtgtgtgacaagaaggccgcctatgagagcctcatcctggatggcctcttcatggagatcctgaatgactgcagtgatgtggatgagatcaagttccaggaggatggctcctggtgccccatgaggcccaagaaggaggccatgaaggtgagcagccagccctgcaccaagattgagagcagctctgtgctgagcaagccctgcagcgtgacagtggccagcgaggccagcaagaagaaggtggatgtgattgacctgaccatcgagagcagcagtgatgaggaggaggaccccccagccaagaggaagtgcatcttcatgtctgagacccagagcagccccaccaagggcgtgctgatgtaccagcccagctctgtgcgggtgcccagcgtgacctctgtggaccctgctgccatcccccccagcctgacagactacagcgtgcccttccaccacacccccatcagctccatgagcagtgacctgcccggcctggacttcctgagcctcatccctgtggacccccagtactgcccccccatgttcctggacagcctgaccagccccctgacagccagcagcacctctgtgaccaccaccagcagccatgagagcagcacccacgtgagcagcagcagcagccgctctgagaccggggtcatcaccagcagcggcagcaacatcccagacatcatcagcctggactag

SEQ ID NO: 148631 - DNA, 1866 bp, Artificial Sequence
  derived and/or modified sequence
atggccaactttgaggagatcatcaacatggtgtcctccttccgggtgtctgagctgcaggtgctgctgggctttgctggcaggaacaagagcggcaggaagcatgacctgctgatgagggccctgcacctgctgaagagcggctgcagccctgctgtgcagatcaagatccgggagctgtacagaagacgctaccccaggaccctggagggcctgagtgacctgagcaccatcaagagctctgtgttcagcctggatggcggcagcagccctgtggagccagacctggccgtggccggcatccacagcctgcccagcacctctgtgaccccccacagccccagcagccctgtgggctctgtgctgctgcaggacaccaagcccacctttgagatgcagcagcccagcccccccatcccccctgtgcacccagatgtgcagctgaagaacctgcccttctatgatgtgctggatgtgctgatcaagcccaccagcctggtgcagagcagcatccagcgcttccaggagaagttcttcatctttgccctgaccccccagcaggtgcgggagatctgcatcagccgggacttcctgcccggcggccggcgggactacacagtgcaggtgcagctgcggctgtgcctggccgagaccagctgcccccaggaggacaactaccccaacagcctgtgcatcaaggtgaatggcaagctgttccccctgcccggctacgcccccccacccaagaatggcatcgagcagaagaggcctggccggcccctgaacatcaccagcctggtgcggctgagcagcgctgtgcccaaccagatcagcatctcctgggccagcgagatcggcaagaactacagcatgtctgtgtacctggtgcggcagctgaccagcgccatgctgctgcagaggctgaagatgaagggcatccggaacccagaccacagccgggccctgatcaaggagaagctgacagctgaccctgattctgaaattgccaccaccagcctgcgggtgtccctgatgtgccccctgggcaagatgaggctgaccatcccctgcagagctgtgacctgcacccacctgcagtgctttgatgctgccctgtacctgcagatgaatgagaagaagcccacctggatctgccctgtgtgtgacaagaaggccgcctatgagagcctcatcctggatggcctcttcatggagatcctgaatgactgcagtgatgtggatgagatcaagttccaggaggatggctcctggtgccccatgaggcccaagaaggaggccatgaaggtgagcagccagccctgcaccaagattgagagcagctctgtgctgagcaagccctgcagcgtgacagtggccagcgaggccagcaagaagaaggtggatgtgattgacctgaccatcgagagcagcagtgatgaggaggaggaccccccagccaagaggaagtgcatcttcatgtctgagacccagagcagccccaccaagggcgtgctgatgtaccagcccagctctgtgcgggtgcccagcgtgacctctgtggaccctgctgccatcccccccagcctgacagactacagcgtgcccttccaccacacccccatcagctccatgagcagtgacctgcccggcctggacttcctgagcctcatccctgtggacccccagtactgcccccccatgttcctggacagcctgaccagccccctgacagccagcagcacctctgtgaccaccaccagcagccatgagagcagcacccacgtgagcagcagcagcagccgctctgagaccggggtcatcaccagcagcggcagcaacatcccagacatcatcagcctggactag

SEQ ID NO: 148632 - DNA, 5909 bp, Artificial Sequence
  derived and/or modified sequence
atggcggatttcgaagagttgaggaatatggtttctagttttagggtttctgaactacaagtattactaggctttgctggacggaataaaagtggacgcaagcatgacctcctgatgagggcgctgcatttattgaagagcggctgcagccctgcggttcagattaaaatccgagaattgtatagacgccgatatccacgaactcttgaaggactttctgatttatccacaatcaaatcatcggttttcagtttggatggtggctcatcacctgtagaacctgacttggccgtggctggaatccactcgttgccttccacttcagttacacctcactcaccatcctctcctgttggttctgtgctgcttcaagatactaagcccacatttgagatgcagcagccatctcccccaattcctcctgtccatcctgatgtgcagttaaaaaatctgcccttttatgatgtccttgatgttctcatcaagcccacgagtttagttcaaagcagtattcagcgatttcaagagaagttttttatttttgctttgacacctcaacaagttagagagatatgcatatccagggattttttgccaggtggtaggagagattatacagtccaagttcagttgagactttgcctggcagagacaagttgccctcaagaagataactatccaaatagtctatgtataaaagtaaatgggaagctatttcctttgcctggctatgcaccaccgcctaaaaatgggattgaacagaagcgccctggacgccccttgaatattacatctttagttaggttatcttcagctgtgccaaaccaaatttccatttcttgggcatcagaaattgggaagaattactctatgtctgtatatcttgtacggcagcttacatcagccatgttattacagagattaaaaatgaaaggtattagaaaccctgatcattccagagcactaattaaagaaaaacttactgcagatcctgatagtgaaattgctacaactagccttcgggtatccttgatgtgccctttaggaaaaatgaggctgacaatcccatgccgtgcagtgacttgtacacatctgcagtgttttgatgctgccctctatctacaaatgaatgagaaaaagcccacctggatttgtcctgtgtgtgacaaaaaagctgcctatgaaagtctaatattagatgggctttttatggaaattctcaatgactgttctgatgtagatgagatcaaattccaagaagatggttcttggtgtccaatgagaccgaagaaagaagctatgaaagtatccagccaaccgtgtacaaaaatagaaagttcaagcgtcctcagtaagccttgttcagtgactgtagccagtgaggcaagcaagaagaaagtagatgttattgatcttacaatagaaagctcttctgacgaagaggaagaccctcctgccaaaaggaaatgcatctttatgtcagaaacacaaagcagcccaaccaaaggggttctcatgtatcagccatcttctgtaagggtgcccagtgtgacttcggttgatcctgctgctattccgccttcattaacagactactcagtaccattccaccatacgccaatatcaagcatgtcatcagatttgccaggtttggattttctttcccttattccagttgatccccagtactgtcctcctatgtttttggatagtctcacctcacccttaacagcaagcagtacgtctgtcaccaccaccagctcccatgaaagcagtactcatgttagttcatccagcagcaggagtgagacaggggtcataaccagcagtggaagtaacattcctgacatcatctcattggactaaaggaggactcacttgattctgggaatcattcatcagaactgctttttcttggatctctagtctgtggaaacgttcttttttttttttttttaataatttggtatttattgaaagtcagatggattcttttgctttctgaggggtgaacacagaagactgcaacaagaaccaaatgacatgcaaggatttttcttaattatgctgtactctcagcatcagatacattcaaccataactgtatcttcctgagagatggatttcactttcatacgttaatggatggagtctacaaatcagtgaaaaaagtttttgttaaaataaagagcaataaaattatgtaaatattcaagtaaccttttttctaattaaaaaaaaaattgtaatcactgattctagaatgacagcaacttctgtttaaccttacgtgaaggaaaaaaaatatatggaaagaacttaatgtttgctgaatgagtcctttccatggagatttgctctgtttcattgaagtaatgaagtttcagtacgtggccaaagcttggattccacttttcgtcctgcatttccacttttcttcgtgattgcatcaaagaaaaatggcattcgtgttacttggtttttttcctgcttatcatttacactttgacgttgtttgctaatgagtgctgtgtgaagttctgggatttggctactcttcattggtgattatgtttaaaagcactatgcagattctgccctgacataaagtgtgttattatgtttttagtaattgtacatttttcattctagagttttctataaatttgaggcttgccttctcaaaaaagaaactatgcagccattgaatgaaatgtctttggggtacggtgtgactggaatgtttgttagaaatttgttcacactatcaaatattgatatcttggagccagcagaagagcagattttgggaggtggtaataacaaaatttaatttcttcccaacaacttaattttctcatttattttacagaatagtagtgaaatatttgatgaaactttgtattttggtagcactacatagaaaatgtgttttagatttatgatgatcatatttctcaccaatgtaatttcagtctcagcagtgattttcaaacttagggaaagggacagcattagattttttttttttttcatttttttaaaatgatatcttacctgaaactacaaacgacaaaagagaattagaaatgtttgaattaaagtgaagaagggttgggggagatgggcctgaacccacttcctgtctcaatccatgctaccccaaacactccagggaacctctgaggttttattgggtgcactttgaaaatttctcttctatagtgtgtttgtttgattttaaatcacagagaaaactgggttttactcttagagaaacattttcatccagttttttagtttgcttcatttgacttcctaaatcatttttgagttcacaaggatttggtacttttctgtttagctttctctctctaagctttatctaccttaaaaacaaagtcctttttttaatggccagtccaaccaattgatttctcaaactgaagtgcccaggtgtggactcatcaatttccgttagaatagggacatcctacttaagagttggtgcagctccaaggagctgacttgtccttgcttggggttttttttttttttctttcaccttctcaagtttccatggcctttgtgtgttctttttatgttgatttaaattcatatggttttccacaaatcccttctttggctacattgtctccttattcaatggattatccctttgtgggggctgcttattttaaagatgttgggggggaaacaaacccaaatctacgagcagtagttgcacatagttgccagttttaccttcttagtcattagatttccaaaccatgttgcagttttttggtccagatatagtatttctttctaataaagttttatgttgctgctctaaatacagatgcaatatttattgactctgtaatcagatagaaaaaacttaacttggtttgtgtggtatgacttataaagaaatgatgtatatttgttattttgttaccctttagattgtcagagactcccccaatttaatcaacaaagttttataaagtaaatgaaaatattaatagaaattagtttatttacttggttcttataactgatatctctgtgcttttataattgtgatttgtttttttgtttttttttctattttctgtgaacagttttaatgttcggttttggtgttttacactgaaattacatataaatttttaatttatttcatacaggcaacttgcattttaaaaaatacactttgaagtttatcatcttgaaattggggcttacgttgtttatctgtcttgagcattagtactttatgactttggccttatggcaacatcatgattattaatccgtcagcctttaatgtggtcactgtttcttatccagaccctgactttctagtagtttattttgctagcccagatttctgcttaaccaaatataagggagtttcagaggggtgatcttagctgtcacctagattctgtcagccaaccagtgattgtctggaatatcttaggaaatgaactgtaattgtcagcctcctaaaatcaatttttttttttttttttttgaggctgagtcttgctcttgttgcccgggatggagtgcaatggtgcgatcttggctcaccgcaacctccacctacagggttcaagcgattctcctgcctcagcctcccgagtagctgggattacaggcatgtatcaccacgcccagctaattttgtatttttagtagatacggggtttctccattttggtcaggctggtctcgaactcccgacctcaggtgatccgcctgccttggcctcccaaagtgctgggatttacaggcgtgagccaccgcgcctggccaaaataaaatgtttttatctttcttcacttagaactatgaaggccttttcttgttctggtaaccccccacagtgtaattggtgctgaaaatagtttcgtgcctgaggtctgttgtcactcactcactttctgacaattaggtgagccacttgaggattttctggcctgaagttataaaaacttggcatctgtcctaaggtaattgtaaaggcaaaatgaaagcattgaggtgaatttaggttatatggcatttatctggtaatgtgtttcagaaaagctagaatgaaaatgtgatgtaagggatagcaagtgtaggttgattcataattcttggtataaaaccaagttttccttagtcttgaggaatttgaagaaaggtaaaatgttggattttaagcaaagtaggattgaccagagactgttctgactttgacattcagacctttcagatgttcttccttcagaccagtccaagacactcagcatttccagccaagttgtcttttttttctgccaataaagtattcattagttgacgtttgtttgtattttaagtaaagtcaattttttttaaagcattaatttaattcacgggtatgcctttcatttctctggccttcagttggtttaaaaaaaaaaaaaaaaaaaaaagcacttagccggaccattctttctttagtaaacatttttattttcttaatttttcctgaaagattttcttcattttcatggaatgtcataatgacactaccattattttctagctctttgcataatagaaaaatgtagagcagtgcaccatttaaacacgtctgacattggatttagtggtcctaggttcatgtgatttgggagccttaagttgttatttagattgattcagcctgattcaccatcttttttactacagttctacatgaatgtggtgaaacaggtagaagaaaattaagcatttctctgcttttggagtctaatgttcctgcctagtgactggtttgtaacacccccctcacccctactttgttaggaacctgcaattcctaaaagaaataaataaagctgtacccaatgtccattctttaa

SEQ ID NO: 148633 - DNA, 2202 bp, Artificial Sequence
  derived and/or modified sequence
atggctaattttgaagaaattataaatatggtttctagttttagggtttctgaactacaagtattactaggctttgctggacggaataaaagtggacgcaagcatgacctcctgatgagggcgctgcatttattgaagagcggctgcagccctgcggttcagattaaaatccgagaattgtatagacgccgatatccacgaactcttgaaggactttctgatttatccacaatcaaatcatcggttttcagtttggatggtggctcatcacctgtagaacctgacttggccgtggctggaatccactcgttgccttccacttcagttacacctcactcaccatcctctcctgttggttctgtgctgcttcaagatactaagcccacatttgagatgcagcagccatctcccccaattcctcctgtccatcctgatgtgcagttaaaaaatctgcccttttatgatgtccttgatgttctcatcaagcccacgagtttagttcaaagcagtattcagcgatttcaagagaagttttttatttttgctttgacacctcaacaagttagagagatatgcatatccagggattttttgccaggtggtaggagagattatacagtccaagttcagttgagactttgcctggcagagacaagttgccctcaagaagataactatccaaatagtctatgtataaaagtaaatgggaagctatttcctttgcctggctatgcaccaccgcctaaaaatgggattgaacagaagcgccctggacgccccttgaatattacatctttagttaggttatcttcagctgtgccaaaccaaatttccatttcttgggcatcagaaattgggaagaattactctatgtctgtatatcttgtacggcagcttacatcagccatgttattacagagattaaaaatgaaaggtattagaaaccctgatcattccagagcactaattaaagaaaaacttactgcagatcctgatagtgaaattgctacaactagccttcgggtatccttgatgtgccctttaggaaaaatgaggctgacaatcccatgccgtgcagtgacttgtacacatctgcagtgttttgatgctgccctctatctacaaatgaatgagaaaaagcccacctggatttgtcctgtgtgtgacaaaaaagctgcctatgaaagtctaatattagatgggctttttatggaaattctcaatgactgttctgatgtagatgagatcaaattccaagaagatggttcttggtgtccaatgagaccgaagaaagaagctatgaaagtatccagccaaccgtgtacaaaaatagaaagttcaagcgtcctcagtaagccttgttcagtgactgtagccagtgaggcaagcaagaagaaagtagatgttattgatcttacaatagaaagctcttctgacgaagaggaagaccctcctgccaaaaggaaatgcatctttatgtcagaaacacaaagcagcccaaccaaaggggttctcatgtatcagccatcttctgtaagggtgcccagtgtgacttcggttgatcctgctgctattccgccttcattaacagactactcagtaccattccaccatacgccaatatcaagcatgtcatcagatttgccaggtttggattttctttcccttattccagttgatccccagtactgtcctcctatgtttttggatagtctcacctcacccttaacagcaagcagtacgtctgtcaccaccaccagctcccatgaaagcagtactcatgttagttcatccagcagcaggagtgagacaggggtcataaccagcagtggaagtaacattcctgacatcatctcattggactaaaggaggactcacttgattctgggaatcattcatcagaactgctttttcttggatctctagtctgtggaaacgttcttttttttttttttttaataatttggtatttattgaaagtcagatggattcttttgctttctgaggggtgaacacagaagactgcaacaagaaccaaatgacatgcaaggatttttcttaattatgctgtactctcagcatcagatacattcaaccataactgtatcttcctgagagatggatttcactttcatacgttaatggatggagtctacaaatcagtgaaaaaagtttttgttaaaataaagagcaataaaatta

SEQ ID NO: 148634 - DNA, 2190 bp, Artificial Sequence
  derived and/or modified sequence
cgtaacttgaataatatggtttctagttttagggtttctgaactacaagtattactaggctttgctggacggaataaaagtggacgcaagcatgacctcctgatgagggcgctgcatttattgaagagcggctgcagccctgcggttcagattaaaatccgagaattgtatagacgccgatatccacgaactcttgaaggactttctgatttatccacaatcaaatcatcggttttcagtttggatggtggctcatcacctgtagaacctgacttggccgtggctggaatccactcgttgccttccacttcagttacacctcactcaccatcctctcctgttggttctgtgctgcttcaagatactaagcccacatttgagatgcagcagccatctcccccaattcctcctgtccatcctgatgtgcagttaaaaaatctgcccttttatgatgtccttgatgttctcatcaagcccacgagtttagttcaaagcagtattcagcgatttcaagagaagttttttatttttgctttgacacctcaacaagttagagagatatgcatatccagggattttttgccaggtggtaggagagattatacagtccaagttcagttgagactttgcctggcagagacaagttgccctcaagaagataactatccaaatagtctatgtataaaagtaaatgggaagctatttcctttgcctggctatgcaccaccgcctaaaaatgggattgaacagaagcgccctggacgccccttgaatattacatctttagttaggttatcttcagctgtgccaaaccaaatttccatttcttgggcatcagaaattgggaagaattactctatgtctgtatatcttgtacggcagcttacatcagccatgttattacagagattaaaaatgaaaggtattagaaaccctgatcattccagagcactaattaaagaaaaacttactgcagatcctgatagtgaaattgctacaactagccttcgggtatccttgatgtgccctttaggaaaaatgaggctgacaatcccatgccgtgcagtgacttgtacacatctgcagtgttttgatgctgccctctatctacaaatgaatgagaaaaagcccacctggatttgtcctgtgtgtgacaaaaaagctgcctatgaaagtctaatattagatgggctttttatggaaattctcaatgactgttctgatgtagatgagatcaaattccaagaagatggttcttggtgtccaatgagaccgaagaaagaagctatgaaagtatccagccaaccgtgtacaaaaatagaaagttcaagcgtcctcagtaagccttgttcagtgactgtagccagtgaggcaagcaagaagaaagtagatgttattgatcttacaatagaaagctcttctgacgaagaggaagaccctcctgccaaaaggaaatgcatctttatgtcagaaacacaaagcagcccaaccaaaggggttctcatgtatcagccatcttctgtaagggtgcccagtgtgacttcggttgatcctgctgctattccgccttcattaacagactactcagtaccattccaccatacgccaatatcaagcatgtcatcagatttgccaggtttggattttctttcccttattccagttgatccccagtactgtcctcctatgtttttggatagtctcacctcacccttaacagcaagcagtacgtctgtcaccaccaccagctcccatgaaagcagtactcatgttagttcatccagcagcaggagtgagacaggggtcataaccagcagtggaagtaacattcctgacatcatctcattggactaaaggaggactcacttgattctgggaatcattcatcagaactgctttttcttggatctctagtctgtggaaacgttcttttttttttttttttaataatttggtatttattgaaagtcagatggattcttttgctttctgaggggtgaacacagaagactgcaacaagaaccaaatgacatgcaaggatttttcttaattatgctgtactctcagcatcagatacattcaaccataactgtatcttcctgagagatggatttcactttcatacgttaatggatggagtctacaaatcagtgaaaaaagtttttgttaaaataaagagcaataaaatta

SEQ ID NO: 148635 - DNA, 2360 bp, Artificial Sequence
  derived and/or modified sequence
gacgggcccggctgtagcggcggcggccgcggcgtcttaagcggcgcccagtgcaggatggtgctggaggcggcggcggccgtggtggcggcagcgtcgttggcggcagcgggagtgggtgcggcggcagcggcggcggcgcccgcgggtggtataaaatggcggatttcgaagagttgaggaatatggtttctagttttagggtttctgaactacaagtattactaggctttgctggacggaataaaagtggacgcaagcatgacctcctgatgagggcgctgcatttattgaagagcggctgcagccctgcggttcagattaaaatccgagaattgtatagacgccgatatccacgaactcttgaaggactttctgatttatccacaatcaaatcatcggttttcagtttggatggtggctcatcacctgtagaacctgacttggccgtggctggaatccactcgttgccttccacttcagttacacctcactcaccatcctctcctgttggttctgtgctgcttcaagatactaagcccacatttgagatgcagcagccatctcccccaattcctcctgtccatcctgatgtgcagttaaaaaatctgcccttttatgatgtccttgatgttctcatcaagcccacgagtttagttcaaagcagtattcagcgatttcaagagaagttttttatttttgctttgacacctcaacaagttagagagatatgcatatccagggattttttgccaggtggtaggagagattatacagtccaagttcagttgagactttgcctggcagagacaagttgccctcaagaagataactatccaaatagtctatgtataaaagtaaatgggaagctatttcctttgcctggctatgcaccaccgcctaaaaatgggattgaacagaagcgccctggacgccccttgaatattacatctttagttaggttatcttcagctgtgccaaaccaaatttccatttcttgggcatcagaaattgggaagaattactctatgtctgtatatcttgtacggcagcttacatcagccatgttattacagagattaaaaatgaaaggtattagaaaccctgatcattccagagcactaattaaagaaaaacttactgcagatcctgatagtgaaattgctacaactagccttcgggtatccttgatgtgccctttaggaaaaatgaggctgacaatcccatgccgtgcagtgacttgtacacatctgcagtgttttgatgctgccctctatctacaaatgaatgagaaaaagcccacctggatttgtcctgtgtgtgacaaaaaagctgcctatgaaagtctaatattagatgggctttttatggaaattctcaatgactgttctgatgtagatgagatcaaattccaagaagatggttcttggtgtccaatgagaccgaagaaagaagctatgaaagtatccagccaaccgtgtacaaaaatagaaagttcaagcgtcctcagtaagccttgttcagtgactgtagccagtgaggcaagcaagaagaaagtagatgttattgatcttacaatagaaagctcttctgacgaagaggaagaccctcctgccaaaaggaaatgcatctttatgtcagaaacacaaagcagcccaaccaaaggggttctcatgtatcagccatcttctgtaagggtgcccagtgtgacttcggttgatcctgctgctattccgccttcattaacagactactcagtaccattccaccatacgccaatatcaagcatgtcatcagatttgccaggtttggattttctttcccttattccagttgatccccagtactgtcctcctatgtttttggatagtctcacctcacccttaacagcaagcagtacgtctgtcaccaccaccagctcccatgaaagcagtactcatgttagttcatccagcagcaggagtgagacaggggtcataaccagcagtggaagtaacattcctgacatcatctcattggactaaaggaggactcacttgattctgggaatcattcatcagaactgctttttcttggatctctagtctgtggaaacgttcttttttttttttttttaataatttggtatttattgaaagtcagatggattcttttgctttctgaggggtgaacacagaagactgcaacaagaaccaaatgacatgcaaggatttttcttaattatgctgtactctcagcatcagatacattcaaccataactgtatcttcctgagagatggatttcactttcatacgttaatggatggagtctacaaatcagtgaaaaaagtttttgttaaaataaagagcaataaaatta

SEQ ID NO: 148636 - DNA, 1866 bp, Artificial Sequence
  derived and/or modified sequence
atggccgacttcgaggagctgcggaacatggtgagcagcttccgggtgagcgaactgcaagttttgttgggttttgcaggccggaataaaagcgggcgaaaacacgatctgttgatgcgcgccctgcacctccttaaatcaggctgctctcccgccgtccagatcaagataagagagctgtatcgacgccgctatccacgcactttggaaggcctgtccgatctgtctactatcaaatcaagcgtatttagcctagacggcggctcaagtcccgtagaaccagacttggctgtggccgggatccatagcctgccaagtacctctgtgacaccacactccccttcttccccagtggggtcggtcctgctccaagacaccaaaccaacttttgagatgcagcaaccgtctcctcctatcccaccagtacatcctgatgttcagctgaaaaacctgccattttatgacgtccttgatgtcctaataaaacccacctccctggtgcagagtagtatacagagattccaggagaagttcttcatcttcgcactaactccacagcaggtgagagagatatgtatctcaagggactttttgccaggaggaagaagggattataccgtccaggtacagctgcggctgtgcttggctgaaacctcctgcccacaagaggataactacccgaattccctttgtattaaggtcaacggcaaactttttcccctgcctggctacgcccctccccctaagaacggaatcgagcagaaacgcccaggaaggccactgaatatcacctctctggtcaggctgagctctgccgtccctaaccagatctcaattagctgggcatcagagattgggaaaaattactccatgagtgtttacctggtccgtcagctgacaagtgccatgcttctgcagcggctcaagatgaaagggatccgcaaccccgaccacagccgggctttgattaaagaaaaactgacagccgatcccgatagcgagattgccactacctcgctgcgggtgagtcttatgtgtccactgggaaagatgagacttaccattccctgcagggccgtgacttgcactcatctgcaatgctttgatgccgcactttacttgcagatgaatgagaagaaacccacttggatctgcccggtgtgtgataaaaaagctgcgtacgagtccctgattctagatgggctgtttatggaaatcctgaatgattgcagcgatgtggatgagatcaaatttcaggaggatggctcttggtgtccaatgcgaccaaaaaaagaggctatgaaggtttctagccaaccatgtacgaaaatcgaatcatcatctgttttaagtaagccttgttccgtaacggttgcttcggaagccagcaaaaaaaaagtagatgtcatagatctgacaatcgaatctagttccgacgaggaggaagaccctcccgctaagaggaagtgtatattcatgtccgagacacaaagcagccctaccaagggcgtactgatgtatcagccctcctcggttcgggtcccctcagtaacttccgtcgatcccgcagcaatcccaccatccctgacggactactccgtcccgttccatcatactcctatctcctcgatgagctctgaccttcccggcctggattttctgtctctgattcccgtcgatccccagtactgcccacctatgtttttggatagtttgacaagcccactgaccgcatccagtacctccgtgaccaccacttccagccacgagtcgtctacacatgtttcctcctcttcgagtaggtccgagacgggggtcataacttcttctggctcaaatattcccgatatcatttcccttgactag

SEQ ID NO: 148637 - DNA, 1866 bp, Artificial Sequence
  derived and/or modified sequence
atggccaacttcgaggagatcatcaacatggtgagcagcttccgggtgtcagagctccaggtgctgttaggctttgcggggaggaacaaatccggccgaaagcatgatttgctgatgcgggcgctacatctcttgaaaagtggctgctctcctgccgtccagattaagatcagggagctataccgccggcgctaccctcggacactcgagggactctccgaccttagcaccattaagagctctgttttcagcctagatggcggctccagtcctgtcgagcctgacctggctgtggccggcatccattctctccccagtaccagcgtgaccccccattcgccctccagccccgtgggatccgtgctgcttcaggacactaaacctactttcgagatgcaacaacccagcccccccataccaccagttcaccccgatgtccagctgaaaaaccttccattttatgatgtactcgatgtacttataaagcctacaagcctggttcagtccagcatccaacggtttcaggaaaagttcttcattttcgcactgacaccacagcaagtgagggagatctgcattagcagagatttcctgccggggggtagacgagattataccgttcaggtccagctgagattgtgtctcgctgagaccagctgtcctcaggaagacaactatccaaactcactctgcattaaagtaaacggaaagctcttcccattaccaggctacgccccacctcctaaaaacggaatagaacagaagaggcccggacggcccctgaatattacatctctggtccgcctgagctcggcagtcccgaatcaaatttctatctcctgggctagcgagatcggcaaaaactactccatgtccgtgtatctggtgcgccagttaacgagtgccatgctcttgcagcgcctaaagatgaagggaatccgcaatcccgaccattcccgggcactgatcaaggaaaagctcactgccgatcctgatagcgagattgccaccacaagcctgagggtctcgttgatgtgtccgctgggtaaaatgagactgacaatcccatgtagagcagtcacatgtacacacctccaatgttttgatgcagcactctatctgcagatgaatgaaaagaaaccgacctggatttgtccagtctgcgacaagaaggccgcgtacgagagtctcatcctggacggactgttcatggagattctaaacgattgtagcgatgtcgacgagattaagtttcaggaggacggatcgtggtgccctatgagaccgaaaaaagaggcaatgaaggtttcaagccagccatgcacaaagatcgaatcttccagcgtgttaagtaaaccttgcagcgtcactgtggcaagcgaagctagcaaaaaaaaagtcgatgtcatcgacctgaccatcgaatcctctagcgacgaagaagaggacccaccggccaagaggaagtgtatttttatgtctgagactcaatcatctccaacaaagggcgtgctcatgtatcagccctcaagcgtgagggtcccaagcgttacatccgtggaccccgcagcgatccctccaagcctcactgactactcagtgccattccaccacactcctatatcttccatgtccagcgatctcccaggactggattttctcagcttgattccagttgatccgcaatattgccctccaatgtttttggactccctgaccagtcctctgactgcaagctctacaagtgtgacaaccacctcttcacacgagtcatctacacacgtgtcgtcttccagcagcagaagcgagacaggtgtgatcacttcctcagggagcaacatccccgatatcataagtttggattag

SEQ ID NO: 148638 - DNA, 1866 bp, Artificial Sequence
  derived and/or modified sequence
atggccgacttcgaggagctgcggaacatggtgagcagcttccgggtctccgagttgcaggtgctactggggttcgctggccgcaacaaatccggcagaaaacatgacctgctcatgcgagcattgcacttgctgaaatcaggatgctctcctgctgtccagataaagatacgtgagttgtaccgccggagataccccaggaccctggagggattaagcgacctgtcaactatcaagtccagtgttttcagccttgatggcgggagctcccctgttgaaccagatctcgcagtggccggcattcattcattgccctccacgtccgtcaccccacattccccgtcctcacctgtcggaagcgtgctgctacaggacaccaagcctacattcgaaatgcagcagccctcaccaccaatccccccggtgcacccagatgtgcagctcaagaacctgcctttttatgacgttctcgatgtgctgattaaacccacctcgctggttcagtcctccattcagagatttcaggagaaattttttatattcgccctgaccccacagcaggtgcgagagatctgcatcagcagggacttcctcccaggaggaaggcgcgactacaccgtgcaggtgcagttgagattatgccttgcagagacttcttgccctcaggaagacaactatcccaactctttatgtattaaggttaacgggaaactctttccattgcccggctacgcgccacctccaaaaaacggtatcgaacagaaaagaccaggaaggcccctgaacattacctctctcgtccgcctctcttccgcagtgcccaaccagatatcgatttcctgggcttccgaaattggaaaaaattactccatgagcgtctacttggtgcgtcagctaacatccgctatgctcctccagcggctcaaaatgaagggcatccgcaacccagatcatagtagggcccttattaaggagaagcttaccgcagaccctgactctgagatagccaccaccagcctccgagtaagcctgatgtgcccacttggaaaaatgagacttaccataccctgtagagctgtcacctgtacgcatctccagtgtttcgacgccgcgctgtacctgcagatgaatgagaagaaacccacctggatttgtcctgtgtgcgacaagaaagccgcctacgaatcactcatcctggacggactgtttatggagatactcaatgactgcagcgatgtcgacgaaatcaaatttcaggaagacggctcttggtgccccatgagaccaaagaaggaagcgatgaaagtgtcatctcagccttgcacaaaaattgaatcttcaagtgtgctgagtaagccttgttcggtgacagtcgccagcgaagcgagtaaaaaaaaagtcgacgtgattgatctcaccattgaatcctcaagcgatgaggaggaggaccccccagccaaacgcaagtgcatcttcatgagcgaaacgcagtcaagtcccaccaagggagtgctgatgtatcaaccctcctcagtgagagtgccctccgtgaccagcgtcgacccagcagctatcccccccagtctgaccgattacagtgtgcctttccatcacacccctatctcatctatgagtagcgatttgcccggactggactttctgtcactcatccctgtggatcctcagtactgtcccccaatgtttctcgactcactgacatcaccacttactgcctcttccacttccgtcactactactagtagccacgaaagcagcacacacgtgagctcgtctagctcacgatctgaaaccggcgtcattacatcctcagggtccaatataccggacattatctcgctggactag

SEQ ID NO: 148639 - DNA, 1866 bp, Artificial Sequence
  derived and/or modified sequence
atggccgattttgaagagctgcgcaacatggtttccagtttccgggtgagcgagctgcaggtgctgttaggttttgcagggcgaaataagtcaggaaggaagcatgatctcttaatgcgcgcactgcacctgctcaaatctggatgctccccagcagtgcagatcaagatccgtgaactgtatagaagacgttacccccgaacgcttgaggggctgagtgaccttagtaccatcaaatcctctgttttcagtctggatgggggatcttctcctgtggaacccgacctggcggtcgccggaattcattctcttccaagtacatcagttaccccccactccccctcttctccagtcggctccgtcctgctgcaggacaccaaaccaaccttcgagatgcagcagccttctccacccattcctcctgtgcatcccgatgttcagctcaaaaacctaccgttttacgatgttctcgatgtgttgataaaacctacttcgttagtgcagagctccatacagaggttccaggagaaatttttcatcttcgctctgaccccacagcaggtccgcgagatttgtatatccagggattttctgccgggaggaagacgggattacactgtccaggtccaactccgactgtgcctcgccgagacctcgtgtccccaggaggataactaccctaacagtttgtgtattaaagtcaacggcaagctttttcctctacctgggtacgcccctccccctaagaacgggatcgagcaaaagcgccctggccgacctttgaatatcacctccctggtgcggctgagcagcgccgtgcctaaccagatcagcatttcctgggcctctgagatcggtaaaaattactccatgagtgtgtaccttgtcagacagcttacctcggctatgttactccagcgactaaagatgaaaggcataagaaaccctgatcactcacgtgcactcatcaaagagaaattaactgccgaccctgatagcgagattgctacaacgagccttcgagtgtctctcatgtgccctctcggtaaaatgaggttgactatcccttgtagggccgtgacctgtacccacctgcagtgttttgatgctgcactttacctccaaatgaacgagaagaaacctacatggatctgcccagtttgtgacaagaaagccgcttacgagtcactgattcttgacggactgttcatggaaatcctcaatgattgttctgacgtagatgagattaagtttcaggaagacggatcatggtgcccgatgagacctaaaaaagaggcgatgaaggtgagttcacagccttgtactaagattgagagcagctcagtcctgagcaagccttgctcagtcaccgtggcctccgaggccagcaaaaaaaaggtggacgtgattgacctcacaatcgaatcctcttctgacgaagaagaagatccacctgccaaaaggaagtgcatctttatgtctgagacacagagctctcccactaagggcgttctgatgtaccagccctcttctgtcagggtcccctccgtgacatccgtggacccggcagcaattcccccttccttgaccgattatagtgtgccgttccatcatacacccatttccagtatgtcgtccgatctgcctggactagactttctgtcccttattccagtggatccccagtactgtcctccaatgttcctggattctttgacttcccctttgactgctagctccacttcggtgaccactacgagctcacacgagagctctacacatgtgtcttcctccagctctagatcagagactggagtaattacaagtagtggcagcaacattcccgacattatctccttggactag

SEQ ID NO: 148640 - DNA, 1866 bp, Artificial Sequence
  derived and/or modified sequence
atggctaacttcgaagaaattattaacatggtgtcttcttttagagtctcagaactacaggtgcttctcggattcgccggacgcaacaaatccggccgaaagcacgacctgctgatgcgcgctctccacctgctaaagtcaggctgctcaccagctgtgcagatcaagatccgcgaactgtaccgcagacggtaccctcggacactcgaagggctgtccgaccttagtaccatcaagagttctgttttcagcctggacggcggttcatctccagtcgagcctgatctggcagttgccggtatccatagtctgccttctacgtcagtgaccccacattcgccttcgtctccagtggggtctgtgctcctgcaagataccaagccaacgtttgagatgcaacaacctagccccccaataccccctgttcacccggacgtccaacttaaaaacctgcccttttatgatgtgctggatgtgttgatcaagccaacctcactcgtgcaatcatcaattcagcggttccaagaaaagttttttatcttcgcattgacaccccagcaggtgcgggagatttgtatctctcgagacttcctccctggaggaagacgtgattacacagtccaggtgcaactcaggttgtgtttggctgaaacatcctgcccccaagaggacaattaccctaacagtctttgcatcaaggtcaatggcaagctttttcctctgcccggatacgcaccgccacctaagaacggaatcgagcaaaagcggccaggccgtcccctcaacattacgtctctggtgcgcttgtcttcagctgtcccaaaccagatctctattagttgggccagcgagataggcaagaattactccatgtctgtttatctcgtgcgccagctgacgagcgccatgctgttacaaaggctgaaaatgaaggggattcggaacccagaccattccagggcattaattaaagagaagttgaccgcagaccctgattcagagattgcaaccacctccctcagagtgtcgcttatgtgccctctgggtaagatgcggctgactataccttgccgcgcagtgacctgcacccacctccaatgttttgatgcagcgctgtaccttcagatgaacgagaagaagccgacttggatatgtcccgtgtgcgacaagaaagccgcttacgagtccctcattctggatggcctcttcatggaaatcttaaacgactgcagcgatgtagacgagattaaattccaggaggatggttcctggtgcccaatgagaccaaaaaaggaggccatgaaggtatcatcccaaccttgtacgaaaattgaaagtagttccgtgttaagtaagccatgttcagtgactgtggcctcggaggcctctaagaaaaaagtcgacgtgatcgatctcacgattgaatcaagttcagatgaggaggaggatccaccagcaaagaggaaatgcattttcatgagcgagacccagagctcccctacgaagggtgtacttatgtaccagccgtctagcgttcgggtaccgagtgtcacttcagtggaccccgctgctattccgccaagcctaactgattactccgtgccattccaccatacccccataagcagtatgagttccgacctgccagggttggattttctgagtctcatccctgttgaccctcaatattgcccgcctatgttcctggacagccttacctcgccactgaccgcatccagcacttctgtaactactaccagctcccacgagtccagtactcacgtctcatcgtcctctagcagatctgagacgggagtaataacttcctccggcagcaatatccctgatattattagtctggactag

SEQ ID NO: 148641 - DNA, 1866 bp, Artificial Sequence
  derived and/or modified sequence
atggccgattttgaggaactcagaaacatggtcagctccttcagggtgtccgagctgcaggttttgcttgggtttgcaggacgtaataaaagtggccgtaagcacgatttgctgatgcgagccctccacctgctgaagtcgggttgctcacctgcagtgcagattaagatccgcgagttgtatcgccgaaggtacccaagaaccctggaaggtctgtcagacctctcaaccatcaagagctccgtattctcactcgacggcggatctagtcccgttgagcctgaccttgccgtggcaggcattcacagcctgcctagtacttccgtaacccctcattccccaagctcaccggtcgggtctgtgctcctccaggacaccaagcctaccttcgaaatgcagcagccaagcccacctatcccaccggtacacccagacgttcagctaaaaaacctccctttctacgatgtgctagatgttctcatcaaacccacatcgcttgtgcagtcaagtatccagagattccaggagaaattcttcattttcgctctgactccgcagcaggtacgggagatatgtatctcaagagattttctgcccggaggtagaagagactatactgtccaggtgcaactccgcctgtgtctggcagaaacctcttgtccccaggaggacaattaccccaactccctttgcattaaagttaatggtaaacttttccccctccccggatacgcaccaccacccaagaatgggatcgagcagaagagacccggacgcccactcaatattacatctctagtgaggctgagctctgccgtgcctaatcagatctcaattagctgggcctccgaaattggcaagaactacagtatgtcagtatatctcgtccggcagctgacctcagccatgctgctgcagaggctcaaaatgaaagggattcgaaatcctgaccattcccgtgcacttatcaaggagaagttgactgcggatcccgattccgagatcgccacaactagccttcgggtatcattgatgtgcccactcggtaaaatgaggttaacaatcccctgtcgggcagttacctgcacacatctgcaatgctttgacgctgccctctatctacagatgaatgagaaaaaacccacgtggatctgccccgtgtgcgacaaaaaggctgcgtacgaaagtttgattctggacgggctcttcatggaaatcctgaacgactgtagcgatgttgacgagatcaagttccaggaggacggctcctggtgccccatgcgacccaagaaggaggcaatgaaagtttcgtcccaaccttgcactaaaattgagtccagcagcgttctgagtaaaccctgttctgtgaccgtggcgtccgaagccagcaaaaaaaaagtcgacgttatcgatctcactattgagtcatcctcggacgaggaagaggatcccccagcgaagaggaagtgcatcttcatgtcagagactcagagtagccccacaaagggggttctgatgtaccagcctagcagcgtaagagtgccttcagtgacttccgttgatccagccgcaataccgccaagtctgaccgattattctgttccctttcaccacacccccatctcctctatgagcagtgaccttccaggcctggactttctgagtcttatccccgtcgacccccaatactgccccccaatgtttctagactcgcttacaagcccactgaccgccagttcaactagcgtgactacaacctcctcacatgaatcttccactcacgtgtcgtcctcatcctcaagaagcgagaccggggtcattacctcaagcggcagcaacatcccagatattatttccttggactag

SEQ ID NO: 148642 - DNA, 1866 bp, Artificial Sequence
  derived and/or modified sequence
atggccgacttcgaggagctgagaaacatggtgagcagcttcagagtgagcgagctgcaggtgctgctgggcttcgccggcagaaacaagagcggcagaaagcacgacctgctgatgagagccctgcacctgctgaagagcggctgcagccccgccgtgcagatcaagatcagagagctgtacagaagaagataccccagaaccctggagggcctgagcgacctgagcaccatcaagagcagcgtgttcagcctggacggcggcagcagccccgtggagcccgacctggccgtggccggcatccacagcctgcccagcaccagcgtgaccccccacagccccagcagccccgtgggcagcgtgctgctgcaggacaccaagcccaccttcgagatgcagcagcccagcccccccatcccccccgtgcaccccgacgtgcagctgaagaacctgcccttctacgacgtgctggacgtgctgatcaagcccaccagcctggtgcagagcagcatccagagattccaggagaagttcttcatcttcgccctgaccccccagcaggtgagagagatctgcatcagcagagacttcctgcccggcggcagaagagactacaccgtgcaggtgcagctgagactgtgcctggccgagaccagctgcccccaggaggacaactaccccaacagcctgtgcatcaaggtgaacggcaagctgttccccctgcccggctacgcccccccccccaagaacggcatcgagcagaagagacccggcagacccctgaacatcaccagcctggtgagactgagcagcgccgtgcccaaccagatcagcatcagctgggccagcgagatcggcaagaactacagcatgagcgtgtacctggtgagacagctgaccagcgccatgctgctgcagagactgaagatgaagggcatcagaaaccccgaccacagcagagccctgatcaaggagaagctgaccgccgaccccgacagcgagatcgccaccaccagcctgagagtgagcctgatgtgccccctgggcaagatgagactgaccatcccctgcagagccgtgacctgcacccacctgcagtgcttcgacgccgccctgtacctgcagatgaacgagaagaagcccacctggatctgccccgtgtgcgacaagaaggccgcctacgagagcctgatcctggacggcctgttcatggagatcctgaacgactgcagcgacgtggacgagatcaagttccaggaggacggcagctggtgccccatgagacccaagaaggaggccatgaaggtgagcagccagccctgcaccaagatcgagagcagcagcgtgctgagcaagccctgcagcgtgaccgtggccagcgaggccagcaagaagaaggtggacgtgatcgacctgaccatcgagagcagcagcgacgaggaggaggacccccccgccaagagaaagtgcatcttcatgagcgagacccagagcagccccaccaagggcgtgctgatgtaccagcccagcagcgtgagagtgcccagcgtgaccagcgtggaccccgccgccatcccccccagcctgaccgactacagcgtgcccttccaccacacccccatcagcagcatgagcagcgacctgcccggcctggacttcctgagcctgatccccgtggacccccagtactgcccccccatgttcctggacagcctgaccagccccctgaccgccagcagcaccagcgtgaccaccaccagcagccacgagagcagcacccacgtgagcagcagcagcagcagaagcgagaccggcgtgatcaccagcagcggcagcaacatccccgacatcatcagcctggactag

SEQ ID NO: 148643 - DNA, 1866 bp, Artificial Sequence
  derived and/or modified sequence
atggccaacttcgaggagatcatcaacatggtgagcagcttcagagtgagcgagctgcaggtgctgctgggcttcgccggcagaaacaagagcggcagaaagcacgacctgctgatgagagccctgcacctgctgaagagcggctgcagccccgccgtgcagatcaagatcagagagctgtacagaagaagataccccagaaccctggagggcctgagcgacctgagcaccatcaagagcagcgtgttcagcctggacggcggcagcagccccgtggagcccgacctggccgtggccggcatccacagcctgcccagcaccagcgtgaccccccacagccccagcagccccgtgggcagcgtgctgctgcaggacaccaagcccaccttcgagatgcagcagcccagcccccccatcccccccgtgcaccccgacgtgcagctgaagaacctgcccttctacgacgtgctggacgtgctgatcaagcccaccagcctggtgcagagcagcatccagagattccaggagaagttcttcatcttcgccctgaccccccagcaggtgagagagatctgcatcagcagagacttcctgcccggcggcagaagagactacaccgtgcaggtgcagctgagactgtgcctggccgagaccagctgcccccaggaggacaactaccccaacagcctgtgcatcaaggtgaacggcaagctgttccccctgcccggctacgcccccccccccaagaacggcatcgagcagaagagacccggcagacccctgaacatcaccagcctggtgagactgagcagcgccgtgcccaaccagatcagcatcagctgggccagcgagatcggcaagaactacagcatgagcgtgtacctggtgagacagctgaccagcgccatgctgctgcagagactgaagatgaagggcatcagaaaccccgaccacagcagagccctgatcaaggagaagctgaccgccgaccccgacagcgagatcgccaccaccagcctgagagtgagcctgatgtgccccctgggcaagatgagactgaccatcccctgcagagccgtgacctgcacccacctgcagtgcttcgacgccgccctgtacctgcagatgaacgagaagaagcccacctggatctgccccgtgtgcgacaagaaggccgcctacgagagcctgatcctggacggcctgttcatggagatcctgaacgactgcagcgacgtggacgagatcaagttccaggaggacggcagctggtgccccatgagacccaagaaggaggccatgaaggtgagcagccagccctgcaccaagatcgagagcagcagcgtgctgagcaagccctgcagcgtgaccgtggccagcgaggccagcaagaagaaggtggacgtgatcgacctgaccatcgagagcagcagcgacgaggaggaggacccccccgccaagagaaagtgcatcttcatgagcgagacccagagcagccccaccaagggcgtgctgatgtaccagcccagcagcgtgagagtgcccagcgtgaccagcgtggaccccgccgccatcccccccagcctgaccgactacagcgtgcccttccaccacacccccatcagcagcatgagcagcgacctgcccggcctggacttcctgagcctgatccccgtggacccccagtactgcccccccatgttcctggacagcctgaccagccccctgaccgccagcagcaccagcgtgaccaccaccagcagccacgagagcagcacccacgtgagcagcagcagcagcagaagcgagaccggcgtgatcaccagcagcggcagcaacatccccgacatcatcagcctggactag

SEQ ID NO: 148644 - protein, 491 aa, Artificial Sequence
  derived and/or modified sequence
MKTFTWTLGVLFFLLVDTGHCRGGQFKIKKINQRRYPRATDGKEEAKKCAYTFLVPEQRITGPICVNTKGQDASTIKDMITRMDLENLKDVLSRQKREIDVLQLVVDVDGNIVNEVKLLRKESRNMNSRVTQLYMQLLHEIIRKRDNSLELSQLENKILNVTTEMLKMATRYRELEVKYASLTDLVNNQSVMITLLEEQCLRIFSRQDTHVSPPLVQVVPQHIPNSQQYTPGLLGGNEIQRDPGYPRDLMPPPDLATSPTKSPFKIPPVTFINEGPFKDCQQAKEAGHSVSGIYMIKPENSNGPMQLWCENSLDPGGWTVIQKRTDGSVNFFRNWENYKKGFGNIDGEYWLGLENIYMLSNQDNYKLLIELEDWSDKKVYAEYSSFRLEPESEFYRLRLGTYQGNAGDSMMWHNGKQFTTLDRDKDMYAGNCAHFHKGGWWYNACAHSNLNGVWYRGGHYRSKHQDGIFWAEYRGGSYSLRAVQMMIKPID

SEQ ID NO: 148645 - protein, 280 aa, Artificial Sequence
  derived and/or modified sequence
MKTFTWTLGVLFFLLVDTGHCRGGQFKIKKINQRRYPRTIKDMITRMDLENLKDVLSRQKREIDVLQLVVDVDGNIVNEVKLLRKESRNMNSRVTQLYMQLLHEIIRKRDNSLELSQLENKILNVTTEMLKMATRYRELEVKYASLTDLVNNQSVMITLLEEQCLRIFSRQDTHVSPPLVQVVPQHIPNSQQYTPGLLGGNEIQRDPGYPRDLMPPPDLATSPTKSPFKIPPVTFINEGPFKDCQQAKEAGHSVNGIFWAEYRGGSYSLRAVQMMIKPID

SEQ ID NO: 148646 - protein, 114 aa, Artificial Sequence
  derived and/or modified sequence
MKTFTWTLGVLFFLLVDTGHCRGGQFKIKKINQRRYPRATDGKEEAKKCAYTFLVPEQRITGPICVNTKGQDASTIKDMITRMDLENLKDVLSRQKREIDVLQLVVDVDGNIVN

SEQ ID NO: 148647 - DNA, 1476 bp, Artificial Sequence
  derived and/or modified sequence
atgaagacgtttacatggacacttggtgtcctcttctttctgctcgttgacactggccattgtcgcggggggcagttcaagattaaaaagattaatcaaaggaggtatcctcgggcaacagacggtaaggaggaggcaaagaagtgcgcctacactttcctggtccccgaacagcgcattaccggacccatttgtgtgaataccaagggccaggatgcctccacaatcaaagacatgataaccaggatggacctagaaaacctgaaggatgtcttaagccggcagaaaagggagatcgacgtccttcagctggtcgtggacgttgatgggaatattgtgaatgaggtgaaactacttcggaaagagtcgcggaatatgaactctagagtgactcaactgtacatgcaactgttgcacgaaattatcagaaagagggataatagcctcgagctctcacagctggagaacaaaattctgaacgtgacgacggagatgctgaaaatggccacgcgctatagggagcttgaagttaagtatgcctcattgactgaccttgtgaataatcagtcagtaatgattacactcctggaggagcagtgtctcaggatcttttctagacaagatacccatgtgtctccacccttggttcaggtggtccctcaacacatccccaatagccagcagtatactcctggcctgttaggtggaaacgagattcaaagggacccaggatacccacgcgacttaatgcccccacctgacctggccacttcacccaccaagtcgccctttaagattccgccagtgacatttatcaacgaggggcctttcaaagactgccaacaggcaaaggaggcagggcactccgtgagtggtatctatatgatcaagccggagaacagtaacggtccaatgcagctgtggtgcgagaactctcttgatcctggggggtggactgtgattcagaagcgtaccgatggctccgtcaacttttttaggaactgggagaactacaagaaaggcttcgggaacatcgatggagagtattggttaggtttagagaatatctacatgctgtctaatcaagataactacaaactgttgatcgagttggaggactggagcgacaagaaagtctatgctgagtattcctcttttaggctggagcctgagtccgagttctatcgtctgcgattaggaacctatcagggcaatgccggagactccatgatgtggcacaatggtaagcaattcacaacccttgatagagacaaggatatgtacgccggaaactgcgcgcacttccacaaaggcgggtggtggtacaacgcctgcgcccacagcaatcttaacggcgtgtggtataggggcggtcattatagaagcaaacatcaagatggcatcttctgggctgagtatcggggggggagctattccctgcgggcggtgcagatgatgatcaagcccatcgactag

SEQ ID NO: 148648 - DNA, 1476 bp, Artificial Sequence
  derived and/or modified sequence
atgaagaccttcacctggaccctgggcgtgctcttcttcctgctggtggacaccggccactgccggggcggccagttcaagatcaagaagatcaaccagaggcgctacccccgggccacagatggcaaggaggaggccaagaagtgtgcctacaccttcctggtgcctgagcagaggatcaccggccccatctgtgtgaacaccaagggccaggatgccagcaccatcaaggacatgatcaccaggatggacctggagaacctgaaggatgtgctgagccggcagaagcgggagattgatgtgctgcagctggtggtggatgtggatggcaacatcgtgaatgaggtgaagctgctgaggaaggagagcaggaacatgaacagccgggtgacccagctgtacatgcagctgctgcacgagatcatcaggaagagggacaacagcctggagctgagccagctggagaacaagatcctgaatgtgaccacagagatgctgaagatggccacccgctaccgggagctggaggtgaagtatgccagcctgacagacctggtgaacaaccagagcgtgatgatcaccctgctggaggagcagtgcctgcgcatcttcagccggcaggacacccacgtgtccccacccctggtgcaggtggtgccccagcacatccccaacagccagcagtacaccccaggcctgctgggcggcaatgagatccagagggaccccggctacccccgggacctgatgcctcctccagacctggccaccagccccaccaagagccccttcaagatcccccctgtgaccttcatcaatgaaggccccttcaaggactgccagcaggccaaggaggccggccacagcgtgtctggcatctacatgatcaagccagagaacagcaatggccccatgcagctgtggtgtgagaacagcctggaccccggcggctggacagtcatccagaagaggacagatggctctgtgaacttcttcaggaactgggagaactacaagaagggcttcggcaacattgatggagagtactggctgggcctggagaacatctacatgctgagcaaccaggacaactacaagctgctgattgagctggaggactggagcgacaagaaggtgtatgcagagtacagcagcttccggctggagcctgagagcgagttctaccgcctgcggctgggcacctaccagggcaatgctggggacagcatgatgtggcacaacgggaagcagttcaccaccctggaccgggacaaggacatgtatgccggcaactgtgcccacttccacaagggcggctggtggtacaatgcctgtgcccacagcaacctgaatggagtgtggtacagaggaggccactaccgcagcaagcaccaggacggcatcttctgggccgagtacagaggaggcagctacagcctgcgggctgtgcagatgatgatcaagcccatcgactag

SEQ ID NO: 148649 - DNA, 1476 bp, Artificial Sequence
  derived and/or modified sequence
atgaagaccttcacctggaccctgggcgtgctgttcttcctgctggtcgacaccgggcactgccggggcggccagttcaaaatcaaaaagattaatcagagacggtatcctcgggctacagacggtaaggaggaggcaaagaagtgtgcgtacacttttctagtccctgaacagcgaatcacagggcctatctgtgtcaataccaagggccaggatgccagcactattaaggacatgatcacccggatggatctcgagaaccttaaagatgtactgtcccggcagaagcgagaaattgacgtgcttcagctggtagtggacgtagacggaaacatcgttaatgaagtgaagctgctgcgcaaagaaagtcggaacatgaatagtagggtgacgcagctgtacatgcagctactacatgaaatcattcgtaaaagagacaactctctcgagctaagtcagctggagaacaagattcttaatgttaccacagagatgttaaagatggcaactcgttaccgggaactggaagtgaagtatgcatcactgactgacctggtgaataatcagtccgtcatgatcaccctgctcgaagagcagtgcctccgcatcttctcgagacaggacacacatgtttcacccccgctggttcaggtggtcccgcagcacattccaaacagccaacaatacactccgggtctgctggggggaaatgaaatccaaagggaccccggctatccccgcgatcttatgccgccccccgacttggcaacaagtcctacaaaatcaccatttaaaatccctcctgtaaccttcattaatgaagggccgttcaaagactgtcagcaggctaaggaagccggacacagtgtgtctggaatctacatgattaaacctgagaattctaatgggccaatgcagctttggtgtgagaactcacttgaccctggaggttggactgtgattcaaaaaagaacagacggatcggtaaacttctttcggaattgggagaactacaagaagggttttggtaatattgacggtgaatattggctcggcctggaaaatatttacatgctgtctaaccaggataattataagctgttgattgagttggaggattggtctgacaaaaaggtttatgccgagtattccagcttccgactcgagccagaaagcgagttctatagactgcggctagggacctaccagggtaacgccggcgatagtatgatgtggcacaacgggaagcagtttacgactctggatcgcgacaaagatatgtatgccggaaattgtgcccatttccataagggcggctggtggtataatgcctgtgcccattctaacctaaacggagtatggtacagaggtgggcactacaggagcaagcaccaggatggcatcttttgggccgaatacagaggggggtcatacagccttagggcggttcagatgatgatcaagcctatcgactag

SEQ ID NO: 148650 - DNA, 1476 bp, Artificial Sequence
  derived and/or modified sequence
atgaaaacattcacctggaccctgggcgtgctgttttttctgctggtcgacacaggccattgtaggggcggacagttcaaaatcaaaaagattaatcagagacggtacccgcgagctacggatgggaaggaggaggccaaaaaatgtgcatacaccttcttggtgcctgaacagagaattaccggccctatctgtgtgaatacaaaggggcaagacgctagcaccattaaagacatgatcacacgcatggaccttgaaaatttgaaggacgtcctgagtcggcaaaagagggaaattgacgtcttacagctcgtcgttgacgttgatgggaacatcgtgaacgaagtgaagctgctgcgcaaagaaagcaggaacatgaatagtcgtgtcacccagctgtatatgcagcttctccacgagattataagaaagcgcgacaattcgctggagctgagtcagcttgagaacaagatcttgaacgttaccacggaaatgctgaaaatggcgaccagatacagggaacttgaagtgaagtacgccagcttaaccgatctggtgaataatcaatccgtgatgatcaccctgctggaagagcagtgcctgagaattttttctcggcaggacactcacgtctctcctccacttgtgcaggtggttccccaacacattcccaattcccagcagtacacgccgggtctgctgggaggcaacgagatccaaagggatcccggatacccgagggacctaatgcccccacctgatctggcaacgtcaccaactaaatccccgttcaaaattccccctgtgactttcatcaatgagggacccttcaaagactgccaacaggcgaaggaggctggtcattccgtgagtgggatttacatgattaagcctgagaactccaacgggcctatgcagctgtggtgtgagaactccctcgaccccggagggtggaccgttatccagaaacggacggatggctctgtaaatttcttcagaaattgggaaaattacaagaagggctttggtaatatcgatggcgaatactggctgggtctggaaaatatctacatgctaagcaatcaagacaattataaattactcattgaactcgaggactggtcggacaaaaaggtttatgcggagtatagcagctttagactggaacctgagagcgagttttaccgtctaaggctgggcacctaccagggcaacgctggggattcaatgatgtggcacaatggtaagcagttcaccacactggaccgagacaaggacatgtatgcagggaactgtgcccacttccacaaaggcggatggtggtacaatgcctgtgcccactcaaatttgaacggagtttggtacaggggaggacactatcggagcaaacaccaggatgggatcttctgggccgaataccggggagggtcctattcattaagagcagtgcagatgatgattaaacctattgattag

SEQ ID NO: 148651 - DNA, 1476 bp, Artificial Sequence
  derived and/or modified sequence
atgaagaccttcacctggaccctaggggtcttgttttttctgctagttgatacaggccactgccgggggggacagttcaagatcaaaaaaattaatcaaaggagatacccaagggccaccgacggcaaggaagaagccaaaaaatgtgcgtacactttcctggtacctgaacagcgcataaccggacccatctgtgtcaacactaagggccaggatgccagcacaattaaggacatgatcactagaatggatctggaaaacctgaaggacgtgttatcacgccagaagagagaaattgacgtgcttcagcttgtagtcgatgtcgacgggaacatcgtgaatgaggtgaaacttttgaggaaggagtcaaggaatatgaatagcagggtcacacagctgtacatgcagctgttgcacgagataatacgtaaacgggataattctttagaactttcccagctggaaaacaaaattctgaatgtcacgaccgagatgttgaaaatggcaactcggtaccgagagctggaagttaagtatgcctcccttaccgatctggttaacaatcaatctgtaatgataacccttctagaagaacagtgtctccgcatctttagcagacaggacactcatgtctcacctcctttagtccaggtcgtgccacaacatatacccaattctcagcagtacacccccggactcctcggtggcaatgagatccagagggatccaggttaccctagagatttgatgcccccgcccgatctggcaacaagtcccaccaagagtccattcaaaataccccccgtgactttcatcaatgaagggccctttaaagattgtcagcaagcaaaagaggccggccactctgtgtcaggtatctatatgattaagccagagaactccaatggaccaatgcaactatggtgcgaaaattcactcgaccccggcggttggaccgtgattcagaagcggacagatggttcagttaatttcttcagaaactgggaaaactataagaagggatttggcaacattgacggggagtattggctggggctcgagaacatctacatgctgtctaatcaagataattataagctccttatcgagttggaggattggagtgataaaaaagtctacgccgaatattccagctttagactagaaccagaaagcgagttctataggctgaggcttgggacatatcagggcaatgctggcgactctatgatgtggcacaacggtaagcaattcacgacactcgatcgcgataaggatatgtatgccgggaactgcgcacacttccataagggagggtggtggtataacgcatgtgcccactcaaatttgaatggtgtctggtataggggaggccattacaggagcaaacatcaagatggtatattttgggctgaatacagagggggttcatattccttaagagccgtgcagatgatgatcaaacccattgactag

SEQ ID NO: 148652 - DNA, 1476 bp, Artificial Sequence
  derived and/or modified sequence
atgaagacctttacctggacattaggcgttctcttctttcttcttgtagatacaggtcactgtcgggggggacaattcaagattaaaaagataaatcagcgtagataccctagagccaccgatgggaaggaagaagctaagaagtgcgcttatacatttctggtccctgagcagcggattacaggccccatatgcgtaaacactaagggacaggatgccagtaccattaaagatatgataactagaatggatttggaaaacttaaaagacgttctcagcagacaaaagcgcgagatagatgtgctgcagctggtggtggatgttgacggaaacattgtgaatgaagtgaaattgctgaggaaagaatcccgcaacatgaactctagggtgacccagctttatatgcaactcttgcatgaaattatccggaagcgcgacaattcattggagctctcccagttagagaacaaaatcttaaatgtcaccaccgaaatgttaaagatggccacccggtaccgcgagctcgaggttaaatacgctagcttaactgacctagtaaataatcaaagcgtcatgataaccttgctggaggaacagtgcctccgcatattcagccggcaggatactcatgtttcccctccccttgtgcaggttgtcccgcagcacatccctaattcacagcaatacaccccgggcttgttaggtggcaatgagatacaacgtgatcccgggtaccctagagacctcatgcctcctcccgatctggcaacttcgcctactaagagtccattcaagatcccccctgtgacttttatcaatgaaggacccttcaaagactgccaacaagctaaagaagctggtcactcagtgtctgggatatatatgattaaaccagaaaacagcaacggaccaatgcaactgtggtgcgagaatagcctagacccaggtggatggaccgtgattcagaaacgtactgacggcagtgtaaatttctttaggaactgggaaaactacaaaaaagggtttggaaacatagatggggaatattggctcggcttagaaaatatctacatgttaagcaatcaagataactacaagttgctcattgagttggaggattggtcagataagaaggtgtatgctgaatactctagcttcaggctggagcccgaaagtgaattttacagactaaggctcggaacatatcagggcaatgctggcgactctatgatgtggcacaacggtaagcaattcacgacactcgatcgcgataaggatatgtatgccgggaactgcgcacacttccataagggagggtggtggtataacgcatgtgcccactcaaatttgaatggtgtctggtataggggaggccattacaggagcaaacatcaagatggtatattttgggctgaatacagagggggttcatattccttaagagccgtgcagatgatgatcaaacccattgactag

SEQ ID NO: 148653 - DNA, 1476 bp, Artificial Sequence
  derived and/or modified sequence
atgaagaccttcacctggaccctgggcgtgctgttcttcctgctggtggacaccggccactgcagaggcggccagttcaagatcaagaagatcaaccagagaagataccccagagccaccgacggcaaggaggaggccaagaagtgcgcctacaccttcctggtgcccgagcagagaatcaccggccccatctgcgtgaacaccaagggccaggacgccagcaccatcaaggacatgatcaccagaatggacctggagaacctgaaggacgtgctgagcagacagaagagagagatcgacgtgctgcagctggtggtggacgtggacggcaacatcgtgaacgaggtgaagctgctgagaaaggagagcagaaacatgaacagcagagtgacccagctgtacatgcagctgctgcacgagatcatcagaaagagagacaacagcctggagctgagccagctggagaacaagatcctgaacgtgaccaccgagatgctgaagatggccaccagatacagagagctggaggtgaagtacgccagcctgaccgacctggtgaacaaccagagcgtgatgatcaccctgctggaggagcagtgcctgagaatcttcagcagacaggacacccacgtgagcccccccctggtgcaggtggtgccccagcacatccccaacagccagcagtacacccccggcctgctgggcggcaacgagatccagagagaccccggctaccccagagacctgatgcccccccccgacctggccaccagccccaccaagagccccttcaagatcccccccgtgaccttcatcaacgagggccccttcaaggactgccagcaggccaaggaggccggccacagcgtgagcggcatctacatgatcaagcccgagaacagcaacggccccatgcagctgtggtgcgagaacagcctggaccccggcggctggaccgtgatccagaagagaaccgacggcagcgtgaacttcttcagaaactgggagaactacaagaagggcttcggcaacatcgacggcgagtactggctgggcctggagaacatctacatgctgagcaaccaggacaactacaagctgctgatcgagctggaggactggagcgacaagaaggtgtacgccgagtacagcagcttcagactggagcccgagagcgagttctacagactgagactgggcacctaccagggcaacgccggcgacagcatgatgtggcacaacggcaagcagttcaccaccctggacagagacaaggacatgtacgccggcaactgcgcccacttccacaagggcggctggtggtacaacgcctgcgcccacagcaacctgaacggcgtgtggtacagaggcggccactacagaagcaagcaccaggacggcatcttctgggccgagtacagaggcggcagctacagcctgagagccgtgcagatgatgatcaagcccatcgactag

SEQ ID NO: 148654 - DNA, 1476 bp, Artificial Sequence
  derived and/or modified sequence
atgaaaaccttcacctggaccctgggcgtcctgttcttcttgctggtagataccggccactgccgcggaggccagttcaaaattaagaaaattaatcagcgcagatatcctagagctactgacggtaaggaagaggcaaagaaatgtgcatatacctttctggtgcccgagcagcgcattaccgggcctatctgtgtcaataccaagggccaggatgctagcacaattaaggacatgattacccggatggatctcgaaaacctgaaagatgtgctctctcgacagaagcgggaaatcgacgtgctgcagcttgtcgttgatgtcgacggaaatatcgtgaatgaggttaagttgctccgaaaagagtctcgcaatatgaattctagggtgacgcaactgtacatgcagttactgcacgagataatacgaaagcgcgacaattccctggagctgtcacagctagagaacaaaatcctgaacgtaacaaccgagatgctgaaaatggcgacaaggtatcgagagctggaggtcaaatatgcaagtctgacagatctagtgaacaatcaatctgtgatgatcacactgctcgaggagcaatgcctccggatttttagtagacaggacactcacgtatcccccccattagtacaggtggtcccacagcacatccccaactcccagcaatatacccccggactactgggtggtaatgagatccagcgcgaccccggttatcctcgcgatctgatgccccctccagatcttgcaactagccctacaaagtccccatttaagattccgcctgtcacttttatcaacgaaggacctttcaaggactgccagcaggcgaaggaggcagggcactcagtgtccggtatctacatgatcaaaccagaaaactccaacgggccaatgcagttatggtgcgaaaacagtttggaccctgggggatggactgttattcagaagcggacagacggatctgtgaatttcttccgaaattgggagaattacaagaagggattcgggaatatagatggcgagtactggctgggcctggaaaacatctacatgctgtccaaccaggataactacaagttgctgatagaactcgaggactggagcgataagaaagtctatgctgagtattcgtcatttaggctggagccagaaagcgagttttatcgccttcgattaggaacttatcaaggcaatgctggggatagtatgatgtggcacaatggcaagcagtttacaactctggaccgcgataaagacatgtacgctggtaactgtgcccacttccacaagggtggctggtggtacaacgcctgtgcacattcgaatttgaacggcgtgtggtacagagggggtcactatagaagtaagcatcaggatgggatattctgggcagagtataggggtggcagctactctctgcgggcagtgcagatgatgatcaagccaattgactag

SEQ ID NO: 148655 - DNA, 843 bp, Artificial Sequence
  derived and/or modified sequence
atgaagacctttacgtggacgcttggggtgcttttttttctacttgttgatacaggccattgccgcggtgggcaatttaaaattaagaagatcaatcaaagaagatacccgagaacgatcaaggacatgatcactcggatggacctggagaatctgaaggacgttctgagcagacagaaacgagagatcgatgtcctgcaactggtcgttgatgtggacggcaatatcgtgaatgaggtgaaactgctgcggaaggaaagtcgcaatatgaattcaagggtaacacagctgtacatgcagttattgcatgagatcattcgcaagcgcgataattccttagagctgtcacagttggaaaataaaattttgaatgtcactaccgagatgctgaagatggccacccgctaccgcgaactggaggtgaagtacgctagtctcacagacctagtgaataatcagtccgttatgattacactcctggaggagcagtgccttcgcattttctctcggcaggacactcacgtcagccccccactggtgcaggtggtcccccaacatataccgaactcgcagcagtataccccaggcctgctcgggggaaatgagatccaaagggatcccggatatccaagggacttgatgccaccccctgatctggctaccagccccaccaagtctccttttaaaatcccacctgtgacctttattaacgaaggacctttcaaggattgtcagcaggcgaaagaggccggtcactccgtgaacgggattttctgggcagaatatagggggggatcctattcgctgcgagctgtacagatgatgatcaagcctattgattag

SEQ ID NO: 148656 - DNA, 345 bp, Artificial Sequence
  derived and/or modified sequence
atgaaaacgtttacctggactctaggagtgctgttctttctgctcgtggataccgggcactgtcgcggtggccaatttaaaatcaagaagatcaatcagcgccgatacccccgagctactgatggaaaggaggaggctaaaaaatgcgcctacacgttcctcgtgcctgaacagaggatcaccggcccaatatgcgttaatacaaaaggtcaggacgcatccacaataaaggacatgattactagaatggatctcgaaaacctgaaagacgtactaagtagacaaaaacgcgagatagatgtccttcagctggtggttgacgtagatggcaacatcgtgaactag

SEQ ID NO: 148657 - DNA, 1569 bp, Artificial Sequence
  derived and/or modified sequence
agtgcatgacacagccagttaaatgcctctgtgagtttaccatctgaaaggaggcaaatcctgactttcgtttcttctctctactagctggcaatatagcaactatgaagagaaaagctactaataaaattaacccaacgcatagaagacttttttttctcttctaaaaacaactaagtaaagacttaaatttaaacacatcattttacaacctcatttcaaaatgaagacttttacctggaccctaggtgtgctattcttcctactagtggacactggacattgcagaggtggacaattcaaaattaaaaaaataaaccagagaagataccctcgtaccattaaagacatgatcaccaggatggaccttgaaaacctgaaggatgtgctctccaggcagaagcgggagatagatgttctgcaactggtggtggatgtagatggaaacattgtgaatgaggtaaagctgctgagaaaggaaagccgtaacatgaactctcgtgttactcaactctatatgcaattattacatgagattatccgtaagagggataattcacttgaactttcccaactggaaaacaaaatcctcaatgtcaccacagaaatgttgaagatggcaacaagatacagggaactagaggtgaaatacgcttccttgactgatcttgtcaataaccaatctgtgatgatcactttgttggaagaacagtgcttgaggatattttcccgacaagacacccatgtgtctcccccacttgtccaggtggtgccacaacatattcctaacagccaacagtatactcctggtctgctgggaggtaacgagattcagagggatccaggttatcccagagatttaatgccaccacctgatctggcaacttctcccaccaaaagccctttcaagataccaccggtaactttcatcaatgaaggaccattcaaagactgtcagcaagcaaaagaagctgggcattcggtcaatggaattttctgggccgaatacagaggcgggtcatactccttaagagcagttcagatgatgatcaagcctattgactgaagagagacactcgccaatttaaatgacacagaactttgtacttttcagctcttaaaaatgtaaatgttacatgtatattacttggcacaatttatttctacacagaaagtttttaaaatgaattttaccgtaactataaaagggaacctataaatgtagtttcatctgtcgtcaattactgcagaaaattatgtgtatccacaacctagttattttaaaaattatgttgactaaatacaaagtttgttttctaaaatgtaaatatttgccacaatgtaaagcaaatcttagctatattttaaatcataaataacatgttcaagatacttaacaatttatttaaaatctaagattgctctaacgtctagtgaaaaaaatatttttaaaatttcagccaaataatgcattttatttataaaaatacagacagaaaattagggagaaacctctagttttgccaatagaaaatgcttcttccattgaataaaagttatttcaaattg

SEQ ID NO: 148658 - DNA, 1476 bp, Artificial Sequence
  derived and/or modified sequence
atgaagaccttcacttggacacttggggtactctttttcctgttggtggacacgggtcactgcaggggcggccaattcaaaattaagaaaatcaatcagcggcgttatcctagagcaacagatggtaaagaagaagcaaaaaaatgtgcctataccttcctcgtcccagagcagagaatcactggccccatatgtgttaacaccaaagggcaagatgcaagcaccatcaaggacatgattacccgaatggatctggagaaccttaaggatgtgctcagcagacaaaagcgagagattgatgtcttgcagttagttgtagatgtggatgggaatatcgtgaatgaggtcaaactgttgcggaaggagtctaggaacatgaactcccgggtcacacagctttatatgcagttgctgcacgagatcattcgtaaaagggataactcactcgagctctcgcaactggagaacaagatcctaaatgtgacaaccgaaatgctgaagatggccacacgctacagggagctcgaagtgaaatacgcatctttgaccgatctggttaacaaccagagcgttatgatcacactgctggaggaacagtgcctgcgtatcttttccagacaagatacacatgtctctcccccactggtccaggtcgtaccccagcatattcccaattcccagcagtatactccaggactcctcggcggcaacgaaatccaacgggaccccgggtaccctcgcgatctcatgcctcctcctgacctcgcaactagtccgacaaagagtcccttcaaaatccctcctgtcacattcatcaacgagggcccatttaaagattgtcagcaagctaaggaggcaggacattccgtcagtggaatctatatgataaaacccgagaacagcaatggaccgatgcagctgtggtgtgagaactccttagatccagggggctggacagttatccagaaaagaactgacggaagcgtgaattttttccggaattgggaaaactacaagaagggcttcggtaacatcgatggcgaatactggctgggactcgaaaatatctacatgctcagtaatcaagataattacaagctcctgatcgaactggaggactggagcgacaagaaggtttacgccgaatatagctcatttcgactcgaacccgaatccgagttttatcgattgcgcttggggacctaccagggcaatgcaggagattcaatgatgtggcataacggcaagcagttcacgacattagatagagataaggatatgtatgctgggaattgcgctcactttcataagggcggctggtggtacaatgcctgtgcccactctaaccttaacggggtctggtaccgggggggacactataggagtaagcatcaggacggaatattttgggcagaatatcggggcggatcgtacagcctgagagcggtgcaaatgatgatcaagcccatcgactag

SEQ ID NO: 148659 - DNA, 843 bp, Artificial Sequence
  derived and/or modified sequence
atgaagacatttacttggaccctgggcgtcttgttcttcctgctcgtagacacgggccattgccgcggggggcagttcaagatcaagaagataaatcagcgaagatacccaagaactataaaggacatgataacaaggatggacctggaaaatctgaaggatgtgctttcccgtcaaaaaagagagatcgacgttctgcaactggtcgttgacgtcgatggaaatatcgtcaatgaggttaagctgctgaggaaggagtccagaaatatgaattcaagggttacccagctctacatgcagctgctgcacgagattattagaaaacgagataatagcctcgagctgagtcagcttgaaaacaaaattcttaacgtcactacagagatgctgaaaatggccactagatatagggagctagaggtgaagtatgcttcattgacagacttagtgaacaatcagagtgtcatgattaccctgctcgaagaacagtgcctgagaattttctctcgtcaggatactcacgtgtctccgccgctggtccaggtagttccgcagcatattcccaactcccaacagtatactcccggattactaggaggcaatgaaatccaacgcgaccctggctacccccgggacttaatgccccccccagatttggccacttctccaacaaaaagcccattcaaaattccaccggtaacgtttatcaacgaaggccctttcaaagattgtcaacaggccaaagaggctggccactctgtaaacggtattttctgggcagaatatagaggtggcagctactctcttcgggctgtgcagatgatgatcaagcctatcgactag

SEQ ID NO: 148660 - DNA, 345 bp, Artificial Sequence
  derived and/or modified sequence
atgaagaccttcacatggaccttgggcgtactattctttctgttggtggacacaggacattgtaggggaggtcaatttaagataaagaaaattaaccagcgccggtacccacgcgcaaccgacggcaaagaggaggccaagaagtgtgcctacaccttccttgtccccgagcaacgaatcactggtcccatctgcgttaacacgaaaggccaggatgcttctactattaaggacatgatcacacggatggatctggagaacctgaaagacgtgcttagcagacagaaaagggagatcgacgtgttacagctggttgtggatgtagacggcaatatagtcaactag

SEQ ID NO: 148661 - DNA, 534 bp, Artificial Sequence
  derived and/or modified sequence
gagtttaccatctgaaaggaggcaaatcctgactttcgtttcttctctctactagctggcaatatagcaactatgaagagaaaagctactaataaaattaacccaacgcatagaagacttttttttctcttctaaaaacaactaagtaaagacttaaatttaaacacatcattttacaacctcatttcaaaatgaagacttttacctggaccctaggtgtgctattcttcctactagtggacactggacattgcagaggtggacaattcaaaattaaaaaaataaaccagagaagataccctcgtgccacagatggtaaagaggaagcaaagaaatgtgcatacacattcctggtacctgaacaaagaataacagggccaatctgtgtcaacaccaaggggcaagatgcaagtaccattaaagacatgatcaccaggatggaccttgaaaacctgaaggatgtgctctccaggcagaagcgggagatagatgttctgcaactggtggtggatgtagatggaaacattgtgaatg

SEQ ID NO: 148662 - DNA, 1476 bp, Artificial Sequence
  derived and/or modified sequence
atgaagaccttcacttggacacttggggtactctttttcctgttggtggacacgggtcactgcaggggcggccaattcaaaattaagaaaatcaatcagcggcgttatcctagagcaacagatggtaaagaagaagcaaaaaaatgtgcctataccttcctcgtcccagagcagagaatcactggccccatatgtgttaacaccaaagggcaagatgcaagcaccatcaaggacatgattacccgaatggatctggagaaccttaaggatgtgctcagcagacaaaagcgagagattgatgttctgcaactcgtggtggatgtcgacggaaatattgtgaatgaagtgaaacttctccggaaagaaagtcgaaatatgaatagtcgtgtgacacaactctatatgcagctattgcatgagatcattcgaaaacgcgacaatagtctggaactgtctcaattagaaaacaaaatcctaaatgtcaccacggaaatgttgaaaatggcaacaaggtaccgagaactcgaagtgaaatatgcctccttgaccgacttagtaaacaatcagtcagtcatgatcactcttctggaggagcagtgcctcagaatcttctcacggcaggatacccatgtcagccccccactcgtccaggtagtcccacaacacattcccaattcccagcaatacacgccaggcttgcttggcggaaatgagatccaacgcgatcccgggtacccaagagatttaatgccacccccagatctggccacaagccctactaaaagcccctttaagataccacctgtgacctttattaacgagggcccattcaaggactgccagcaggctaaagaggcaggacacagcgtgtccggcatctacatgatcaagcccgaaaactctaacggaccaatgcaactgtggtgtgagaatagcctggatcctggcgggtggaccgtgattcagaaacgtactgatggaagtgtgaacttttttcgaaattgggagaactataaaaagggtttcggcaatatcgatggggaatactggctggggcttgagaacatctatatgctatccaaccaagataactataagttgctgattgaattagaggactggtccgataaaaaagtgtacgcagaatacagtagctttagacttgaaccagaatcggaattttatagactgcgactgggaacctaccagggcaatgcaggagattcaatgatgtggcataacggcaagcagttcacgacattagatagagataaggatatgtatgctgggaattgcgctcactttcataagggcggctggtggtacaatgcctgtgcccactctaaccttaacggggtctggtaccgggggggacactataggagtaagcatcaggacggaatattttgggcagaatatcggggcggatcgtacagcctgagagcggtgcaaatgatgatcaagcccatcgactag

SEQ ID NO: 148663 - DNA, 843 bp, Artificial Sequence
  derived and/or modified sequence
atgaaaacattcacttggaccttgggtgtgctgttctttttgttggtggatactggacattgcagaggcgggcaatttaagataaaaaagattaatcagaggcgctatcctcggaccattaaggatatgataacacggatggatctggaaaatttgaaggatgtcttgagcaggcagaagagggagatcgatgtgcttcagctcgtggtggacgtggatggcaatatcgtaaacgaagtgaaactcctccgaaaagaatcccggaatatgaattcgcgcgtgactcagctctatatgcaattactgcacgaaattataaggaaaagagacaacagtctggaactcagccagctagagaacaaaatattaaacgtcactacagaaatgttgaaaatggctacccgctacagggaactagaggtcaaatacgcatctttaaccgatttggtgaacaatcaatctgtcatgattaccttattggaggaacagtgcctgagaatatttagtcgccaggatacccatgtaagtcccccactcgtacaggtggtaccacaacacatcccaaattcccagcagtatacgcccggactcctggggggaaatgagatacagcgagaccccggctacccccgtgacttgatgcccccccccgacctcgcaacctctcctaccaagagccccttcaagattccaccagtgacctttattaatgaaggaccgttcaaggactgtcagcaggctaaagaagcaggccatagtgtaaatgggatattttgggcagagtatcgaggaggcagctattcactgcgggctgtgcagatgatgatcaagcctatcgactag

SEQ ID NO: 148664 - DNA, 345 bp, Artificial Sequence
  derived and/or modified sequence
atgaaaactttcacatggacccttggcgtccttttctttctgttagtcgacactgggcactgcagaggcggccagtttaagatcaagaagattaatcaaagacgataccctcgagctactgacggcaaggaggaagctaagaagtgcgcatacacatttctcgtgcctgagcagcgcattacggggccaatttgcgtgaataccaagggacaggacgcgtccactatcaaggatatgattaccagaatggatctagaaaatctgaaagacgtactgagccgccagaagagggaaattgatgtgcttcagttggtggtggatgtggatggtaatatagtcaactag

SEQ ID NO: 148665 - DNA, 3348 bp, Artificial Sequence
  derived and/or modified sequence
gcagctggttactgcatttctccatgtggcagacagagcaaagccacaacgctttctctgctggattaaagacggcccacagaccagaacttccactatactacttaaaattacataggtggcttgtcaaattcaattgattagtattgtaaaaggaaaaagaagttccttcttacagcttggattcaacggtccaaaacaaaaatgcagctgccattaaagtcacagatgaacaaacttctacactgatttttaaaatcaagaataagggcagcaagtttctggattcactgaatcaacagacacaaaaagctggcaatatagcaactatgaagagaaaagctactaataaaattaacccaacgcatagaagacttttttttctcttctaaaaacaactaagtaaagacttaaatttaaacacatcattttacaacctcatttcaaaatgaagacttttacctggaccctaggtgtgctattcttcctactagtggacactggacattgcagaggtggacaattcaaaattaaaaaaataaaccagagaagataccctcgtgccacagatggtaaagaggaagcaaagaaatgtgcatacacattcctggtacctgaacaaagaataacagggccaatctgtgtcaacaccaaggggcaagatgcaagtaccattaaagacatgatcaccaggatggaccttgaaaacctgaaggatgtgctctccaggcagaagcgggagatagatgttctgcaactggtggtggatgtagatggaaacattgtgaatgaggtaaagctgctgagaaaggaaagccgtaacatgaactctcgtgttactcaactctatatgcaattattacatgagattatccgtaagagggataattcacttgaactttcccaactggaaaacaaaatcctcaatgtcaccacagaaatgttgaagatggcaacaagatacagggaactagaggtgaaatacgcttccttgactgatcttgtcaataaccaatctgtgatgatcactttgttggaagaacagtgcttgaggatattttcccgacaagacacccatgtgtctcccccacttgtccaggtggtgccacaacatattcctaacagccaacagtatactcctggtctgctgggaggtaacgagattcagagggatccaggttatcccagagatttaatgccaccacctgatctggcaacttctcccaccaaaagccctttcaagataccaccggtaactttcatcaatgaaggaccattcaaagactgtcagcaagcaaaagaagctgggcattcggtcagtgggatttatatgattaaacctgaaaacagcaatggaccaatgcagttatggtgtgaaaacagtttggaccctgggggttggactgttattcagaaaagaacagacggctctgtcaacttcttcagaaattgggaaaattataagaaagggtttggaaacattgacggagaatactggcttggactggaaaatatctatatgcttagcaatcaagataattacaagttattgattgaattagaagactggagtgataaaaaagtctatgcagaatacagcagctttcgtctggaacctgaaagtgaattctatagactgcgcctgggaacttaccagggaaatgcaggggattctatgatgtggcataatggtaaacaattcaccacactggacagagataaagatatgtatgcaggaaactgcgcccactttcataaaggaggctggtggtacaatgcctgtgcacattctaacctaaatggagtatggtacagaggaggccattacagaagcaagcaccaagatggaattttctgggccgaatacagaggcgggtcatactccttaagagcagttcagatgatgatcaagcctattgactgaagagagacactcgccaatttaaatgacacagaactttgtacttttcagctcttaaaaatgtaaatgttacatgtatattacttggcacaatttatttctacacagaaagtttttaaaatgaattttaccgtaactataaaagggaacctataaatgtagtttcatctgtcgtcaattactgcagaaaattatgtgtatccacaacctagttattttaaaaattatgttgactaaatacaaagtttgttttctaaaatgtaaatatttgccacaatgtaaagcaaatcttagctatattttaaatcataaataacatgttcaagatacttaacaatttatttaaaatctaagattgctctaacgtctagtgaaaaaaatatttttaaaatttcagccaaataatgcattttatttataaaaatacagacagaaaattagggagaaacctctagttttgccaatagaaaatgcttcttccattgaataaaagttatttcaaattgaatttgtgcctttcacacgtaatgattaaatctgaattcttaataatatatcctatgctgattttcccaaaacatgacccatagtattaaatacatatcatttttaaaaataaaaaaaaacccaaaaataatgcatgcataatttaaatggtcaatttataaagacaaatctatgaatgaatttttcagtgttatcttcatatgatatgctgaacaccaaaatctccagaaatgcattttatgtagttctaaaatcagcaaaatattggtattacaaaaatgcagaatatttagtgtgctacagatctgaattatagttctaatttattattactttttttctaatttactgatcttactactacaaagaaaaaaaaacccaaccaatctgcaattcaaatcagaaagtttggacagctttacaagtattagtgcatgctcagaacaggtgggactaaaacaaactcaaggaactgttggctgttttcccgatactgagaattcaacagctccagagcagaagccacaggggcatagcttagtccaaactgctaatttcattttacagtgtatgtaacgcttagtctcacagtgtctttaactcatctttgcaatcaacaactttactagtgactttctggaacaatttcctttcaggaatacatattcactgcttagaggtgaccttgccttaatatatttgtgaagttaaaattttaaagatagctcatgaaacttttgcttaagcaaaaagaaaacctcgaattgaaatgtgtgaggcaaactatgcatgggaatagcttaatgtgaagataatcatttggacaactcaaatccatcaacatgaccaatgtttttcatctgccacatctcaaaataaaacttctggtgaaacaaattaaacaaaatatccaaacctca

SEQ ID NO: 148666 - DNA, 843 bp, Artificial Sequence
  derived and/or modified sequence
atgaagaccttcacctggaccctgggcgtgctgttcttcctgctggtggacaccggccactgcagaggcggccagttcaagatcaagaagatcaaccagagaagataccccagaaccatcaaggacatgatcaccagaatggacctggagaacctgaaggacgtgctgagcagacagaagagagagatcgacgtgctgcagctggtggtggacgtggacggcaacatcgtgaacgaggtgaagctgctgagaaaggagagcagaaacatgaacagcagagtgacccagctgtacatgcagctgctgcacgagatcatcagaaagagagacaacagcctggagctgagccagctggagaacaagatcctgaacgtgaccaccgagatgctgaagatggccaccagatacagagagctggaggtgaagtacgccagcctgaccgacctggtgaacaaccagagcgtgatgatcaccctgctggaggagcagtgcctgagaatcttcagcagacaggacacccacgtgagcccccccctggtgcaggtggtgccccagcacatccccaacagccagcagtacacccccggcctgctgggcggcaacgagatccagagagaccccggctaccccagagacctgatgcccccccccgacctggccaccagccccaccaagagccccttcaagatcccccccgtgaccttcatcaacgagggccccttcaaggactgccagcaggccaaggaggccggccacagcgtgaacggcatcttctgggccgagtacagaggcggcagctacagcctgagagccgtgcagatgatgatcaagcccatcgactag

SEQ ID NO: 148667 - DNA, 345 bp, Artificial Sequence
  derived and/or modified sequence
atgaagaccttcacctggaccctgggcgtgctgttcttcctgctggtggacaccggccactgcagaggcggccagttcaagatcaagaagatcaaccagagaagataccccagagccaccgacggcaaggaggaggccaagaagtgcgcctacaccttcctggtgcccgagcagagaatcaccggccccatctgcgtgaacaccaagggccaggacgccagcaccatcaaggacatgatcaccagaatggacctggagaacctgaaggacgtgctgagcagacagaagagagagatcgacgtgctgcagctggtggtggacgtggacggcaacatcgtgaactag

SEQ ID NO: 148668 - DNA, 1476 bp, Artificial Sequence
  derived and/or modified sequence
atgaaaaccttcacgtggacgctgggggtactgtttttcctgctggttgataccggacattgtagagggggccaattcaagattaaaaaaattaaccagcgcagataccccagggccaccgacggtaaggaggaggcaaaaaagtgtgcctatactttcctggttcccgaacaaaggataacagggcctatttgtgtgaacacaaaagggcaggacgcatctacaataaaagacatgatcaccaggatggacctggaaaacctgaaggatgtcttatcaaggcaaaagagggagattgatgtcctgcagttggtcgtggacgtggacggcaatatcgtgaacgaggttaagctgctcagaaaagagtctcgcaacatgaattccagggttacccaactgtacatgcagctcctgcatgaaatcatccggaagagggacaacagcctggagttatcacagctagaaaataagatcctgaatgtgaccaccgagatgctgaagatggcaacccgctaccgtgagttagaggttaagtacgcttcactcaccgatctggtgaacaatcagtctgtaatgatcactctgcttgaggagcaatgtctcaggatcttttcaagacaggatacccatgtttcccctccactggttcaggttgtgcctcagcatatccctaactcccaacagtacaccccgggcctgcttggcggtaacgaaattcaaagagacccaggataccctcgtgatctgatgccacctcccgatctcgccacaagtcccactaaaagtcccttcaaaatccccccggtcacattcatcaacgaaggtccctttaaggactgccaacaggcaaaagaggctggtcactctgtgagcggcatctacatgattaagcccgagaattcaaacgggccaatgcagctctggtgtgagaatagtttggatcctgggggttggacagtcattcagaagagaacggacggaagcgtcaacttctttcggaactgggagaattataagaagggctttggtaacattgatggagagtattggctgggcctagaaaacatctatatgctcagcaatcaggataattacaaattactcatcgaactggaagattggtccgataagaaggtttacgcagagtacagtagctttcggctggaacctgaaagcgagttctacaggctccgtttgggaacataccagggcaacgctggcgactcaatgatgtggcacaatggaaagcagtttacgacgctcgaccgcgataaggatatgtatgccggcaattgtgcacactttcataagggcgggtggtggtataatgcatgcgcccacagtaatctcaacggagtctggtatcggggggggcactatcgctctaagcaccaagatggaattttctgggcagagtatagaggaggaagctatagcctgagggctgtgcagatgatgattaagcctattgattag

SEQ ID NO: 148669 - DNA, 843 bp, Artificial Sequence
  derived and/or modified sequence
atgaaaacatttacttggaccctcggcgtgctattcttcctcctggtggatactggacactgtcggggcggccaatttaagatcaaaaaaatcaatcagagaagatacccaaggacaataaaggatatgattacacgtatggatctcgaaaacttgaaggacgtgcttagtcgtcagaagagggaaatcgatgtgctgcagctcgtagtcgacgtggacgggaatatcgtcaacgaagtgaaactcctacgtaaggaaagtaggaacatgaactctcgggtgacacaattgtatatgcaattactgcacgagattattaggaagcgagataacagcttggagctgtctcaactggagaacaagattttaaacgtcaccaccgaaatgcttaagatggctacacgctatagggagctggaagttaagtatgcatccctaaccgatcttgttaacaatcagagtgttatgatcaccttgctggaagaacagtgcctccggatcttctctagacaagatactcatgtctccccccctctagtccaggttgtgccacagcatattcctaactcacagcagtacacacctgggttactgggcggaaatgagatacagcgagatcccggatatcccagggatttaatgccaccccccgacttagccacaagtcccacgaaatctccatttaaaattcctcctgtgacattcattaacgaaggaccatttaaggactgccagcaggccaaggaggctgggcatagtgtgaatggaattttctgggcggagtacagaggggggagctactcattgcgtgcagttcagatgatgattaagcccatagactag

SEQ ID NO: 148670 - DNA, 345 bp, Artificial Sequence
  derived and/or modified sequence
atgaagacattcacctggacgttaggcgtactgttttttcttttagtggacacagggcactgtagaggtggtcagttcaagataaaaaagatcaatcagcggcgctatccccgggcaacggacggcaaggaggaggccaaaaagtgcgcctacacattcctcgtccccgaacagcgcattactgggcccatctgcgtgaatacaaaaggacaggatgctagtactatcaaagacatgataactcgcatggatttggagaatcttaaagatgtgctctcaaggcagaagcgcgaaatcgatgtgctgcagctggtggtcgacgtggacgggaatatcgtgaactag

SEQ ID NO: 148671 - DNA, 2289 bp, Artificial Sequence
  derived and/or modified sequence
agacagagcaaagccacaacgctttctctgctggattaaagacggcccacagaccagaacttccactatactacttaaaattacataggtggcttgtcaaattcaattgattagtattgtaaaaggaaaaagaagttccttcttacagcttggattcaacggtccaaaacaaaaatgcagctgccattaaagtcacagatgaacaaacttctacactgatttttaaaatcaagaataagggcagcaagtttctggattcactgaatcaacagacacaaaaagacatcattttacaacctcatttcaaaatgaagacttttacctggaccctaggtgtgctattcttcctactagtggacactggacattgcagaggtggacaattcaaaattaaaaaaataaaccagagaagataccctcgtgccacagatggtaaagaggaagcaaagaaatgtgcatacacattcctggtacctgaacaaagaataacagggccaatctgtgtcaacaccaaggggcaagatgcaagtaccattaaagacatgatcaccaggatggaccttgaaaacctgaaggatgtgctctccaggcagaagcgggagatagatgttctgcaactggtggtggatgtagatggaaacattgtgaatgaggtaaagctgctgagaaaggaaagccgtaacatgaactctcgtgttactcaactctatatgcaattattacatgagattatccgtaagagggataattcacttgaactttcccaactggaaaacaaaatcctcaatgtcaccacagaaatgttgaagatggcaacaagatacagggaactagaggtgaaatacgcttccttgactgatcttgtcaataaccaatctgtgatgatcactttgttggaagaacagtgcttgaggatattttcccgacaagacacccatgtgtctcccccacttgtccaggtggtgccacaacatattcctaacagccaacagtatactcctggtctgctgggaggtaacgagattcagagggatccaggttatcccagagatttaatgccaccacctgatctggcaacttctcccaccaaaagccctttcaagataccaccggtaactttcatcaatgaaggaccattcaaagactgtcagcaagcaaaagaagctgggcattcggtcagtgggatttatatgattaaacctgaaaacagcaatggaccaatgcagttatggtgtgaaaacagtttggaccctgggggttggactgttattcagaaaagaacagacggctctgtcaacttcttcagaaattgggaaaattataagaaagggtttggaaacattgacggagaatactggcttggactggaaaatatctatatgcttagcaatcaagataattacaagttattgattgaattagaagactggagtgataaaaaagtctatgcagaatacagcagctttcgtctggaacctgaaagtgaattctatagactgcgcctgggaacttaccagggaaatgcaggggattctatgatgtggcataatggtaaacaattcaccacactggacagagataaagatatgtatgcaggaaactgcgcccactttcataaaggaggctggtggtacaatgcctgtgcacattctaacctaaatggagtatggtacagaggaggccattacagaagcaagcaccaagatggaattttctgggccgaatacagaggcgggtcatactccttaagagcagttcagatgatgatcaagcctattgactgaagagagacactcgccaatttaaatgacacagaactttgtacttttcagctcttaaaaatgtaaatgttacatgtatattacttggcacaatttatttctacacagaaagtttttaaaatgaattttaccgtaactataaaagggaacctataaatgtagtttcatctgtcgtcaattactgcagaaaattatgtgtatccacaacctagttattttaaaaattatgttgactaaatacaaagtttgttttctaaaatgtaaatatttgccacaatgtaaagcaaatcttagctatattttaaatcataaataacatgttcaagatacttaacaatttatttaaaatctaagattgctctaacgtctagtgaaaaaaatatttttaaaatttcagccaaataatgcattttatttataaaaatacagacagaaaattagggagaaacctctagttttgccaatagaaaatgcttcttccattgaataaaagttatttcaaattgaa

SEQ ID NO: 148672 - DNA, 843 bp, Artificial Sequence
  derived and/or modified sequence
atgaagaccttcacctggaccctgggcgtgctcttcttcctgctggtggacaccggccactgccggggcggccagttcaagatcaagaagatcaaccagaggcgctaccccaggaccatcaaggacatgatcaccaggatggacctggagaacctgaaggatgtgctgagccggcagaagcgggagattgatgtgctgcagctggtggtggatgtggatggcaacatcgtgaatgaggtgaagctgctgaggaaggagagcaggaacatgaacagccgggtgacccagctgtacatgcagctgctgcacgagatcatcaggaagagggacaacagcctggagctgagccagctggagaacaagatcctgaatgtgaccacagagatgctgaagatggccacccgctaccgggagctggaggtgaagtatgccagcctgacagacctggtgaacaaccagagcgtgatgatcaccctgctggaggagcagtgcctgcgcatcttcagccggcaggacacccacgtgtccccacccctggtgcaggtggtgccccagcacatccccaacagccagcagtacaccccaggcctgctgggcggcaatgagatccagagggaccccggctacccccgggacctgatgcctcctccagacctggccaccagccccaccaagagccccttcaagatcccccctgtgaccttcatcaatgaaggccccttcaaggactgccagcaggccaaggaggccggccacagcgtgaatggcatcttctgggccgagtaccggggcggcagctacagcctgcgggctgtgcagatgatgatcaagcccattgattag

SEQ ID NO: 148673 - DNA, 345 bp, Artificial Sequence
  derived and/or modified sequence
atgaagaccttcacctggaccctgggcgtgctcttcttcctgctggtggacaccggccactgccggggcggccagttcaagatcaagaagatcaaccagaggcgctacccccgggccacagatggcaaggaggaggccaagaagtgtgcctacaccttcctggtgcctgagcagaggatcaccggccccatctgtgtgaacaccaagggccaggatgccagcaccatcaaggacatgatcaccaggatggacctggagaacctgaaggatgtgctgagccggcagaagcgggagattgatgtgctgcagctggtggtggatgtggatggcaacatcgtgaactag

SEQ ID NO: 148674 - DNA, 1476 bp, Artificial Sequence
  derived and/or modified sequence
atgaagaccttcacctggaccctgggcgtgctgttcttcctgctggtcgacacaggccattgcaggggcggacaattcaagattaaaaaaataaaccagagacgttacccacgggcaaccgacggaaaagaagaggccaagaaatgcgcttatacgttcctggttccagagcagcggattactgggccaatctgcgtaaataccaagggccaggacgcctccacgattaaggatatgattactaggatggatcttgaaaatctgaaagatgttctcagtcggcagaagagagagatcgatgtcttgcagctggtggtggatgttgatggaaatatcgtcaacgaggtcaaactgcttaggaaagaatctcggaacatgaacagtagggtgacacagctctacatgcagcttctccatgaaattatcagaaagcgagacaatagcctggagctttctcagctcgaaaataagatcctgaatgttactacagagatgttgaagatggctactcggtacagggaactggaagtgaagtatgcctcactgaccgacctggtgaataatcagagcgtgatgattactctgctggaggagcagtgcctgcgtatttttagccgacaggatacacatgtctctcctcccttggtgcaagttgtcccccagcacatcccgaattctcagcagtataccccaggtctgctgggtggcaatgaaattcagagggaccccggctatccgagggatctgatgccgcctccagatctcgcaaccagtccaacaaaatcaccttttaagattccccctgtcacgtttatcaatgagggtccctttaaagattgtcagcaagctaaggaagccggacattcagtgagcggcatatacatgattaagcccgagaattccaatgggccgatgcaactgtggtgtgagaacagcctggaccccggaggctggaccgtcatccagaagcggaccgatggctccgtcaatttttttcgcaactgggaaaactacaagaaggggtttggaaacatcgatggcgaatactggctgggcctcgagaatatttatatgctgtccaaccaagacaattataagcttctgatcgagttggaggattggtcagacaaaaaagtgtacgccgaatactcttcatttagactggagccagaaagtgaattctatcggctgagactcggtacataccagggaaacgctggcgacagcatgatgtggcacaatggtaagcagttcacaacccttgatagggataaggatatgtacgcaggaaattgtgcccactttcacaagggagggtggtggtataatgcatgcgcacatagcaacttgaatggcgtgtggtatcgtggaggccactatcggagcaagcatcaggacggaatattctgggcagagtatcggggtggtagctatagtctgcgagccgtccagatgatgatcaaaccaatcgactag

SEQ ID NO: 148675 - DNA, 843 bp, Artificial Sequence
  derived and/or modified sequence
atgaagaccttcacctggaccctgggcgtgctgttcttcctgctggtggatactggccattgtaggggtgggcaatttaagatcaagaaaattaaccagcgccgctatcctagaactattaaggatatgattactcgtatggatttggagaacttgaaggacgtgttgtctagacagaagagggaaattgacgttttgcagttagtggtagacgtggatggcaacatcgtgaatgaagtgaaactcctccgtaaagagagtcggaatatgaatagccgcgtgacgcagctctatatgcagctactgcacgaaatcatacgcaagagagataactctctggagttgagtcaactggagaacaagattctcaacgtgacgacagagatgctaaagatggctactagataccgggagctggaggtcaaatacgccagtctcactgatttggtgaataatcagagcgttatgattacacttctggaggagcaatgcctccggattttcagccggcaggacacccacgtgtcaccaccacttgtgcaggttgtcccccagcacattcccaacagtcagcaatatactcctggtctgttgggggggaatgagatccaaagggatccaggctaccctcgggatctgatgccgcctcctgatttggccacttcccccaccaagagcccgttcaagataccaccagtcacttttataaatgaaggacccttcaaggattgccagcaagccaaagaggccgggcacagcgtgaacggcattttttgggcagagtataggggtggtagttactcacttcgcgccgtgcagatgatgataaagcctatcgattag

SEQ ID NO: 148676 - DNA, 345 bp, Artificial Sequence
  derived and/or modified sequence
atgaagaccttcacctggaccctgggcgtgctgttcttcctgctggtcgacactggccactgtaggggcggacaatttaagatcaagaagattaatcagcggagatatcccagagccacagatgggaaagaagaggccaaaaaatgcgcctacacttttctggtcccagagcagagaattaccggcccgatttgcgttaatacaaaggggcaggacgcatccacgataaaagacatgatcactcgtatggatcttgagaacctaaaggatgtgctttcccgacagaaacgggaaattgacgtgttgcagttggtcgtggatgtggacggcaatatagtcaactag

SEQ ID NO: 148677 - RNA, 1476 nt, Artificial Sequence
  derived and/or modified sequence
augaagaccuucaccuggacccuaggggucuuguuuuuucugcuaguugauacaggccacugccgggggggacaguucaagaucaaaaaaauuaaucaaaggagauacccaagggccaccgacggcaaggaagaagccaaaaaaugugcguacacuuuccugguaccugaacagcgcauaaccggacccaucugugucaacacuaagggccaggaugccagcacaauuaaggacaugaucacuagaauggaucuggaaaaccugaaggacguguuaucacgccagaagagagaaauugacgugcuucagcuuguagucgaugucgacgggaacaucgugaaugaggugaaacuuuugaggaaggagucaaggaauaugaauagcagggucacacagcuguacaugcagcuguugcacgagauaauacguaaacgggauaauucuuuagaacuuucccagcuggaaaacaaaauucugaaugucacgaccgagauguugaaaauggcaacucgguaccgagagcuggaaguuaaguaugccucccuuaccgaucugguuaacaaucaaucuguaaugauaacccuucuagaagaacagugucuccgcaucuuuagcagacaggacacucaugucucaccuccuuuaguccaggucgugccacaacauauacccaauucucagcaguacacccccggacuccucgguggcaaugagauccagagggauccagguuacccuagagauuugaugcccccgcccgaucuggcaacaagucccaccaagaguccauucaaaauaccccccgugacuuucaucaaugaagggcccuuuaaagauugucagcaagcaaaagaggccggccacucugugucagguaucuauaugauuaagccagagaacuccaauggaccaaugcaacuauggugcgaaaauucacucgaccccggcgguuggaccgugauucagaagcggacagaugguucaguuaauuucuucagaaacugggaaaacuauaagaagggauuuggcaacauugacggggaguauuggcuggggcucgagaacaucuacaugcugucuaaucaagauaauuauaagcuccuuaucgaguuggaggauuggagugauaaaaaagucuacgccgaauauuccagcuuuagacuagaaccagaaagcgaguucuauaggcugaggcuugggacauaucagggcaaugcuggcgacucuaugauguggcacaacgguaagcaauucacgacacucgaucgcgauaaggauauguaugccgggaacugcgcacacuuccauaagggaggguggugguauaacgcaugugcccacucaaauuugaauggugucugguauaggggaggccauuacaggagcaaacaucaagaugguauauuuugggcugaauacagaggggguucauauuccuuaagagccgugcagaugaugaucaaacccauugacuag

SEQ ID NO: 148678 - RNA, 1476 nt, Artificial Sequence
  derived and/or modified sequence
augaagaccuuuaccuggacauuaggcguucucuucuuucuucuuguagauacaggucacugucgggggggacaauucaagauuaaaaagauaaaucagcguagauacccuagagccaccgaugggaaggaagaagcuaagaagugcgcuuauacauuucuggucccugagcagcggauuacaggccccauaugcguaaacacuaagggacaggaugccaguaccauuaaagauaugauaacuagaauggauuuggaaaacuuaaaagacguucucagcagacaaaagcgcgagauagaugugcugcagcuggugguggauguugacggaaacauugugaaugaagugaaauugcugaggaaagaaucccgcaacaugaacucuagggugacccagcuuuauaugcaacucuugcaugaaauuauccggaagcgcgacaauucauuggagcucucccaguuagagaacaaaaucuuaaaugucaccaccgaaauguuaaagauggccacccgguaccgcgagcucgagguuaaauacgcuagcuuaacugaccuaguaaauaaucaaagcgucaugauaaccuugcuggaggaacagugccuccgcauauucagccggcaggauacucauguuuccccuccccuugugcagguugucccgcagcacaucccuaauucacagcaauacaccccgggcuuguuagguggcaaugagauacaacgugaucccggguacccuagagaccucaugccuccucccgaucuggcaacuucgccuacuaagaguccauucaagauccccccugugacuuuuaucaaugaaggacccuucaaagacugccaacaagcuaaagaagcuggucacucagugucugggauauauaugauuaaaccagaaaacagcaacggaccaaugcaacuguggugcgagaauagccuagacccagguggauggaccgugauucagaaacguacugacggcaguguaaauuucuuuaggaacugggaaaacuacaaaaaaggguuuggaaacauagauggggaauauuggcucggcuuagaaaauaucuacauguuaagcaaucaagauaacuacaaguugcucauugaguuggaggauuggucagauaagaagguguaugcugaauacucuagcuucaggcuggagcccgaaagugaauuuuacagacuaaggcucggaacauaucagggcaaugcuggcgacucuaugauguggcacaacgguaagcaauucacgacacucgaucgcgauaaggauauguaugccgggaacugcgcacacuuccauaagggaggguggugguauaacgcaugugcccacucaaauuugaauggugucugguauaggggaggccauuacaggagcaaacaucaagaugguauauuuugggcugaauacagaggggguucauauuccuuaagagccgugcagaugaugaucaaacccauugacuag

SEQ ID NO: 148679 - RNA, 1476 nt, Artificial Sequence
  derived and/or modified sequence
augaagaccuucacuuggacacuugggguacucuuuuuccuguugguggacacgggucacugcaggggcggccaauucaaaauuaagaaaaucaaucagcggcguuauccuagagcaacagaugguaaagaagaagcaaaaaaaugugccuauaccuuccucgucccagagcagagaaucacuggccccauauguguuaacaccaaagggcaagaugcaagcaccaucaaggacaugauuacccgaauggaucuggagaaccuuaaggaugugcucagcagacaaaagcgagagauugaugucuugcaguuaguuguagauguggaugggaauaucgugaaugaggucaaacuguugcggaaggagucuaggaacaugaacucccgggucacacagcuuuauaugcaguugcugcacgagaucauucguaaaagggauaacucacucgagcucucgcaacuggagaacaagauccuaaaugugacaaccgaaaugcugaagauggccacacgcuacagggagcucgaagugaaauacgcaucuuugaccgaucugguuaacaaccagagcguuaugaucacacugcuggaggaacagugccugcguaucuuuuccagacaagauacacaugucucucccccacugguccaggucguaccccagcauauucccaauucccagcaguauacuccaggacuccucggcggcaacgaaauccaacgggaccccggguacccucgcgaucucaugccuccuccugaccucgcaacuaguccgacaaagagucccuucaaaaucccuccugucacauucaucaacgagggcccauuuaaagauugucagcaagcuaaggaggcaggacauuccgucaguggaaucuauaugauaaaacccgagaacagcaauggaccgaugcagcuguggugugagaacuccuuagauccagggggcuggacaguuauccagaaaagaacugacggaagcgugaauuuuuuccggaauugggaaaacuacaagaagggcuucgguaacaucgauggcgaauacuggcugggacucgaaaauaucuacaugcucaguaaucaagauaauuacaagcuccugaucgaacuggaggacuggagcgacaagaagguuuacgccgaauauagcucauuucgacucgaacccgaauccgaguuuuaucgauugcgcuuggggaccuaccagggcaaugcaggagauucaaugauguggcauaacggcaagcaguucacgacauuagauagagauaaggauauguaugcugggaauugcgcucacuuucauaagggcggcuggugguacaaugccugugcccacucuaaccuuaacggggucugguaccgggggggacacuauaggaguaagcaucaggacggaauauuuugggcagaauaucggggcggaucguacagccugagagcggugcaaaugaugaucaagcccaucgacuag

SEQ ID NO: 148680 - RNA, 843 nt, Artificial Sequence
  derived and/or modified sequence
augaagacauuuacuuggacccugggcgucuuguucuuccugcucguagacacgggccauugccgcggggggcaguucaagaucaagaagauaaaucagcgaagauacccaagaacuauaaaggacaugauaacaaggauggaccuggaaaaucugaaggaugugcuuucccgucaaaaaagagagaucgacguucugcaacuggucguugacgucgauggaaauaucgucaaugagguuaagcugcugaggaaggaguccagaaauaugaauucaaggguuacccagcucuacaugcagcugcugcacgagauuauuagaaaacgagauaauagccucgagcugagucagcuugaaaacaaaauucuuaacgucacuacagagaugcugaaaauggccacuagauauagggagcuagaggugaaguaugcuucauugacagacuuagugaacaaucagagugucaugauuacccugcucgaagaacagugccugagaauuuucucucgucaggauacucacgugucuccgccgcugguccagguaguuccgcagcauauucccaacucccaacaguauacucccggauuacuaggaggcaaugaaauccaacgcgacccuggcuacccccgggacuuaaugccccccccagauuuggccacuucuccaacaaaaagcccauucaaaauuccaccgguaacguuuaucaacgaaggcccuuucaaagauugucaacaggccaaagaggcuggccacucuguaaacgguauuuucugggcagaauauagagguggcagcuacucucuucgggcugugcagaugaugaucaagccuaucgacuag

SEQ ID NO: 148681 - RNA, 345 nt, Artificial Sequence
  derived and/or modified sequence
augaagaccuucacauggaccuugggcguacuauucuuucuguugguggacacaggacauuguaggggaggucaauuuaagauaaagaaaauuaaccagcgccgguacccacgcgcaaccgacggcaaagaggaggccaagaagugugccuacaccuuccuuguccccgagcaacgaaucacuggucccaucugcguuaacacgaaaggccaggaugcuucuacuauuaaggacaugaucacacggauggaucuggagaaccugaaagacgugcuuagcagacagaaaagggagaucgacguguuacagcugguuguggauguagacggcaauauagucaacuag

SEQ ID NO: 148682 - RNA, 1476 nt, Artificial Sequence
  derived and/or modified sequence
augaagaccuucacuuggacacuugggguacucuuuuuccuguugguggacacgggucacugcaggggcggccaauucaaaauuaagaaaaucaaucagcggcguuauccuagagcaacagaugguaaagaagaagcaaaaaaaugugccuauaccuuccucgucccagagcagagaaucacuggccccauauguguuaacaccaaagggcaagaugcaagcaccaucaaggacaugauuacccgaauggaucuggagaaccuuaaggaugugcucagcagacaaaagcgagagauugauguucugcaacucgugguggaugucgacggaaauauugugaaugaagugaaacuucuccggaaagaaagucgaaauaugaauagucgugugacacaacucuauaugcagcuauugcaugagaucauucgaaaacgcgacaauagucuggaacugucucaauuagaaaacaaaauccuaaaugucaccacggaaauguugaaaauggcaacaagguaccgagaacucgaagugaaauaugccuccuugaccgacuuaguaaacaaucagucagucaugaucacucuucuggaggagcagugccucagaaucuucucacggcaggauacccaugucagccccccacucguccagguagucccacaacacauucccaauucccagcaauacacgccaggcuugcuuggcggaaaugagauccaacgcgaucccggguacccaagagauuuaaugccacccccagaucuggccacaagcccuacuaaaagccccuuuaagauaccaccugugaccuuuauuaacgagggcccauucaaggacugccagcaggcuaaagaggcaggacacagcguguccggcaucuacaugaucaagcccgaaaacucuaacggaccaaugcaacuguggugugagaauagccuggauccuggcggguggaccgugauucagaaacguacugauggaagugugaacuuuuuucgaaauugggagaacuauaaaaaggguuucggcaauaucgauggggaauacuggcuggggcuugagaacaucuauaugcuauccaaccaagauaacuauaaguugcugauugaauuagaggacugguccgauaaaaaaguguacgcagaauacaguagcuuuagacuugaaccagaaucggaauuuuauagacugcgacugggaaccuaccagggcaaugcaggagauucaaugauguggcauaacggcaagcaguucacgacauuagauagagauaaggauauguaugcugggaauugcgcucacuuucauaagggcggcuggugguacaaugccugugcccacucuaaccuuaacggggucugguaccgggggggacacuauaggaguaagcaucaggacggaauauuuugggcagaauaucggggcggaucguacagccugagagcggugcaaaugaugaucaagcccaucgacuag

SEQ ID NO: 148683 - RNA, 843 nt, Artificial Sequence
  derived and/or modified sequence
augaaaacauucacuuggaccuugggugugcuguucuuuuuguugguggauacuggacauugcagaggcgggcaauuuaagauaaaaaagauuaaucagaggcgcuauccucggaccauuaaggauaugauaacacggauggaucuggaaaauuugaaggaugucuugagcaggcagaagagggagaucgaugugcuucagcucgugguggacguggauggcaauaucguaaacgaagugaaacuccuccgaaaagaaucccggaauaugaauucgcgcgugacucagcucuauaugcaauuacugcacgaaauuauaaggaaaagagacaacagucuggaacucagccagcuagagaacaaaauauuaaacgucacuacagaaauguugaaaauggcuacccgcuacagggaacuagaggucaaauacgcaucuuuaaccgauuuggugaacaaucaaucugucaugauuaccuuauuggaggaacagugccugagaauauuuagucgccaggauacccauguaagucccccacucguacaggugguaccacaacacaucccaaauucccagcaguauacgcccggacuccuggggggaaaugagauacagcgagaccccggcuacccccgugacuugaugcccccccccgaccucgcaaccucuccuaccaagagccccuucaagauuccaccagugaccuuuauuaaugaaggaccguucaaggacugucagcaggcuaaagaagcaggccauaguguaaaugggauauuuugggcagaguaucgaggaggcagcuauucacugcgggcugugcagaugaugaucaagccuaucgacuag

SEQ ID NO: 148684 - RNA, 345 nt, Artificial Sequence
  derived and/or modified sequence
augaaaacuuucacauggacccuuggcguccuuuucuuucuguuagucgacacugggcacugcagaggcggccaguuuaagaucaagaagauuaaucaaagacgauacccucgagcuacugacggcaaggaggaagcuaagaagugcgcauacacauuucucgugccugagcagcgcauuacggggccaauuugcgugaauaccaagggacaggacgcguccacuaucaaggauaugauuaccagaauggaucuagaaaaucugaaagacguacugagccgccagaagagggaaauugaugugcuucaguuggugguggauguggaugguaauauagucaacuag

SEQ ID NO: 148685 - protein, 628 aa, Artificial Sequence
  derived and/or modified sequence
MAAAGAGPGQEAGAGPGPGAVANATGAEEGEMKPVAAGAAAPPGEGISAAPTVEPSSGEAEGGEANLVDVSGGLETESSNGKDTLEGAGDTSEVMDTQAGSVDEENGRQLGEVELQCGICTKWFTADTFGIDTSSCLPFMTNYSFHCNVCHHSGNTYFLRKQANLKEMCLSALANLTWQSRTQDEHPKTMFSKDKDIIPFIDKYWECMTTRQRPGKMTWPNNIVKTMSKERDVFLVKEHPDPGSKDPEEDYPKFGLLDQDLSNIGPAYDNQKQSSAVSTSGNLNGGIAAGSSGKGRGAKRKQQDGGTTGTTKKARSDPLFSAQRLPPHGYPLEHPFNKDGYRYILAEPDPHAPDPEKLELDCWAGKPIPGDLYRACLYERVLLALHDRAPQLKISDDRLTVVGEKGYSMVRASHGVRKGAWYFEITVDEMPPDTAARLGWSQPLGNLQAPLGYDKFSYSWRSKKGTKFHQSIGKHYSSGYGQGDVLGFYINLPEDTETAKSLPDTYKDKALIKFKSYLYFEEKDFVDKAEKSLKQTPHSEIIFYKNGVNQGVAYKDIFEGVYFPAISLYKSCTVSINFGPCFKYPPKDLTYRPMSDMGWGAVVEHTLADVLYHVETEVDGRRSPPWEP

SEQ ID NO: 148686 - protein, 534 aa, Artificial Sequence
  derived and/or modified sequence
MDTQAGSVDEENGRQLGEVELQCGICTKWFTADTFGIDTSSCLPFMTNYSFHCNVCHHSGNTYFLRKQANLKEMCLSALANLTWQSRTQDEHPKTMFSKDKDIIPFIDKYWECMTTRQRPGKMTWPNNIVKTMSKERDVFLVKEHPDPGSKDPEEDYPKFGLLDQDLSNIGPAYDNQKQSSAVSTSGNLNGGIAAGSSGKGRGAKRKQQDGGTTGTTKKARSDPLFSAQRLPPHGYPLEHPFNKDGYRYILAEPDPHAPDPEKLELDCWAGKPIPGDLYRACLYERVLLALHDRAPQLKISDDRLTVVGEKGYSMVRASHGVRKGAWYFEITVDEMPPDTAARLGWSQPLGNLQAPLGYDKFSYSWRSKKGTKFHQSIGKHYSSGYGQGDVLGFYINLPEDTETAKSLPDTYKDKALIKFKSYLYFEEKDFVDKAEKSLKQTPHSEIIFYKNGVNQGVAYKDIFEGVYFPAISLYKSCTVSINFGPCFKYPPKDLTYRPMSDMGWGAVVEHTLADVLYHVETEVDGRRSPPWEP

SEQ ID NO: 148687 - protein, 489 aa, Artificial Sequence
  derived and/or modified sequence
MTNYSFHCNVCHHSGNTYFLRKQANLKEMCLSALANLTWQSRTQDEHPKTMFSKDKDIIPFIDKYWECMTTRQRPGKMTWPNNIVKTMSKERDVFLVKEHPDPGSKDPEEDYPKFGLLDQDLSNIGPAYDNQKQSSAVSTSGNLNGGIAAGSSGKGRGAKRKQQDGGTTGTTKKARSDPLFSAQRLPPHGYPLEHPFNKDGYRYILAEPDPHAPDPEKLELDCWAGKPIPGDLYRACLYERVLLALHDRAPQLKISDDRLTVVGEKGYSMVRASHGVRKGAWYFEITVDEMPPDTAARLGWSQPLGNLQAPLGYDKFSYSWRSKKGTKFHQSIGKHYSSGYGQGDVLGFYINLPEDTETAKSLPDTYKDKALIKFKSYLYFEEKDFVDKAEKSLKQTPHSEIIFYKNGVNQGVAYKDIFEGVYFPAISLYKSCTVSINFGPCFKYPPKDLTYRPMSDMGWGAVVEHTLADVLYHVETEVDGRRSPPWEP

SEQ ID NO: 148688 - DNA, 2599 bp, Artificial Sequence
  derived and/or modified sequence
cacagcaacgcgcgcgagagaagagagtattctcgcgagaagtccaggggtggccgtgatggcggcggcaggagcaggacctggccaggaagcgggtgccgggcctggcccaggagcggtcgcaaatgcaacaggggcagaagagggggagatgaagccggtggcagcgggagcagccgctcctcctggagaggggatctctgctgctccgacagttgagcccagttccggggaggctgaaggcggggaggcaaacttggtcgatgtaagcggtggcttggagacagaatcatctaatggaaaagatacactagaaggtgctggggatacatcagaggtgatggatactcaggcgggctccgtggatgaagagaatggccgacagttgggtgaggtagagctgcaatgtgggatttgtacaaaatggttcacggctgacacatttggcatagatacctcatcctgtctacctttcatgaccaactacagttttcattgcaacgtctgccatcacagtgggaatacctatttcctccggaagcaagcaaacttgaaggaaatgtgccttagtgctttggccaacctgacatggcagtcccgaacacaggatgaacatccgaagacaatgttctccaaagataaggatattataccatttattgataaatactgggagtgcatgacaaccagacagagacctgggaaaatgacttggccaaataacattgttaaaacaatgagtaaagaaagagatgtattcttggtaaaggaacacccagatccaggcagtaaagatccagaagaagattaccccaaatttggacttttggatcaggaccttagtaacattggtcctgcttatgacaaccaaaaacagagcagtgctgtgtctactagtgggaatttaaatgggggaattgcagcaggaagcagcggaaaaggacgaggagccaagcgcaaacagcaggatggagggaccacagggaccaccaagaaggcccggagtgaccctttgttttctgctcagcgccttccccctcatggctacccattggaacacccgtttaacaaagatggctatcggtatattctagctgagcctgatccgcacgcccctgaccccgagaagctggaacttgactgctgggcaggaaaacctattcctggagacctctacagagcctgcttgtatgaacgggttttgttagccctacatgatcgagctccccagttaaagatctcagatgaccggctgactgtggttggagagaagggctactctatggtgagggcctctcatggagtacggaaaggtgcctggtattttgaaatcactgtggatgagatgccaccagataccgctgccagactgggttggtcccagcccctaggaaaccttcaagctcctttaggttatgataaatttagctattcttggcggagcaaaaagggaaccaagttccaccagtccattggcaaacactactcttctggctatggacagggagacgtcctgggattttatattaatcttcctgaagacacagagacagccaagtcattgccagacacatacaaagataaggctttgataaaattcaagagttatttgtattttgaggaaaaagactttgtggataaagcagagaagagcctgaagcagactccccatagtgagataatattttataaaaatggtgtcaatcaaggtgtggcttacaaagatatttttgagggggtttacttcccagccatctcactgtacaagagctgcacggtttccattaactttggaccatgcttcaagtatcctccgaaggatctcacttaccgccctatgagtgacatgggctggggcgccgtggtagagcacaccctggctgacgtcttgtatcacgtggagacagaagtggatgggaggcgcagtcccccatgggaaccctgaccaggtccctcttttctgtcaaggactttctgggaataatactgggggttttgtttttgtttttgaactgtctcaaatgttctcccaaagatgctaaaaacacagcctctccttttagcaagttaaaaggctgggtaggactgcgggagactgcctgcctttcaccattttctccccacttccagtgactgctcttattttgtgtaccataagccaacaaccgctgactccaggattgcataagccccctgtgaaatcggtgctgtactgcataccctgccagctgtgacttgttatcctactatattttctaaggagtgaataatattgtccgagtaactaacttatttaaaagacatttccttctgtgggcattgactgtatcccacctgttttccaaggaaatggtaacctgtttctgagaacacctgaaatcaatggctatacattccaaaccaatctaaacgctatttccttttggtgtgggtttggttttgttcattttgaaatacacttttgaacactgagatccgtaaaactactagatctctggaagtgtaattgtgaaagaaacttgcttgcagctttaacaaaatgagaaacttcccaaataaaacttgttttgaagtttatgtgacaaaaaaaaaaaaaaaa

SEQ ID NO: 148689 - DNA, 1887 bp, Artificial Sequence
  derived and/or modified sequence
atggcggccgctggtgccggccccggacaggaggccggtgccggccccggtcccggagcagtggcaaatgcaacaggcgccgaagagggcgagatgaagcctgtcgctgctggggccgccgcccctcccggggagggtatctccgcagccccaactgttgaaccaagctcaggggaggcagaaggcggcgaggctaatctcgtggatgtgagtggaggcctggaaactgaatcttctaacggtaaggatacactggagggagccggggacaccagtgaggtgatggatactcaggctggtagcgtcgatgaggaaaacggaaggcaactgggagaggttgagcttcagtgcggcatttgtaccaaatggttcaccgccgatacctttggcatcgatactagctcttgtctcccattcatgacgaactattcatttcactgcaatgtctgccaccactccggcaatacgtactttttacgtaaacaggcaaatctgaaagaaatgtgcttgtcggccctcgctaacctgacgtggcaatcccgtacacaggacgaacacccaaagactatgttctcaaaagacaaagatattatcccttttatagacaaatactgggagtgtatgacaacccgtcagaggcccggaaagatgacatggcccaacaatatcgtcaagactatgagtaaggagcgggacgtgttcctggtgaaggaacacccagaccctggctccaaagaccctgaggaagattaccctaagttcggccttctggatcaggatctgagcaacatcggccccgcatacgacaatcagaagcagagcagtgcagtgtctacaagtggcaatttgaatggcgggatagcagccgggagctctggaaaggggaggggagccaagagaaagcaacaggacgggggcacaacagggacgactaaaaaggccagaagcgatcctctgtttagcgctcagcggcttcctcctcatgggtatccactggagcatcctttcaataaggatggctatcggtatattctcgccgagcctgatccccatgctccagaccccgagaaacttgagctggactgctgggccggtaagccaatccccggggacctctacagggcatgcctgtacgaacgcgtcctgttagctcttcacgaccgggccccccaacttaagatttctgacgatcggttgacggtcgtgggcgagaagggttacagcatggtcagagcatctcacggggtgaggaagggcgcctggtactttgagatcacagtcgacgagatgcccccagatacagccgcacggctgggctggtcgcagcctctgggcaacctgcaggcccctttagggtacgacaaattttcatactcctggcgctccaaaaaggggaccaaattccatcagtctatcggaaaacattactcctcaggctacggccagggtgacgtcttgggcttctacattaatctccccgaggatacagagaccgctaaatctttaccggacacgtataaagataaggccttaataaagtttaagagttacttgtattttgaagagaaggatttcgtggataaggccgagaaatccctgaagcaaactccccattccgagatcatcttttacaagaacggtgtgaaccagggtgtggcgtacaaggacatcttcgagggggtatactttccagcaatatcactctacaagtcttgtacagtgtccattaattttggtccatgtttcaaataccctcctaaggatttgacgtatcgacccatgtctgacatggggtggggagcagtggtggaacatacactggctgatgtgctgtatcatgtcgaaactgaagtggacggtaggaggtctccaccttgggagccatag

SEQ ID NO: 148690 - DNA, 1887 bp, Artificial Sequence
  derived and/or modified sequence
atggctgctgctggggccggccctggccaggaggccggggccggccctggccctggagctgtggccaatgccactggagctgaggagggggagatgaagcctgtggccgccggggccgccgcccctcctggagagggcatctctgctgcccccaccgtggagcccagcagtggagaggccgagggcggggaggccaacctggtggatgtgtctgggggcctggagacagagagcagcaatggcaaggacaccctggagggcgctggggacaccagcgaggtgatggacacccaggccggctctgtggatgaagaaaatggccggcagctgggggaggtggagctgcagtgtggcatctgcaccaagtggttcaccgctgacacctttggaattgacaccagcagctgcctgcccttcatgaccaactacagcttccactgcaatgtgtgccaccacagcggcaacacctacttcctgaggaagcaggccaacctgaaggagatgtgcctgagcgccctggccaacctgacctggcagagcaggacccaggatgagcaccccaagaccatgttcagcaaggacaaggacatcatccccttcatcgacaagtactgggagtgcatgaccacccggcagaggcctgggaagatgacctggcccaacaacatcgtgaagaccatgagcaaggagagagatgtgttcctggtgaaggagcacccagaccccggcagcaaggaccctgaggaggactaccccaagtttggcctgctggaccaggacctgagcaacatcggccctgcctatgacaaccagaagcagagcagcgctgtgtccaccagcggcaacctgaatggaggcattgctgctggcagcagcggcaagggccgcggggccaagaggaagcagcaggacggcggcaccaccggcaccaccaagaaggcccggagtgaccccctcttcagcgcccagaggctgcccccccacggctaccccctggagcaccccttcaacaaggatggctaccgctacatcctggccgagccagacccccacgccccagaccctgagaagctggagctggactgctgggccggcaagcccatccctggggacctgtaccgggcctgcctgtatgaaagagtgctgctggccctgcatgaccgggccccccagctgaagatcagtgatgaccggctgactgtggtgggggagaagggctacagcatggtgcgggccagccacggcgtgaggaagggggcctggtactttgagatcaccgtggatgagatgcccccagacacagctgcccggctgggctggagccagcccctgggcaacctgcaggcccccctgggctatgacaagttctcctacagctggaggagcaagaagggcaccaagttccaccagagcatcggcaagcactacagcagcggctacggccagggagatgtgctgggcttctacatcaacctgcctgaggacacagaaacagccaagagcctgcctgacacctacaaggacaaggccctgatcaagttcaagagctacctgtactttgaggagaaggactttgtggacaaggccgagaagagcctgaagcagaccccccacagcgagatcatcttctacaagaatggagtgaaccagggcgtggcctacaaggacatctttgagggcgtgtacttccctgccatcagcctgtacaagagctgcaccgtgtccatcaactttggcccctgcttcaagtacccacccaaggacctgacctaccggcccatgtctgacatgggctggggcgctgtggtggagcacaccctggctgatgtgctgtaccacgtggagacagaggtggatggaagaagaagccccccctgggagccctag

SEQ ID NO: 148691 - DNA, 1887 bp, Artificial Sequence
  derived and/or modified sequence
atggccgccgccggcgccggccccggccaggaggccggcgccggcccaggccccggcgccgtagccaacgccacaggcgcagaagagggagagatgaaacctgttgccgccggagccgccgctcccccaggggaagggatctccgcggcgcctacagtggaaccctctagcggcgaagctgagggtggagaagccaacttggtggatgtaagcggggggttggagaccgaatcctccaacggcaaagacacactggaaggcgcaggggatacatccgaagttatggatacgcaggctggctcagtggacgaggaaaatggaagacagttgggggaggttgaactacagtgtggaatttgcaccaagtggttcaccgctgacacattcggcattgacacaagttcgtgcttgccatttatgactaattatagttttcattgcaacgtgtgccaccatagcggaaatacctactttctccgtaagcaggcgaatttgaaggagatgtgtctcagcgctttagctaatctcacttggcagtcccggactcaggatgagcacccaaaaactatgttctccaaggataaggacatcattcctttcattgataaatactgggagtgcatgaccacccgccagaggccggggaagatgacttggcccaacaacatcgtcaagactatgtctaaggagcgtgacgtgttcctggtcaaggaacatcccgaccccggctccaaagacccagaagaggattatcccaaattcggtctgcttgatcaggacttaagtaacattggccctgcctatgataatcagaagcagagcagcgccgtgtccacgtccgggaatttgaatggcggcattgcagcaggctctagtggtaaaggccggggcgccaagagaaagcaacaggacggaggcacgactggaacaactaaaaaggcccgttccgacccattgttctcggctcagaggctaccaccccatggctacccgctcgagcacccatttaacaaggacggctaccgatatatcctggcggaacctgatccgcatgcacccgacccggagaaactggagctggattgctgggcaggaaaacctatccccggagacctatatcgagcttgtctgtacgaacgggtcctgctcgccctgcacgatcgagccccgcagttaaagatcagcgatgatagacttactgtcgtgggcgaaaaggggtattccatggttcgcgcatcccatggggtgcgtaagggagcatggtatttcgagatcaccgttgacgaaatgcctcctgataccgcagctcggctgggatggtcacagcctcttggaaacctgcaggcccccttgggatacgacaaattttcatattcatggaggtcaaagaaagggactaagttccatcagagcattggaaaacattactctagcgggtacggtcaaggcgacgtactgggcttctatatcaatctgccagaggataccgaaaccgctaaatcgctgcccgacacttataaggacaaggccttgattaagttcaagagttacttatactttgaggaaaaagacttcgtggataaagcagagaaatccctgaagcagactccgcattctgagatcatattctacaaaaatggcgtgaaccagggcgtcgcttataaagacatctttgagggagtgtattttccagcaatttccctgtataagagctgcaccgttagcataaatttcggcccctgtttcaagtatccaccaaaggatctgacctacaggccaatgtcagatatggggtggggcgcagtggtcgagcacactctggccgatgtgctgtaccacgtagagactgaggtagacgggcgtaggagtcccccttgggagccatag

SEQ ID NO: 148692 - DNA, 1887 bp, Artificial Sequence
  derived and/or modified sequence
atggcagctgcgggagctgggccaggacaagaagcaggagcgggacctggccctggggctgtggccaatgccacgggtgccgaagagggagaaatgaagccagttgctgccggagccgcagcaccccctggcgaggggatatctgcggcacccactgtggagccctctagcggagaggcagaaggaggcgaggccaatctagtcgatgtgagtggcggactagagacagaaagttccaatggcaaggacacactggagggcgcaggcgacacctccgaagtgatggacacacaggctgggtctgtcgatgaagaaaacggcaggcagctgggcgaagtcgagctccagtgcggaatctgtacgaaatggtttaccgctgatacatttgggattgacacctcatcatgtctgcccttcatgacaaactactcttttcactgtaacgtatgccatcactccgggaatacctactttctgaggaaacaggccaaccttaaggaaatgtgtctgagcgcccttgccaatctcacttggcagagtcgaactcaggatgagcatcctaaaacaatgttctccaaagataaggatatcattccatttatcgataagtattgggaatgtatgacaacaaggcagagacctggcaagatgacttggcccaacaatatagtcaaaaccatgtccaaggagagggatgtgtttctggtgaaggagcatccagaccctggttctaaagaccccgaagaggattacccaaagttcggactcctcgaccaggacctctccaatatcggccctgcctacgataaccagaagcaaagctcagcagtgtccacatctggaaatctgaatgggggaattgccgcaggttcctctggtaaagggagaggcgctaagaggaaacagcaggacggaggcacgacaggcacaaccaagaaggccaggagcgatccactgttttcagctcagagactgccccctcacggctatcctctggagcacccctttaataaagatggctaccggtacattttggctgaaccggatccccatgcgcctgacccagagaagttggaattagactgctgggcaggcaagcctatcccgggagatctgtacagggcctgcctttatgaacgcgtccttctcgctctgcacgaccgcgcaccccagctgaagatctccgatgaccgtttgacagtggtcggcgagaagggctactctatggttcgagcaagtcacggtgttcgaaaaggtgcctggtatttcgagattactgtggacgagatgcctccagacactgcggcacgtctaggctggagccaacccctgggtaatctccaagctcctctcggatatgacaaattctcatactcatggaggtcaaaaaaaggcaccaaattccaccaatcaatcgggaaacactactcctctggctatggacagggcgatgtccttggattttatataaacctccctgaggatacagaaacggcaaagtctcttccggacacctataaggacaaggctttgatcaagtttaagagctacctgtacttcgaggaaaaggattttgtggacaaggccgaaaagagccttaagcagaccccgcatagcgagattattttttacaagaacggcgtaaaccagggcgtagcctataaagatatattcgagggcgtttactttcctgcaatatccctctacaaatcttgtacagtctctattaacttcggtccatgctttaaatacccaccaaaggatttaacctacagacccatgagtgatatgggttggggtgccgttgtggagcatacactggctgacgtgctgtatcatgtcgagaccgaggtagacggccgaaggtcccctccatgggagccctag

SEQ ID NO: 148693 - DNA, 2835 bp, Artificial Sequence
  derived and/or modified sequence
gcagaatatccagtcgtagccacgaaaatacgccgcgtcagtccctgactcgaaaggaagtcctccagagagccgcactaaccatctagcttcctccaccttcagcctgccaggcccgcggccaccgccggcgcgggaggccggcccacctctgcccgcgcgcctggccttaaagcggtcgtggaattatgcttcctcaggcaggcggtggacgcaccgcgggctttttctgtttgaagactacagcgtcacacagcaacgcgcgcgagagaagagagtattctcgcgagaagtccaggggtggccgtgatggcggcggcaggagcaggacctggccaggaagcgggtgccgggcctggcccaggagcggtcgcaaatgcaacaggggcagaagagggggagatgaagccggtggcagcgggagcagccgctcctcctggagaggggatctctgctgctccgacagttgagcccagttccggggaggctgaaggcggggaggcaaacttggtcgatgtaagcggtggcttggagacagaatcatctaatggaaaagatacactagaaggtgctggggatacatcagaggtgatggatactcaggcgggctccgtggatgaagagaatggccgacagttgggtgaggtagagctgcaatgtgggatttgtacaaaatggttcacggctgacacatttggcatagatacctcatcctgtctacctttcatgaccaactacagttttcattgcaacgtctgccatcacagtgggaatacctatttcctccggaagcaagcaaacttgaaggaaatgtgccttagtgctttggccaacctgacatggcagtcccgaacacaggatgaacatccgaagacaatgttctccaaagataaggatattataccatttattgataaatactgggagtgcatgacaaccagacagagacctgggaaaatgacttggccaaataacattgttaaaacaatgagtaaagaaagagatgtattcttggtaaaggaacacccagatccaggcagtaaagatccagaagaagattaccccaaatttggacttttggatcaggaccttagtaacattggtcctgcttatgacaaccaaaaacagagcagtgctgtgtctactagtgggaatttaaatgggggaattgcagcaggaagcagcggaaaaggacgaggagccaagcgcaaacagcaggatggagggaccacagggaccaccaagaaggcccggagtgaccctttgttttctgctcagcgccttccccctcatggctacccattggaacacccgtttaacaaagatggctatcggtatattctagctgagcctgatccgcacgcccctgaccccgagaagctggaacttgactgctgggcaggaaaacctattcctggagacctctacagagcctgcttgtatgaacgggttttgttagccctacatgatcgagctccccagttaaagatctcagatgaccggctgactgtggttggagagaagggctactctatggtgagggcctctcatggagtacggaaaggtgcctggtattttgaaatcactgtggatgagatgccaccagataccgctgccagactgggttggtcccagcccctaggaaaccttcaagctcctttaggttatgataaatttagctattcttggcggagcaaaaagggaaccaagttccaccagtccattggcaaacactactcttctggctatggacagggagacgtcctgggattttatattaatcttcctgaagacacagagacagccaagtcattgccagacacatacaaagataaggctttgataaaattcaagagttatttgtattttgaggaaaaagactttgtggataaagcagagaagagcctgaagcagactccccatagtgagataatattttataaaaatggtgtcaatcaaggtgtggcttacaaagatatttttgagggggtttacttcccagccatctcactgtacaagagctgcacggtttccattaactttggaccatgcttcaagtatcctccgaaggatctcacttaccgccctatgagtgacatgggctggggcgccgtggtagagcacaccctggctgacgtcttgtatcacgtggagacagaagtggatgggaggcgcagtcccccatgggaaccctgaccaggtccctcttttctgtcaaggactttctgggaataatactgggggttttgtttttgtttttgaactgtctcaaatgttctcccaaagatgctaaaaacacagcctctccttttagcaagttaaaaggctgggtaggactgcgggagactgcctgcctttcaccattttctccccacttccagtgactgctcttattttgtgtaccataagccaacaaccgctgactccaggattgcataagccccctgtgaaatcggtgctgtactgcataccctgccagctgtgacttgttatcctactatattttctaaggagtgaataatattgtccgagtaactaacttatttaaaagacatttccttctgtgggcattgactgtatcccacctgttttccaaggaaatggtaacctgtttctgagaacacctgaaatcaatggctatacattccaaaccaatctaaacgctatttccttttggtgtgggtttggttttgttcattttgaaatacacttttgaacactgagatccgtaaaactactagatctctggaagtgtaattgtgaaagaaacttgcttgcagctttaacaaaatgagaaacttcccaaataaaacttgttttgaagtttatgtgaca

SEQ ID NO: 148694 - DNA, 2678 bp, Artificial Sequence
  derived and/or modified sequence
atcccgcggctcctggagccctgccgcccgccccctgcgaacccaggccccgccgccaatggctcgccctgcctctgcgccgcttggcccgtcccctctcaagcatatctcggataacgccccttccgcacctttcacgggcggtgggagctgaggctcctgtcgttatctctgatccttgcaccctggcaggaagctggtagctcacactttaacgggaggccttcacatattccagaaaagaaaccactttgcagtgccagactggaagaagtaacggtcactctgaaaacagggtgggagagctgcctctctttgaacctctcccaggaccaactctaacccagggaggcaaacttggtcgatgtaagcggtggcttggagacagaatcatctaatggaaaagatacactagaaggtgctggggatacatcagaggtgatggatactcaggcgggctccgtggatgaagagaatggccgacagttgggtgaggtagagctgcaatgtgggatttgtacaaaatggttcacggctgacacatttggcatagatacctcatcctgtctacctttcatgaccaactacagttttcattgcaacgtctgccatcacagtgggaatacctatttcctccggaagcaagcaaacttgaaggaaatgtgccttagtgctttggccaacctgacatggcagtcccgaacacaggatgaacatccgaagacaatgttctccaaagataaggatattataccatttattgataaatactgggagtgcatgacaaccagacagagacctgggaaaatgacttggccaaataacattgttaaaacaatgagtaaagaaagagatgtattcttggtaaaggaacacccagatccaggcagtaaagatccagaagaagattaccccaaatttggacttttggatcaggaccttagtaacattggtcctgcttatgacaaccaaaaacagagcagtgctgtgtctactagtgggaatttaaatgggggaattgcagcaggaagcagcggaaaaggacgaggagccaagcgcaaacagcaggatggagggaccacagggaccaccaagaaggcccggagtgaccctttgttttctgctcagcgccttccccctcatggctacccattggaacacccgtttaacaaagatggctatcggtatattctagctgagcctgatccgcacgcccctgaccccgagaagctggaacttgactgctgggcaggaaaacctattcctggagacctctacagagcctgcttgtatgaacgggttttgttagccctacatgatcgagctccccagttaaagatctcagatgaccggctgactgtggttggagagaagggctactctatggtgagggcctctcatggagtacggaaaggtgcctggtattttgaaatcactgtggatgagatgccaccagataccgctgccagactgggttggtcccagcccctaggaaaccttcaagctcctttaggttatgataaatttagctattcttggcggagcaaaaagggaaccaagttccaccagtccattggcaaacactactcttctggctatggacagggagacgtcctgggattttatattaatcttcctgaagacacagagacagccaagtcattgccagacacatacaaagataaggctttgataaaattcaagagttatttgtattttgaggaaaaagactttgtggataaagcagagaagagcctgaagcagactccccatagtgagataatattttataaaaatggtgtcaatcaaggtgtggcttacaaagatatttttgagggggtttacttcccagccatctcactgtacaagagctgcacggtttccattaactttggaccatgcttcaagtatcctccgaaggatctcacttaccgccctatgagtgacatgggctggggcgccgtggtagagcacaccctggctgacgtcttgtatcacgtggagacagaagtggatgggaggcgcagtcccccatgggaaccctgaccaggtccctcttttctgtcaaggactttctgggaataatactgggggttttgtttttgtttttgaactgtctcaaatgttctcccaaagatgctaaaaacacagcctctccttttagcaagttaaaaggctgggtaggactgcgggagactgcctgcctttcaccattttctccccacttccagtgactgctcttattttgtgtaccataagccaacaaccgctgactccaggattgcataagccccctgtgaaatcggtgctgtactgcataccctgccagctgtgacttgttatcctactatattttctaaggagtgaataatattgtccgagtaactaacttatttaaaagacatttccttctgtgggcattgactgtatcccacctgttttccaaggaaatggtaacctgtttctgagaacacctgaaatcaatggctatacattccaaaccaatctaaacgctatttccttttggtgtgggtttggttttgttcattttgaaatacacttttgaacactgagatccgtaaaactactagatctctggaagtgtaattgtgaaagaaacttgcttgcagctttaacaaaatgagaaacttcccaaataaaacttgttttgaagttta

SEQ ID NO: 148695 - DNA, 1887 bp, Artificial Sequence
  derived and/or modified sequence
atggccgccgccggcgccggccccggccaggaggccggcgccggccccggccccggcgccgtggccaacgccaccggcgccgaggagggcgagatgaagcccgtggccgccggcgccgccgccccccccggcgagggcatcagcgccgcccccaccgtggagcccagcagcggcgaggccgagggcggcgaggccaacctggtggacgtgagcggcggcctggagaccgagagcagcaacggcaaggacaccctggagggcgccggcgacaccagcgaggtgatggacacccaggccggcagcgtggacgaggagaacggcagacagctgggcgaggtggagctgcagtgcggcatctgcaccaagtggttcaccgccgacaccttcggcatcgacaccagcagctgcctgcccttcatgaccaactacagcttccactgcaacgtgtgccaccacagcggcaacacctacttcctgagaaagcaggccaacctgaaggagatgtgcctgagcgccctggccaacctgacctggcagagcagaacccaggacgagcaccccaagaccatgttcagcaaggacaaggacatcatccccttcatcgacaagtactgggagtgcatgaccaccagacagagacccggcaagatgacctggcccaacaacatcgtgaagaccatgagcaaggagagagacgtgttcctggtgaaggagcaccccgaccccggcagcaaggaccccgaggaggactaccccaagttcggcctgctggaccaggacctgagcaacatcggccccgcctacgacaaccagaagcagagcagcgccgtgagcaccagcggcaacctgaacggcggcatcgccgccggcagcagcggcaagggcagaggcgccaagagaaagcagcaggacggcggcaccaccggcaccaccaagaaggccagaagcgaccccctgttcagcgcccagagactgcccccccacggctaccccctggagcaccccttcaacaaggacggctacagatacatcctggccgagcccgacccccacgcccccgaccccgagaagctggagctggactgctgggccggcaagcccatccccggcgacctgtacagagcctgcctgtacgagagagtgctgctggccctgcacgacagagccccccagctgaagatcagcgacgacagactgaccgtggtgggcgagaagggctacagcatggtgagagccagccacggcgtgagaaagggcgcctggtacttcgagatcaccgtggacgagatgccccccgacaccgccgccagactgggctggagccagcccctgggcaacctgcaggcccccctgggctacgacaagttcagctacagctggagaagcaagaagggcaccaagttccaccagagcatcggcaagcactacagcagcggctacggccagggcgacgtgctgggcttctacatcaacctgcccgaggacaccgagaccgccaagagcctgcccgacacctacaaggacaaggccctgatcaagttcaagagctacctgtacttcgaggagaaggacttcgtggacaaggccgagaagagcctgaagcagaccccccacagcgagatcatcttctacaagaacggcgtgaaccagggcgtggcctacaaggacatcttcgagggcgtgtacttccccgccatcagcctgtacaagagctgcaccgtgagcatcaacttcggcccctgcttcaagtacccccccaaggacctgacctacagacccatgagcgacatgggctggggcgccgtggtggagcacaccctggccgacgtgctgtaccacgtggagaccgaggtggacggcagaagaagccccccctgggagccctag

SEQ ID NO: 148696 - protein, 106 aa, Artificial Sequence
  derived and/or modified sequence
MMTLVPRARTRAGQDHYSHPCPRFSQVLLTEGIMTYCLTKNLSDVNILHRLLKNGNVRNTLLQSKVGLLTYYVKLYPGEVTLLTRPSIQMRLCCITGSVSRPRSQK

SEQ ID NO: 148697 - DNA, 321 bp, Artificial Sequence
  derived and/or modified sequence
atgatgactctggtccctcgcgcaaggactagggctgggcaggaccattacagccacccatgtcctcggttctcgcaggttctgctgacagagggcatcatgacatactgtctcactaagaacctgtcagacgtcaacattctccacagactgctgaaaaatggaaatgtgaggaataccctcctgcaaagcaaggtggggctcctgacatactatgttaagttgtaccctggcgaggtaaccctccttactagaccctccatccagatgcggctctgctgtattactggcagcgtgtcgagaccacgctcccaaaagtag

SEQ ID NO: 148698 - DNA, 321 bp, Artificial Sequence
  derived and/or modified sequence
atgatgacactagtacctagggctagaacccgggcgggtcaagaccactattcacatccctgcccccgctttagccaggtcctgttgactgaagggatcatgacttactgtctaacaaagaacctcagcgacgtcaacatactgcacaggctgcttaagaacggaaacgtgcggaacactctgctccagtctaaggttgggctcctgacatattatgtaaaactgtatccgggggaggtgacattactgacacggccatcaattcagatgcgcctctgttgcataacaggatctgtgtctagaccaagatcacagaagtag

SEQ ID NO: 148699 - DNA, 321 bp, Artificial Sequence
  derived and/or modified sequence
atgatgaccctggtgccccgggcccggacccgggccggccaggaccactacagccacccctgcccccgcttcagccaggtgctgctgacagagggcatcatgacctactgcctgaccaagaacctgagtgatgtgaacatcctgcaccggctgctgaagaatggaaatgtgaggaacaccctgctgcagagcaaggtgggcctgctgacctactacgtgaagctgtacccaggagaggtgaccctgctgacccggcccagcatccagatgaggctgtgctgcatcaccggctctgtgtcccggcccaggagccagaagtag

SEQ ID NO: 148700 - DNA, 321 bp, Artificial Sequence
  derived and/or modified sequence
atgatgaccctggtgccccgggcccggacccgggccggccaggaccattatagtcacccctgtccacgattttctcaggtgctcttgactgaaggtatcatgacttactgcttaacaaagaacctaagcgacgtgaacatcctccacagactgctcaagaatggtaacgtaagaaacacattgctccaatctaaggtggggcttttgacatactacgtgaaactgtatcccggagaagtgactctacttacccggcctagtattcaaatgcgcctctgctgtattactggcagcgtgtccaggccaaggtctcagaagtag

SEQ ID NO: 148701 - DNA, 321 bp, Artificial Sequence
  derived and/or modified sequence
atgatgaccctggtgccccgggcccggacccgggccggccaggaccactactcacacccctgtcctagattcagtcaggtcctgctgactgagggtatcatgacttattgcctcaccaagaacttgagcgacgtcaatatccttcatcgtcttctgaagaatgggaatgtgcggaacacactcttacagtcaaaggtgggccttctcacctattacgtgaagctgtatcctggcgaagtcacacttctaacccgtccatcaattcagatgcggttgtgctgcattacgggaagcgtttctcgaccaagatctcaaaagtag

SEQ ID NO: 148702 - DNA, 321 bp, Artificial Sequence
  derived and/or modified sequence
atgatgacacttgttccaagagccagaacgagggcgggtcaggaccactattcacatccatgtccacgcttttcgcaggtactgctgacagagggaattatgacctattgcctgaccaagaacttgtcagatgtgaatatccttcataggctcctaaagaacggcaatgtcaggaacactctgctgcaaagcaaggtgggcctgctgacctattacgtgaaactctatccgggagaggtaacactcctcacacgcccaagtatacaaatgagactgtgctgcattactggcagcgtatctcggccacgcagtcagaagtag

SEQ ID NO: 148703 - DNA, 321 bp, Artificial Sequence
  derived and/or modified sequence
atgatgacacttgtcccaagggctcggacccgcgctgggcaagaccattactcccatccctgtcccaggttctcccaggtgttactgaccgagggcatcatgacatattgcctgacgaagaatttgagcgacgttaatatccttcaccgactgctaaagaacggtaacgtgagaaacaccctgctgcaatccaaagtcggcctcttgacgtactacgtgaagctataccccggagaagttaccttattgacaagaccaagcattcaaatgagattgtgctgtattacggggtccgtcagccgccctaggtcccagaagtag

SEQ ID NO: 148704 - DNA, 1206 bp, Artificial Sequence
  derived and/or modified sequence
aatatctcaggacccaggaccatgtgatatgggcccaacacctggatgatgttactcttctgcctaggtcatgcgtaaagagggaattagggcatattgcttggcccagtcccgtaatgatatgactctcctgcttgtgccagagccacagaagtgtgcttggtgacataatctttgaggctgtcacatcaccaagattatattgtatcactggaccagcataaagctgacacttctgactatgcccagccttcaaataatactacactgtataattggctcaacacccaggtgatattgttccatttacctgagaccagataaaaagcctaatgatgacgcttgtccccagagccaggacacgtgcaggacaggatcattactctcatccctgccccagattttcacaggtgctgcttacagagggcatcatgacatattgcttgacaaagaacctaagtgatgttaatattctgcataggttgctaaaaaatgggaatgtgagaaataccttgcttcagtccaaagtgggcttgctgacatattatgtgaaactgtacccgggtgaagtgactcttctgactaggcccagcatacaaatgagattatgctgtatcactggctcagtgtcgaggcccagatcacagaagtaattgtgccatatgtggaacaagcagctaagcaatagataacatccatcgtggctctgccttcaaagggaaattttacatatgtcactgggaccatcacccagatgatgtcctgcccactaaaagaattgtgacataacgctgactgcaaaaactgggtaatgcaactctcctctttattctggagtctgccaaaacaagggattatcacatattgcggagtccagcacccaggtaaaattttgtcatatacccagcttcagataccatgcaataatacaactatcatacctggacccaaagaggagagatattttgattctcattgccattcttatggccacaagcaaagtaatggttctcatagtggtataaagttcacacagtattatgacactcccagcgtatcatagaaaatgtgagtagtacaatgagtgttataacagggaacagcaaaccaatgctattgtgattattggattcacacccagctgacgcgactatcattctctcacaagaacagaacctgcaaataaagtactaaatctcaccaaaa

SEQ ID NO: 148705 - DNA, 321 bp, Artificial Sequence
  derived and/or modified sequence
atgatgaccctggtgcccagagccagaaccagagccggccaggaccactacagccacccctgccccagattcagccaggtgctgctgaccgagggcatcatgacctactgcctgaccaagaacctgagcgacgtgaacatcctgcacagactgctgaagaacggcaacgtgagaaacaccctgctgcagagcaaggtgggcctgctgacctactacgtgaagctgtaccccggcgaggtgaccctgctgaccagacccagcatccagatgagactgtgctgcatcaccggcagcgtgagcagacccagaagccagaagtag

SEQ ID NO: 148706 - DNA, 321 bp, Artificial Sequence
  derived and/or modified sequence
atgatgacactcgtgcctcgggcacggacaagagctggccaagaccactactctcatccatgtccaagattctctcaggtactgctcacagagggtattatgacgtattgtcttaccaaaaatctctccgacgtcaacatcttgcacaggctgctaaagaatggtaacgtgcgcaacactttgctgcagagtaaagtgggtctgttgacttactatgtcaaactctaccctggcgaggtgacactgcttaccaggccctccatccagatgagattgtgctgcatcacgggctccgtcagccggcctaggagtcagaaatag

SEQ ID NO: 148707 - DNA, 321 bp, Artificial Sequence
  derived and/or modified sequence
atgatgacgctggtgccaagggcccggacacgggcaggccaggatcactattcgcacccctgccccagatttagtcaggtgttgcttaccgaggggatcatgacgtattgtctgacaaaaaatctcagtgatgtgaatatactgcatcgtctgcttaaaaacggcaatgttcgcaacacccttcttcagtctaaggtcggcctactaacttattacgttaaactttaccctggtgaggtcacattattgacacgcccaagcattcaaatgagactttgttgcatcaccgggtccgtcagccgtccgcgatcacaaaaatag

SEQ ID NO: 148708 - DNA, 321 bp, Artificial Sequence
  derived and/or modified sequence
atgatgaccctggtgccccgggcccggacccgggccggccaggaccattatagtcacccctgtccccgttttagtcaggtgctcctgaccgaaggaatcatgacatactgcttgacgaagaacctgtcagacgtgaacatcctccaccgtttgctcaagaatggaaacgtacggaacactctgctacaatctaaagtcggcctcttgacctattacgtgaagctatacccgggtgaggttacattgctcacaaggccatctattcagatgaggttatgctgcatcacggggagtgtctcccggccccgaagtcagaagtag

SEQ ID NO: 148709 - DNA, 321 bp, Artificial Sequence
  derived and/or modified sequence
atgatgaccctggtgccccgggcccggacccgggccggccaggaccactattcgcacccctgcccacggttctcacaggtgctccttacagagggaattatgacgtattgcttgacaaagaatctgagtgacgtgaatatcctgcataggctgctgaagaatggcaacgtaaggaataccctcctccagagcaaagtcggtctgcttacctactacgttaagctttaccccggagaggttactctgcttactcgcccatctattcagatgaggctgtgctgcataacagggtctgtaagtcgcccccgaagtcagaaatag

SEQ ID NO: 148710 - DNA, 321 bp, Artificial Sequence
  derived and/or modified sequence
atgatgacacttgtccctcgagctcggacacgtgccggtcaggatcattacagccacccttgccccaggttctcacaggttctgctaaccgaaggcattatgacatactgcctaaccaagaatctgtcagatgtgaatatccttcaccgcctgcttaaaaacggcaacgtgcggaatactctattacaatcaaaagtgggacttctgacttactatgtgaagttgtacccaggcgaggtgactctgctcaccaggccttctattcaaatgcgcctttgctgtattacaggcagtgtgtcaaggccccgatcacagaagtag

SEQ ID NO: 148711 - DNA, 321 bp, Artificial Sequence
  derived and/or modified sequence
atgatgacactggttccacgggcacgcacaagagccggacaggatcactattcgcatccatgtcccagatttagtcaggtgcttttgaccgagggcataatgacatactgtcttacaaaaaacctcagtgatgtgaacattctgcatcgcctgctcaagaacggtaatgtgcgcaatacgctgttgcagagcaaagtgggattgctcacgtactacgtgaaactgtatcccggagaggtgaccctgctgactcggccttccatacagatgcggctgtgttgcattaccgggtctgtaagtcgtccccgatcgcaaaagtag

SEQ ID NO: 148712 - DNA, 1294 bp, Artificial Sequence
  derived and/or modified sequence
aatatctcaggacccaggaccatgtgatatgggcccaacacctggatgatgttactcttctgcctaggtcatgcgtaaagagggaattagggcatattgcttggcccagtcccgtaatgatatgactctcctgcttgtgccagagccacagaagtgtgcttggtgacataatctttgaggctgtcacatcaccaagattatattgtatcactggaccagcataaagctgacacttctgactatgcccagccttcaaataatactacactgtataattggctcaacacccaggtgatattgttccatttacctgagaccagataaaaagcctaatgatgacgcttgtccccagagccaggacacgtgcaggacaggatcattactctcatccctgccccagattttcacaggtgctgcttacagagggcatcatgacatattgcttgacaaagaacctaagtgatgttaatattctgcataggttgctaaaaaatgggaatgtgagaaataccttgcttcagtccaaagtgggcttgctgacatattatgtgaaactgtacccgggtgaagtgactcttctgactaggcccagcatacaaatgagattatgctgtatcactggctcagtgtcgaggcccagatcacagaagtaattgtgccatatgtggaacaagcagctaagcaatagataacatccatcgtggctctgccttcaaagggaaattttacatatgtcactgggaccatcacccagatgatgtcctgcccactaaaagaattgtgacataacgctgactgcaaaaactgggtaatgcaactctcctctttattctggagtctgccaaaacaagggattatcacatattgcggagtccagcacccaggtgatgtgagtcttctctgtttctctaagattataatgtatcctgagctcaccatccaggtgatgagactctcctgctctgtttctgcccgcaggtaaaattttgtcatatacccagcttcagataccatgcaataatacaactatcatacctggacccaaagaggagagatattttgattctcattgccattcttatggccacaagcaaagtaatggttctcatagtggtataaagttcacacagtattatgacactcccagcgtatcatagaaaatgtgagtagtacaatgagtgttataacagggaacagcaaaccaatgctattgtgattattggattcacacccagctgacgcgactatcattctctcacaagaacagaacctgcaaataaagtactaaatctca

SEQ ID NO: 148713 - protein, 125 aa, Artificial Sequence
  derived and/or modified sequence
MSPKPRASGPPAKAKETGKRKSSSQPSPSGPKKKTTKVAEKGEAVRGGRRGKKGAATKMAAVTAPEAESGPAAPGPSDQPSQELPQHELPPEEPVSEGTQHDPLSQESELEEPLSKGRPSTPLSP

SEQ ID NO: 148714 - DNA, 378 bp, Artificial Sequence
  derived and/or modified sequence
atgagccccaagcccagagccagcggcccccccgccaaggccaaggagaccggcaagagaaagagcagcagccagcccagccccagcggccccaagaagaagaccaccaaggtggccgagaagggcgaggccgtgagaggcggcagaagaggcaagaagggcgccgccaccaagatggccgccgtgaccgcccccgaggccgagagcggccccgccgcccccggccccagcgaccagcccagccaggagctgccccagcacgagctgccccccgaggagcccgtgagcgagggcacccagcacgaccccctgagccaggagagcgagctggaggagcccctgagcaagggcagacccagcacccccctgagcccctag

SEQ ID NO: 148715 - DNA, 378 bp, Artificial Sequence
  derived and/or modified sequence
atgagtccaaagccgcgggctagtggacccccggcgaaagctaaagagaccggcaaaagaaagtcatcatcccaaccctccccgtccggccctaagaaaaaaacgacaaaggtggccgagaagggagaggcagtgcgcgggggccgccggggcaagaagggcgctgccactaagatggccgccgtgactgcccctgaggcagaaagtggaccagccgctcctggaccttccgaccagccaagtcaggagctgcctcagcacgagctgccaccggaggagcccgtgtccgaaggtacacagcatgacccgttatcacaggagtccgaactggaggaacccctgagcaagggaagacccagcacccctctcagtccatag

SEQ ID NO: 148716 - DNA, 378 bp, Artificial Sequence
  derived and/or modified sequence
atgagccccaagccccgggccagcggccccccagccaaggccaaggagaccgggaagaggaagagcagcagccagcccagccccagcggccccaagaagaagaccaccaaggtggccgagaagggggaggccgtgcggggcggcagaagaggcaagaagggagctgccaccaagatggctgctgtgacagcccctgaggccgagagcggccctgctgcccctggccccagcgaccagcccagccaggagctgccccagcacgagctgcccccagaggagcctgtgtctgagggcacccagcacgaccccctgagccaggagagcgagctggaggagcccctgagcaagggccggcccagcacccccctgagcccctag

SEQ ID NO: 148717 - DNA, 378 bp, Artificial Sequence
  derived and/or modified sequence
atgagccccaagccccgggccagcggcccccccgccaaggccaaggaaaccggcaaaaggaaaagctcctcccagccatcgcctagtggcccaaagaaaaaaactaccaaagtggccgagaaaggggaggccgtcagaggcgggaggagagggaagaagggggccgccacaaagatggctgcggtgactgcccctgaggcggagtccggaccggctgcacctggaccaagcgatcagccttcgcaggagttacctcaacacgaactgccgcccgaagaaccagtgtccgaaggcacccagcacgatccacttagccaagagtctgagctggaggagccgctgtcgaagggcaggccctctactccgctttccccctag

SEQ ID NO: 148718 - DNA, 378 bp, Artificial Sequence
  derived and/or modified sequence
atgagcccgaaacctcgagccagcggcccacctgccaaagctaaagagactgggaaacggaagtcgagtagccagccctcaccgtccgggcctaaaaagaagacaactaaagtagccgaaaagggggaagcggtccgcggaggtcgacggggtaagaagggagcagcaacaaaaatggccgctgtaacggctcccgaggccgaaagcggtcctgctgctcccggaccaagcgatcagccgagccaggagctccctcagcatgagctcccacctgaagagccagtctctgagggcacgcagcacgaccctctgagccaggaatcagagctggaggagccactttcgaaaggtagaccctcgacacctctatctccttag

SEQ ID NO: 148719 - DNA, 550 bp, Artificial Sequence
  derived and/or modified sequence
cgagaggggtatacacagggaggccaggcagcctggagttagtcgaccgttgcgagacgttgagctgcggcagatgagtccaaagccgagagcctcgggacctccggccaaggccaaggagacaggaaagaggaagtcctcctctcagccgagccccagtggcccgaagaagaagactaccaaggtggccgagaagggagaagcagttcgtggagggagacgcgggaagaaaggggctgcgacaaagatggcggccgtgacggcacctgaggcggagagcgggccagcggcacccggccccagcgaccagcccagccaggagctccctcagcacgagctgccgccggaggagccagtgagcgaggggacccagcacgaccccctgagtcaggagagcgagctggaggaaccactgagtaaggggcgcccatctactcccctatctccctgagcagcaactaagtttaggcccagctgccagacctcagagatctcaccagcagggtgcttcccatgttgatgacaataaaatgaatgtgttgcaaaccga

SEQ ID NO: 148720 - DNA, 378 bp, Artificial Sequence
  derived and/or modified sequence
atgtctcccaagccccgggcatctgggcctccagccaaagcgaaagaaacaggcaaaagaaagtcctcctcccagccttcaccttccggccccaagaagaagactacgaaagtggccgagaaaggggaagccgtccgcggcggcagaaggggtaaaaagggcgccgctactaaaatggcagcagtgacagcccctgaagccgagtccggccccgcagcccccggcccctccgatcagcctagtcaggagctgccccagcacgaactgccacccgaggaaccggtcagtgaaggaacgcaacacgatcctctcagccaggagagcgagctggaagagcccctctctaagggccgcccaagcacaccgttgtctccctag

SEQ ID NO: 148721 - DNA, 378 bp, Artificial Sequence
  derived and/or modified sequence
atgagccccaagccccgggccagcggcccccccgccaaggccaaggaaacaggaaaacgtaaatcaagttcacagcccagtccaagtggcccaaagaaaaagaccactaaagtggccgaaaagggtgaggccgtgcgtggaggcaggcggggcaaaaagggtgccgccactaaaatggcagcagtcaccgcccctgaggcggaaagtggccctgcagcacctggaccatctgaccagcctagtcaggaacttccacagcacgagctaccacctgaggagcctgtctcagaagggacccagcacgatcccctgtcgcaggagtccgaattagaggaacccctttcaaagggaaggccatcaactcctctgtctccttag

SEQ ID NO: 148722 - DNA, 378 bp, Artificial Sequence
  derived and/or modified sequence
atgtcacctaaaccgagggcttctggccctcccgcaaaggctaaagagaccggaaaacgtaagtcgtcatcgcagccttctccatcaggcccaaaaaaaaaaacgacaaaagtggctgagaaaggggaagccgtaagagggggtcgcagaggtaaaaagggcgctgctacaaagatggctgccgtcaccgcacccgaagctgagtcaggaccagctgctccaggtccttcagaccagcctagtcaagagcttccacaacatgaacttcctcctgaagaacctgtgtctgaggggactcagcacgaccctcttagtcaggaaagtgaattggaagagcccttatcgaaaggcagacctagcactcccctctcgccatag

SEQ ID NO: 148723 - protein, 144 aa, Artificial Sequence
  derived and/or modified sequence
MPKNKGKGGKNRRRGKNENESEKRELVFKEDGQEYAQVIKMLGNGRLEALCFDGVKRLCHIRGKLRKKVWINTSDIILVGLRDYQDNKADVILKYNADEARSLKAYGELPEHAKINETDTFGPGDDDEIQFDDIGDDDEDIDDI

SEQ ID NO: 148724 - DNA, 1390 bp, Artificial Sequence
  derived and/or modified sequence
agagagtgcgcgtcagcagtttattagagagctctgtagccagcctcttctgcgcacccacctgctgcatcttagttcagtcggctcttagagtagtaaccgccagaaaggagtcggaagaggtctcacgaggctgtcatcaccgccatgcccaagaataaaggtaaaggaggtaaaaacaggcgcaggggtaaaaatgagaatgaatctgaaaaaagagagttggtgtttaaagaggatggacaagagtatgctcaggtaatcaaaatgttgggaaatggacgattggaagcattgtgttttgatggtgtaaagaggttatgccatatcagagggaaattgagaaaaaaggtttggataaatacatcagacattatattggttggtctacgggactatcaggataacaaagctgatgtaattttaaagtacaatgcagatgaagctagaagcctgaaggcatatggcgagcttccagaacatgctaaaatcaatgaaacagacacatttggtcctggagatgatgatgaaatccagtttgacgatattggagatgatgatgaagacattgatgatatctaaattgaaccaagtgtttttacatgacaagttctctgaggatggttctacagttgggattttggccatcatcaaccaagaagagaaattcatttagtgtgtagtttctgaaagcaaactgatttattttcattgttttaaagtatttatttctttaaaagctgaggacactgaattaccttaagttaaatgttaatactttattgttttgatgtaatggaacttaaggataaaagaccataatatttgctgttaaaataaataaacgagtgcctttcctactgtgataacgtcaagtaattggatattttgaatacatttctgcctgataatcatgctgggttctaataagccctacttccacctaatctgtttacagtcttttggtatgtttcagttacttagatggtctcataaggtttctgatacaatttgaagacagaaatctgcatttagaatcagaaaacatggacatatttttcatatttatctagtcatatgtaattttatgctaacattgatagtttataaatccttttcatcctttgtgcctcggttattaaggaaaaaaaaatgtccaacatacagtttttaaagtgtggcagttttgagtagtaacttagaatgtataagattaagagttaaagaaaccgaacaataagtggcaaccaattatcttaacattggaaatactggggtgccattttgttttcaaaagttattcattgtaatccactgttttggctttcatgaacaagtaaattacagtgtataaatgaaaagcaatttcataataaattctataaactga

SEQ ID NO: 148725 - DNA, 435 bp, Artificial Sequence
  derived and/or modified sequence
atgcccaagaataagggtaaaggcggcaaaaacagacgaaggggcaagaatgaaaatgagtcagaaaaaagagagcttgtgtttaaagaggatggccaagaatacgcacaggtcatcaagatgctgggtaatgggagattagaggccctctgtttcgacggggtaaagcgcctgtgtcatatccgaggcaaactgaggaagaaggtgtggatcaacacttccgacataattttggtgggactacgagattatcaggacaataaggctgatgttatactgaagtacaacgccgacgaggccagaagcctcaaggcttatggtgagttaccagaacacgccaagattaatgaaaccgacacttttggccctggggacgatgatgaaatccagttcgacgacatcggtgacgatgacgaggacatcgatgatatctag

SEQ ID NO: 148726 - DNA, 435 bp, Artificial Sequence
  derived and/or modified sequence
atgcccaagaacaagggcaaaggaggcaagaacagaagaagaggcaagaatgaaaatgaaagtgagaagcgggagctggtgttcaaggaggatggccaggagtatgcccaggtgatcaagatgctgggcaatggccgcctggaggccctgtgctttgatggagtgaagaggctgtgccacatccggggcaagctgaggaagaaggtgtggatcaacaccagtgacatcatcctggtgggcctgcgggactaccaggacaacaaggcagatgtgatcctgaagtacaatgctgatgaggcccggagcctgaaggcctacggggagctgcctgagcacgccaagatcaatgaaacagacacctttggacctggagatgatgatgagatccagtttgatgacattggagatgatgatgaagatattgatgacatctag

SEQ ID NO: 148727 - DNA, 435 bp, Artificial Sequence
  derived and/or modified sequence
atgcccaagaacaagggcaagggcggcaagaaccggcggcggggcaagaacgagaacgagagtgagaagcgagagctagtctttaaagaggacgggcaggagtacgcacaggttattaaaatgttgggtaacggtagactggaggctctttgctttgacggtgttaaacggctttgtcacatccggggtaagttacgcaagaaggtgtggatcaatacttccgatatcattctggttgggctgcgcgattaccaagataataaggcagacgtcattctaaagtacaacgctgacgaggctcgcagtctgaaagcgtatggtgagctccctgaacacgccaaaataaatgaaactgatacgtttggccctggggacgatgatgagattcaatttgacgatatcggcgacgacgatgaggacatcgatgacatctag

SEQ ID NO: 148728 - DNA, 435 bp, Artificial Sequence
  derived and/or modified sequence
atgccaaagaacaagggcaaagggggtaagaatcgcagaagaggaaagaatgagaatgaaagcgaaaaacgagaactggtgttcaaagaagatggtcaggaatatgcccaggtcattaaaatgctggggaatggtcggctggaggccttatgcttcgatggcgtgaagcgcttgtgtcatattcggggaaaactgcgtaagaaagtctggatcaatactagtgatatcattctggtaggactgcgggattaccaagataataaggcagacgtcatcctgaaatacaacgccgacgaagctagaagtctgaaggcatatggagaattgccggaacacgcaaagattaatgagacagacaccttcggccctggagacgatgacgagatccagtttgacgacatcggggacgacgatgaggatattgatgatatctag

SEQ ID NO: 148729 - DNA, 435 bp, Artificial Sequence
  derived and/or modified sequence
atgcccaagaacaagggcaagggcggcaagaacagaagaagaggcaagaacgagaacgagagcgagaagagagagctggtgttcaaggaggacggccaggagtacgcccaggtgatcaagatgctgggcaacggcagactggaggccctgtgcttcgacggcgtgaagagactgtgccacatcagaggcaagctgagaaagaaggtgtggatcaacaccagcgacatcatcctggtgggcctgagagactaccaggacaacaaggccgacgtgatcctgaagtacaacgccgacgaggccagaagcctgaaggcctacggcgagctgcccgagcacgccaagatcaacgagaccgacaccttcggccccggcgacgacgacgagatccagttcgacgacatcggcgacgacgacgaggacatcgacgacatctag

SEQ ID NO: 148730 - protein, 299 aa, Artificial Sequence
  derived and/or modified sequence
MSSIKIECVLPENCRCGESPVWEEVSNSLLFVDIPAKKVCRWDSFTKQVQRVTMDAPVSSVALRQSGGYVATIGTKFCALNWKEQSAVVLATVDNDKKNNRFNDGKVDPAGRYFAGTMAEETAPAVLERHQGALYSLFPDHHVKKYFDQVDISNGLDWSLDHKIFYYIDSLSYSVDAFDYDLQTGQISNRRSVYKLEKEEQIPDGMCIDAEGKLWVACYNGGRVIRLDPVTGKRLQTVKLPVDKTTSCCFGGKNYSEMYVTCARDGMDPEGLLRQPEAGGIFKITGLGVKGIAPYSYAG

SEQ ID NO: 148731 - DNA, 900 bp, Artificial Sequence
  derived and/or modified sequence
atgtcaagtatcaaaattgagtgtgttctccccgagaattgccgctgcggcgagtcacccgtatgggaagaagtgagtaattctctactgttcgtggatattcctgctaaaaaagtctgtcgatgggactctttcacaaaacaggtgcagagagtcaccatggatgcgccagtgagctctgtggctctgcggcagtcaggggggtacgttgcgactatcggcaccaagttttgtgctctgaattggaaggagcagtctgccgtggttctcgccacagtcgacaacgacaagaagaacaataggttcaatgatggaaaagtcgatcccgcaggaaggtatttcgccggaaccatggcggaggaaactgccccagccgtcttggagagacaccagggcgcgctctatagtctcttcccggatcaccacgtaaaaaaatactttgaccaggtggacatttctaacggtctagactggtcactggatcataaaattttctactacatagacagtctatcatactctgtagatgcttttgattacgatctccagacgggccagatctccaacagacggtctgtctacaagttagaaaaggaagagcagatcccagacgggatgtgcatcgatgccgaggggaaactgtgggtcgcctgttataacggaggacgcgtgattcggttggatcctgtcacagggaagaggctacagacggtgaagttgcctgtagacaagacaacctcttgttgcttcggcgggaagaattattctgaaatgtatgtaacttgcgcgcgagacgggatggatcccgaaggactccttcggcagcctgaggctggagggatctttaaaattacaggattgggcgtgaaaggtatcgctccatactcatatgctggctag

SEQ ID NO: 148732 - DNA, 900 bp, Artificial Sequence
  derived and/or modified sequence
atgtccagtattaaaatagaatgtgtcctgccagaaaattgcaggtgcggagaaagccctgtgtgggaagaagtcagcaactccctcttatttgtggacattccagctaagaaggtgtgccggtgggattcattcaccaaacaagtccagagagttacaatggatgcccccgtctcctccgtggctcttaggcagtccggaggttacgttgctacgattggaaccaaattctgtgcgctgaattggaaagaacagtctgccgttgttcttgccactgtcgataacgacaagaagaacaaccgattcaacgacggaaaggttgatccagcgggccgttacttcgccggcacgatggcagaagagacggctcccgcagtactcgaaaggcatcagggcgccttgtactctctcttccccgatcaccacgttaagaaatactttgaccaggtcgatatctcaaacggattggattggagcctcgaccacaaaatattttactatatcgacagcctttcttatagcgtggacgcctttgattacgacctgcaaaccggccagatcagcaatcggcggtctgtttacaaattggagaaggaagagcagatccctgacggcatgtgcatcgatgcagagggcaagttgtgggtagcatgttataatggaggacgcgtgataaggctcgaccccgtcaccgggaaacgattgcagactgtgaaactacctgtcgataaaactacctcttgttgttttggtgggaaaaattactctgagatgtacgtaacttgcgctcgcgacggtatggatccagaagggctgctgcgccagcccgaggcaggcggtatctttaaaatcacaggattaggagtgaagggcatcgccccatactcatacgcagggtag

SEQ ID NO: 148733 - DNA, 900 bp, Artificial Sequence
  derived and/or modified sequence
atgtcgtcaataaaaatcgagtgcgtactgccagaaaattgccgttgcggcgaaagcccagtgtgggaggaagtttccaattctctcctgtttgtcgacatcccagccaagaaggtgtgcaggtgggacagctttactaagcaggtgcagagagtaacgatggacgctccagtgtctagtgtcgctctgcgccagagcggagggtatgtcgctacgattggaacgaagttctgtgccctgaactggaaggagcagtcagccgtcgtgctggcaaccgtcgacaacgacaagaagaataatagatttaatgatggtaaagtggacccagccggcaggtatttcgctggcaccatggctgaggagacagcacctgccgtcttagaacgccaccagggggctctgtatagcctcttccccgatcaccacgtgaaaaaatattttgatcaggttgacatctctaatggcctcgactggtccttggatcataagatcttttactacattgactcactgtcttactccgtggatgccttcgattacgacctgcagacaggccaaatcagtaaccggcgtagcgtttataaactggaaaaagaggagcagattccagacggcatgtgcattgacgctgagggcaagctgtgggttgcttgttacaacggagggagggtcattagactggatcctgtgacgggcaagcgactccagaccgttaagctgcccgtggacaagacaacgtcttgttgctttggaggcaagaactattccgagatgtacgtcacttgtgcacgggatggcatggaccccgagggcttgctgagacagccagaggcaggaggtatttttaaaattaccggtctaggagtgaaaggcattgcgccctactcatatgctggatag

SEQ ID NO: 148734 - DNA, 900 bp, Artificial Sequence
  derived and/or modified sequence
atgagcagcatcaagattgaatgtgtgctgcctgagaactgccgctgtggggagagccctgtgtgggaggaggtgagcaacagcctgctgtttgtggacatcccagccaagaaggtgtgccgctgggacagcttcaccaagcaggtgcagagggtgaccatggatgcccctgtgtcctctgtggccctgcggcagagcggcggctacgtggccaccatcggcaccaagttctgtgccctgaactggaaggagcagagcgctgtggtgctggccaccgtggacaatgacaagaagaacaaccgcttcaatgatggcaaggtggaccctgctggccgctactttgctggcaccatggccgaggagacagccccagctgtgctggagcggcaccagggcgccctgtacagcctcttcccagaccaccacgtgaagaagtactttgaccaggtggacatcagcaatggcctggactggagcctggaccacaagatcttctactacatcgacagcctgagctacagcgtggatgcctttgattatgacctgcagacaggccagatcagcaacagaagatctgtgtacaagctggagaaggaggagcagatcccagatggcatgtgcattgatgctgagggcaagctgtgggtggcctgctacaacggcggccgggtcatccggctggaccctgtgacaggcaagaggctgcagacagtgaagctgcctgtggacaagaccaccagctgctgcttcggcggcaagaactacagcgagatgtatgtgacctgtgccagagatggcatggaccctgagggcctgctgcggcagcctgaggccggcggcatcttcaagatcaccggcctgggcgtgaagggcatcgccccctacagctatgccggctag

SEQ ID NO: 148735 - DNA, 900 bp, Artificial Sequence
  derived and/or modified sequence
atgagcagcatcaagatcgagtgcgtgctgcccgagaactgccggtgtggcgagtcacccgtctgggaagaagtcagcaatagcctgctgttcgtcgacataccagccaagaaagtgtgtcgatgggacagttttaccaaacaagttcagcgggtcaccatggatgctcccgtgtcctctgtagccttacgacaaagtggcggctacgtagccacaatcggaactaaattttgcgccttgaactggaaggaacagtctgccgtagtgctagcaacagtggataatgataagaagaataatagattcaacgatggcaaagtggatcccgcagggcggtacttcgctggtacaatggccgaggaaactgcccccgccgtgcttgagaggcatcaaggggccctatactccctgtttccagatcatcatgtgaaaaaatatttcgatcaggtcgatatatctaatggtctcgactggtccttagaccacaagatattctactacattgactcactgagctattccgtcgatgcctttgattacgacttgcaaaccggtcagatctcgaaccgaaggagcgtctataagctggagaaagaggagcagattcccgatggcatgtgcatcgatgccgaaggcaagctttgggtcgcatgctacaacggtggacgggttatccgcttggatccagttaccggtaagaggctgcaaacggtcaaactaccggtggataaaactacgtcctgctgctttggcggtaagaattactcagagatgtatgttacatgcgctagggatggaatggatccagagggcctcctccgtcagcccgaagccggcggcatattcaaaattaccggcctcggagtgaagggcatagccccctacagctacgccggttag

SEQ ID NO: 148736 - DNA, 900 bp, Artificial Sequence
  derived and/or modified sequence
atgagcagcatcaagatcgagtgcgtgctgcccgagaactgccggtgtggtgagtcacctgtgtgggaagaagtcagcaactctttactctttgtcgacatacctgctaagaaagtgtgtcggtgggatagctttactaaacaagtgcaacgagtgacaatggacgctcccgtttcaagcgtggccttacgccaaagcggtggttacgttgctacaattggcacgaagttttgtgcacttaattggaaggaacaatctgcagtcgtgctggccactgttgacaatgacaaaaaaaacaacagattcaacgacgggaaagtggacccagccggacgttactttgcgggcacaatggctgaagagaccgctcctgcagtgctcgagcgccaccagggagccctatactccctttttccagatcatcacgtcaaaaagtacttcgatcaggtggatatttctaacggactggactggtccctggatcacaagatcttctattatattgactccctgtcgtatagtgtcgacgcatttgactacgatcttcagaccggtcagattagtaaccgcaggtccgtgtataaactggagaaggaggaacaaatccccgacggaatgtgtattgacgcagagggtaagctgtgggtggcttgctacaacggtggacgggtgatccgtctcgacccagtcaccggcaagcgcctgcagaccgttaagctacccgtggataaaaccacgtcctgttgtttcggcgggaagaattactccgaaatgtacgtgacttgtgcacgggacgggatggacccagaaggcttgctgaggcaacccgaggctgggggtatctttaagatcacgggactgggcgtgaaaggaattgccccttactcttatgctggctag

SEQ ID NO: 148737 - DNA, 900 bp, Artificial Sequence
  derived and/or modified sequence
atgagcagcatcaagatcgagtgcgtgctgcccgagaactgccggtgtggagaatctccggtgtgggaagaagtgtccaattccttactattcgtagacatccctgcaaaaaaggtctgccgttgggacagtttcacaaagcaagtccagcgggtgaccatggatgcaccagtttcttccgtggcgttacggcagagcggcggctatgttgcgacaatcggaacaaagttctgcgcgctgaactggaaggagcagtccgctgtcgttcttgccaccgttgataacgacaagaaaaacaaccgctttaatgacggcaaggtcgaccctgcagggcgctactttgccggtacgatggccgaggaaaccgcccctgctgtgttagagcggcaccagggggccctttatagcctctttcccgaccatcacgtgaagaagtacttcgaccaggtggacatttctaatggactcgactggagtctcgaccacaaaatcttttactacattgacagccttagctactccgtggacgcgtttgactatgaccttcaaactggccagatcagtaaccggagatcagtgtataaactggagaaagaggaacaaataccggacggcatgtgcatcgatgccgaagggaaactttgggtggcatgctacaatggggggcgggtgattaggctggaccccgtcacaggcaaacgactgcagactgttaaactccccgtggataagaccacgtcatgttgttttggaggtaaaaactatagcgaaatgtatgtgacctgcgcaagggatgggatggaccccgagggcctgctgcgtcagcctgaggcaggcggtatctttaaaatcacgggcctaggtgttaaaggaatcgccccttattcttatgctggttag

SEQ ID NO: 148738 - DNA, 900 bp, Artificial Sequence
  derived and/or modified sequence
atgagcagtattaaaattgaatgtgtcctccccgagaattgtcggtgcggagagtcacctgtctgggaggaagtcagtaattcacttctattcgtggacatccctgccaaaaaagtgtgcaggtgggatagttttacaaaacaggtgcagcgcgttacaatggatgcacctgtgtcctctgtggcattacgacagagcgggggttatgtggccaccatcggaactaagttttgtgcgctcaactggaaggagcagagcgcagtcgttttagctaccgttgacaacgacaagaagaacaatagattcaatgatggtaaagttgaccctgctggcagatacttcgctggtaccatggccgaggagacagcaccagccgtcctggaaagacaccagggtgcactgtattcgctgtttcctgaccaccacgtgaagaagtacttcgaccaggttgacatcagcaatggactggactggagtctcgatcataagatcttctactacatcgatagcttgtcgtactctgttgacgcattcgactatgacctccaaacaggccagatctccaaccggcgaagcgtctacaagctggagaaagaggaacagatccctgatgggatgtgtatcgatgcagaggggaagctctgggtcgcttgctacaacggtggaagagtgatcagacttgaccccgttaccgggaagagactccaaacggtaaaactaccagtcgacaagaccacctcctgctgctttggaggcaagaactattcagagatgtacgtgacttgtgcccgtgacggcatggaccccgaggggctgctcagacagccagaggctggaggaatctttaagatcactgggctgggggtgaaaggaatcgcgccatactcttacgctggatag

SEQ ID NO: 148739 - DNA, 900 bp, Artificial Sequence
  derived and/or modified sequence
atgagcagtatcaagatcgaatgtgtgctccctgagaattgtcggtgtggagaaagcccagtgtgggaggaggtgagtaactccttacttttcgtagacattccggcaaagaaggtatgtagatgggactcatttaccaagcaggtgcagagagtgacaatggacgcccctgttagctctgtggcactccgacaatcaggcggatacgttgctaccatcgggactaaattctgcgcgctcaactggaaagaacagtcagcagttgtcctagccacagtagacaacgataaaaagaacaaccgcttcaacgacggcaaggttgaccctgcaggcagatacttcgcgggaacaatggctgaagaaaccgctcctgccgtgcttgaacgtcaccagggagccctctactccctctttcctgaccaccacgtcaaaaaatatttcgaccaagtagacatatcaaatggtctggactggtctctggatcacaagatcttttattatatcgacagcctgtcctatagtgtcgacgcattcgattacgacctccagacaggccagatctctaaccgcaggagcgtctacaaacttgaaaaagaggagcaaattcccgacggcatgtgtattgacgccgagggcaaactgtgggtagcctgttacaatggaggaagggttatccggctagatcccgtcaccggcaagagactacagaccgtgaaactacccgtggacaaaaccacatcctgttgcttcggcggaaagaactattctgaaatgtacgtgacgtgtgcccgagatgggatggatcctgagggccttttgcgccagccggaagcaggcggtatcttcaagatcaccggattgggcgtgaagggcatagcaccatatagctatgccggatag

SEQ ID NO: 148740 - DNA, 900 bp, Artificial Sequence
  derived and/or modified sequence
atgtcttcgataaagatcgaatgtgtgctgcccgaaaactgccggtgcggagagtcccccgtttgggaagaggtgagtaacagcctactgtttgtggacattcctgccaagaaagtctgtcgatgggatagcttcaccaagcaggtccagcgagtaacaatggatgctcccgtttcttcggtagcactgcgccagagcggaggatacgtggccactatcgggaccaagttctgtgctttgaactggaaagaacaatctgccgtggtgctggccacggtggataatgataagaagaataataggttcaacgatggtaaagtcgatcctgcaggtagatacttcgccggtactatggcagaggaaacagccccagctgttttggaaagacaccaaggcgctctgtattctttgttccccgaccaccatgttaagaaatacttcgatcaggtagatattagcaacggtttagattggtcgctggatcataagatattttactatatcgacagtctctcatattccgttgacgccttcgactatgatctccagaccggacaaatttcaaacaggaggagtgtatataaactggagaaggaagagcagattccagacggaatgtgcatagacgcagagggcaaactgtgggtagcgtgttacaacggcggtagagtgataagacttgacccagtgacaggcaaacgtctccagaccgtgaaacttccagttgacaagactaccagctgctgctttggcggtaagaactactcagagatgtacgttacttgcgccagggacgggatggaccctgagggactgctgaggcagcctgaggcgggaggtatctttaagattacaggcctgggagtgaagggtatcgcaccgtattcctatgccggttag

SEQ ID NO: 148741 - DNA, 1356 bp, Artificial Sequence
  derived and/or modified sequence
acaaacaccaaggagtggaggtcagagtgtcacttttttgttttctttttgaaagatcattcgagaaacacgtcactgatctcccctgcgaccatgtcttccattaagattgagtgtgttttgccagagaactgccggtgtggtgagtctccagtatgggaggaagtgtccaactctctgctctttgtagacattcctgcaaaaaaggtttgccggtgggattcattcaccaagcaagtacagcgagtgaccatggatgccccagtcagctccgtggctcttcgccagtcgggaggctatgttgccaccattggaacaaagttctgtgctttgaactggaaagaacaatcagcagttgtcttggccacggtggataacgacaagaaaaacaatcgcttcaatgatgggaaggtggatcccgccgggaggtactttgctggcaccatggctgaggaaacagctccagcagttcttgagcggcaccagggggccctgtactccctctttcctgatcaccacgtgaaaaagtactttgaccaggtggacatttccaatggtttggattggtcgctagaccacaaaatcttctattacattgacagcctgtcctactccgtggatgcctttgactatgacctgcagacaggacagatctccaaccgcagaagtgtttacaagctagaaaaggaagaacaaatcccagatggaatgtgtattgatgctgaggggaagctctgggtggcctgttacaatggaggaagagtgattcgtttagatcctgtgacagggaaaagacttcaaactgtgaagttgcctgttgataaaacaacttcatgctgctttggagggaagaattactctgaaatgtatgtgacctgcgcccgggatgggatggaccccgagggtcttttgaggcaacctgaagctggtggaattttcaagataactggtctgggggtcaaaggaattgctccctactcctatgcgggatgaggacaggtcttctttcctgccagagggagctctgaagacaactagagaattctgggcctgaaatttcaatctagttagaaagaaaaatgaggcaatgattttattaacagcgttaagttttaatttacaacttttaaaaggcagagcatttttaacaaggggtgacaggtggttttgataacacacttataaggctttctgtaaaaggtactatagaagggcgaagaatcgttcaactgtcaatcagcctcttgattctttgtaaattgccagggtgggtgggtacatatctcttcttgattctgcatttcatacttaactatattaaagcttcaaggaacaataaatagtaacctggtaatg

SEQ ID NO: 148742 - DNA, 1611 bp, Artificial Sequence
  derived and/or modified sequence
ccgagccaggccggcctccccgccccctccctggaaaggaaaggccccggcgacaacagagccagacccgctcatcccgatctcccagaaggcgactgacagctgactgccagaaggagatcgcgccaggagactgactgctctgtgcccacccggggacccgggcccgttcagccgggctggctggtgcgccctctgcaaagcctgcgccagggaggaggcaggctcaaccttcagattcccagggcctctctgtcgctgtcgccgtcgccgtcgcccgaggtcccagcggctctaccagattgttgtggaggcctctcacccgcacagatctcccctgcgaccatgtcttccattaagattgagtgtgttttgccagagaactgccggtgtggtgagtctccagtatgggaggaagtgtccaactctctgctctttgtagacattcctgcaaaaaaggtttgccggtgggattcattcaccaagcaagtacagcgagtgaccatggatgccccagtcagctccgtggctcttcgccagtcgggaggctatgttgccaccattggaacaaagttctgtgctttgaactggaaagaacaatcagcagttgtcttggccacggtggataacgacaagaaaaacaatcgcttcaatgatgggaaggtggatcccgccgggaggtactttgctggcaccatggctgaggaaacagctccagcagttcttgagcggcaccagggggccctgtactccctctttcctgatcaccacgtgaaaaagtactttgaccaggtggacatttccaatggtttggattggtcgctagaccacaaaatcttctattacattgacagcctgtcctactccgtggatgcctttgactatgacctgcagacaggacagatctccaaccgcagaagtgtttacaagctagaaaaggaagaacaaatcccagatggaatgtgtattgatgctgaggggaagctctgggtggcctgttacaatggaggaagagtgattcgtttagatcctgtgacagggaaaagacttcaaactgtgaagttgcctgttgataaaacaacttcatgctgctttggagggaagaattactctgaaatgtatgtgacctgcgcccgggatgggatggaccccgagggtcttttgaggcaacctgaagctggtggaattttcaagataactggtctgggggtcaaaggaattgctccctactcctatgcgggatgaggacaggtcttctttcctgccagagggagctctgaagacaactagagaattctgggcctgaaatttcaatctagttagaaagaaaaatgaggcaatgattttattaacagcgttaagttttaatttacaacttttaaaaggcagagcatttttaacaaggggtgacaggtggttttgataacacacttataaggctttctgtaaaaggtactatagaagggcgaagaatcgttcaactgtcaatcagcctcttgattctttgtaaattgccagggtgggtgggtacatatctcttcttgattctgcatttcatacttaactatattaaagcttcaaggaacaataaatagtaacctggtaatgacc

SEQ ID NO: 148743 - DNA, 2235 bp, Artificial Sequence
  derived and/or modified sequence
gtgcccgagccaggccggcctccccgccccctccctggaaaggaaaggccccggcgacaacagagccagacccgctcatcccgatctcccagaaggcgactgacagctgactgccagaaggagatcgcgccaggagactgactgctctgtgcccacccggggacccgggcccgttcagccgggctggctggtgcgccctctgcaaagcctgcgccagggaggaggcaggctcaaccttcagattcccagggcctctctgtcgctgtcgccgtcgccgtcgcccgaggtcccagcggctctaccagattgttgtggaggcctctcacccgcacagataatttttctctgtcttctcccagttcgctggtcatggtctctggcctaaagtcccagcatagactgttcctctcctgtggagtctaacactctttgccaaactggcacggtgtcttcctgggaagcaagaaatcactgagggcctgtcagttcctgccagggtggttcgatgctgtccttttctccactccttccatggtctgcgttggaaaatgtgtgttagttcgaattcagcgagttctcattggggtgaacatagtcctaaaaatgcagttcataaaaatcaaccacacagagaagaaaaataaataaatcagtaaagcagctcagaaaaatgcaggtgtggcgggccctggcctctgcaccctcatagaggggctcaacagcatcaacagaaggtgggggagcagaaggtgccctgcagacacccagaggggccaccaatgagcaaactgccagctccctgacccgccctggggcccagggtattgacataaaggacggccttgcactatttcaacagccagttctctgagggtcacaaacaccaaggagtggaggtcagagtgtcacttttttgttttctttttgaaagatcattcgagaaacacgtcactgatctcccctgcgaccatgtcttccattaagattgagtgtgttttgccagagaactgccggtgtggtgagtctccagtatgggaggaagtgtccaactctctgctctttgtagacattcctgcaaaaaaggtttgccggtgggattcattcaccaagcaagtacagcgagtgaccatggatgccccagtcagctccgtggctcttcgccagtcgggaggctatgttgccaccattggaacaaagttctgtgctttgaactggaaagaacaatcagcagttgtcttggccacggtggataacgacaagaaaaacaatcgcttcaatgatgggaaggtggatcccgccgggaggtactttgctggcaccatggctgaggaaacagctccagcagttcttgagcggcaccagggggccctgtactccctctttcctgatcaccacgtgaaaaagtactttgaccaggtggacatttccaatggtttggattggtcgctagaccacaaaatcttctattacattgacagcctgtcctactccgtggatgcctttgactatgacctgcagacaggacagatctccaaccgcagaagtgtttacaagctagaaaaggaagaacaaatcccagatggaatgtgtattgatgctgaggggaagctctgggtggcctgttacaatggaggaagagtgattcgtttagatcctgtgacagggaaaagacttcaaactgtgaagttgcctgttgataaaacaacttcatgctgctttggagggaagaattactctgaaatgtatgtgacctgcgcccgggatgggatggaccccgagggtcttttgaggcaacctgaagctggtggaattttcaagataactggtctgggggtcaaaggaattgctccctactcctatgcgggatgaggacaggtcttctttcctgccagagggagctctgaagacaactagagaattctgggcctgaaatttcaatctagttagaaagaaaaatgaggcaatgattttattaacagcgttaagttttaatttacaacttttaaaaggcagagcatttttaacaaggggtgacaggtggttttgataacacacttataaggctttctgtaaaaggtactatagaagggcgaagaatcgttcaactgtcaatcagcctcttgattctttgtaaattgccagggtgggtgggtacatatctcttcttgattctgcatttcatacttaactatattaaagcttcaaggaacaataaatagtaacctggtaatgacc

SEQ ID NO: 148744 - DNA, 900 bp, Artificial Sequence
  derived and/or modified sequence
atgagcagcatcaagatcgagtgcgtgctgcccgagaactgcagatgcggcgagagccccgtgtgggaggaggtgagcaacagcctgctgttcgtggacatccccgccaagaaggtgtgcagatgggacagcttcaccaagcaggtgcagagagtgaccatggacgcccccgtgagcagcgtggccctgagacagagcggcggctacgtggccaccatcggcaccaagttctgcgccctgaactggaaggagcagagcgccgtggtgctggccaccgtggacaacgacaagaagaacaacagattcaacgacggcaaggtggaccccgccggcagatacttcgccggcaccatggccgaggagaccgcccccgccgtgctggagagacaccagggcgccctgtacagcctgttccccgaccaccacgtgaagaagtacttcgaccaggtggacatcagcaacggcctggactggagcctggaccacaagatcttctactacatcgacagcctgagctacagcgtggacgccttcgactacgacctgcagaccggccagatcagcaacagaagaagcgtgtacaagctggagaaggaggagcagatccccgacggcatgtgcatcgacgccgagggcaagctgtgggtggcctgctacaacggcggcagagtgatcagactggaccccgtgaccggcaagagactgcagaccgtgaagctgcccgtggacaagaccaccagctgctgcttcggcggcaagaactacagcgagatgtacgtgacctgcgccagagacggcatggaccccgagggcctgctgagacagcccgaggccggcggcatcttcaagatcaccggcctgggcgtgaagggcatcgccccctacagctacgccggctag

SEQ ID NO: 148745 - protein, 621 aa, Artificial Sequence
  derived and/or modified sequence
MEHIRTTKVEQVKLLDRFSTSNKSLTGTLYLTATHLLFIDSHQKETWILHHHIASVEKLALTTSGCPLVIQCKNFRTVHFIVPRERDCHDIYNSLLQLSKQAKYEDLYAFSYNPKQNDSERLQGWQLIDLAEEYKRMGVPNSHWQLSDANRDYKICETYPRELYVPRIASKPIIVGSSKFRSKGRFPVLSYYHQDKEAAICRCSQPLSGFSARCLEDEHLLQAISKANPVNRYMYVMDTRPKLNAMANRAAGKGYENEDNYSNIRFQFVGIENIHVMRSSLQKLLEVNGTKGLSVNDFYSGLESSGWLRHIKAVMDAAIFLAKAITVENASVLVHCSDGWDRTSQVCSLGSLLLDSYYRTIKGFMVLIEKDWISFGHKFSERCGQLDGDPKEVSPVFTQFLECVWHLTEQFPQAFEFSEAFLLQIHEHIHSCQFGNFLGNCQKEREELKLKEKTYSLWPFLLEDQKKYLNPLYSSESHRFTVLEPNTVSFNFKFWRNMYHQFDRTLHPRQSVFNIIMNMNEQNKQLEKDIKDLESKIKQRKNKQTDGILTKELLHSVHPESPNLKTSLCFKEQTLLPVNDALRTIEGSSPADNRYSEYAEEFSKSEPAVVSLEYGVARMTC

SEQ ID NO: 148746 - protein, 548 aa, Artificial Sequence
  derived and/or modified sequence
MEHIRTTKVEQVKLLDRFSTSNKSLTGTLYLTATHLLFIDSHQKETWILHHHIASVEKLALTTSGCPLVIQCKNFRTVHFIVPRERDCHDIYNSLLQLSKQAKYEDLYAFSYNPKQNDSERLQGWQLIDLAEEYKRMGVPNSHWQLSDANRDYKICETYPRELYVPRIASKPIIVGSSKFRSKGRFPVLSYYHQDKEAAICRCSQPLSGFSARCLEDEHLLQAISKANPVNRYMYVMDTRPKLNAMANRAAGKGYENEDNYSNIRFQFVGIENIHVMRSSLQKLLEVNGTKGLSVNDFYSGLESSGWLRHIKAVMDAAIFLAKAITVENASVLVHCSDGWDRTSQVCSLGSLLLDSYYRTIKGFMVLIEKDWISFGHKFSERCGQLDGDPKEVSPVFTQFLECVWHLTEQFPQAFEFSEAFLLQIHEHIHSCQFGNFLGNCQKEREELKLKEKTYSLWPFLLEDQKKYLNPLYSSESHRFTVLEPNTVSFNFKFWRNMYHQFDRTLHPRQSVFNIIMNMNEQNKQLEKDIKDLESLTSYSSFKIIVGQ

SEQ ID NO: 148747 - protein, 548 aa, Artificial Sequence
  derived and/or modified sequence
MEHIRTTKVEQVKLLDRFSTSNKSLTGTLYLTATHLLFIDSHQKETWILHHHIASVEKLALTTSGCPLVIQCKNFRTVHFIVPRERDCHDIYNSLLQLSKQAKYEDLYAFSYNPKQNDSERLQGWQLIDLAEEYKRMGVPNSHWQLSDANRDYKICETYPRELYVPRIASKPIIVGSSKFRSKGRFPVLSYYHQDKEAAICRCSQPLSGFSARCLEDEHLLQAISKANPVNRYMYVMDTRPKLNAMANRAAGKGYENEDNYSNIRFQFVGIENIHVMRSSLQKLLEVNGTKGLSVNDFYSGLESSGWLRHIKAVMDAAIFLAKAITVENASVLVHCSDGWDRTSQVCSLGSLLLDSYYRTIKGFMVLIEKDWISFGHKFSERCGQLDGDPKEVSPVFTQFLECVWHLTEQFPQAFEFSEAFLLQIHEHIHSCQFGNFLGNCQKEREELKLKEKTYSLWPFLLEDQKKYLNPLYSSESHRFTVLEPNTVSFNFKFWRNMYHQFDRTLHPRQSVFNIIMNMNEQNKQLEKDIKDLESFTSFAAARVIQGQ

SEQ ID NO: 148748 - DNA, 570 bp, Artificial Sequence
  derived and/or modified sequence
atgcccgtatggaaactgccctggaagttaagcgagggcaaacgtagggcacaggtcgaaggtgaggacctctttcccgtggctatatcttttggaaggcccaaagaagtactccctctttactcgtctgagagccacagatttaccgtcctggaacccaatactgtctccttcaactttaagttctggaggaacatgtaccatcaatttgatagaacactgcacccccgacaaagtgtattcaatattatcatgaatatgaacgaacaaaataagcaacttgagaaagacatcaaggacttagagagtaaaataaaacagcggaaaaataaacaaactgacggaatactcactaaggagttgttgcactcagtgcacccagagtcgcctaatctgaaaactagtctgtgctttaaggaacagaccctcctgccagtgaatgacgctctaaggactatcgaaggatccagcccagccgataacagatatagcgagtacgctgaagaattctccaaatccgagccagcggtggtgtctctcgaatatggagtggcccgtatgacctgttag

SEQ ID NO: 148749 - DNA, 1866 bp, Artificial Sequence
  derived and/or modified sequence
atggagcatattcgcactaccaaagttgagcaggtaaagctgctggatcgcttttctaccagtaacaaaagcctcaccggcacactgtacctcacagcgactcatctcctctttatcgatagtcaccagaaagagacctggatcctccaccatcatattgctagcgtagaaaaactggcactcacgacaagtggctgtccccttgtgatacagtgtaaaaactttcgaaccgtccactttatcgtcccaagagagagagattgccacgatatatataactcattgctacagctgtcgaagcaggcaaaatacgaagacctatacgcgttttcttataaccctaagcagaacgattccgaacgcctccaagggtggcagctgatcgacctcgccgaagagtataagaggatgggtgttccaaactcccactggcagctgtccgacgctaaccgtgattacaaaatttgtgagacctacccccgggaactctacgtgccccggattgcatcaaagccgatcatcgtgggttcctctaaattcagaagtaaaggaaggttccccgtgctgtcatactaccaccaggacaaggaggcagcgatctgtcgctgcagtcagccattgtcgggattcagcgcacgatgtttagaagatgagcatctgctccaggccatctcaaaagctaatccggtcaatagatacatgtatgtgatggatacccgacccaaactgaatgccatggccaatagggccgctgggaaaggctacgagaacgaggataactattctaatattagattccagtttgtcggcatcgaaaatattcacgtcatgaggtcatctctccagaagcttttggaagttaacggtaccaaaggcctatctgtgaatgacttttactcaggcttggaatccagtggttggctgagacacataaaggctgttatggacgctgccattttcctggccaaggccatcactgtggaaaatgccagcgtgctggtacactgctctgacggctgggacaggacatctcaggtgtgtagtcttggcagtcttttgcttgactcctactacagaactattaaagggtttatggtccttatagaaaaggattggatctccttcgggcacaaattcagtgaaaggtgtggtcagctagacggagatccaaaggaagtgtcgcctgtgtttacacagtttctggagtgcgtgtggcacctaacagagcagttcccacaggcattcgagttttcagaagccttcctattgcagattcatgaacacatccacagttgtcagtttggaaatttcctcggaaactgccagaaagagcgggaggaactgaaacttaaggaaaaaacctactctttgtggcccttcttgctcgaggaccagaaaaaatatctgaatccactttactccagcgaatctcatagattcacagtgcttgagcccaatacagtgagcttcaatttcaagttttggcggaacatgtaccatcagtttgataggacattacaccctcggcaaagcgtgttcaacatcataatgaacatgaatgaacaaaataagcagctggaaaaggacattaaggacttggagtctaaaattaagcagcgcaaaaataagcagacagatgggatcttgacaaaggagctgctgcactctgtgcatcccgagagcccaaacctgaagacctccctgtgtttcaaggagcagaccctgctcccggtgaacgacgccctcaggaccatagagggtagcagccctgctgacaatagatactctgaatatgccgaggaatttagcaaatctgagccagcggtcgtctcacttgagtacggcgtagcacgcatgacgtgctag

SEQ ID NO: 148750 - DNA, 1647 bp, Artificial Sequence
  derived and/or modified sequence
atggagcacattcgtaccacaaaggtggagcaagttaaactgctagaccgcttttccacttccaacaagagcctgactgggaccctgtatctgacagcaacccatctcctgtttatcgatagccatcagaaagaaacatggatccttcatcaccatatcgcaagtgtcgaaaaactggccctgaccacaagcgggtgccccctggtgatccagtgtaagaattttcgaacggtgcacttcatcgtgcccagggaacgagattgtcatgatatctataatagcttgctccagctgtccaagcaagcgaaatacgaagatttgtacgcgttctcatataaccctaaacagaacgactcagagaggttacagggctggcagctgatcgatctggccgaggaatacaagcgtatgggggtccctaattctcactggcaactgtccgatgccaatagggactacaagatttgtgaaacatacccccgcgagctgtatgtcccccgaatcgcatctaagccgatcattgtgggctcgtcaaagtttagaagcaaggggcggttccccgtactgtcttactatcatcaagataaagaggccgccatttgcagatgctcccagccgctatccggcttctcagctaggtgccttgaagacgagcatctgctccaagccatcagcaaagctaaccctgttaacagatacatgtacgttatggacacaagacccaagctgaatgcaatggccaacagagcagccggaaagggatacgagaacgaagataactatagtaacattagatttcaattcgtagggatagagaatatccacgtcatgagatccagtctgcagaaactgctggaagttaatgggaccaagggactgagtgttaatgacttctattcaggcttggagtcctctgggtggctcaggcacatcaaagcagtaatggacgccgcaatctttctagccaaagctattaccgtggagaacgcctcagttcttgtgcactgtagcgacggatgggatcgtaccagccaggtatgttccctgggttctctgcttcttgatagctactaccggacaataaaaggattcatggtgctgatcgagaaggattggatatcgtttggccataaatttagcgagagatgtggtcagctggatggcgaccctaaggaagtgagccctgtgttcacccagttcctcgaatgcgtgtggcacctgaccgaacagtttcctcaagcatttgagttctctgaagctttcctactgcagattcacgagcacattcacagctgccagtttggtaattttcttggaaactgccagaaggaacgagaggagttaaaactcaaagagaagacatacagcctatggcccttcctgttggaggaccagaaaaaatatttgaaccctctctacagttccgaaagccaccgatttacggtcctcgagcccaataccgtttcctttaactttaaattctggcgaaatatgtatcatcaattcgacagaactcttcatccacgccagtctgttttcaatattatcatgaatatgaatgagcagaataagcagctggaaaaagacataaaggacttggaatctttgacctcctattccagtttcaaaatcatagtcggacagtag

SEQ ID NO: 148751 - DNA, 1647 bp, Artificial Sequence
  derived and/or modified sequence
atggaacacattcgcaccaccaaggtggaacaggtgaagctgctggatcgattctctacgtccaataaaagcttgacggggaccttataccttacagccacgcatctgttatttatagactcccaccagaaagaaacctggatcctacatcatcacatcgcgtctgtggagaagttagcgctgaccaccagcggttgtccactggttatacaatgcaaaaactttcgaaccgttcacttcatcgtaccacgggaacgcgactgtcacgacatctataattccttgctgcaactgtctaaacaggcaaaatatgaggatctgtacgcctttagctacaaccccaagcagaatgatagcgagagacttcagggttggcaactgatagaccttgcagaggagtataaacggatgggcgtcccaaactcccattggcaactatcggacgctaaccgggattacaagatctgcgagacatatcccagagagctgtacgtgccgagaattgcctcaaagccaatcatcgtcggatcctcaaagtttagatcaaagggccgatttccagtattatcctattaccaccaggataaggaagctgccatctgtaggtgcagtcagccattgagcgggttctctgctaggtgcctcgaggacgagcaccttcttcaggcaatcagcaaagctaaccccgtgaatcgatatatgtacgtgatggatacgaggcccaaattaaatgcaatggcaaatcgggccgccggtaaggggtacgagaacgaagacaattattctaatataagattccaatttgtcggaatcgaaaatatccacgtgatgcgttcctctcttcaaaaactgctcgaagtcaatgggacgaaaggcctgagcgtgaatgatttctactcaggcctggaatccagtggctggctgcgacatatcaaagcggtcatggacgctgctatattcctcgccaaggcaatcaccgtggaaaatgcctcagtcctcgtgcactgcagtgacggctgggatagaaccagccaggtgtgctctctcgggtctctgctgttggattcatactaccgcacaattaaagggtttatggttctcattgagaaggactggattagcttcggccacaagttttcggagcgttgtggacaactggacggtgatccaaaggaagtttcaccagttttcacacagttcctggagtgtgtctggcaccttacggagcaattcccccaagcttttgaatttagtgaagccttcctattacagatacacgagcatattcatagctgtcagttcggcaattttttgggcaattgtcagaaggagagagaggagctcaagttaaaggaaaagacgtactccctgtggccttttttattggaagaccagaagaagtatctgaaccccctttactccagcgagtcgcaccgatttaccgtgttagaacccaataccgttagcttcaattttaagttttggcggaatatgtaccatcaattcgacaggaccttgcatcctagacaatctgtattcaacatcatcatgaatatgaacgaacagaacaaacagctggaaaaggacattaaggacttggagtcctttacaagtttcgccgcagcgagagtgatccagggacagtag

SEQ ID NO: 148752 - DNA, 570 bp, Artificial Sequence
  derived and/or modified sequence
atgcctgtgtggaagctgccctggaagctgtctgagggcaagagaagagcccaggtggagggggaggacctcttccctgtggccatcagctttggccggcccaaggaggtgctgcccctgtacagcagcgagagccaccgcttcaccgtgctggagcccaacacagtgtccttcaacttcaagttctggaggaacatgtaccaccagtttgacaggaccctgcacccccggcagagcgtcttcaacatcatcatgaacatgaatgagcagaacaagcagctggagaaggacatcaaggacctggagagcaagatcaagcagaggaagaacaagcagacagatggcatcctgaccaaggagctgctgcacagcgtgcaccctgagagccccaacctgaagaccagcctgtgcttcaaggagcagaccctgctgcctgtgaatgatgccctgcggaccatcgagggcagcagccctgctgacaaccgctacagtgaatatgcagaggagttcagcaagtctgagcctgctgtggtgtccctggagtatggagtggccaggatgacctgctag

SEQ ID NO: 148753 - DNA, 1866 bp, Artificial Sequence
  derived and/or modified sequence
atggagcacatccgcaccaccaaggtggagcaggtgaagctgctggaccgcttcagcaccagcaacaagagcctgaccggcaccctgtacctgacagccacccacctgctcttcatcgacagccaccagaaggagacctggatcctgcaccaccacatcgcctctgtggagaagctggccctgaccaccagcggctgccccctggtgatccagtgcaagaacttcagaacagtgcacttcatcgtgccccgggagcgggactgccacgacatctacaacagcctgctgcagctgagcaagcaggccaagtatgaggacctgtatgccttctcctacaaccccaagcagaatgattctgagcggctgcagggctggcagctgattgacctggccgaggagtacaagaggatgggcgtgcccaacagccactggcagctgagtgatgccaacagagactacaagatctgtgagacctacccccgggagctgtatgtgccccgcatcgccagcaagcccatcatcgtgggcagcagcaagttccgcagcaagggccgcttccctgtgctgagctactaccaccaggacaaggaggccgccatctgccgctgcagccagcccctgagcggcttcagcgcccgctgcctggaggatgagcacctgctgcaggccatcagcaaggccaaccctgtgaaccgctacatgtatgtgatggacacccggcccaagctgaatgccatggccaacagagctgctgggaagggctatgaaaatgaagacaactacagcaacatccgcttccagtttgtgggcatcgagaacatccacgtgatgaggagcagcctgcagaagctgctggaggtgaatggcaccaagggcctgtctgtgaatgacttctacagcggcctggagagcagcggctggctgcggcacatcaaggctgtgatggatgctgccatcttcctggccaaggccatcaccgtggagaatgcctctgtgctggtgcactgcagtgatggctgggacaggaccagccaggtgtgcagcctgggcagcctgctgctggacagctactaccgcaccatcaagggcttcatggtgctgattgagaaggactggatcagctttggccacaagttcagcgagcgctgtggccagctggatggagaccccaaggaggtgtcccctgtgttcacccagttcctggagtgtgtgtggcacctgacagagcagttcccccaggcctttgagttcagcgaggccttcctgctgcagatccacgagcacatccacagctgccagtttggaaacttcctgggcaactgccagaaggagcgggaggagctgaagctgaaggagaagacctacagcctgtggcccttcctgctggaggaccagaagaagtacctgaaccccctgtacagcagcgagagccaccgcttcaccgtgctggagcccaacacagtgtccttcaacttcaagttctggaggaacatgtaccaccagtttgacaggaccctgcacccccggcagagcgtcttcaacatcatcatgaacatgaatgagcagaacaagcagctggagaaggacatcaaggacctggagagcaagatcaagcagaggaagaacaagcagacagatggcatcctgaccaaggagctgctgcacagcgtgcaccctgagagccccaacctgaagaccagcctgtgcttcaaggagcagaccctgctgcctgtgaatgatgccctgcggaccatcgagggcagcagccctgctgacaaccgctacagtgaatatgcagaggagttcagcaagtctgagcctgctgtggtgtccctggagtatggagtggccaggatgacctgctag

SEQ ID NO: 148754 - DNA, 1647 bp, Artificial Sequence
  derived and/or modified sequence
atggagcacatccgcaccaccaaggtggagcaggtgaagctgctggaccgcttcagcaccagcaacaagagcctgaccggcaccctgtacctgacagccacccacctgctcttcatcgacagccaccagaaggagacctggatcctgcaccaccacatcgcctctgtggagaagctggccctgaccaccagcggctgccccctggtgatccagtgcaagaacttcagaacagtgcacttcatcgtgccccgggagcgggactgccacgacatctacaacagcctgctgcagctgagcaagcaggccaagtatgaggacctgtatgccttctcctacaaccccaagcagaatgattctgagcggctgcagggctggcagctgattgacctggccgaggagtacaagaggatgggcgtgcccaacagccactggcagctgagtgatgccaacagagactacaagatctgtgagacctacccccgggagctgtatgtgccccgcatcgccagcaagcccatcatcgtgggcagcagcaagttccgcagcaagggccgcttccctgtgctgagctactaccaccaggacaaggaggccgccatctgccgctgcagccagcccctgagcggcttcagcgcccgctgcctggaggatgagcacctgctgcaggccatcagcaaggccaaccctgtgaaccgctacatgtatgtgatggacacccggcccaagctgaatgccatggccaacagagctgctgggaagggctatgaaaatgaagacaactacagcaacatccgcttccagtttgtgggcatcgagaacatccacgtgatgaggagcagcctgcagaagctgctggaggtgaatggcaccaagggcctgtctgtgaatgacttctacagcggcctggagagcagcggctggctgcggcacatcaaggctgtgatggatgctgccatcttcctggccaaggccatcaccgtggagaatgcctctgtgctggtgcactgcagtgatggctgggacaggaccagccaggtgtgcagcctgggcagcctgctgctggacagctactaccgcaccatcaagggcttcatggtgctgattgagaaggactggatcagctttggccacaagttcagcgagcgctgtggccagctggatggagaccccaaggaggtgtcccctgtgttcacccagttcctggagtgtgtgtggcacctgacagagcagttcccccaggcctttgagttcagcgaggccttcctgctgcagatccacgagcacatccacagctgccagtttggaaacttcctgggcaactgccagaaggagcgggaggagctgaagctgaaggagaagacctacagcctgtggcccttcctgctggaggaccagaagaagtacctgaaccccctgtacagcagcgagagccaccgcttcaccgtgctggagcccaacacagtgtccttcaacttcaagttctggaggaacatgtaccaccagtttgacaggaccctgcacccccggcagagcgtcttcaacatcatcatgaacatgaatgagcagaacaagcagctggagaaggacatcaaggacctggagagcctgaccagctacagcagcttcaagatcatcgtgggccagtag

SEQ ID NO: 148755 - DNA, 1647 bp, Artificial Sequence
  derived and/or modified sequence
atggagcacatccgcaccaccaaggtggagcaggtgaagctgctggaccgcttcagcaccagcaacaagagcctgaccggcaccctgtacctgacagccacccacctgctcttcatcgacagccaccagaaggagacctggatcctgcaccaccacatcgcctctgtggagaagctggccctgaccaccagcggctgccccctggtgatccagtgcaagaacttcagaacagtgcacttcatcgtgccccgggagcgggactgccacgacatctacaacagcctgctgcagctgagcaagcaggccaagtatgaggacctgtatgccttctcctacaaccccaagcagaatgattctgagcggctgcagggctggcagctgattgacctggccgaggagtacaagaggatgggcgtgcccaacagccactggcagctgagtgatgccaacagagactacaagatctgtgagacctacccccgggagctgtatgtgccccgcatcgccagcaagcccatcatcgtgggcagcagcaagttccgcagcaagggccgcttccctgtgctgagctactaccaccaggacaaggaggccgccatctgccgctgcagccagcccctgagcggcttcagcgcccgctgcctggaggatgagcacctgctgcaggccatcagcaaggccaaccctgtgaaccgctacatgtatgtgatggacacccggcccaagctgaatgccatggccaacagagctgctgggaagggctatgaaaatgaagacaactacagcaacatccgcttccagtttgtgggcatcgagaacatccacgtgatgaggagcagcctgcagaagctgctggaggtgaatggcaccaagggcctgtctgtgaatgacttctacagcggcctggagagcagcggctggctgcggcacatcaaggctgtgatggatgctgccatcttcctggccaaggccatcaccgtggagaatgcctctgtgctggtgcactgcagtgatggctgggacaggaccagccaggtgtgcagcctgggcagcctgctgctggacagctactaccgcaccatcaagggcttcatggtgctgattgagaaggactggatcagctttggccacaagttcagcgagcgctgtggccagctggatggagaccccaaggaggtgtcccctgtgttcacccagttcctggagtgtgtgtggcacctgacagagcagttcccccaggcctttgagttcagcgaggccttcctgctgcagatccacgagcacatccacagctgccagtttggaaacttcctgggcaactgccagaaggagcgggaggagctgaagctgaaggagaagacctacagcctgtggcccttcctgctggaggaccagaagaagtacctgaaccccctgtacagcagcgagagccaccgcttcaccgtgctggagcccaacacagtgtccttcaacttcaagttctggaggaacatgtaccaccagtttgacaggaccctgcacccccggcagagcgtcttcaacatcatcatgaacatgaatgagcagaacaagcagctggagaaggacatcaaggacctggagagcttcaccagctttgctgctgcccgggtcatccagggccagtag

SEQ ID NO: 148756 - DNA, 5659 bp, Artificial Sequence
  derived and/or modified sequence
tttcgttatgtgatatccctctacaggatgagttttaatggatgctggtgctaacatcgtatgaaattgaggtaggaggcgggactctgacaccagaccagattgaggactagctaatcatcatactttacataaggaatccgtaggattggagagttgattgtttcaaataaggctggtttccttatttggttatttccttagaataataactccaaatctgattatttccttagaatacattcttatgagtagaactgcagctcaaactaaatttggtgctgtccagtggtatggcgatggacttcagaacatcctccactcttgccctcaccccacaagaaccctttactcgggatccattctcacgcagtcttcctccccgaccgccccgcgcgtccgctcggcgggatgacaaagaccgcctcgggtggggtggtgagcagtaccggcctcctccagcagggggcgctgtgggatccgccgctgtccgggacgaaccagcaagccgctctcggtccacacacgctctgtctgcctgccccgagtcccccgggaggccgcggggtttggggaagtgtttctaggagacggcgctcaccggctgcacctgcgccgttgacgccaccggggccggcagacagacccgcggcgctggctggtggagggagttcccgcttgctctctgtcgctgtcaccgccctgtttctgtagccgtatggtacgcctgtgagaccggctgccggctgacgtctccttgcgatggagcatatccggacgaccaaggtcgaacaagtaaaattacttgaccgattcagtaccagcaacaagtcattaacaggaacactgtatcttacggctacacatctattatttatcgactctcatcaaaaagaaacctggatattacaccaccatattgcctcagtagagaaacttgctttgactacttctggatgcccccttgtgatacagtgcaagaacttcagaactgtgcatttcattgttcccagagaaagagattgccatgatatttacaactctttgctacaactgtcaaaacaagcaaaatatgaagatctctatgcattttcttataatcccaaacaaaatgattcagaacgactacaaggctggcagctcattgatctcgctgaggaatataagaggatgggagtgccaaactcacactggcagttgtctgatgccaaccgggactacaagatttgtgaaacttaccccagagaactttatgttccccggatagcaagcaaaccaataattgttggtagttccaagttccggagcaagggaagattcccagttctttcctactatcatcaagataaggaggctgccatttgtcgatgtagtcagccactctctggattcagtgccaggtgcctggaggatgaacatttgcttcaagccattagtaaagccaatccagtcaatcgctatatgtacgtcatggataccaggccaaaactgaatgcaatggccaacagagcagctggaaaaggttatgaaaatgaagacaactattccaatattagatttcagtttgttggaattgaaaatattcatgtcatgaggtccagccttcagaaattattggaagtcaatggcactaaagggctttctgtcaatgatttctactccggtttggagagctcgggatggcttcgccatatcaaagctgttatggatgctgcaatcttcttggccaaagcaataacagttgaaaatgcaagtgtgttggtgcattgttccgatggttgggataggacttcccaggtttgttccctgggttctcttttattggattcctactacaggacaatcaaaggattcatggttttaatagaaaaggattggatctcttttggacataaattttcagagaggtgtggccagttggatggtgacccaaaggaagtctcaccagtgtttactcagttcttggaatgtgtgtggcatttgaccgaacagtttccacaagcctttgaattcagtgaagcatttcttcttcagatccatgagcatattcattcatgccagtttggaaacttccttggaaattgtcagaaggaaagagaagagctcaagttgaaggagaagacttattccctgtggccatttcttttggaagaccaaaagaagtacttaaatcctctctacagttccgaatctcacagatttacagttttggagccaaatacagtatctttcaattttaagttttggaggaacatgtaccatcaatttgatcgaacactgcatcctaggcagtctgtatttaatataattatgaatatgaatgagcaaaataaacaattagagaaagatattaaagacctagaatctaaaattaaacaacgcaaaaataagcaaacagatggcatcctcaccaaggaattgttacattcagttcatcctgaatcacctaacctcaaaacttccctgtgttttaaagagcagactctgctacccgtaaatgatgctcttcgaactatagagggcagcagcccggcagataatcgttatagtgaatatgcagaagagttttctaaatcagaacctgctgtggtcagcttagagtatggtgtggcaagaatgacttgttagactcatagagttttttctgcaatgattgcagtacaagaaaaggattattgtgaggatggtctgtaagcataaccaaaaggaatttgtctaataacaattttagggtttaacagtaggctaatagttgaaggaaggataataactacccttgtgagagaaataagtcattttaattgcatttccagcaaggaatgacattcagttctgtaagaaatgagtggtatttgatgtatttactcaaaacacaatttgcactgtacactagtgaattgacgtttatgatttatgttaattcagccaaacataaataaccttccttaagtacaatttaacttcaagaaaacaaaatttgacaacatagtttcttaataaatgatatggcatgtactttcaattatgtagctttgtaactatgaatatttacatattttgccttttagtgatatttaatgttaaagtgccatgaaaaatatttctaagaaagccttaaattcccagtggattctttacccttaagttttacagcctacaacaagattttttgttttgtttttcttctggtcagccttgttttgtttgtaaagaattgtgctctcattactgctgggggtgcatgctacaatacttctatataaacacttgtagaagtacactgttcacgtttagcctgccccacttttgtattcaaaattaatgaaactgaaggtttattctgatcataatttgtttagtgctacatttgataatttattatttacagcttagaatattgatttcttgaatacgtataagcacatttgactgtcttttatatatggattactgcattccattgattcttattttgtggttggctttatttctttcacaactgtgtaagtttaaagagctaaagctctaaaactgttctgagaaacaatgaatagtacatgtatatgtatatttttaaactgccttattgctcaatgagttgctgttcctggagtatctaactttcagtttactcaaaaacttttgggtaaataaaaaagggaagtacagatagtttaggttgtgcatggttgcatgaattttgaagtcatttctatgtggagcattatttttcttcttgttaaatatagaaaaaaaaagagattctagtacaaagttactgtttaacaaaagcaacataaactctgggaaagatttcattttgccatgttatatttactgtttattctgtgtactagtacatatctttaaattaccaaaaaacaagaaacaaaacataaaaaccccaaaactatcacttggaattagcaatatcacccaactggctttaaaattgaaaatttaaataacatggtggcatgaagtacaattcgagtattaggcaatttgcatagtgttcctcatgctactttctgttacacctctattatattagttttgaatataaacatctttttcagaccaaaaaaaactttattgtatgagagcttatcttatcctgtttatttttccaatgcttttctgtaatacattatgtaatttaaaaaatattcctttttaaacagcaacagaaatgcactataaaatatagtatgtgattaaccaatcctgcttccatatttaagcactgggaatggaaacttaatctctgtgactacaaagggaagtttttgtgccttggtgttccagtcactgattgtggttttagaatcttctgtggctgacttcttgtattcaactctggtttattatcttaatcttcaacttcagacatatatttgtgtgtttatatgctcacaggtggactgagaaatcagttacatcttaagtgacctacagggtatatgttggcaaaagcagactgtgtatatgtcttataaagttgaatttatgttcagtgtgtttggaagtgtatagcatgtaaattacttcatatatgatttaaaggtaattaaatgttcacattttactttgaatgtttttcttctggataaaacaaatggaatcaagttgtagttgttttttttttcttctcacctaggcaagtagacttgcccattacattaacataacagcataaggtttgaggagtttattttccaaaagtttgttgataaataatacctgtttcatacaaaaataatttccagaatatttaaaataggtatagtgggctaaaaggcccatcagatgtaggtaataatgtcattaagttttcattttgttcctgtcacttgcttatattacaatcactatttttttgtgcccttgccaacttgatggaaggcagggtccattgagtacaaacattcgaggtgaaatgtctctccaaaggcagatctggatgtaaatatgaggaagaaaataactggctgacaagaggataattttattgagggtgttttgaaaaggtcagctaggctagaagtagctcagggaatcttgagtaaagatgaagggaactcttttaaaacaaattcaatttatttggtcgggtagcagagcagggaggtggtgtcagtcaagcctgttttgaaacattttttgcagaaggtcagctttaaaatattgaaaaatttccagttgacatgctaagttggattaaatgctgatcatttataaaactatatagttgctgcaaaagtaattggggcttttgccattgaaagtgatgacaaaaaccgcaattacttttgcaccaacctaatactacagttgcagacttttattagtgacgctgatcttcattagtcaagttttagttattttgttggcttttccatgtagaattccaagtgacattaacatactttgattaattaaagaaaatttggagactgtttaagatatatgtctagatatcaatgtaaactataagctttaggaacttacatctagaagaaagcctggaatctagaataattatctcaaaaaaaagtatatataccattgtacttgatataagaaaatgtaaacatgaaaccttgacattttaataaacagtatttgtgctactctagttatttctaggaaagtaaaa

SEQ ID NO: 148757 - DNA, 2337 bp, Artificial Sequence
  derived and/or modified sequence
cagtaccggcctcctccagcagggggcgctgtgggatccgccgctgtccgggacgaaccagcaagccgctctcggtccacacacgctctgtctgcctgccccgagtcccccgggaggccgcggggtttggggaagtgtttctaggagacggcgctcaccggctgcacctgcgccgttgacgccaccggggccggcagacagacccgcggcgctggctggtggagggagttcccgcttgctctctgtcgctgtcaccgccctgtttctgtagccgtatggtacgcctgtgagaccggctgccggctgacgtctccttgcgatggagcatatccggacgaccaaggtcgaacaagtaaaattacttgaccgattcagtaccagcaacaagtcattaacaggaacactgtatcttacggctacacatctattatttatcgactctcatcaaaaagaaacctggatattacaccaccatattgcctcagtagagaaacttgctttgactacttctggatgcccccttgtgatacagtgcaagaacttcagaactgtgcatttcattgttcccagagaaagagattgccatgatatttacaactctttgctacaactgtcaaaacaagcaaaatatgaagatctctatgcattttcttataatcccaaacaaaatgattcagaacgactacaaggctggcagctcattgatctcgctgaggaatataagaggatgggagtgccaaactcacactggcagttgtctgatgccaaccgggactacaagatttgtgaaacttaccccagagaactttatgttccccggatagcaagcaaaccaataattgttggtagttccaagttccggagcaagggaagattcccagttctttcctactatcatcaagataaggaggctgccatttgtcgatgtagtcagccactctctggattcagtgccaggtgcctggaggatgaacatttgcttcaagccattagtaaagccaatccagtcaatcgctatatgtacgtcatggataccaggccaaaactgaatgcaatggccaacagagcagctggaaaaggttatgaaaatgaagacaactattccaatattagatttcagtttgttggaattgaaaatattcatgtcatgaggtccagccttcagaaattattggaagtcaatggcactaaagggctttctgtcaatgatttctactccggtttggagagctcgggatggcttcgccatatcaaagctgttatggatgctgcaatcttcttggccaaagcaataacagttgaaaatgcaagtgtgttggtgcattgttccgatggttgggataggacttcccaggtttgttccctgggttctcttttattggattcctactacaggacaatcaaaggattcatggttttaatagaaaaggattggatctcttttggacataaattttcagagaggtgtggccagttggatggtgacccaaaggaagtctcaccagtgtttactcagttcttggaatgtgtgtggcatttgaccgaacagtttccacaagcctttgaattcagtgaagcatttcttcttcagatccatgagcatattcattcatgccagtttggaaacttccttggaaattgtcagaaggaaagagaagagctcaagttgaaggagaagacttattccctgtggccatttcttttggaagaccaaaagaagtacttaaatcctctctacagttccgaatctcacagatttacagttttggagccaaatacagtatctttcaattttaagttttggaggaacatgtaccatcaatttgatcgaacactgcatcctaggcagtctgtatttaatataattatgaatatgaatgagcaaaataaacaattagagaaagatattaaagacctagaatctctaacctcttactcatccttcaagatcatcgtaggccaatgaatccttgaatttgtggtcaacaagaggtcttctgtaggctgaagtcagggctgagtggtctgcttgtgatctcctaggaattcaagtaaatccatgtacttcttgaacatagctcatagcagaggactgagccgtgaaaatgcttacatgcctgcctcctctgacacattataagctccctgaggatggggaccaaggcttatttcatcgttgtatcctcagcatctgaccaatagcaggcactaagtcattactgaaaagaactgagcatgacacccaagggaacagatgaggtggaggtaggacaaggaagactgaggagtctccatggaaccttccagggagagacagtcaataaactctcatcagtc

SEQ ID NO: 148758 - DNA, 1963 bp, Artificial Sequence
  derived and/or modified sequence
cagtaccggcctcctccagcagggggcgctgtgggatccgccgctgtccgggacgaaccagcaagccgctctcggtccacacacgctctgtctgcctgccccgagtcccccgggaggccgcggggtttggggaagtgtttctaggagacggcgctcaccggctgcacctgcgccgttgacgccaccggggccggcagacagacccgcggcgctggctggtggagggagttcccgcttgctctctgtcgctgtcaccgccctgtttctgtagccgtatggtacgcctgtgagaccggctgccggctgacgtctccttgcgatggagcatatccggacgaccaaggtcgaacaagtaaaattacttgaccgattcagtaccagcaacaagtcattaacaggaacactgtatcttacggctacacatctattatttatcgactctcatcaaaaagaaacctggatattacaccaccatattgcctcagtagagaaacttgctttgactacttctggatgcccccttgtgatacagtgcaagaacttcagaactgtgcatttcattgttcccagagaaagagattgccatgatatttacaactctttgctacaactgtcaaaacaagcaaaatatgaagatctctatgcattttcttataatcccaaacaaaatgattcagaacgactacaaggctggcagctcattgatctcgctgaggaatataagaggatgggagtgccaaactcacactggcagttgtctgatgccaaccgggactacaagatttgtgaaacttaccccagagaactttatgttccccggatagcaagcaaaccaataattgttggtagttccaagttccggagcaagggaagattcccagttctttcctactatcatcaagataaggaggctgccatttgtcgatgtagtcagccactctctggattcagtgccaggtgcctggaggatgaacatttgcttcaagccattagtaaagccaatccagtcaatcgctatatgtacgtcatggataccaggccaaaactgaatgcaatggccaacagagcagctggaaaaggttatgaaaatgaagacaactattccaatattagatttcagtttgttggaattgaaaatattcatgtcatgaggtccagccttcagaaattattggaagtcaatggcactaaagggctttctgtcaatgatttctactccggtttggagagctcgggatggcttcgccatatcaaagctgttatggatgctgcaatcttcttggccaaagcaataacagttgaaaatgcaagtgtgttggtgcattgttccgatggttgggataggacttcccaggtttgttccctgggttctcttttattggattcctactacaggacaatcaaaggattcatggttttaatagaaaaggattggatctcttttggacataaattttcagagaggtgtggccagttggatggtgacccaaaggaagtctcaccagtgtttactcagttcttggaatgtgtgtggcatttgaccgaacagtttccacaagcctttgaattcagtgaagcatttcttcttcagatccatgagcatattcattcatgccagtttggaaacttccttggaaattgtcagaaggaaagagaagagctcaagttgaaggagaagacttattccctgtggccatttcttttggaagaccaaaagaagtacttaaatcctctctacagttccgaatctcacagatttacagttttggagccaaatacagtatctttcaattttaagttttggaggaacatgtaccatcaatttgatcgaacactgcatcctaggcagtctgtatttaatataattatgaatatgaatgagcaaaataaacaattagagaaagatattaaagacctagaatcttttacaagttttgctgctgcaagagtgatacaaggtcag

SEQ ID NO: 148759 - DNA, 570 bp, Artificial Sequence
  derived and/or modified sequence
atgcccgtgtggaagctgccctggaagctgagcgagggcaagcggagggcacaggtggagggggaggatctttttccggtagcgatctctttcggccggcccaaggaggtcctgccactttacagtagtgaatcccacaggttcacagttcttgaaccaaataccgtcagtttcaacttcaaattctggcgcaatatgtatcaccagtttgacagaaccctccatccgcggcagtctgtgttcaatatcattatgaatatgaacgaacagaacaaacaactggagaaggatatcaaggacctggagagtaaaataaagcagcggaaaaacaaacagaccgacggcatcctcactaaggaacttctgcacagcgtgcatccagagagcccaaatctgaaaacctctttatgcttcaaagagcagacactgttaccagtgaatgacgcccttaggactattgaagggtcttctcccgccgataacaggtactccgaatatgcagaggaattctcgaagtcagaacctgccgtagtctctttggagtacggcgtggcaagaatgacctgttag

SEQ ID NO: 148760 - DNA, 1866 bp, Artificial Sequence
  derived and/or modified sequence
atggagcacatccggaccaccaaggtggagcaggtgaagctgctggatcgttttagtaccagtaataagtcacttaccggaacgctgtatctgactgccacccatctactctttatagacagtcaccagaaggaaacctggatcctccatcaccacatcgcctctgttgaaaaactcgcactcaccacctccggatgtcccctcgtgatccagtgtaagaatttcaggaccgtccatttcatcgttccgcgggagagggattgtcatgatatctacaacagcttgctccagctgtcaaaacaggccaagtacgaagacttatacgctttcagttataatcccaagcagaatgacagtgaacggctgcaaggatggcagctcatcgacctcgcggaggagtacaaaaggatgggcgtccccaattcgcattggcagttgagtgatgctaaccgcgactacaaaatatgtgaaacgtacccccgtgagctatacgtgccccggattgcgagcaaacccatcatcgttggcagttccaagttcagaagcaaaggaagatttccagtcctgtcctattaccatcaggataaggaggcagccatctgtaggtgtagccagccactgtctggctttagtgctcgctgcctcgaggacgaacatctgctgcaggcaatcagtaaagcgaatccggtgaatcgctatatgtatgtcatggacacaagaccgaagctaaacgccatggccaaccgggctgcaggcaaggggtacgagaacgaagacaactactctaacatccgcttccagtttgtagggattgagaatatacacgtcatgcgcagctcactgcagaagttgctcgaagttaacggtacaaagggcctaagtgtgaatgacttttatagtggattggaatcctccggttggttacgccatattaaggctgtgatggacgcagccatctttttggctaaagcgatcaccgtggaaaatgcgtctgtgttggtgcactgttccgacgggtgggatcggacttcccaggtgtgttcactcggcagtctactattagacagctactaccgtactattaagggattcatggtcttaattgaaaaagactggatctcttttgggcataagttctccgagaggtgcggacagctggacggagaccctaaggaagtatctccagtattcacccagtttctcgagtgtgtttggcacctcactgagcagttcccgcaggcatttgagttctcagaggccttcttgcttcagatccatgagcatatacatagctgccagtttggcaacttcctgggaaactgtcagaaggaaagagaggagctgaaactgaaagagaaaacctattccctctggcccttcttgctggaagaccagaagaaatacctgaatcccctgtactcaagcgagtcacaccgctttacagtgctggaacctaacactgttagcttcaatttcaagttttggagaaacatgtatcatcaatttgatcgaacattgcacccacggcaaagtgtcttcaatattattatgaacatgaatgaacagaataagcagctagagaaagatatcaaagacctggagtccaagattaagcaaagaaagaataagcagacagatgggatcctgacgaaggagttgcttcatagtgttcacccagagtctccgaatctaaagacttctctctgctttaaggaacagacactgttacctgtgaacgacgctctcaggactatcgaaggctccagtcctgccgacaatagatattcggagtacgctgaggaattctcgaaaagcgagccagctgttgtcagtttagaatatggcgtggcgcggatgacctgttag

SEQ ID NO: 148761 - DNA, 1647 bp, Artificial Sequence
  derived and/or modified sequence
atggagcacatccggaccaccaaggtggagcaggtgaagctgctggaccgcttttccacttccaataaatccctcacaggcacactttatctgactgccacccatctgctctttatcgattcccatcaaaaggagacgtggatcctgcaccatcacatcgcctcagtggagaagctggcgcttactacgagcggatgtcctttggtgatacagtgcaagaacttcaggacagtgcacttcatcgtccctcgagaacgggattgtcacgacatttataactctctgctccagctctcgaaacaggccaaatatgaggatctgtatgccttttcatacaatcctaagcagaatgattcagagaggctccaagggtggcagctcatcgacctcgcagaggaatacaaacgtatgggagtcccaaactctcactggcaactgagcgatgcaaatagggattacaaaatatgcgagacataccctcgggaactttacgtcccaagaatcgcatctaagccaattattgttggatcaagcaagttccgctcaaagggtagattcccggtcttatcttactaccaccaggacaaagaggccgccatctgccggtgcagccagcctctgtctgggttcagcgcccgctgtctagaggacgagcatctcttgcaggccatctcaaaagccaatcccgtgaatcggtatatgtatgtcatggataccagacccaaactgaatgcaatggctaacagggccgccggcaaggggtatgagaatgaggataactatagcaacatcaggttccagttcgtaggcatcgaaaacattcatgtgatgcgtagttcattgcaaaagctcctggaagtgaatgggaccaaggggctcagtgtgaatgatttctactctggactggagtcttctggctggctgcggcatattaaggccgtcatggatgccgcaatatttttggctaaagccatcactgtcgagaacgccagcgttcttgtgcattgttcagacggttgggacagaacctcgcaggtgtgctctttggggagtctcctgctggattcctactaccgaactatcaaagggtttatggtacttatcgaaaaagattggatcagtttcggacacaaattttccgagcgctgcggccaactcgatggcgacccaaaggaggtgtctccagttttcacccaattcctggagtgcgtatggcacctcaccgaacagtttccacaggcatttgaattctctgaggccttcctcttgcaaatacacgagcatatccactcctgccagttcggaaattttttaggcaactgtcaaaaggagagggaagaattgaaattaaaggagaaaacttacagcctctggcctttcctgctcgaagatcagaaaaaatacctgaatcctctttatagcagtgagagccataggtttaccgtactggaacccaacaccgtcagcttcaacttcaagttctggagaaatatgtatcatcaattcgaccgaaccctgcatccccggcaaagcgttttcaacatcattatgaacatgaatgagcagaataaacagctggaaaaagatatcaaagaccttgaatcattaacatcttatagctctttcaagatcatcgtcgggcagtag

SEQ ID NO: 148762 - DNA, 1647 bp, Artificial Sequence
  derived and/or modified sequence
atggagcacatccggaccaccaaggtggagcaggtgaagctgctggacagattcagcacgagcaacaagtccctcacggggacactgtacctgaccgccacccacttactctttatcgattctcaccagaaagagacctggatcctgcatcaccacatagcctccgttgagaaactcgccctcactacgtcagggtgccctctcgtgatccagtgcaaaaactttaggaccgtacactttattgtgccccgcgagagggattgccacgacatatacaattctttgctccagctcagtaagcaggcaaagtacgaagacctgtatgccttttcctataatcctaagcagaacgatagcgagaggctgcagggatggcagctgattgatcttgcggaagaatataagagaatgggcgttcccaacagccactggcaattgtctgacgccaacagagactacaaaatttgtgaaacctatccccgtgagctttatgtaccacggatcgcgtcaaagccaataattgtgggctcttccaagtttaggagtaagggccggttcccagttctgtcatattaccatcaagacaaagaggcggcaatctgtaggtgcagccaaccactgtctgggttcagtgccaggtgtctggaagatgaacacttactgcaggcaatctcaaaagcgaatccagtgaacaggtatatgtatgtgatggacactcgccctaaactgaatgccatggctaaccgcgctgccggcaaagggtatgaaaatgaggataactactctaatattcgctttcagttcgtcggaatcgagaacatccacgttatgcggtctagcttgcagaaactgttggaggtgaacggtaccaaaggcctgtcagtcaacgacttttatagcggtctcgagtctagcggttggctcaggcacatcaaagccgtcatggatgcggctatttttctagcaaaggccataactgtcgagaatgccagtgtgctcgtgcactgcagtgacggatgggacagaactagccaagtgtgctctctggggagcctgctcttagacagctattaccgcacaatcaagggcttcatggtgctgatcgagaaggactggatctcctttggccataagtttagtgagcgctgtggccagttggacggcgacccaaaggaagtgtctcccgtgttcactcagtttctggaatgtgtttggcatttgaccgagcagttccctcaagcctttgaattcagcgaagcgttcctcctgcaaattcacgaacacatacacagttgccagttcggcaacttcttaggcaactgtcagaaggaaagagaagaactaaagctgaaagagaaaacttatagtctctggcctttcctcctggaggatcagaaaaaatacctgaaccccctgtattcctcagaatctcaccggtttactgtccttgagcctaacaccgtttcattcaatttcaaattctggcgaaacatgtaccatcagtttgaccgaacactccacccccgccagagtgtgtttaacattattatgaacatgaacgaacagaataaacagctagaaaaggacattaaggacctcgaatcgtttacctccttcgccgcagccagagtgatacagggacagtag

SEQ ID NO: 148763 - DNA, 570 bp, Artificial Sequence
  derived and/or modified sequence
atgcctgtgtggaaactgccatggaaactcagcgaggggaaaaggcgagcccaggttgaaggggaggatctgttcccggtcgccatcagcttcgggcgtccaaaagaagtcctgcccctttatagcagtgaaagtcatcggtttacagtgctcgagcctaataccgtatctttcaattttaagttttggcgaaacatgtaccaccagtttgacagaacattgcatcctagacaatccgtcttcaatatcattatgaatatgaacgagcagaataagcagctagagaaagacattaaagatctcgagagtaagatcaaacagcgcaagaacaaacagaccgatggtatcctcacgaaagagctcctgcatagcgtccaccccgaaagccccaatttgaaaaccagcttgtgtttcaaggaacagaccttgctccccgtgaacgacgcactccgtacaattgagggctcttcgccggctgataacagatacagtgaatacgccgaagaattctccaagagtgaacccgctgtggtgagcctcgagtacggtgttgcaagaatgacctgctag

SEQ ID NO: 148764 - DNA, 1866 bp, Artificial Sequence
  derived and/or modified sequence
atggaacacatccggacaacaaaagtcgagcaggttaaacttctggacagattctcaacgtctaacaaaagcctcacagggactctataccttacggccacacacctgctttttatcgacagccatcagaaggaaacctggattctgcaccaccacatcgcttcagtggaaaaacttgcgttaaccacatcagggtgtccacttgtcattcagtgcaaaaactttcggaccgtgcacttcatcgtgccgagggagcgggattgccatgatatctataattccctccttcaactgtccaagcaggccaagtatgaagacctctatgccttctcctacaaccccaaacagaacgactctgagcgcctccaaggttggcagctaatagacctggctgaagaatacaagcgcatgggagttccaaactcgcactggcagctgagtgacgccaaccgggactacaagatatgtgagacctaccccagagagctctatgtccccagaatagccagcaaacctattatagtgggttcttctaaattccgctctaaggggaggtttcccgttctgtcctactaccaccaggataaagaggcagccatttgccgctgttctcagccactgagtggcttctctgccaggtgcctggaggacgagcacctactgcaggccataagtaaagccaatccggtgaaccggtatatgtatgtgatggatacaagaccaaaactgaacgcgatggcgaaccgggctgcaggaaaaggctacgagaatgaggataactatagcaacatccgattccagttcgtgggcatagagaacattcatgtcatgagatccagcctccagaaactgctagaggtcaacgggaccaagggcctcagcgtgaacgatttttactctggcctcgagtcatctggatggttgagacatatcaaagccgtgatggacgctgccatttttttggccaaggccatcacagtagagaatgcaagcgtgctcgttcactgcagcgacggttgggataggactagccaggtgtgctcacttgggagcttgttgttggattcttactatagaacaatcaagggattcatggttttgatagagaaggactggatctcttttgggcacaagttttccgagcgctgtgggcagctagacggtgaccctaaagaggtatcaccagttttcacccaattcctggaatgcgtctggcaccttaccgagcagttcccacaggcattcgagtttagcgaggcctttctgctacagatacatgagcacatacactcctgtcagttcgggaatttcttggggaattgccaaaaagagcgggaggagctgaaactgaaagagaaaacatactccctttggcctttcctcttggaggaccaaaaaaagtatcttaatcccctttactcatctgaaagccaccggttcaccgttctggaaccaaatactgtgtccttcaattttaagttctggcgaaacatgtatcaccagtttgataggactttacatcctcgacagtccgtatttaacattatcatgaacatgaatgagcagaacaagcagctagagaaagacatcaaagacctcgagagtaaaatcaaacagcggaagaataaacagactgacgggatcctcactaaagaactgctccacagcgttcatcccgagagcccaaatttgaaaacttccttgtgttttaaagagcagacattacttcctgtgaatgacgccctgcgaacaatagagggcagttctccagcggacaatagatactccgaatatgccgaggaattcagcaagtcggagcccgcagtggttagcctcgaatacggtgttgcccgtatgacctgctag

SEQ ID NO: 148765 - DNA, 1647 bp, Artificial Sequence
  derived and/or modified sequence
atggaacatattagaactactaaggtagaacaggtcaaacttctggatagattctccaccagcaataagtctctcacaggcactctgtatttaacagctacccatctgctcttcattgatagccaccagaaggagacttggattttacatcaccatatcgcatctgtagaaaaactggcgctcacaacatctgggtgtcctctagtaatccaatgcaaaaacttccggaccgtccactttatagtccctcgtgagcgcgattgccacgacatctataattctctgctccagctctcaaaacaagcgaagtatgaggatctctacgccttctcttacaatccaaagcagaacgactctgagaggctgcaagggtggcagctgatcgatctggcggaagaatacaaacgcatgggagttcccaattcacattggcagctttcagacgccaatagagactataagatttgtgagacatatcctcgcgagctgtatgttccacggattgcgagcaaaccaattattgtcggtagctcaaagttccgcagtaagggccgattcccagtgctgtcctactaccatcaggacaaagaggcagccatatgccgctgctctcagccattgtctggcttctcagccaggtgcctggaagatgagcatctacttcaggctatttctaaagcgaacccagtcaacagatatatgtacgtgatggacactcgccctaaattgaacgcaatggcaaacagggcagccggaaagggctatgagaacgaagacaattactccaatatcaggttccagtttgtcgggattgagaatattcatgtcatgaggtcctccctgcagaaacttctggaagttaatgggactaagggacttagtgtgaacgatttttacagtggcttagaatcctccgggtggctccgccatatcaaagctgtgatggatgccgcaattttcctggctaaagcaataactgttgaaaacgcctccgtccttgtccattgctccgacggttgggacaggacatcccaagtttgctcactcggcagtttgcttctcgactcatactataggaccatcaagggattcatggtactgattgagaaggactggatatccttcggacacaaatttagcgagcgatgcggacagttggacggtgatccgaaggaagttagccccgtattcacacagttccttgagtgcgtctggcacctgacagagcagtttcctcaggcatttgagtttagtgaggccttccttctgcagattcatgagcatatccacagttgccagtttggtaatttcttggggaactgtcaaaaagaaagagaggaattaaagttaaaagaaaagacctactccttatggccgttcttacttgaggaccaaaagaaatacttgaatcccctctattcttctgaaagccaccgctttacagtccttgaaccgaacaccgtctccttcaactttaagttctggagaaacatgtatcatcagtttgatcgcacgcttcaccctagacaatcagtcttcaacatcattatgaacatgaatgaacaaaacaaacagctcgagaaagacattaaagatctcgaatccctgacctcatatagctctttcaagatcatcgtgggccagtag

SEQ ID NO: 148766 - DNA, 1647 bp, Artificial Sequence
  derived and/or modified sequence
atggagcacattcgcactacgaaggtggaacaggtcaaattactcgacaggttcagcacttctaataaatcactgacaggcacactttatctcaccgccacgcatctgttgttcattgattcccatcagaaagagacatggatactacatcatcatattgctagtgtggagaagttagctttgacaacctctggctgtccgttagtgatacagtgtaagaattttcgcactgttcattttattgtgcccagggaacgcgattgccacgacatctataacagcctcctacagctcagcaaacaggctaaatacgaggatctgtatgcgttctcttataaccccaagcagaacgattctgagcggctgcagggctggcagctgattgacctggctgaggaatacaaacgcatgggtgtgcctaattcccactggcaactaagtgatgccaacagagactataaaatttgcgaaacttaccccagagagctgtacgtgccccgaattgcctcaaagcccatcatcgttggaagcagcaagttccgctcgaagggtaggttcccagtcctgtcttactaccaccaggataaggaagccgctatctgccggtgctctcagccgcttagcggcttcagcgcacgctgcctggaggatgagcatctcctgcaggcaataagcaaggccaatcccgtaaacaggtacatgtatgttatggacacaagacccaagctaaacgccatggccaaccgtgccgcaggaaagggttacgagaacgaggacaattatagcaatatcaggtttcaattcgtgggaatcgagaatatccacgttatgcgctcctctctccagaagttgctggaagtgaatggtacaaaaggcttgagcgtaaacgacttctactccggcctcgagtcctccggctggctgcggcacatcaaagccgttatggatgctgcaattttcctcgctaaggccattaccgtggagaacgcgtccgtcctggtgcattgctcggatgggtgggataggaccagtcaggtctgctccttggggtccctgctgttggacagctattatcggaccatcaagggcttcatggtgctgatcgagaaggactggatctcttttggtcacaagttcagcgagcggtgtgggcagcttgatggtgatcccaaagaagtatcccccgtttttactcagttcctggaatgcgtttggcaccttacggagcagttccctcaggcctttgagttcagtgaagccttcctgctacagatccacgagcacatccactcttgccagtttggcaatttcctgggaaattgccagaaagagagagaggaactgaagttgaaggagaagacatacagtctgtggccgtttctgcttgaggaccagaagaagtacctaaatccgctgtacagttcagagtcccatcggttcactgtgctcgagccgaatacggtgtcttttaatttcaagttctggagaaacatgtaccatcagttcgaccgaacactgcatccccgtcaatcagtctttaacatcatcatgaacatgaacgagcagaacaagcagcttgaaaaggacattaaggatctagaatcattcactagtttcgcagctgcgagagttattcagggccagtag

SEQ ID NO: 148767 - DNA, 570 bp, Artificial Sequence
  derived and/or modified sequence
atgcccgtgtggaagctgccctggaagctgagcgagggcaagagaagagcccaggtggagggcgaggacctgttccccgtggccatcagcttcggcagacccaaggaggtgctgcccctgtacagcagcgagagccacagattcaccgtgctggagcccaacaccgtgagcttcaacttcaagttctggagaaacatgtaccaccagttcgacagaaccctgcaccccagacagagcgtgttcaacatcatcatgaacatgaacgagcagaacaagcagctggagaaggacatcaaggacctggagagcaagatcaagcagagaaagaacaagcagaccgacggcatcctgaccaaggagctgctgcacagcgtgcaccccgagagccccaacctgaagaccagcctgtgcttcaaggagcagaccctgctgcccgtgaacgacgccctgagaaccatcgagggcagcagccccgccgacaacagatacagcgagtacgccgaggagttcagcaagagcgagcccgccgtggtgagcctggagtacggcgtggccagaatgacctgctag

SEQ ID NO: 148768 - DNA, 1866 bp, Artificial Sequence
  derived and/or modified sequence
atggagcacatcagaaccaccaaggtggagcaggtgaagctgctggacagattcagcaccagcaacaagagcctgaccggcaccctgtacctgaccgccacccacctgctgttcatcgacagccaccagaaggagacctggatcctgcaccaccacatcgccagcgtggagaagctggccctgaccaccagcggctgccccctggtgatccagtgcaagaacttcagaaccgtgcacttcatcgtgcccagagagagagactgccacgacatctacaacagcctgctgcagctgagcaagcaggccaagtacgaggacctgtacgccttcagctacaaccccaagcagaacgacagcgagagactgcagggctggcagctgatcgacctggccgaggagtacaagagaatgggcgtgcccaacagccactggcagctgagcgacgccaacagagactacaagatctgcgagacctaccccagagagctgtacgtgcccagaatcgccagcaagcccatcatcgtgggcagcagcaagttcagaagcaagggcagattccccgtgctgagctactaccaccaggacaaggaggccgccatctgcagatgcagccagcccctgagcggcttcagcgccagatgcctggaggacgagcacctgctgcaggccatcagcaaggccaaccccgtgaacagatacatgtacgtgatggacaccagacccaagctgaacgccatggccaacagagccgccggcaagggctacgagaacgaggacaactacagcaacatcagattccagttcgtgggcatcgagaacatccacgtgatgagaagcagcctgcagaagctgctggaggtgaacggcaccaagggcctgagcgtgaacgacttctacagcggcctggagagcagcggctggctgagacacatcaaggccgtgatggacgccgccatcttcctggccaaggccatcaccgtggagaacgccagcgtgctggtgcactgcagcgacggctgggacagaaccagccaggtgtgcagcctgggcagcctgctgctggacagctactacagaaccatcaagggcttcatggtgctgatcgagaaggactggatcagcttcggccacaagttcagcgagagatgcggccagctggacggcgaccccaaggaggtgagccccgtgttcacccagttcctggagtgcgtgtggcacctgaccgagcagttcccccaggccttcgagttcagcgaggccttcctgctgcagatccacgagcacatccacagctgccagttcggcaacttcctgggcaactgccagaaggagagagaggagctgaagctgaaggagaagacctacagcctgtggcccttcctgctggaggaccagaagaagtacctgaaccccctgtacagcagcgagagccacagattcaccgtgctggagcccaacaccgtgagcttcaacttcaagttctggagaaacatgtaccaccagttcgacagaaccctgcaccccagacagagcgtgttcaacatcatcatgaacatgaacgagcagaacaagcagctggagaaggacatcaaggacctggagagcaagatcaagcagagaaagaacaagcagaccgacggcatcctgaccaaggagctgctgcacagcgtgcaccccgagagccccaacctgaagaccagcctgtgcttcaaggagcagaccctgctgcccgtgaacgacgccctgagaaccatcgagggcagcagccccgccgacaacagatacagcgagtacgccgaggagttcagcaagagcgagcccgccgtggtgagcctggagtacggcgtggccagaatgacctgctag

SEQ ID NO: 148769 - DNA, 1647 bp, Artificial Sequence
  derived and/or modified sequence
atggagcacatcagaaccaccaaggtggagcaggtgaagctgctggacagattcagcaccagcaacaagagcctgaccggcaccctgtacctgaccgccacccacctgctgttcatcgacagccaccagaaggagacctggatcctgcaccaccacatcgccagcgtggagaagctggccctgaccaccagcggctgccccctggtgatccagtgcaagaacttcagaaccgtgcacttcatcgtgcccagagagagagactgccacgacatctacaacagcctgctgcagctgagcaagcaggccaagtacgaggacctgtacgccttcagctacaaccccaagcagaacgacagcgagagactgcagggctggcagctgatcgacctggccgaggagtacaagagaatgggcgtgcccaacagccactggcagctgagcgacgccaacagagactacaagatctgcgagacctaccccagagagctgtacgtgcccagaatcgccagcaagcccatcatcgtgggcagcagcaagttcagaagcaagggcagattccccgtgctgagctactaccaccaggacaaggaggccgccatctgcagatgcagccagcccctgagcggcttcagcgccagatgcctggaggacgagcacctgctgcaggccatcagcaaggccaaccccgtgaacagatacatgtacgtgatggacaccagacccaagctgaacgccatggccaacagagccgccggcaagggctacgagaacgaggacaactacagcaacatcagattccagttcgtgggcatcgagaacatccacgtgatgagaagcagcctgcagaagctgctggaggtgaacggcaccaagggcctgagcgtgaacgacttctacagcggcctggagagcagcggctggctgagacacatcaaggccgtgatggacgccgccatcttcctggccaaggccatcaccgtggagaacgccagcgtgctggtgcactgcagcgacggctgggacagaaccagccaggtgtgcagcctgggcagcctgctgctggacagctactacagaaccatcaagggcttcatggtgctgatcgagaaggactggatcagcttcggccacaagttcagcgagagatgcggccagctggacggcgaccccaaggaggtgagccccgtgttcacccagttcctggagtgcgtgtggcacctgaccgagcagttcccccaggccttcgagttcagcgaggccttcctgctgcagatccacgagcacatccacagctgccagttcggcaacttcctgggcaactgccagaaggagagagaggagctgaagctgaaggagaagacctacagcctgtggcccttcctgctggaggaccagaagaagtacctgaaccccctgtacagcagcgagagccacagattcaccgtgctggagcccaacaccgtgagcttcaacttcaagttctggagaaacatgtaccaccagttcgacagaaccctgcaccccagacagagcgtgttcaacatcatcatgaacatgaacgagcagaacaagcagctggagaaggacatcaaggacctggagagcctgaccagctacagcagcttcaagatcatcgtgggccagtag

SEQ ID NO: 148770 - DNA, 1647 bp, Artificial Sequence
  derived and/or modified sequence
atggagcacatcagaaccaccaaggtggagcaggtgaagctgctggacagattcagcaccagcaacaagagcctgaccggcaccctgtacctgaccgccacccacctgctgttcatcgacagccaccagaaggagacctggatcctgcaccaccacatcgccagcgtggagaagctggccctgaccaccagcggctgccccctggtgatccagtgcaagaacttcagaaccgtgcacttcatcgtgcccagagagagagactgccacgacatctacaacagcctgctgcagctgagcaagcaggccaagtacgaggacctgtacgccttcagctacaaccccaagcagaacgacagcgagagactgcagggctggcagctgatcgacctggccgaggagtacaagagaatgggcgtgcccaacagccactggcagctgagcgacgccaacagagactacaagatctgcgagacctaccccagagagctgtacgtgcccagaatcgccagcaagcccatcatcgtgggcagcagcaagttcagaagcaagggcagattccccgtgctgagctactaccaccaggacaaggaggccgccatctgcagatgcagccagcccctgagcggcttcagcgccagatgcctggaggacgagcacctgctgcaggccatcagcaaggccaaccccgtgaacagatacatgtacgtgatggacaccagacccaagctgaacgccatggccaacagagccgccggcaagggctacgagaacgaggacaactacagcaacatcagattccagttcgtgggcatcgagaacatccacgtgatgagaagcagcctgcagaagctgctggaggtgaacggcaccaagggcctgagcgtgaacgacttctacagcggcctggagagcagcggctggctgagacacatcaaggccgtgatggacgccgccatcttcctggccaaggccatcaccgtggagaacgccagcgtgctggtgcactgcagcgacggctgggacagaaccagccaggtgtgcagcctgggcagcctgctgctggacagctactacagaaccatcaagggcttcatggtgctgatcgagaaggactggatcagcttcggccacaagttcagcgagagatgcggccagctggacggcgaccccaaggaggtgagccccgtgttcacccagttcctggagtgcgtgtggcacctgaccgagcagttcccccaggccttcgagttcagcgaggccttcctgctgcagatccacgagcacatccacagctgccagttcggcaacttcctgggcaactgccagaaggagagagaggagctgaagctgaaggagaagacctacagcctgtggcccttcctgctggaggaccagaagaagtacctgaaccccctgtacagcagcgagagccacagattcaccgtgctggagcccaacaccgtgagcttcaacttcaagttctggagaaacatgtaccaccagttcgacagaaccctgcaccccagacagagcgtgttcaacatcatcatgaacatgaacgagcagaacaagcagctggagaaggacatcaaggacctggagagcttcaccagcttcgccgccgccagagtgatccagggccagtag

SEQ ID NO: 148771 - protein, 660 aa, Artificial Sequence
  derived and/or modified sequence
MEHIRTPKVENVRLVDRVSPKKAALGTLYLTATHVIFVENSPDPRKETWILHSQISTIEKQATTATGCPLLIRCKNFQIIQLIIPQERDCHDVYISLIRLARPVKYEELYCFSFNPMLDKEEREQGWVLIDLSEEYTRMGLPNHYWQLSDVNRDYRVCDSYPTELYVPKSATAHIIVGSSKFRSRRRFPVLSYYYKDNHASICRSSQPLSGFSARCLEDEQMLQAIRKANPGSDFVYVVDTRPKLNAMANRAAGKGYENEDNYSNIKFQFIGIENIHVMRNSLQKMLEVCELKSPSMSDFLWGLENSGWLRHIKAIMDAGIFIAKAVSEEGASVLVHCSDGWDRTAQVCSVASLLLDPHYRTLKGFMVLIEKDWISFGHKFNHRYGNLDGDPKEISPVIDQFIECVWQLMEQFPCAFEFNERFLIHIQHHIYSCQFGNFLCNSQKERRELKIQERTYSLWAHLWKNRADYLNPLFRADHSQTQGTLHLPTTPCNFMYKFWSGMYNRFEKGMQPRQSVTDYLMAVKEETQQLEEELEALEERLEKIQKVQLNCTKVKSKQSEPSKHSGFSTSDNSIANTPQDYSGNMKSFPSRSPSQGDEDSALILTQDNLKSSDPDLSANSDQESGVEDLSCRSPSGGEHAPSEDSGKDRDSDEAVFLTA

SEQ ID NO: 148772 - protein, 555 aa, Artificial Sequence
  derived and/or modified sequence
MEHIRTPKVENVRLVDRVSPKKAALGTLYLTATHVIFVENSPDPRKETWILHSQISTIEKQATTATGCPLLIRCKNFQIIQLIIPQERDCHDVYISLIRLARPVKYEELYCFSFNPMLDKEEREQGWVLIDLSEEYTRMGLPNHYWQLSDVNRDYRVCDSYPTELYVPKSATAHIIVGSSKFRSRRRFPVLSYYYKDNHASICRSSQPLSGFSARCLEDEQMLQAIRKANPGSDFVYVVDTRPKLNAMANRAAGKGYENEDNYSNIKFQFIGIENIHVMRNSLQKMLEVCELKSPSMSDFLWGLENSGWLRHIKAIMDAGIFIAKAVSEEGASVLVHCSDGWDRTAQVCSVASLLLDPHYRTLKGFMVLIEKDWISFGHKFNHRYGNLDGDPKEISPVIDQFIECVWQLMEQFPCAFEFNERFLIHIQHHIYSCQFGNFLCNSQKERRELKIQERTYSLWAHLWKNRADYLNPLFRADHSQTQGTLHLPTTPCNFMYKFWSGMYNRFEKGMQPRQSVTDYLMAVKEETQQLEEELEALEEVRHTCFVNLFSVLIS

SEQ ID NO: 148773 - DNA, 1983 bp, Artificial Sequence
  derived and/or modified sequence
atggagcatattagaacaccaaaagtagaaaatgtccgactcgtggatagagtatctcctaaaaaggccgcattagggacattgtatctcacagctacacacgtgatctttgtcgagaattcccctgaccccaggaaagagacttggattctgcactcccaaatctccacgatagagaagcaggctactaccgctacaggatgccccctgcttattcgatgtaagaacttccagattattcagttgatcataccccaggaacgagactgtcatgatgtctacatttcactgatccgcctcgcccgaccagtgaagtacgaggagttgtactgcttcagcttcaaccctatgcttgacaaagaggaaagagagcagggatgggtcctgatagatctctcagaagagtacacccgtatgggactccctaatcactactggcaactcagcgatgtgaacagagattatcgggtgtgtgacagctatcccacagagctttacgtgcctaaatccgccactgctcatattatcgtgggatcctcaaaatttaggtctcggagacgtttccctgtgttgtcctactattataaggacaatcatgcatccatttgtagatccagccagccgctctcaggtttcagcgctaggtgcctggaagacgaacagatgctccaggctataaggaaggccaaccccggtagcgattttgtgtacgtggtggatacacgacctaaactgaatgcaatggctaatcgcgctgctggtaaggggtacgagaatgaggacaactatagcaatattaagtttcaattcatcgggatcgaaaacatccacgtcatgcgtaatagcttgcagaagatgctggaggtgtgcgagctgaaaagcccctctatgtcggattttctgtggggcctggaaaactcaggctggctgcgccatattaaggcgatcatggacgccgggatattcatcgccaaagcagttagcgaggagggagctagtgtcctggtccactgctcagacggatgggatcgcaccgctcaggtttgttccgttgcctctcttttgctggacccacattatcgtactctgaaagggttcatggtcctgatagagaaagactggatcagttttggccacaagttcaatcataggtatggcaacctcgatggcgaccctaaggagataagtcccgttattgaccagtttattgaatgcgtctggcaactcatggaacagtttccatgcgcctttgaattcaatgaaagatttctcattcatattcaacaccatatctattcatgtcaatttggtaacttcttgtgtaattcacaaaaggagagacgggaacttaaaatacaagagcggacgtactctctgtgggcacacctgtggaagaatcgtgctgactacctgaaccccctgtttagagcagaccattcacaaacacaaggtactctccacctgccaacaaccccatgtaattttatgtataaattttggagcggaatgtacaatcgctttgagaagggtatgcagcctcggcagtccgttacggactatctgatggctgtgaaagaggagactcagcagctggaggaagaacttgaagccctagaagagagactggaaaaaatccaaaaagttcagttgaattgtaccaaggttaagtctaagcagtccgaacccagcaagcactctggctttagtacctccgacaacagcatcgcaaacacacctcaggactattccggcaatatgaaatcctttccaagcaggagcccatcacagggagacgaagactcagcgctgattttgacccaagataaccttaaatccagtgacccagacctgagcgccaatagcgatcaggaaagcggcgtcgaagacctgtcgtgtaggtcaccctctggcggcgagcatgccccaagcgaggatagtgggaaggatcgggactctgatgaggcggtctttcttaccgcttag

SEQ ID NO: 148774 - DNA, 1668 bp, Artificial Sequence
  derived and/or modified sequence
atggagcatataaggacaccaaaagtcgagaacgtacgattggtggatcgagtgtccccaaagaaggccgctttaggaaccttgtaccttaccgctacacatgttatatttgtggagaattcccctgaccctaggaaagagacatggatcctccattcacagatcagtaccatcgaaaaacaggccacaactgcgaccggctgtccactgctgatccggtgtaaaaatttccagatcatccaactgataattccccaagaacgagattgccatgatgtttacatatctctcataagactggcgaggcccgtgaagtacgaggagttatattgtttctccttcaacccaatgctggataaggaggagcgtgaacagggctgggtgctgatagatctctctgaggaatacaccaggatgggtctgcctaatcactattggcagctctccgatgtgaaccgcgactaccgcgtgtgtgacagctatcccacggagctttacgtccccaagtctgctacggcccacataattgtgggcagtagcaaatttcgtagcaggcggcgcttccccgtgctgagctactattataaggataatcacgcttcaatatgtagatcctcccagcctttgtccggattcagcgctagatgtctggaggatgagcaaatgctccaggctatcaggaaggctaacccaggcagtgattttgtttatgtggtggacactcgcccgaaactgaatgctatggcaaacagagccgctgggaaaggttacgagaatgaggataactacagcaacataaagttccagttcatcggaatcgaaaacatccacgttatgagaaattctttacagaaaatgttggaggtctgtgaattgaagtcacctagtatgtctgatttcctgtgggggctggagaattctggatggctgcgccacatcaaggccatcatggatgccggcatttttattgcgaaagccgtgagcgaggagggggcaagcgtgttagtccattgttccgatggttgggataggaccgcccaggtctgttccgttgcctcgctcttgctggatcctcattatagaaccctgaagggattcatggtcctcatagaaaaggattggatttccttcgggcataaattcaaccaccggtacggaaatctcgatggggaccccaaggaaatttcacccgttatcgaccagtttattgaatgcgtctggcagttgatggaacaatttccatgcgcctttgaatttaatgagcgcttcttaatccacatccagcatcatatttactcttgtcagtttggcaactttctgtgcaacagtcagaaagaacggcgagagctgaagattcaggaacggacttattcattatgggcacacctttggaagaatagagctgattacctcaaccccctttttcgcgcggatcatagccaaacgcaaggtactctgcatctgcctacgacgccctgcaacttcatgtacaaattctggtcaggcatgtacaaccgttttgagaaggggatgcaaccgagacaatcagtgaccgattacctgatggccgtgaaagaagaaactcagcagttagaagaggaattggaggccctagaggaagttaggcacacatgctttgttaatttgttttctgtcctgattagctag

SEQ ID NO: 148775 - DNA, 1983 bp, Artificial Sequence
  derived and/or modified sequence
atggagcacatccgcacccccaaggtggagaatgtgcggctggtggacagagtgagccccaagaaggccgccctgggcaccctgtacctgacagccacccacgtgatctttgtggagaacagcccagaccccaggaaggagacctggatcctgcacagccagatcagcaccatcgagaagcaggccaccacagccaccggctgccccctgctgatccgctgcaagaacttccagatcatccagctgatcatcccccaggagcgggactgccatgatgtgtacatcagcctcatccggctggcccggcctgtgaagtatgaggagctgtactgcttctccttcaaccccatgctggacaaggaggagcgggagcagggctgggtgctgattgacctgtctgaggagtacaccaggatgggcctgcccaaccactactggcagctgagtgatgtgaacagagactacagagtgtgtgacagctaccccacagagctgtatgtgcccaagagcgccacagcccacatcatcgtgggcagcagcaagttccgcagcagaagacgcttccctgtgctgagctactactacaaggacaaccacgccagcatctgccgcagcagccagcccctgagcggcttcagcgcccgctgcctggaggatgagcagatgctgcaggccatcaggaaggccaaccctggcagtgactttgtgtatgtggtggacacccggcccaagctgaatgccatggccaacagagctgctgggaagggctatgaaaatgaagacaactacagcaacatcaagttccagttcatcggcatcgagaacatccacgtgatgaggaacagcctgcagaagatgctggaggtgtgtgagctgaagagccccagcatgtctgacttcctgtggggcctggagaacagcggctggctgcggcacatcaaggccatcatggatgctggcatcttcatcgccaaggctgtgtctgaggagggcgcctctgtgctggtgcactgcagtgatggctgggacagaacagcccaggtgtgcagcgtggccagcctgctgctggacccccactaccgcaccctgaagggcttcatggtgctgattgagaaggactggatcagctttggccacaagttcaaccacagatatggcaacctggatggagaccccaaggagatcagccctgtgattgaccagttcattgaatgtgtgtggcagctgatggagcagttcccctgtgcctttgagttcaatgaacgcttcctgatccacatccagcaccacatctacagctgccagtttggaaacttcctgtgcaacagccagaaggagcggcgggagctgaagatccaggagaggacctacagcctgtgggcccacctgtggaagaacagagctgactacctgaaccccctcttccgggctgaccacagccagacccagggcaccctgcacctgcccaccaccccctgcaacttcatgtacaagttctggagcggcatgtacaacagatttgagaagggcatgcagccccggcagagcgtgacagactacctgatggctgtgaaggaggagacccagcagctggaggaggagctggaggccctggaggagcggctggagaagatccagaaggtgcagctgaactgcaccaaggtgaagagcaagcagagcgagcccagcaagcacagcggcttcagcaccagtgacaacagcatcgccaacaccccccaggactacagcggcaacatgaagagcttccccagccgcagccccagccagggagatgaagattctgccctgatcctgacccaggacaacctgaagagcagtgaccctgacctgagcgccaacagcgaccaggagagcggcgtggaggacctgagctgccgcagccccagcggcggggagcacgcccccagcgaggacagcggcaaggaccgggacagtgatgaagctgtgttcctgacagcctag

SEQ ID NO: 148776 - DNA, 1668 bp, Artificial Sequence
  derived and/or modified sequence
atggagcacatccgcacccccaaggtggagaatgtgcggctggtggacagagtgagccccaagaaggccgccctgggcaccctgtacctgacagccacccacgtgatctttgtggagaacagcccagaccccaggaaggagacctggatcctgcacagccagatcagcaccatcgagaagcaggccaccacagccaccggctgccccctgctgatccgctgcaagaacttccagatcatccagctgatcatcccccaggagcgggactgccatgatgtgtacatcagcctcatccggctggcccggcctgtgaagtatgaggagctgtactgcttctccttcaaccccatgctggacaaggaggagcgggagcagggctgggtgctgattgacctgtctgaggagtacaccaggatgggcctgcccaaccactactggcagctgagtgatgtgaacagagactacagagtgtgtgacagctaccccacagagctgtatgtgcccaagagcgccacagcccacatcatcgtgggcagcagcaagttccgcagcagaagacgcttccctgtgctgagctactactacaaggacaaccacgccagcatctgccgcagcagccagcccctgagcggcttcagcgcccgctgcctggaggatgagcagatgctgcaggccatcaggaaggccaaccctggcagtgactttgtgtatgtggtggacacccggcccaagctgaatgccatggccaacagagctgctgggaagggctatgaaaatgaagacaactacagcaacatcaagttccagttcatcggcatcgagaacatccacgtgatgaggaacagcctgcagaagatgctggaggtgtgtgagctgaagagccccagcatgtctgacttcctgtggggcctggagaacagcggctggctgcggcacatcaaggccatcatggatgctggcatcttcatcgccaaggctgtgtctgaggagggcgcctctgtgctggtgcactgcagtgatggctgggacagaacagcccaggtgtgcagcgtggccagcctgctgctggacccccactaccgcaccctgaagggcttcatggtgctgattgagaaggactggatcagctttggccacaagttcaaccacagatatggcaacctggatggagaccccaaggagatcagccctgtgattgaccagttcattgaatgtgtgtggcagctgatggagcagttcccctgtgcctttgagttcaatgaacgcttcctgatccacatccagcaccacatctacagctgccagtttggaaacttcctgtgcaacagccagaaggagcggcgggagctgaagatccaggagaggacctacagcctgtgggcccacctgtggaagaacagagctgactacctgaaccccctcttccgggctgaccacagccagacccagggcaccctgcacctgcccaccaccccctgcaacttcatgtacaagttctggagcggcatgtacaacagatttgagaagggcatgcagccccggcagagcgtgacagactacctgatggctgtgaaggaggagacccagcagctggaggaggagctggaggccctggaggaggtgcgccacacctgctttgtgaacctcttctctgtgctgatctcctag

SEQ ID NO: 148777 - DNA, 3850 bp, Artificial Sequence
  derived and/or modified sequence
gcgcccgcccgggaccctgcagacgtgggccagccatggagcacatccgtacgcccaaggttgaaaatgtccgcttggtagatcgagtgtctcctaaaaaagcagctctaggtactttgtatttgacggctacccatgtcatattcgtggaaaattcacctgacccaagaaaagaaacatggattcttcacagtcagatttccaccattgagaaacaggcaacaaccgctaccggatgccctctgctgattcgctgcaagaactttcagataatacagctcatcatacctcaggaaagagattgccacgacgtgtacatctccctgatacgccttgcaaggccagtgaaatatgaggagttatactgcttttcattcaaccccatgctggataaagaagaaagagagcaaggctgggtgctgatcgatcttagtgaagaatacacgcggatgggcctccctaatcattactggcagctcagcgatgtgaatagagactacagagtctgtgactcttatcctactgaactgtacgttcccaaatcggccacggcacacatcatagtggggagttccaaattccggagtagacggcgatttcctgtcctttcttactattataaagataaccacgcctccatctgccggagcagccagcccctgtccggcttcagtgcccggtgcctagaggacgagcagatgctccaggccattaggaaagccaatccaggaagtgacttcgtttatgtcgttgacacccggcctaaacttaatgcaatggcaaatcgtgctgcagggaaaggctatgagaatgaagacaattattccaatatcaagtttcagtttatcgggatagagaacatccatgtcatgaggaacagtctgcagaaaatgctggaagtgtgtgaacttaaatctccctccatgagtgatttcctgtggggtctggagaactctggctggttaaggcacattaaagccataatggatgcaggaatcttcattgcaaaggcagtgtcagaggaaggggcaagtgtgcttgttcactgttctgatggctgggacaggaccgctcaggtgtgctcggtggcaagcctgctgctggaccctcactaccggactctgaagggcttcatggtattaattgaaaaggactggatttcctttggtcataagtttaatcaccgatatggcaatctagatggtgacccaaaagaaatctctccagttattgaccagttcattgagtgtgtttggcagttaatggaacaatttccctgtgcctttgagttcaatgagaggtttttgattcacattcaacatcacatttattcctgccagtttggaaacttcctatgtaacagccaaaaggagagacgagaactcaagattcaagaaagaacatactcattatgggctcacctgtggaagaatcgggccgactacctgaatcctctgtttagagctgatcacagccagactcagggaacccttcatctccctacaacaccatgtaacttcatgtacaagttttggagtggaatgtataaccgctttgaaaaggggatgcagccccgacagtcagttacagattacctaatggcagtgaaggaagaaactcagcagctagaggaagaactagaggccctggaagaaaggctggaaaaaattcaaaaggtccagttaaattgcactaaggtgaagagtaagcaaagtgagcccagcaagcactcagggttttctacctcagacaacagcatagccaacactccccaggattacagtgggaatatgaaatcatttccatcccggagcccttcacaaggcgatgaagattctgctctgattctaacccaagacaatctgaaaagttcagatccagatctgtcagccaacagtgaccaagagtccggggtggaggatttgagctgtcggtctccaagtggtggtgagcatgcaccgagtgaagatagtggcaaggaccgggattctgatgaagccgtgtttctcactgcctgaagtttccctttggagttccaaagtaaaggacacataagcaacacttccaaaaacaagggaacaaggtggtttattgtaaaaacaggaaatggtgcatgtcattgagaactactttaatgcagctatgaaaagggaaaaaagtgcccagttcttgatttcttagatactgaagaggacgtagtcatttcatttatcaaatataaggaaaattattcaccattttgaagctcaccctagactatgaaaattatattcactgcagagcaattacttctgtcattacctgaagtgatcagtatctatcttccttgtcatagcatgcatctctcaaaaagcctccactcctttccctcacatctgtgatcatcatgattcttttagttcacttctagatgcatattttgtgttttctaaagcatctgacattatcctcctttccgaccctcttatacatatttctaaaaacaggcacattggtgagatgcaccctttttagttaatagatgcattcctaaggagcttttaattgcttatctttcaggcataatcatcactttaacttttccttggagcatatattttgaattgtgagaataattttgttgcttttctctgagatctatagtctgtttctcctcattatttaaaaatgctaaaccttgtatctcactttttctctaacactgatttaatagctaacgaggtagaagcaacattcattctcctggtcttacatatgaatttaagtatcagctttcttgtaataaccttttattactgttctagagactacactaccgacagtgtgggccagccaccagcctgatctcaaagtatcacattataaagttagtagataaaacatctgtgagtgaaaatccagtttcaagaaccagagaattgggttgtcatgtctgtttaatgaagggaataggttttgtaatctatcattttagaaattatgtaactggctaatatggtttaattaaccttagtaacatctcatgaccactgactgctgaaagttctgaaaagaatttttgttttgttacactgcacatttaagggagagtccctcccctatcttatgagttaaaaaagacttcactaggtgacctaaattaaacttagtggggaaaagtggccatgtttggacataaataaatggtattcacactgtatggttttaatatattagtacattctagaatgtaaaaggattaaactttacaatttagatcaatattttgaatatgtgaaaggattaatttaaactttacaatttacatcaatattttgaatatctgattttttttaatgggagaattattacatttcgctgaaatgaggacgagggcaagaaagcaacattgctgatctctctagtatgaaagatttggagggagtgttgcaatatatataaatgaaaacatttaattgtgttcatcatatttaaaaatatagaatatattagagaactgtgatttaaaagtactgttaatgtaaaaaataaagcaagtgtaattaattctttcagaatataaaatttgggcattctctgctgagcagttcccaaattaagtacaaggaatgtttattcattttctgcaatatactatatgtaatagggaataccttgctaaaataaaacttaggatatagtggtaatggctttcacatttttataacataacataactcacttcacaaccttcttggagctgtccactcttagaaactctgttgcctaatattgaggatgtggctttaatttcttccgtttgacagtgtatgtctataaaaacaataaacattttttaaaaaatgacaaa

SEQ ID NO: 148778 - DNA, 2158 bp, Artificial Sequence
  derived and/or modified sequence
gcgcccgcccgggaccctgcagacgtgggccagccatggagcacatccgtacgcccaaggttgaaaatgtccgcttggtagatcgagtgtctcctaaaaaagcagctctaggtactttgtatttgacggctacccatgtcatattcgtggaaaattcacctgacccaagaaaagaaacatggattcttcacagtcagatttccaccattgagaaacaggcaacaaccgctaccggatgccctctgctgattcgctgcaagaactttcagataatacagctcatcatacctcaggaaagagattgccacgacgtgtacatctccctgatacgccttgcaaggccagtgaaatatgaggagttatactgcttttcattcaaccccatgctggataaagaagaaagagagcaaggctgggtgctgatcgatcttagtgaagaatacacgcggatgggcctccctaatcattactggcagctcagcgatgtgaatagagactacagagtctgtgactcttatcctactgaactgtacgttcccaaatcggccacggcacacatcatagtggggagttccaaattccggagtagacggcgatttcctgtcctttcttactattataaagataaccacgcctccatctgccggagcagccagcccctgtccggcttcagtgcccggtgcctagaggacgagcagatgctccaggccattaggaaagccaatccaggaagtgacttcgtttatgtcgttgacacccggcctaaacttaatgcaatggcaaatcgtgctgcagggaaaggctatgagaatgaagacaattattccaatatcaagtttcagtttatcgggatagagaacatccatgtcatgaggaacagtctgcagaaaatgctggaagtgtgtgaacttaaatctccctccatgagtgatttcctgtggggtctggagaactctggctggttaaggcacattaaagccataatggatgcaggaatcttcattgcaaaggcagtgtcagaggaaggggcaagtgtgcttgttcactgttctgatggctgggacaggaccgctcaggtgtgctcggtggcaagcctgctgctggaccctcactaccggactctgaagggcttcatggtattaattgaaaaggactggatttcctttggtcataagtttaatcaccgatatggcaatctagatggtgacccaaaagaaatctctccagttattgaccagttcattgagtgtgtttggcagttaatggaacaatttccctgtgcctttgagttcaatgagaggtttttgattcacattcaacatcacatttattcctgccagtttggaaacttcctatgtaacagccaaaaggagagacgagaactcaagattcaagaaagaacatactcattatgggctcacctgtggaagaatcgggccgactacctgaatcctctgtttagagctgatcacagccagactcagggaacccttcatctccctacaacaccatgtaacttcatgtacaagttttggagtggaatgtataaccgctttgaaaaggggatgcagccccgacagtcagttacagattacctaatggcagtgaaggaagaaactcagcagctagaggaagaactagaggccctggaagaagtaagacatacttgctttgttaatctattttctgtgcttatttcttgaagagcaaggcttcatgaaagcctcttaagattcagtgcaatacaaatatttcacatttttagtcagtagaacacctgaaacacaaccccatccaggtcaggactcagataaccgaagcccaaacctaggcatttaatgcatttcacacatctggtttgtggctcagttccacaaatttttggttgttccttattttaggtcaacttgtttggttactgttatttgagagtagtaaaattaatttttttctggaaagtgtgaaaaagtaacagaataaaatcaaatatatgtacttgtaaaactctttccccacttttagaaattatgttaactatgatattaatctataattggtaaaggggagactgactgtaaagtcttatcttttggcttctatgaacttccctgtacttggacagggaggttataataaaatgcttttcctaattggataa

SEQ ID NO: 148779 - DNA, 1983 bp, Artificial Sequence
  derived and/or modified sequence
atggagcacatccggacccccaaggtggagaacgtgcggctggtggaccgcgtgagcccaaaaaaagctgctctgggtacactgtatttaaccgccactcacgtcatctttgtcgaaaattcccctgacccgagaaaggaaacgtggattttgcatagtcagatctccactattgagaaacaagccactacagcgaccgggtgcccccttctgatacggtgcaagaacttccaaattattcaactgatcatcccacaggaaagggactgccacgatgtttatatctccctcattcgactcgctagacccgttaaatatgaggagctgtactgcttttcgttcaacccaatgctggacaaggaagagcgagaacaaggctgggtactcattgacctgtcagaagaatatacacggatgggtctccctaatcattactggcagttatctgatgtgaaccgagactatagggtgtgtgactcctacccaaccgagctgtatgtccctaagagcgccacagctcacattattgtcgggagcagcaaattcaggtcacgcagacgattccctgtgttatcatactactacaaggataaccatgccagcatctgcagaagttcacagcccctttcagggttcagcgctaggtgcctggaggacgaacaaatgcttcaggctatacgcaaagcaaatccaggcagtgacttcgtgtatgtggtagatacacggccaaagcttaacgcaatggccaatagagccgccggtaaaggctacgaaaatgaggacaattactccaacataaaatttcaattcatcgggatcgaaaacattcacgttatgagaaattctctgcaaaagatgttggaggtgtgtgagctaaagagccccagcatgtcagatttcctatggggcctcgaaaactcaggctggctccgccacattaaagctatcatggatgccggcatcttcatcgccaaagcagtgtcagaggaaggggcttctgtcctggtgcattgtagtgacggttgggaccggacggctcaggtttgctcagtcgcatctttgctattggacccccactaccgcaccctaaaggggtttatggttctgattgagaaggactggatatccttcggtcacaagtttaaccatagatacgggaacctcgacggagaccccaaggagatttctccagttattgaccagtttattgagtgtgtttggcaactcatggagcagtttccctgcgccttcgaattcaatgagagatttctcattcatatccagcaccatatctactcttgtcagttcggaaacttcttatgcaactcccaaaaggaaagaagagagctgaagattcaggaaagaacgtatagcctgtgggctcatttatggaaaaacagggccgactatctgaatcctctttttcgagccgatcatagtcaaacccaaggtactctccatctgccgacaacaccttgcaatttcatgtacaagttctggagcggcatgtacaacaggtttgaaaaagggatgcagcccaggcagtctgtgaccgattacttgatggcagtcaaggaagagacgcagcaacttgaggaggaactcgaagctcttgaagagaggctggagaaaattcagaaggtccagctcaattgtaccaaggtcaagtctaagcagtctgagcccagcaagcactctggattttctacaagtgacaatagtatcgccaatacaccccaggattattctggcaatatgaagagttttccttctagatctccttcccagggcgatgaagatagtgccctgattttgactcaggataacctgaagtccagcgaccccgatctcagcgccaatagtgaccaggagagtggagtcgaagacctgtcatgcagatcacctagtggtggcgagcacgccccttccgaagatagcgggaaggaccgggactcagatgaagcggtgtttttgactgcctag

SEQ ID NO: 148780 - DNA, 1668 bp, Artificial Sequence
  derived and/or modified sequence
atggagcacatccggacccccaaggtggagaacgtgcggctggtggacagagtgagtccgaaaaaagcagctctgggcaccctatatttaaccgccactcatgtcatattcgtggagaatagtcccgaccctcggaaagagacctggatcctgcactctcagattagcaccattgagaagcaagcaaccactgctactgggtgccccctccttatcagatgcaagaactttcaaatcattcagctgattatcccccaggagcgcgactgccatgacgtgtatatctccctgataaggctggctcgaccagtgaaatacgaagagctgtattgtttttcttttaatccaatgctggacaaggaggagcgcgagcagggatgggtattaatcgacttatctgaggagtacactagaatggggctcccgaaccactactggcaactgtctgatgtaaaccgggattatcgtgtttgcgattcctatcctaccgaactgtacgtcccgaaatccgccactgcccatataattgtggggtcttctaaattccgcagtagacgccgctttccagtcctaagctattattacaaagacaaccatgcatcaatatgtcgttcctctcagcctctgagcggcttcagtgcccggtgccttgaagatgaacagatgctgcaagctatccgcaaggccaatccaggatccgacttcgtgtacgtcgtcgacacccggccaaaactcaatgccatggccaacagggcagcaggaaaaggttatgaaaacgaggataactattccaatattaagttccagtttattggtattgaaaacattcacgtcatgaggaatagtcttcagaagatgctagaagtgtgtgaactgaagagtcctagcatgtcagatttcctttggggcctggaaaatagtggctggcttcgacatatcaaagccatcatggacgcggggattttcattgcaaaagcagtctcagaggaaggcgccagcgttctagtgcactgctcagacggctgggacagaaccgcccaggtctgttccgtggccagtctgctacttgatccacattacagaaccttaaaaggcttcatggtccttatcgagaaagactggatctcttttgggcacaaatttaaccataggtacggcaatctcgacggcgatcctaaggagatttcccctgtcattgatcaattcattgagtgcgtttggcagctgatggagcaatttccctgtgctttcgaattcaacgagagattcctcatacacatacaacatcatatatatagttgccagtttggcaacttcctgtgtaacagccagaaggaacggcgggaactgaagatccaggagagaacttactccctttgggctcacttgtggaaaaaccgggcagattatctgaaccctctctttagagcggatcattctcaaacgcagggcaccctgcaccttcccaccactccttgtaactttatgtacaagttctggtccggcatgtacaacaggtttgagaaaggaatgcagcctagacagtctgttactgattatcttatggccgttaaggaagaaacccagcaattggaagaagaactggaggctttggaagaggtccgacacacctgcttcgtgaacctcttctccgtgctcatctcgtag

SEQ ID NO: 148781 - DNA, 1983 bp, Artificial Sequence
  derived and/or modified sequence
atggaacatattagaactccgaaagtggagaatgttcggttggtggatagagtttccccaaagaaggcggctctcgggacattatacctgactgcaacgcacgtcatcttcgtggagaattctcccgatcccaggaaagaaacatggattctgcactcacagatttcaacgatagaaaagcaggccactaccgccaccggctgccccctgttgattcgctgcaagaatttccaaataatccagctcatcatccctcaggaacgcgattgtcatgatgtgtacatctcgctaatcaggttggccaggcccgtgaaatacgaggagctgtattgcttttccttcaatcctatgctggacaaagaggaacgtgagcagggatgggtgctcatagatctgtctgaagagtatacgcgtatgggtctccccaaccattactggcagttgtcggacgttaatagggactatcgggtatgcgattcgtatcccacagaactgtacgtgcccaagtctgcaactgcccatattatcgtcgggagctccaaattccgatcccgacgacgcttccctgtgctgtcatactattacaaggataaccatgcaagcatttgccgcagcagtcagcccttaagcggatttagtgcccgttgtctcgaggacgagcagatgctgcaggcaattcgaaaggcaaatcccggtagcgactttgtgtacgtagttgacacccgaccaaaacttaacgccatggcaaatcgggcagccggaaagggctatgaaaacgaagacaattattcaaatatcaagttccagttcattgggattgaaaacattcatgtgatgcgcaatagcctgcaaaagatgctcgaggtctgcgaactgaagtctccatccatgtccgatttcttgtggggactggagaactcaggctggcttaggcatattaaagctattatggacgctggcattttcattgctaaggctgtgtcagaggaaggcgcatctgtgctggtccactgctcggacgggtgggatagaacagcccaggtgtgctctgtcgctagtctcttactggatccccattacagaacgttaaagggtttcatggttctgattgagaaagactggatttctttcggacacaaattcaaccatagatatggcaaccttgacggagatcccaaggaaatcagtccagtgattgaccagttcatcgaatgtgtctggcagctgatggaacaatttccttgtgctttcgaattcaatgaacggtttctcatccacatacagcaccatatatactcatgccagtttgggaacttcctctgcaactcccagaaagagaggcgcgagctaaaaatccaggagagaacctactcattatgggctcatctttggaagaaccgcgcagactatctgaatcctttatttcgagccgatcattcccagactcaagggaccctgcaccttcctaccacaccctgtaactttatgtacaagttttggtccggcatgtataatcgatttgaaaaggggatgcaacccaggcaatctgtaacggattacctcatggctgtaaaggaagaaacccagcagctggaagaagaattagaggcacttgaagaaagactggaaaagatccagaaggttcagctgaactgtactaaagtaaaatccaagcagtccgagccgagcaaacactcagggttttctactagcgataattccatagcaaacactccccaggactactcaggcaacatgaagtcatttccttcacggtccccttcccagggggacgaggacagcgccctgattctgactcaagataacctgaaaagctccgatccggatcttagcgctaacagcgatcaagagtcgggagttgaagatctgagctgtcgctcacccagcggaggagaacacgccccttcggaagatagcgggaaagatcgggactccgacgaggctgtttttctgaccgcatag

SEQ ID NO: 148782 - DNA, 1668 bp, Artificial Sequence
  derived and/or modified sequence
atggaacacatcagaactcctaaagtagagaatgtcagactggtggaccgggtgtcaccgaagaaagcagctctcggtaccctgtacctgactgcaacacacgtaatattcgtcgaaaactcaccggacccacggaaggagacgtggatcctgcacagccagatttcgacgatcgagaaacaggccaccacggccactggatgccccttgctgatcagatgtaagaacttccaaattattcagctgattattccgcaggaacgtgactgccacgacgtgtatattagtctgataagactcgccaggccagtgaaatacgaggagctctattgtttctcgttcaatcctatgctcgataaagaggagagagagcagggttgggtcctgatagatctgagtgaagagtacacaaggatgggactgccgaaccattactggcaattaagtgacgtaaacagagactatcgcgtttgtgactcataccccaccgagctctacgtccccaagagtgccactgctcacataattgtggggagttcaaaatttcgctctcggagaagattccctgtgctgtcctactattataaagataaccacgcctcgatttgtcgttcttctcagcctctgtccggtttctccgccagatgcctggaggatgaacaaatgttacaagccattcgtaaggcgaaccctggaagcgattttgtttatgtcgtggacactcgcccaaaactgaatgccatggcaaaccgcgcagccggtaagggctatgagaacgaggacaactacagtaacatcaagttccagttcattggaattgaaaacatacacgtgatgaggaacagtttgcagaagatgctcgaagtttgcgagttgaaatcaccgtccatgtctgacttcctctgggggctcgaaaatagcggctggttgagacacataaaagctatcatggatgccggaatctttatcgcaaaagcagtaagcgaggaaggagcctctgtcctagttcattgctctgacgggtgggaccggacggctcaggtttgcagtgtggcatcactgctgctggacccccactacaggaccttgaaaggttttatggtgttgatagaaaaggattggatcagcttcggccataagttcaaccataggtacggcaatttagacggggatccaaaagaaatttcccccgtcattgatcaatttatcgagtgcgtgtggcagcttatggagcagtttccgtgtgccttcgagttcaatgagaggttcctcattcatatccagcatcacatttactcttgccaattcggaaacttcctgtgcaactcccagaaagagcgccgagagctgaagatacaggaaagaacttattccttgtgggcgcacctgtggaaaaatagagccgactaccttaatcctctgtttagagccgaccactctcagacgcagggtacactgcacctacctactacgccatgcaatttcatgtataaattctggtctggcatgtacaaccggtttgaaaaagggatgcaaccacgtcaaagcgtcaccgactatctgatggcagttaaggaagaaacccaacagcttgaagaagagctcgaggcccttgaagaggtgcgccatacatgcttcgtgaacctgttttctgtgctgatctcctag

SEQ ID NO: 148783 - DNA, 1983 bp, Artificial Sequence
  derived and/or modified sequence
atggagcacatcagaacccccaaggtggagaacgtgagactggtggacagagtgagccccaagaaggccgccctgggcaccctgtacctgaccgccacccacgtgatcttcgtggagaacagccccgaccccagaaaggagacctggatcctgcacagccagatcagcaccatcgagaagcaggccaccaccgccaccggctgccccctgctgatcagatgcaagaacttccagatcatccagctgatcatcccccaggagagagactgccacgacgtgtacatcagcctgatcagactggccagacccgtgaagtacgaggagctgtactgcttcagcttcaaccccatgctggacaaggaggagagagagcagggctgggtgctgatcgacctgagcgaggagtacaccagaatgggcctgcccaaccactactggcagctgagcgacgtgaacagagactacagagtgtgcgacagctaccccaccgagctgtacgtgcccaagagcgccaccgcccacatcatcgtgggcagcagcaagttcagaagcagaagaagattccccgtgctgagctactactacaaggacaaccacgccagcatctgcagaagcagccagcccctgagcggcttcagcgccagatgcctggaggacgagcagatgctgcaggccatcagaaaggccaaccccggcagcgacttcgtgtacgtggtggacaccagacccaagctgaacgccatggccaacagagccgccggcaagggctacgagaacgaggacaactacagcaacatcaagttccagttcatcggcatcgagaacatccacgtgatgagaaacagcctgcagaagatgctggaggtgtgcgagctgaagagccccagcatgagcgacttcctgtggggcctggagaacagcggctggctgagacacatcaaggccatcatggacgccggcatcttcatcgccaaggccgtgagcgaggagggcgccagcgtgctggtgcactgcagcgacggctgggacagaaccgcccaggtgtgcagcgtggccagcctgctgctggacccccactacagaaccctgaagggcttcatggtgctgatcgagaaggactggatcagcttcggccacaagttcaaccacagatacggcaacctggacggcgaccccaaggagatcagccccgtgatcgaccagttcatcgagtgcgtgtggcagctgatggagcagttcccctgcgccttcgagttcaacgagagattcctgatccacatccagcaccacatctacagctgccagttcggcaacttcctgtgcaacagccagaaggagagaagagagctgaagatccaggagagaacctacagcctgtgggcccacctgtggaagaacagagccgactacctgaaccccctgttcagagccgaccacagccagacccagggcaccctgcacctgcccaccaccccctgcaacttcatgtacaagttctggagcggcatgtacaacagattcgagaagggcatgcagcccagacagagcgtgaccgactacctgatggccgtgaaggaggagacccagcagctggaggaggagctggaggccctggaggagagactggagaagatccagaaggtgcagctgaactgcaccaaggtgaagagcaagcagagcgagcccagcaagcacagcggcttcagcaccagcgacaacagcatcgccaacaccccccaggactacagcggcaacatgaagagcttccccagcagaagccccagccagggcgacgaggacagcgccctgatcctgacccaggacaacctgaagagcagcgaccccgacctgagcgccaacagcgaccaggagagcggcgtggaggacctgagctgcagaagccccagcggcggcgagcacgcccccagcgaggacagcggcaaggacagagacagcgacgaggccgtgttcctgaccgcctag

SEQ ID NO: 148784 - DNA, 1668 bp, Artificial Sequence
  derived and/or modified sequence
atggagcacatcagaacccccaaggtggagaacgtgagactggtggacagagtgagccccaagaaggccgccctgggcaccctgtacctgaccgccacccacgtgatcttcgtggagaacagccccgaccccagaaaggagacctggatcctgcacagccagatcagcaccatcgagaagcaggccaccaccgccaccggctgccccctgctgatcagatgcaagaacttccagatcatccagctgatcatcccccaggagagagactgccacgacgtgtacatcagcctgatcagactggccagacccgtgaagtacgaggagctgtactgcttcagcttcaaccccatgctggacaaggaggagagagagcagggctgggtgctgatcgacctgagcgaggagtacaccagaatgggcctgcccaaccactactggcagctgagcgacgtgaacagagactacagagtgtgcgacagctaccccaccgagctgtacgtgcccaagagcgccaccgcccacatcatcgtgggcagcagcaagttcagaagcagaagaagattccccgtgctgagctactactacaaggacaaccacgccagcatctgcagaagcagccagcccctgagcggcttcagcgccagatgcctggaggacgagcagatgctgcaggccatcagaaaggccaaccccggcagcgacttcgtgtacgtggtggacaccagacccaagctgaacgccatggccaacagagccgccggcaagggctacgagaacgaggacaactacagcaacatcaagttccagttcatcggcatcgagaacatccacgtgatgagaaacagcctgcagaagatgctggaggtgtgcgagctgaagagccccagcatgagcgacttcctgtggggcctggagaacagcggctggctgagacacatcaaggccatcatggacgccggcatcttcatcgccaaggccgtgagcgaggagggcgccagcgtgctggtgcactgcagcgacggctgggacagaaccgcccaggtgtgcagcgtggccagcctgctgctggacccccactacagaaccctgaagggcttcatggtgctgatcgagaaggactggatcagcttcggccacaagttcaaccacagatacggcaacctggacggcgaccccaaggagatcagccccgtgatcgaccagttcatcgagtgcgtgtggcagctgatggagcagttcccctgcgccttcgagttcaacgagagattcctgatccacatccagcaccacatctacagctgccagttcggcaacttcctgtgcaacagccagaaggagagaagagagctgaagatccaggagagaacctacagcctgtgggcccacctgtggaagaacagagccgactacctgaaccccctgttcagagccgaccacagccagacccagggcaccctgcacctgcccaccaccccctgcaacttcatgtacaagttctggagcggcatgtacaacagattcgagaagggcatgcagcccagacagagcgtgaccgactacctgatggccgtgaaggaggagacccagcagctggaggaggagctggaggccctggaggaggtgagacacacctgcttcgtgaacctgttcagcgtgctgatcagctag

SEQ ID NO: 148785 - protein, 307 aa, Artificial Sequence
  derived and/or modified sequence
MEADKDDTQQILKEHSPDEFIKDEQNKGLIDEITKKNIQLKKEIQKLETELQEATKEFQIKEDIPETKMKFLSVETPENDSQLSNISCSFQVSSKVPYEIQKGQALITFEKEEVAQNVVSMSKHHVQIKDVNLEVTAKPVPLNSGVRFQVYVEVSKMKINVTEIPDTLREDQMRDKLELSFSKSRNGGGEVDRVDYDRQSGSAVITFVEIGVADKILKKKEYPLYINQTCHRVTVSPYTEIHLKKYQIFSGTSKRTVLLTGMEGIQMDEEIVEDLINIHFQRAKNGGGEVDVVKCSLGQPHIAYFEE

SEQ ID NO: 148786 - protein, 29 aa, Artificial Sequence
  derived and/or modified sequence
MEADKDDTQQILKEHSPDEFIKDEQNKGL

SEQ ID NO: 148787 - DNA, 1501 bp, Artificial Sequence
  derived and/or modified sequence
ctgttagtgactaatcattggagacaaccatgtttagtatttgagcattggttaaatgctaaagaaaaatcgccgttaaagcagttttctttttcactgtctttttcttttcgcggggaacccagctgttcctgcgagggccacctcctcaggaagaccccgcagctctcccgcggcgcttctgcaggaggcagcgacagtttcgagaacccgggccttcccctcccagtgcctcccggggttccggcgtttcaggcgctgctgttttccgggaagggcaggcgcgctgggccttggggagctgcgctcggcgggcggacgcgggggatcatggaagctgataaagatgacacacaacaaattcttaaggagcattcgccagatgaatttataaaagatgaacaaaataagggactaattgatgaaattacaaagaaaaatattcaactaaagaaggagatccaaaagcttgaaacggagttacaagaggctaccaaagaattccagattaaagaggatattcctgaaacaaagatgaaattcttatcagttgaaactcctgagaatgacagccagttgtcaaatatctcctgttcgtttcaagtgagctcgaaagttccttatgagatacaaaaaggacaagcacttatcacctttgaaaaagaagaagttgctcaaaatgtggtaagcatgagtaaacatcatgtacagataaaagatgtaaatctggaggttacggccaagccagttccattaaattcaggagtcagattccaggtttatgtagaagtttctaaaatgaaaatcaatgttactgaaattcctgacacattgcgtgaagatcaaatgagagacaaactagagctgagcttttcaaagtcccgaaatggaggcggagaggtggaccgcgtggactatgacagacagtccgggagtgcagtcatcacgtttgtggagattggagtggctgacaagattttgaaaaagaaagaataccctctttatataaatcaaacctgccatagagttactgtttctccatacacagaaatacacttgaaaaagtatcagatattttcaggaacatctaagaggacagtgcttctgacaggaatggaaggcattcaaatggatgaagaaattgtggaggatttaattaacattcactttcaacgggcaaagaatggaggtggagaagtagatgtggtcaagtgttctctaggtcaacctcacatagcatactttgaagaatagacttaacagaatcatgaaaactatagctttttaacccggattactgtaaatgtttgacaaaaatgaatatgcttttccttaaaaaatgaaaactttaatttttaccatccatttatgtttagatacaaaacttatttccatgtttctgaatcttctttgtttcaaatggtgctgcatgttttcaactacaataagtgcactgtaataaaaagttttgtttatagaaaaaaaaaaaaaaaaaaaaaaa

SEQ ID NO: 148788 - DNA, 924 bp, Artificial Sequence
  derived and/or modified sequence
atggaggctgacaaggacgacactcaacagatactgaaggagcactctcccgatgaatttatcaaggatgagcagaacaaaggactgattgatgagatcacgaaaaagaatattcagctgaaaaaggaaattcagaagctagaaacggaactgcaggaggctaccaaggaatttcagatcaaggaggatatccctgagacgaagatgaaatttctgtctgttgagacgcccgaaaacgactcgcagctttctaatatctcttgcagcttccaggtcagtagcaaggtcccgtatgaaattcagaaaggccaggccctaattacatttgaaaaggaagaagtcgcgcagaatgtcgtaagcatgtctaagcaccacgttcagattaaggacgtcaatttggaggtgactgctaagcctgtgcctctgaattccggtgtgcgcttccaggtgtacgtggaggtgagcaaaatgaagatcaacgtcactgagattccagacaccttacgagaagaccagatgcgcgacaagctcgaactcagtttcagcaagagcagaaacggggggggggaagtcgaccgagttgactatgatcgccagtccggaagcgccgtcatcaccttcgttgagattggtgtggctgataaaattctcaagaagaaggagtaccctttgtacatcaatcagacttgccaccgggttaccgtgagcccatacactgaaattcacctgaaaaagtatcagatcttttcggggacttccaagcgcactgttctcctcactggcatggaaggaatccagatggacgaggagatcgtggaagaccttattaacatccactttcagagagcaaaaaacggaggcggtgaagtggatgtggttaagtgttcactggggcagccccacattgcttatttcgaagagtag

SEQ ID NO: 148789 - DNA, 90 bp, Artificial Sequence
  derived and/or modified sequence
atggaggccgataaggacgatacccagcagattttgaaagagcattcccccgatgagttcatcaaagacgaacagaataaagggctgtag

SEQ ID NO: 148790 - DNA, 924 bp, Artificial Sequence
  derived and/or modified sequence
atggaggccgacaaggatgacacccagcagatcctgaaggagcacagcccagatgagttcatcaaggatgagcagaacaagggcctgattgatgagatcaccaagaagaacatccagctgaagaaggagatccagaagctggagacagagctgcaggaggccaccaaggagttccagatcaaggaggacatccctgagaccaagatgaagttcctgtctgtggagaccccagaaaatgacagccagctgagcaacatcagctgcagcttccaggtgagcagcaaggtgccctatgagatccagaagggccaggccctgatcacctttgagaaggaggaggtggcccagaatgtggtgtccatgagcaagcaccacgtgcagatcaaggatgtgaacctggaggtgacagccaagcctgtgcccctgaacagcggcgtgcgcttccaggtgtatgtggaggtgtccaagatgaagatcaacgtgacagagatcccagacaccctgcgggaggaccagatgagggacaagctggagctgtccttcagcaagagcagaaatggaggaggagaggtggacagagtggactatgaccggcagagcggcagcgctgtgatcacctttgtggagattggagtggccgacaagatcctgaagaagaaggagtaccccctgtacatcaaccagacctgccaccgggtgacagtgagcccctacacagagatccacctgaagaagtaccagatcttcagcggcaccagcaagaggacagtgctgctgaccggcatggagggcatccagatggatgaggagatcgtggaggacctgatcaacatccacttccagagggccaagaatggaggaggagaggtggatgtggtgaagtgcagcctgggccagccccacatcgcctactttgaggagtag

SEQ ID NO: 148791 - DNA, 90 bp, Artificial Sequence
  derived and/or modified sequence
atggaggccgacaaggatgacacccagcagatcctgaaggagcacagcccagatgagttcatcaaggatgagcagaacaagggcctgtag

SEQ ID NO: 148792 - DNA, 924 bp, Artificial Sequence
  derived and/or modified sequence
atggaggccgacaaggacgacacccagcagatcctgaaggagcacagccctgacgagtttatcaaggacgagcagaacaaaggacttattgacgagatcactaaaaagaacattcagctaaagaaagagatccagaagctggagactgaattacaggaggcgactaaagagtttcagatcaaggaagatatacccgagactaaaatgaaatttctcagtgtcgaaacacccgaaaatgattctcagctaagtaacatatcgtgttcctttcaggtcagcagcaaggttccctacgagatccagaagggccaagccctcattacctttgagaaggaagaggtagcacagaacgttgtctcaatgagcaagcaccatgtccaaatcaaggacgttaacctcgaggttacagccaagccagtacctctaaactccggcgttagattccaggtttacgttgaggtgagcaagatgaaaataaatgttacagagatccctgacaccctgcgcgaagaccagatgagggacaaactggaactctcctttagtaagtccagaaacggaggaggagaggtcgaccgggtggactatgacagacagtccgggtcagctgtgatcacgttcgtggagatcggtgtggcagataaaattttgaagaaaaaagagtatcccctctacatcaaccagacttgtcaccgcgttactgttagcccctacacagagatccatttaaaaaagtatcagatattctcgggcaccagcaaacgcacggtattgctcaccggcatggagggcattcagatggacgaggagattgtcgaagatctcatcaacatccactttcagagagcgaagaacggaggaggggaagtcgatgtggtgaaatgttcactaggccagcctcatattgcttactttgaagagtag

SEQ ID NO: 148793 - DNA, 90 bp, Artificial Sequence
  derived and/or modified sequence
atggaggccgacaaggacgacacccagcagatcctgaaggagcacagccccgacgaattcatcaaggatgagcagaacaagggcctgtag

SEQ ID NO: 148794 - DNA, 1623 bp, Artificial Sequence
  derived and/or modified sequence
taccttataaaatacatgcaaaaaactggttttagaaagcgttccctaaaattagtgtgtacggaaacttcaggtatacttctgctttcctccgcaaaaccacccctttttaaaaatcgaaagtgaaattagtttttttttctgttagtgactaatcattggagacaaccatgtttagtatttgagcattggttaaatgctaaagaaaaatcgccgttaaagcagttttctttttcactgtctttttcttttcgcggggaacccagctgttcctgcgagggccacctcctcaggaagaccccgcagctctcccgcggcgcttctgcaggaggcagcgacagtttcgagaacccgggccttcccctcccagtgcctcccggggttccggcgtttcaggcgctgctgttttccgggaagggcaggcgcgctgggccttggggagctgcgctcggcgggcggacgcgggggatcatggaagctgataaagatgacacacaacaaattcttaaggagcattcgccagatgaatttataaaagatgaacaaaataagggactaattgatgaaattacaaagaaaaatattcaactaaagaaggagatccaaaagcttgaaacggagttacaagaggctaccaaagaattccagattaaagaggatattcctgaaacaaagatgaaattcttatcagttgaaactcctgagaatgacagccagttgtcaaatatctcctgttcgtttcaagtgagctcgaaagttccttatgagatacaaaaaggacaagcacttatcacctttgaaaaagaagaagttgctcaaaatgtggtaagcatgagtaaacatcatgtacagataaaagatgtaaatctggaggttacggccaagccagttccattaaattcaggagtcagattccaggtttatgtagaagtttctaaaatgaaaatcaatgttactgaaattcctgacacattgcgtgaagatcaaatgagagacaaactagagctgagcttttcaaagtcccgaaatggaggcggagaggtggaccgcgtggactatgacagacagtccgggagtgcagtcatcacgtttgtggagattggagtggctgacaagattttgaaaaagaaagaataccctctttatataaatcaaacctgccatagagttactgtttctccatacacagaaatacacttgaaaaagtatcagatattttcaggaacatctaagaggacagtgcttctgacaggaatggaaggcattcaaatggatgaagaaattgtggaggatttaattaacattcactttcaacgggcaaagaatggaggtggagaagtagatgtggtcaagtgttctctaggtcaacctcacatagcatactttgaagaatagacttaacagaatcatgaaaactatagctttttaacccggattactgtaaatgtttgacaaaaatgaatatgcttttccttaaaaaatgaaaactttaatttttaccatccatttatgtttagatacaaaacttatttccatgtttctgaatcttctttgtttcaaatggtgctgcatgttttcaactacaataagtgcactgtaataaaaagttttgtttatagatta

SEQ ID NO: 148795 - DNA, 924 bp, Artificial Sequence
  derived and/or modified sequence
atggaagccgacaaagacgatacacagcaaatcctgaaagagcattcccccgacgagttcatcaaggacgagcagaacaaagggctgattgatgaaatcacgaaaaaaaacatccagcttaagaaggaaatccagaaattggagactgagctgcaggaagccaccaaagaattccaaattaaagaggatatacctgagaccaagatgaagttcctttcggtcgagacacccgagaacgactcacaactttccaacattagctgcagctttcaagtttcgtctaaagttccatatgagatccaaaagggacaggctctgataacattcgaaaaggaggaagtcgcccagaatgtggtgagcatgtccaagcaccacgtccagatcaaggacgtaaacttagaggtcactgctaagcccgtgccattgaactcgggtgtccgcttccaggtctatgtggaagtctcaaagatgaagatcaatgtgacagaaatccctgacactttgagagaggaccagatgcgggacaaacttgagttgagtttttctaaaagccggaacggaggaggagaagttgaccgtgtggattacgacagacagtctggcagtgcagtcataacttttgtggaaatcggagtggcagataaaatattgaagaagaaggaatatcccttgtatatcaatcaaacctgccacagggttacagtgtcaccgtatacagaaatccacttaaaaaaatatcagatatttagcgggacctctaaaagaaccgtgctcttaaccgggatggaagggattcagatggacgaggaaatcgtggaggacctgatcaacattcatttccagcgggctaaaaacggcggtggtgaggtcgacgtggttaagtgttccttgggacagccacatatcgcttattttgaggaatag

SEQ ID NO: 148796 - DNA, 90 bp, Artificial Sequence
  derived and/or modified sequence
atggaggcagataaagacgacacacaacagatcctgaaggaacattcccccgacgaattcataaaggatgaacagaataagggtctttag

SEQ ID NO: 148797 - DNA, 924 bp, Artificial Sequence
  derived and/or modified sequence
atggaggccgacaaggacgacacccagcagatcctgaaggagcacagccccgacgagttcatcaaggacgagcagaacaagggcctgatcgacgagatcaccaagaagaacatccagctgaagaaggagatccagaagctggagaccgagctgcaggaggccaccaaggagttccagatcaaggaggacatccccgagaccaagatgaagttcctgagcgtggagacccccgagaacgacagccagctgagcaacatcagctgcagcttccaggtgagcagcaaggtgccctacgagatccagaagggccaggccctgatcaccttcgagaaggaggaggtggcccagaacgtggtgagcatgagcaagcaccacgtgcagatcaaggacgtgaacctggaggtgaccgccaagcccgtgcccctgaacagcggcgtgagattccaggtgtacgtggaggtgagcaagatgaagatcaacgtgaccgagatccccgacaccctgagagaggaccagatgagagacaagctggagctgagcttcagcaagagcagaaacggcggcggcgaggtggacagagtggactacgacagacagagcggcagcgccgtgatcaccttcgtggagatcggcgtggccgacaagatcctgaagaagaaggagtaccccctgtacatcaaccagacctgccacagagtgaccgtgagcccctacaccgagatccacctgaagaagtaccagatcttcagcggcaccagcaagagaaccgtgctgctgaccggcatggagggcatccagatggacgaggagatcgtggaggacctgatcaacatccacttccagagagccaagaacggcggcggcgaggtggacgtggtgaagtgcagcctgggccagccccacatcgcctacttcgaggagtag

SEQ ID NO: 148798 - DNA, 90 bp, Artificial Sequence
  derived and/or modified sequence
atggaggccgacaaggacgacacccagcagatcctgaaggagcacagccccgacgagttcatcaaggacgagcagaacaagggcctgtag

SEQ ID NO: 148799 - protein, 715 aa, Artificial Sequence
  derived and/or modified sequence
MAANMYRVGDYVYFENSSSNPYLIRRIEELNKTANGNVEAKVVCFYRRRDISSTLIALADKHATLSVCYKAGPGADNGEEGEIEEEMENPEMVDLPEKLKHQLRHRELFLSRQLESLPATHIRGKCSVTLLNETESLKSYLEREDFFFYSLVYDPQQKTLLADKGEIRVGNRYQADITDLLKEGEEDGRDQSRLETQVWEAHNPLTDKQIDQFLVVARSVGTFARALDCSSSVRQPSLHMSAAAASRDITLFHAMDTLHKNIYDISKAISALVPQGGPVLCRDEMEEWSASEANLFEEALEKYGKDFTDIQQDFLPWKSLTSIIEYYYMWKTTDRYVQQKRLKAAEAESKLKQVYIPNYNKPNPNQISVNNVKAGVVNGTGAPGQSPGAGRACESCYTTQSYQWYSWGPPNMQCRLCASCWTYWKKYGGLKMPTRLDGERPGPNRSNMSPHGLPARSSGSPKFAMKTRQAFYLHTTKLTRIARRLCREILRPWHAARHPYLPINSAAIKAECTARLPEASQSPLVLKQAVRKPLEAVLRYLETHPRPPKPDPVKSVSSVLSSLTPAKVAPVINNGSPTILGKRSYEQHNGVDGNMKKRLLMPSRGLANHGQARHMGPSRNLLLNGKSYPTKVRLIRGGSLPPVKRRRMNWIDAPDDVFYMATEETRKIRKLLSSSETKRAARRPYKPIALRQSQALPPRPPPPAPVNDEPIVIED

SEQ ID NO: 148800 - DNA, 2148 bp, Artificial Sequence
  derived and/or modified sequence
atggccgccaacatgtacagagtgggcgactacgtgtacttcgagaacagcagcagcaacccctacctgatcagaagaatcgaggagctgaacaagaccgccaacggcaacgtggaggccaaggtggtgtgcttctacagaagaagagacatcagcagcaccctgatcgccctggccgacaagcacgccaccctgagcgtgtgctacaaggccggccccggcgccgacaacggcgaggagggcgagatcgaggaggagatggagaaccccgagatggtggacctgcccgagaagctgaagcaccagctgagacacagagagctgttcctgagcagacagctggagagcctgcccgccacccacatcagaggcaagtgcagcgtgaccctgctgaacgagaccgagagcctgaagagctacctggagagagaggacttcttcttctacagcctggtgtacgacccccagcagaagaccctgctggccgacaagggcgagatcagagtgggcaacagataccaggccgacatcaccgacctgctgaaggagggcgaggaggacggcagagaccagagcagactggagacccaggtgtgggaggcccacaaccccctgaccgacaagcagatcgaccagttcctggtggtggccagaagcgtgggcaccttcgccagagccctggactgcagcagcagcgtgagacagcccagcctgcacatgagcgccgccgccgccagcagagacatcaccctgttccacgccatggacaccctgcacaagaacatctacgacatcagcaaggccatcagcgccctggtgccccagggcggccccgtgctgtgcagagacgagatggaggagtggagcgccagcgaggccaacctgttcgaggaggccctggagaagtacggcaaggacttcaccgacatccagcaggacttcctgccctggaagagcctgaccagcatcatcgagtactactacatgtggaagaccaccgacagatacgtgcagcagaagagactgaaggccgccgaggccgagagcaagctgaagcaggtgtacatccccaactacaacaagcccaaccccaaccagatcagcgtgaacaacgtgaaggccggcgtggtgaacggcaccggcgcccccggccagagccccggcgccggcagagcctgcgagagctgctacaccacccagagctaccagtggtacagctggggcccccccaacatgcagtgcagactgtgcgccagctgctggacctactggaagaagtacggcggcctgaagatgcccaccagactggacggcgagagacccggccccaacagaagcaacatgagcccccacggcctgcccgccagaagcagcggcagccccaagttcgccatgaagaccagacaggccttctacctgcacaccaccaagctgaccagaatcgccagaagactgtgcagagagatcctgagaccctggcacgccgccagacacccctacctgcccatcaacagcgccgccatcaaggccgagtgcaccgccagactgcccgaggccagccagagccccctggtgctgaagcaggccgtgagaaagcccctggaggccgtgctgagatacctggagacccaccccagaccccccaagcccgaccccgtgaagagcgtgagcagcgtgctgagcagcctgacccccgccaaggtggcccccgtgatcaacaacggcagccccaccatcctgggcaagagaagctacgagcagcacaacggcgtggacggcaacatgaagaagagactgctgatgcccagcagaggcctggccaaccacggccaggccagacacatgggccccagcagaaacctgctgctgaacggcaagagctaccccaccaaggtgagactgatcagaggcggcagcctgccccccgtgaagagaagaagaatgaactggatcgacgcccccgacgacgtgttctacatggccaccgaggagaccagaaagatcagaaagctgctgagcagcagcgagaccaagagagccgccagaagaccctacaagcccatcgccctgagacagagccaggccctgccccccagaccccccccccccgcccccgtgaacgacgagcccatcgtgatcgaggactag

SEQ ID NO: 148801 - DNA, 2148 bp, Artificial Sequence
  derived and/or modified sequence
atggcggccaacatgtaccgagtgggtgattatgtttactttgagaacagcagttctaatccttacctgatcagacggatagaggaactgaataagaccgccaacgggaatgtggaggcaaaagtcgtctgcttctatcgccgacgcgatatatcctccacactcatcgctttggcagataaacacgccactctcagcgtgtgctataaggcgggtcctggtgctgataatggggaggaaggggagatcgaagaggagatggaaaatcctgagatggtggatctgcctgaaaaactcaagcaccagttgcggcacagagaactttttctaagccgtcagctggagagtctcccagcaactcacatccgtggtaaatgtagcgtgactctcctgaacgagacagaatccctcaagtcatatctcgaaagagaagatttttttttttattcactcgtttatgacccccagcaaaagaccctcctcgctgataaaggagagataagagtggggaaccgatatcaggccgatatcacagacttgctcaaagaaggggaagaagatggacgcgatcaatcaagactggaaacccaggtgtgggaagcccacaatcctctaacagataagcagatagatcagttcctggtggtcgctaggagtgtcgggacctttgccagggcactcgactgcagtagctctgttcggcaaccctcgctccacatgagtgccgcagccgcttctcgtgacatcactctcttccacgcaatggacaccctacacaagaacatttatgacattagtaaggctattagcgccctggtcccacaggggggacccgtcctatgtcgggacgagatggaggagtggtctgctagtgaagccaacctgtttgaagaggcactcgaaaaatatggcaaagacttcaccgacattcagcaagattttttaccctggaagagtctgacctcaattatcgaatattactacatgtggaaaaccactgacaggtatgtgcaacagaagaggctcaaggctgcagaggcagaaagcaaacttaagcaggtgtacatccccaattacaataagccaaaccccaatcagatctcagtcaacaatgttaaggctggagtggtgaatgggacaggagcacctggccagtccccaggagccggcagagcttgcgaaagttgttacaccacacagagctatcaatggtatagttggggccctcccaacatgcagtgtaggctttgcgcatcttgttggacttactggaagaagtatggggggctgaagatgcccacaagattggacggcgagcggcctggtccaaaccggagtaatatgtctccacacgggttacctgcccggtcaagcggcagcccgaaattcgcaatgaaaactcggcaggctttctatttacacaccaccaaattgactcgcatcgctcgcagattgtgccgggagatcctgaggccttggcacgcggctcgccatccgtatcttcctattaattctgcagcaattaaagctgagtgtactgcaagactgcctgaagcctcacagagccctctcgtgcttaagcaagcagttcgaaagccccttgaggccgtgcttaggtatttggagacacatccaaggccaccaaagcccgatcccgtgaaatcagtcagcagcgtactgagctcccttactcctgcgaaggtcgcccctgtgatcaacaacgggtcacccactatcctggggaagagaagctatgaacagcacaatggagtggacggcaatatgaagaagcgcttgttaatgccctccaggggactggctaatcatgggcaggccaggcacatgggtccttctagaaacttactcctcaatgggaaaagctacccaaccaaggttcgcttgattaggggtggctcccttcctccagtgaagagacggcggatgaactggatcgacgcacccgacgatgttttctacatggccacagaggagaccagaaaaatccgaaaactgcttagctcttcggagactaaaagagcagcacgccgaccttacaaacccatcgcacttagacagtcccaggcattacctcccaggccacccccgcccgctccagtgaatgatgaaccgatcgtgattgaggactag

SEQ ID NO: 148802 - DNA, 2148 bp, Artificial Sequence
  derived and/or modified sequence
atggccgccaacatgtacagagtgggggactatgtgtactttgagaacagcagcagcaacccctacctgatcagaagaattgaggagctgaacaagacagccaatggaaatgtggaggccaaggtggtgtgcttctacagaagaagagacatcagcagcaccctcatcgccctggccgacaagcacgccaccctgtctgtgtgctacaaggccggccctggagctgacaatggagaggagggggagattgaggaggagatggagaaccctgagatggtggacctgcctgagaagctgaagcaccagctgcggcaccgggagctgttcctgagccggcagctggagagcctgcctgccacccacatccggggcaaatgttctgtgaccctgctgaatgaaacagagagcctgaagagctacctggagcgggaggacttcttcttctacagcctggtgtatgacccccagcagaagaccctgctggccgacaagggggagatccgggtgggcaaccgctaccaggccgacatcacagacctgctgaaggagggggaggaggatggccgggaccagagccggctggagacccaggtgtgggaggcccacaaccccctgacagacaagcagattgaccagttcctggtggtggcccggtctgtgggcacctttgcccgggccctggactgcagcagctctgtgcggcagcccagcctgcacatgtctgctgctgctgccagccgggacatcaccctcttccacgccatggacaccctgcacaagaacatctatgacatcagcaaggccatcagcgccctggtgccccagggcggccctgtgctgtgcagagatgagatggaggagtggagcgccagcgaggccaacctgtttgaggaggccctggagaagtatggcaaggacttcacagacatccagcaggacttcctgccctggaagagcctgaccagcatcatcgagtactactacatgtggaagaccacagaccgctacgtgcagcagaagaggctgaaggctgctgaggccgagagcaagctgaagcaggtgtacatccccaactacaacaagcccaaccccaaccagatctctgtgaacaacgtgaaggccggcgtggtgaatggcaccggggcccctggccagagccctggagctggccgggcctgtgagagctgctacaccacccagagctaccagtggtacagctggggcccccccaacatgcagtgccgcctgtgtgccagctgctggacctactggaagaagtatggaggcctgaagatgcccacccggctggatggagagaggcctggccccaacagaagcaacatgagcccccacggcctgcctgcccggagcagcggcagccccaagtttgccatgaagacccggcaggccttctacctgcacaccaccaagctgaccagaattgcccggcggctgtgccgggagatcctgcggccctggcatgctgcccggcacccctacctgcccatcaacagcgctgccatcaaggcagaatgtacagcccggctgcctgaggccagccagagccccctggtgctgaagcaggccgtgaggaagcccctggaggccgtgctgcgctacctggagacccaccccaggcctcccaagccagaccctgtgaagtctgtgtcctctgtgctgagcagcctgaccccagccaaggtggcccctgtgatcaacaacggcagccccaccatcctgggcaagaggagctatgagcagcacaatggagtggatggcaacatgaagaagaggctgctgatgcccagccggggcctggccaaccacggccaggcccggcacatgggccccagcaggaacctgctgctgaatggcaagagctaccccaccaaggtgcggctcatccggggcggcagcctgccccctgtgaagagaagaaggatgaactggattgatgccccagatgatgtgttctacatggccacagaggagaccaggaagatcaggaagctgctgagcagcagcgagaccaagagagctgcccggcggccctacaagcccatcgccctgcggcagagccaggccctgcccccccggcccccacctccagcccctgtgaatgatgagcccatcgtgattgaggactag

SEQ ID NO: 148803 - DNA, 2876 bp, Artificial Sequence
  derived and/or modified sequence
tcctcctcttcctctcccgcccgcgccgcggccctcccgtccctgcgcggcctcggcggcctcggcggcggcggcggcggcggcggcggcagcagcgcggcccctttaaacgcctgcggcgccccccgcccccgccatcgcgcctccattttcccggccgcccgcgccgagcgccgcgcccgccccgggcccctccgccgccgccggcccggacatggccgccaacatgtacagggtcggagactacgtctactttgagaactcctccagcaacccatacctgatccggagaatcgaggagctcaacaagacggccaatgggaacgtggaggccaaagtggtgtgcttctaccggaggcgggacatctccagcaccctcatcgccctggccgacaagcacgcaaccctgtcagtctgctataaggccggaccgggggcggacaacggcgaggaaggggaaatagaagaggaaatggagaacccggaaatggtggacctgcccgagaaactaaagcaccagctgcggcatcgggagctgttcctctcccggcagctggagtctctgcccgccacgcacatcaggggcaagtgcagcgtcaccctgctcaacgagaccgagtcgctcaagtcctacctggagcgggaggatttcttcttctattctctagtctacgacccacagcagaagaccctgctggcagataaaggagagattcgagtaggaaaccggtaccaggcagacatcaccgacttgttaaaagaaggcgaggaggatggccgagaccagtccaggttggagacccaggtgtgggaggcgcacaacccactcacagacaagcagatcgaccagttcctggtggtggcccgctctgtgggcaccttcgcacgggccctggactgcagcagctccgtccgacagcccagcctgcacatgagcgccgcagctgcctcccgagacatcaccctgttccacgccatggatactctccacaagaacatctacgacatctccaaggccatctcggcgctggtgccgcagggcgggcccgtgctctgcagggacgagatggaggagtggtctgcatcagaggccaaccttttcgaggaagccctggaaaaatatgggaaggatttcacggacattcagcaagattttctcccgtggaagtcgctgaccagcatcattgagtactactacatgtggaagaccaccgacagatacgtgcagcagaaacgcttgaaagcagctgaagctgagagcaagttaaagcaagtttatattcccaactataacaagccaaatccgaaccaaatcagcgtcaacaacgtcaaggccggtgtggtgaacggcacgggggcgccgggccagagccctggggctggccgggcctgcgagagctgttacaccacacagtcttaccagtggtattcttggggtccccctaacatgcagtgtcgtctctgcgcatcttgttggacatattggaagaaatatggtggcttgaaaatgccaacccggttagatggagagaggccaggaccaaaccgcagtaacatgagtccccacggcctcccagcccggagcagcgggagccccaagtttgccatgaagaccaggcaggctttctatctgcacacgacgaagctgacgcggatcgcccggcgcctgtgccgtgagatcctgcgcccgtggcacgctgcgcggcacccctacctgcccatcaacagcgcggccatcaaggccgagtgcacggcgcggctgcccgaagcctcccagagcccgctggtgctgaagcaggcggtacgcaagccgctggaagccgtgcttcggtatcttgagacccacccccgcccccccaagcctgaccccgtgaaaagcgtgtccagcgtgctcagcagcctgacgcccgccaaggtggcccccgtcatcaacaacggctcccccaccatcctgggcaagcgcagctacgagcagcacaacggggtggacggcaacatgaagaagcgcctcttgatgcccagtaggggtctggcaaaccacggacaggccaggcacatgggaccaagccggaacctcctgctcaacgggaagtcctaccccaccaaagtgcgcctgatccgggggggctccctgcccccagtcaagcggcggcggatgaactggatcgacgccccggatgacgtgttctacatggccacagaggagaccaggaagatccgcaagctgctctcatcctcggaaaccaagcgtgctgcccgccggccctacaagcccatcgccctgcgccagagccaggccctgccgccgcggccaccgccacctgcgcccgtcaacgacgagcccatcgtcatcgaggactaggggccgcccccacctgcggccgccccccgcccctcgcccgcccacacggccccttcccagccagcccgccgcccgcccctcagtttggtagtgccccacctcccgccctcacctgcagagaaacgcgctccttggcggacactgggggaggagaggaagaagcgcggctaacttattccgagaatgccgaggagttgtcgtttttagctttgtgtttactttttggctggagcggagatgaggggccaccccgtgcccctgtgctgcggggccttttgcccggaggccgggccctaaggttttgttgtgttctgttgaaggtgccattttaaattttatttttattactttttttgtagatgaacttgagctctgtaacttacacctggaatgttaggatcgtgcggccgcggccggccgagctgcctggcggggttggcccttgtcttttcaagtaattttcatattaaacaaaaacaaagaaaaaaaatcttataaaaaggaaaaaaaccaa

SEQ ID NO: 148804 - DNA, 2148 bp, Artificial Sequence
  derived and/or modified sequence
atggccgccaacatgtaccgggtgggcgactacgtgtacttcgagaattcatcaagtaatccctatttgatccggcgtatagaggagctgaacaagacggcaaacggcaatgtggaagcaaaggtggtgtgcttttatagacggagagatatcagttcaacattgatcgccttagctgataagcacgcgacactatccgtgtgctataaagccggaccgggtgctgacaatggggaggagggagagatcgaggaggaaatggagaatcctgagatggtcgatttacccgagaagctgaagcaccagctgcgacacagggagctgttcctgtcacgtcagcttgaaagcttgccagccacgcacattcgaggcaagtgcagtgtaaccttgttgaatgagacggaatcacttaagtcttacttggagcgagaggacttctttttctacagtctcgtatacgacccccagcagaagactctacttgcagataagggagaaattagggtggggaaccggtaccaggctgacattaccgacctgttgaaagagggggaagaggacggtagggaccagtcacggctggaaactcaggtgtgggaggcccacaatccccttacagataagcagattgaccagttccttgtggttgcaagaagcgttggtactttcgcccgggctctggattgcagcagcagcgtgcgacaaccctcactgcacatgtcagcagccgccgcttcgagggacattaccctatttcatgcaatggacaccctacataaaaacatttacgacatctctaaagcaatcagcgcactggtaccacaggggggtcccgtcctgtgtcgtgacgaaatggaggagtggtctgcctctgaggctaacctgttcgaagaggccctggagaaatacggcaaggacttcacagacattcagcaggactttctgccatggaagtccctgacttcaatcatcgaatactactatatgtggaagacgactgatagatatgtgcaacagaaaaggttgaaggctgctgaggccgaaagcaaattaaagcaagtctatatcccaaattacaataagccgaatcctaaccagatcagcgtcaacaatgtgaaggctggagtcgtgaatggcaccggcgcaccgggccagtcgccaggcgccggaagagcttgtgaatcatgctatactactcagagctaccagtggtactcctggggccctcctaatatgcagtgcaggctgtgtgcatcctgttggacttactggaaaaagtatgggggcctgaagatgcctactagactggacggcgagaggcccgggccgaaccgcagcaatatgtcaccacacggactccctgcacggtctagtggctcgcccaaatttgccatgaaaaccagacaagcattctatctgcatacgacaaagttgactcgcatcgcacgcagattatgtcgggagattttgcgtccatggcatgcggccagacacccctacctgccaattaatagtgccgctatcaaagctgagtgcaccgctcgtctgcccgaagcatctcagtctcccttggttttaaaacaggccgtcaggaagccccttgaagccgtgctaagatacctggagacccacccccggcctccgaagccagatccggtcaagtctgtaagttccgttttgtcttctctgacaccagctaaagtggctccggtgattaacaatggtagccctaccatattaggaaaacgcagctacgagcagcacaatggagtggatggaaatatgaaaaaaagactccttatgccatcccgcgggctggccaaccacggacaggcccgacacatgggcccttcacgcaatctcctgcttaatggcaagagctacccgacaaaagtcaggttaatacgcgggggctcgctgccacccgtcaagcggagacggatgaactggattgatgcccccgatgacgtgttctacatggctactgaggagacacggaagattcgaaaactcctatcaagctccgagacaaagcgagccgccagacgcccgtataagccaattgcactcaggcagagtcaggctctcccacccagacccccgccacccgcaccagtcaacgatgagcccatcgtcatcgaagactag

SEQ ID NO: 148805 - DNA, 2148 bp, Artificial Sequence
  derived and/or modified sequence
atggcggctaacatgtatagagtgggagattatgtctatttcgaaaactcttcatctaacccttatttgattcgacgcatagaagagttgaataaaaccgcgaacggcaatgtcgaagcaaaagttgtgtgtttctatcggagacgggacatctcatcgacattgattgccctggctgataagcatgcgactttgagcgtgtgctataaagcaggcccaggcgcagataatggcgaggagggagaaatcgaggaggagatggagaatcccgagatggttgacttgccggaaaagctgaagcatcagctgcggcatcgagaactgtttctgtcccgacagctcgagtcactcccggcaactcacattcggggaaagtgtagtgtgaccctactgaatgaaacggaaagtctcaaaagctatctggagagagaagatttcttcttctattctctcgtctacgatccccagcagaagaccttgctggccgacaaaggggaaattcgggtgggaaaccgctatcaagcagacattactgatctcctcaaagagggcgaagaggatggtcgagaccagtcacgcctggaaacgcaggtatgggaagcccataacccgctcaccgataagcaaatcgatcagtttcttgtggtggccagatctgtggggacgtttgccagggccctcgactgctccagcagcgtgaggcaacccagccttcacatgagtgctgctgctgctagtagagatataactttatttcatgcaatggatacgctgcataagaatatttacgatatttccaaggctatatcagctctggtgcctcagggagggccagttctttgcagagatgagatggaagagtggtccgcctccgaagctaacctctttgaggaggccctggaaaagtacggcaaggacttcaccgacatacagcaagattttctgccctggaaaagccttacatctataatcgaatattactatatgtggaagaccactgacaggtatgtgcagcagaagcgattgaaggccgctgaggctgagtctaaactgaaacaggtgtacatccctaattacaacaagcccaacccaaatcagatcagtgttaacaatgtgaaagccggtgtggtgaacggaacgggcgctcctggacaatcgcccggagcaggaagagcatgcgaatcatgttacaccacccagagctatcagtggtatagctggggacctccaaacatgcagtgcaggttgtgcgcatcctgctggacttactggaagaagtacggcggattgaaaatgcctacccgactggacggcgaacggcctggtcctaacagatccaacatgagcccccacggactccccgctcggagctcgggttctccgaaattcgccatgaagacaaggcaggccttctacctacacactacgaagctgacgaggatagctcggagactgtgtcgtgagattctgagaccctggcatgccgcacgtcacccgtatctcccaattaactccgctgcaattaaggctgagtgtaccgcacgcctgccagaagctagccagagtccactggtgctcaagcaggccgtgcggaaacccctggaggccgtgctccgctatctggaaacacacccacgccctcccaaacccgatccagtgaagagcgtttcatctgtgctgtcgtccctgacccccgctaaggtggccccagtcataaataatggatcacccactattctcggtaaacggagttatgaacagcataacggggtggatggcaacatgaagaagcgcctcctgatgccgagcagagggcttgccaaccatggccaagctcgccacatgggaccaagtcggaatcttctgctgaatggtaagagttacccaacaaaagtcagattaattcgtggcggatcccttcccccagtgaagcggaggagaatgaattggatagacgcaccagatgatgtcttttatatggccacagaggaaactagaaagatcagaaaactgctttcctcttcagagaccaaacgtgctgctcgcaggccctacaaacctatcgcgctgaggcaatcacaggctttaccccctagacccccaccccctgctcccgttaacgatgagccaatcgttatagaggattag

SEQ ID NO: 148806 - protein, 351 aa, Artificial Sequence
  derived and/or modified sequence
MSFFPELYFNVDNGYLEGLVRGLKAGVLSQADYLNLVQCETLEDLKLHLQSTDYGNFLANEASPLTVSVIDDRLKEKMVVEFRHMRNHAYEPLASFLDFITYSYMIDNVILLITGTLHQRSIAELVPKCHPLGSFEQMEAVNIAQTPAELYNAILVDTPLAAFFQDCISEQDLDEMNIEIIRNTLYKAYLESFYKFCTLLGGTTADAMCPILEFEADRRAFIITINSFGTELSKEDRAKLFPHCGRLYPEGLAQLARADDYEQVKNVADYYPEYKLLFEGAGSNPGDKTLEDRFFEHEVKLNKLAFLNQFHFGVFYAFVKLKEQECRNIVWIAECIAQRHRAKIDNYIPIF

SEQ ID NO: 148807 - protein, 274 aa, Artificial Sequence
  derived and/or modified sequence
MVVEFRHMRNHAYEPLASFLDFITYSYMIDNVILLITGTLHQRSIAELVPKCHPLGSFEQMEAVNIAQTPAELYNAILVDTPLAAFFQDCISEQDLDEMNIEIIRNTLYKAYLESFYKFCTLLGGTTADAMCPILEFEADRRAFIITINSFGTELSKEDRAKLFPHCGRLYPEGLAQLARADDYEQVKNVADYYPEYKLLFEGAGSNPGDKTLEDRFFEHEVKLNKLAFLNQFHFGVFYAFVKLKEQECRNIVWIAECIAQRHRAKIDNYIPIF

SEQ ID NO: 148808 - protein, 392 aa, Artificial Sequence
  derived and/or modified sequence
MSFFPELYFNVDNGYLEGLVRGLKAGVLSQADYLNLVQCETLEDLKLHLQSTDYGNFLANEASPLTVSVIDDRLKEKMVVEFRHMRNHAYEPLASFLDFITQESEAGTPEGPGNMPKLGSRPSPGHRPPFLRVSLLPWPPSSYSYMIDNVILLITGTLHQRSIAELVPKCHPLGSFEQMEAVNIAQTPAELYNAILVDTPLAAFFQDCISEQDLDEMNIEIIRNTLYKAYLESFYKFCTLLGGTTADAMCPILEFEADRRAFIITINSFGTELSKEDRAKLFPHCGRLYPEGLAQLARADDYEQVKNVADYYPEYKLLFEGAGSNPGDKTLEDRFFEHEVKLNKLAFLNQFHFGVFYAFVKLKEQECRNIVWIAECIAQRHRAKIDNYIPIF

SEQ ID NO: 148809 - DNA, 1056 bp, Artificial Sequence
  derived and/or modified sequence
atgtcattttttcctgaactttattttaacgtcgacaacggatatttagagggtctcgttcgtgggctgaaggcgggcgttctttctcaggccgattacctaaacctcgtccaatgtgaaacactggaagacctgaaactgcacctccagtcgaccgattatggaaattttctcgctaacgaagcctctcctcttacagtatccgttatcgatgataggttaaaagaaaaaatggttgtggaattcagacatatgagaaaccacgcctatgagcccctggcatccttcctggatttcataacttacagctatatgatcgacaacgttattctgctgatcacaggcaccctgcatcagcgaagtatagccgaacttgtgcccaaatgtcatccactgggctcctttgaacaaatggaggcagttaatattgctcagacccctgccgagttgtataacgccattctggtcgatacacctctggccgctttctttcaggactgtatatcagagcaggatctcgatgagatgaacatcgaaattattaggaacactctgtacaaagcctatctagaatcgttttacaaattttgtacgcttctgggtggcactactgctgatgcaatgtgccctatcctcgaatttgaagccgatcgcagagcatttatcatcaccatcaatagttttggcacggagctcagcaaggaggatcgcgccaagttgttcccccattgtggtcgtctctaccccgagggactcgctcaactcgcacgcgcggatgattacgaacaggtcaagaatgtggcggactactatcctgaatataagttgctctttgagggcgcaggatcaaacccgggcgacaaaaccctggaggaccgttttttcgaacatgaagtgaagttgaacaaactcgcctttctcaatcagttccactttggagtattctatgcctttgtgaaattgaaagaacaggagtgccggaatattgtctggattgccgagtgtatcgcccagcggcaccgcgccaaaatcgataattacatacctattttctag

SEQ ID NO: 148810 - DNA, 1179 bp, Artificial Sequence
  derived and/or modified sequence
atgtccttcttccccgagctgtacttcaacgttgacaatggatacttggaaggacttgttcgtggcttgaaagctggggtgctatcccaagccgattaccttaacctcgttcagtgcgaaaccctggaggacctgaagttgcacctccagagtactgactatggaaatttcctggccaatgaggcctctccactaaccgtcagcgtcattgacgatcggctgaaagagaagatggtggtggagtttagacacatgaggaaccatgcctacgagcctctcgcgtctttcctagactttatcactcaggagagcgaggctggaacccccgagggcccgggaaacatgccaaaactgggtagccgcccctctcctggccacaggccacctttcctgagggtgagtctgctgccttggccaccttcgagctattcctacatgattgataatgtgattctgcttatcacgggcacactccaccagaggtcaatcgccgagctcgtcccgaagtgtcacccactcggctcatttgagcagatggaggccgtgaacatcgcacagacccctgccgaactatataatgcaatcctcgtagatacccctttggccgcctttttccaggactgcatttcagaacaggaccttgatgagatgaatattgaaatcattagaaataccctgtacaaagcttacctggagagcttttacaagttttgcacattattaggtgggacaacagcagacgccatgtgccctatccttgaattcgaagctgacagacgggcctttattatcacaatcaacagtttcgggacagaattgagcaaggaagatcgagccaagctgtttcctcattgcggccgactatatcccgaaggcttagcacaactcgcgcgggccgacgactacgagcaggtgaagaatgtggccgattattaccctgaatataagttactattcgaaggagccggaagtaaccccggggacaagacattggaggatcgcttcttcgagcacgaggtcaagcttaataagttggcgttcctaaatcaattccactttggggttttctacgccttcgtgaaactgaaggagcaggaatgtcggaatatcgtgtggatagcggaatgcatcgcccaacgacatcgcgcaaagatcgacaactatatcccgatcttttag

SEQ ID NO: 148811 - DNA, 1056 bp, Artificial Sequence
  derived and/or modified sequence
atgtccttcttccctgagctgtacttcaacgtggacaatggctacctggagggcctggtgcggggcctgaaggccggcgtgctgagccaggccgactacctgaacctggtgcagtgtgagaccctggaggacctgaagctgcacctgcagagcacagattatggcaacttcctggccaatgaggccagccccctgactgtgtctgtgattgatgaccggctgaaggagaagatggtggtggagttccgccacatgaggaaccacgcctatgagcccctggccagcttcctggacttcatcacctacagctacatgattgacaacgtcatcctgctgatcaccggcaccctgcaccagaggagcattgctgagctggtgcccaagtgccaccccctgggcagctttgagcagatggaggccgtgaacatcgcccagaccccagctgagctgtacaatgccatcctggtggacacccccctggccgccttcttccaggactgcatcagcgagcaggacctggatgagatgaacatcgagatcatccggaacaccctgtacaaggcctacctggagagcttctacaagttctgcaccctgctgggcggcaccacagcagatgccatgtgccccatcctggagtttgaggccgaccggcgggccttcatcatcaccatcaacagctttggaacagagctgagcaaagaagatcgggccaagctgttcccccactgcggccgcctgtacccagagggcctggcccagctggcccgggcagatgattatgagcaggtgaagaatgtggccgactactacccagagtacaagctgctgtttgagggcgccggcagcaaccctggggacaagaccctggaggaccgcttctttgaacatgaggtgaagctgaacaagctggccttcctgaaccagttccactttggagtcttctacgcctttgtgaagctgaaggagcaggagtgcagaaatattgtgtggattgctgagtgcatcgcccagaggcaccgggccaagattgacaactacatccccatcttctag

SEQ ID NO: 148812 - DNA, 1179 bp, Artificial Sequence
  derived and/or modified sequence
atgtccttcttccctgagctgtacttcaacgtggacaatggctacctggagggcctggtgcggggcctgaaggccggcgtgctgagccaggccgactacctgaacctggtgcagtgtgagaccctggaggacctgaagctgcacctgcagagcacagattatggcaacttcctggccaatgaggccagccccctgactgtgtctgtgattgatgaccggctgaaggagaagatggtggtggagttccgccacatgaggaaccacgcctatgagcccctggccagcttcctggacttcatcacccaggagagcgaggccggcaccccagagggccctggcaacatgcccaagctgggcagccggcccagccctggccaccggccccccttcctgcgggtgtccctgctgccctggccacccagcagctacagctacatgattgacaacgtcatcctgctgatcaccggcaccctgcaccagaggagcattgctgagctggtgcccaagtgccaccccctgggcagctttgagcagatggaggccgtgaacatcgcccagaccccagctgagctgtacaatgccatcctggtggacacccccctggccgccttcttccaggactgcatcagcgagcaggacctggatgagatgaacatcgagatcatccggaacaccctgtacaaggcctacctggagagcttctacaagttctgcaccctgctgggcggcaccacagcagatgccatgtgccccatcctggagtttgaagctgacagaagagccttcatcatcaccatcaacagctttggaacagagctgagcaaggaggaccgggccaagctgttcccccactgcggccgcctgtacccagagggcctggcccagctggcccgggcagatgattatgagcaggtgaagaatgtggccgactactacccagagtacaagctgctgtttgaaggagctggcagcaaccctggggacaagaccctggaggaccgcttctttgagcacgaggtgaagctgaacaagctggccttcctgaaccagttccactttggagtcttctacgcctttgtgaagctgaaggagcaggagtgcaggaacatcgtgtggattgctgaatgtattgcccagaggcaccgggccaagattgacaactacatccccatcttctag

SEQ ID NO: 148813 - DNA, 1056 bp, Artificial Sequence
  derived and/or modified sequence
atgagcttcttccccgagctgtacttcaacgtggacaacggctacctggagggtttagtgcggggcctcaaagccggggttttatctcaggcggattacctcaacttggtgcagtgtgaaactctcgaagatctgaaactgcatctgcaatcgaccgattatggaaactttttggccaacgaggcgagcccgcttacagtcagcgtaatcgacgacagactgaaagagaagatggtggtcgaattccggcacatgcggaaccacgcttacgaacctttagcgtcttttctcgacttcatcacgtactcttatatgattgataatgtcatcctgctgatcacagggacattacatcagagaagtattgccgaactggttccaaagtgccaccccctgggctctttcgaacaaatggaagcagtgaatatcgctcagacacccgccgaactttataatgccattctggtcgacactccactcgcagccttttttcaggactgtatatcggaacaggacctggatgaaatgaacatcgagataatccggaacaccctctacaaggcatacctcgaatcattctacaaattctgtacacttctggggggaacaaccgcagatgcaatgtgtcctatccttgagttcgaggccgacagaagagcattcatcattacaattaattctttcggaaccgaacttagcaaagaagatagagcaaaactattcccccattgtggcagattgtaccccgagggccttgctcagctcgctcgagccgatgactatgaacaagttaagaacgtggccgactactacccagaatacaagctgcttttcgagggagccgggtccaaccctggggataaaaccctggaagatcggttcttcgagcacgaggtgaagttaaacaaacttgcatttctgaaccaattccatttcggcgttttctatgcttttgtgaagctgaaggagcaggaatgccgcaacattgtttggatcgccgaatgcattgcccagagacatagggccaagattgacaattacattcccatattctag

SEQ ID NO: 148814 - DNA, 1179 bp, Artificial Sequence
  derived and/or modified sequence
atgagcttcttccccgagctgtacttcaacgtggacaacggctaccttgagggcttggtccgtgggctgaaggccggcgtgctatctcaggcggattatcttaacctggttcaatgtgaaacactggaggatctcaagctgcacctgcagtcgacagactacgggaactttctcgctaatgaagcaagtcccctgactgtcagcgtcatagatgacagattgaaggagaaaatggtggtggagttccgccatatgcggaatcacgcctacgaaccactggcctctttcctcgatttcatcacacaggagtctgaggcaggcacacccgaagggccaggaaacatgcctaagttggggtctcgcccatcaccggggcatcggcccccttttctcagagtatctcttctcccttggccaccctcatcgtacagctatatgatcgataacgtcattctgctcattactgggacattgcaccagcggagcatcgccgaactcgtgcctaaatgtcacccactcgggtctttcgaacagatggaggcagttaacatcgcacagaccccagccgagttgtacaacgctatcttagtcgacacacccctggcggcgttcttccaagattgcatctccgaacaggatctggatgagatgaatattgaaattatacggaacaccctttataaggcgtatctggagagtttctacaagttctgcactttactgggcggcacaaccgccgatgccatgtgccccatcctcgaatttgaagccgataggcgggctttcattattacgataaatagcttcggaacggaactctcaaaagaagaccgagccaaactattccctcactgcggtcggctctatcccgaagggttggctcagttggctagagctgacgattatgagcaggtcaaaaatgttgccgactattaccctgagtacaaattgctttttgaaggagctgggtcaaacccaggcgacaaaacattggaagatcggttctttgagcacgaggtgaagctcaacaaacttgcctttttgaatcagtttcattttggagtattctacgctttcgttaagttgaaagagcaagagtgcaggaatatcgtatggatcgctgagtgtattgcacagcgccaccgggccaagatcgacaactatatccccatattctag

SEQ ID NO: 148815 - DNA, 1056 bp, Artificial Sequence
  derived and/or modified sequence
atgagtttctttcccgagttgtacttcaacgtggacaacggatacttagaaggtttggttcgcggactcaaggctggtgtgctgagccaggctgactacctgaatctcgtccagtgcgaaactctcgaagatctcaagctgcatctccagagtactgactacgggaattttttagcaaatgaggcctccccactgacagtgtcagtcattgacgatcgactaaaggagaaaatggtcgttgagttccgccacatgcgcaaccacgcttacgaaccactagcctctttcctggatttcatcacctactcttatatgatcgacaatgtgatccttctaatcacagggaccctacaccagcggtccatcgctgagttggtgcctaaatgccacccattagggtccttcgaacagatggaagccgtaaacatcgcgcagacaccagctgagctttacaacgccatcctggtcgacactcccctcgccgcattctttcaggattgcattagcgagcaggaccttgatgaaatgaatattgagatcattcgtaatacactgtacaaagcatacctcgaaagcttctataagttctgcaccctcctgggaggcacaacagctgacgccatgtgccctatcctggaattcgaggcagaccgacgggcattcattatcacaatcaattcattcgggacagagctttccaaagaagatagagcaaagttattcccacattgtggtcgtctctatccagaaggcctcgcccaactggcaagggcagatgactatgagcaggtgaagaatgtggcagattactatccagaatacaagctactgtttgaaggcgcaggcagcaatcccggagacaaaacactcgaagaccgtttcttcgaacacgaggtgaaactcaacaagctggctttcctgaatcagttccactttggtgttttttacgcgttcgtaaaactcaaagaacaggagtgtagaaatatcgtttggatcgcagagtgcatagcacagaggcaccgagcaaaaatcgacaattatatacctatcttttag

SEQ ID NO: 148816 - DNA, 1179 bp, Artificial Sequence
  derived and/or modified sequence
atgagctttttcccagagctgtattttaatgtcgacaacgggtatctggaggggctcgtacggggtttgaaggcgggagtgctaagtcaagccgactatctgaatctcgtgcaatgcgaaactctcgaggaccttaagctccaccttcagtccaccgattatggaaacttccttgctaatgaagcgtccccgctgactgtgagcgttattgacgacaggctgaaggagaaaatggtggtggaattccggcatatgagaaaccatgcctacgaaccacttgccagctttctcgactttatcacacaggaatcagaggcagggactccagagggccctgggaatatgcctaagctcggttccagaccgagcccaggccatagacccccttttttaagggtgtctttgctgccttggccacccagtagctatagctacatgatcgataatgttattctgctgatcactggcactttacatcagaggtccatcgctgagctggtccctaagtgccatcccctcggatcgtttgaacagatggaggccgtgaatatcgcacaaaccccggcagagctgtacaatgcaatcctggtggatactccattggctgctttctttcaagactgtatatccgagcaggacctggatgagatgaatatcgaaatcattaggaacaccctgtacaaggcttacctggaaagcttttataaattctgcactctgcttggcggaaccacggctgatgcaatgtgtcccattctcgaatttgaggccgacagaagagccttcataattaccattaatagcttcggcaccgagctgtccaaagaggaccgcgctaaactttttccccactgcgggcgactttaccccgagggcttagctcagctggcccgagcagatgattacgaacaggtgaagaacgtagccgattattaccccgagtacaagttgttattcgaaggagcaggttccaacccgggtgataaaaccctcgaggacagattcttcgagcatgaggtcaagctgaacaaacttgcctttttgaaccagttccacttcggtgttttctatgcattcgtgaaacttaaagaacaggagtgccgcaacatcgtatggatagccgaatgtattgcccagagacacagagccaagatagataattacattccaatcttttag

SEQ ID NO: 148817 - DNA, 1716 bp, Artificial Sequence
  derived and/or modified sequence
agagccacgcccccttatggtcacgtgaggcgcttgcgcgtcacctgacgcacttgacagcccgctgaggacgcagcgtcagctgacctggggagtcgcgattcgtgccggccggtcctggttctccggtcccgccgctcccgcagcagccatgtcgttcttcccggagctttactttaacgtggacaatggctacttggagggactggtgcgcggcctgaaggccggggtgctcagccaggccgactacctcaacctggtgcagtgcgagacgctagaggacttgaaactgcatctgcagagcactgattatggtaacttcctggccaacgaggcatcacctctgacggtgtcagtcatcgatgaccggctcaaggagaagatggtggtggagttccgccacatgaggaaccatgcctatgagccactcgccagcttcctagacttcattacttacagttacatgatcgacaacgtgatcctgctcatcacaggcacgctgcaccagcgctccatcgctgagctcgtgcccaagtgccacccactaggcagcttcgagcagatggaggccgtgaacattgctcagacacctgctgagctctacaatgccattctggtggacacgcctcttgcggcttttttccaggactgcatttcagagcaggaccttgacgagatgaacatcgagatcatccgcaacaccctctacaaggcctacctggagtccttctacaagttctgcaccctactgggcgggactacggctgatgccatgtgccccatcctggagtttgaagcagaccgccgcgccttcatcatcaccatcaattctttcggcacagagctgtccaaagaggaccgtgccaagctctttccacactgtgggcggctctaccctgagggcctggcgcagctggctcgggctgacgactatgaacaggtcaagaacgtggccgattactacccggagtacaagctgctcttcgagggtgcaggtagcaaccctggagacaagacgctggaggaccgattctttgagcacgaggtaaagctgaacaagttggccttcctgaaccagttccactttggtgtcttctatgccttcgtgaagctcaaggagcaggagtgtcgcaacatcgtgtggatcgctgaatgtatcgcccagcgccaccgcgccaaaatcgacaactacatccctatcttctagcgtcctggcccaaggctctcaattgcactctttgtgtgtgtgtgtgtgtgtgtgcgcgtgtgtgtgcgtgtgtgtgtatgtggtctgtgacaagcctgtggctcacctgcctgtccggggtgtagtacgctgtcctagcggctgcccagttctcctgaccctcttagagactgttcttaggcctgaaaaggggctgggcacccccccccaccaaggatggacgaagaccccctccagagcaaggaggccccctcagccctgtggttacagccgctgatgtatctaagaagcatgtcactttcatgttcctccctaactccctgacctgagaaccctggggcctgggggcagtttgagcctcctctcccttctgtgggtcgctcccagagccatggcccatgggaaggacagagtgtgtgtgtccttggggcctggggggatgttgctcctcagctccctccctcagccctgcccctctgagacaataaaactgccctctctaaggccaa

SEQ ID NO: 148818 - DNA, 1254 bp, Artificial Sequence
  derived and/or modified sequence
cctgcacttcaagggcttctctctccggcagcctgtggacttccctggagcacttgctggagcagagatcacaggaaggtcactctggccagcaagtagcactgttagaccagtcaagggctgaggaatggatggtgccacaagggatgccagagggacttgtccctgagtgatgacagtccagtgacagtgctgatggtccatgcctgtcagacttgaaactgcatctgcagagcactgattatggtaacttcctggccaacgaggcatcacctctgacggtgtcagtcatcgatgaccggctcaaggagaagatggtggtggagttccgccacatgaggaaccatgcctatgagccactcgccagcttcctagacttcattacttacagttacatgatcgacaacgtgatcctgctcatcacaggcacgctgcaccagcgctccatcgctgagctcgtgcccaagtgccacccactaggcagcttcgagcagatggaggccgtgaacattgctcagacacctgctgagctctacaatgccattctggtggacacgcctcttgcggcttttttccaggactgcatttcagagcaggaccttgacgagatgaacatcgagatcatccgcaacaccctctacaaggcctacctggagtccttctacaagttctgcaccctactgggcgggactacggctgatgccatgtgccccatcctggagtttgaagcagaccgccgcgccttcatcatcaccatcaattctttcggcacagagctgtccaaagaggaccgtgccaagctctttccacactgtgggcggctctaccctgagggcctggcgcagctggctcgggctgacgactatgaacaggtcaagaacgtggccgattactacccggagtacaagctgctcttcgagggtgcaggtagcaaccctggagacaagacgctggaggaccgattctttgagcacgaggtaaagctgaacaagttggccttcctgaaccagttccactttggtgtcttctatgccttcgtgaagctcaaggagcaggagtgtcgcaacatcgtgtggatcgctgaatgtatcgcccagcgccaccgcgccaaaatcgacaactacatccctatcttctagcgtcctggcccaaggctctcaattgcactctttgtgtgtgtgtgtgtgtgtgtgcgcgtgtgtgtgcgtgtgtgtgtatgtggtctgtgacaagcctgtggctcacctgcctgtc

SEQ ID NO: 148819 - DNA, 1262 bp, Artificial Sequence
  derived and/or modified sequence
gttctccggtcccgccgctcccgcagcagccatgtcgttcttcccggagctttactttaacgtggacaatggctacttggagggactggtgcgcggcctgaaggccggggtgctcagccaggccgactacctcaacctggtgcagtgcgagacgctagaggacttgaaactgcatctgcagagcactgattatggtaacttcctggccaacgaggcatcacctctgacggtgtcagtcatcgatgaccggctcaaggagaagatggtggtggagttccgccacatgaggaaccatgcctatgagccactcgccagcttcctagacttcattacgcaggagtcagaggctgggacacctgaagggccagggaacatgcccaagctaggaagcaggccctctcctggccacaggcctcctttcctgagagtctccttgctgccctggcctccatcaagttacagttacatgatcgacaacgtgatcctgctcatcacaggcacgctgcaccagcgctccatcgctgagctcgtgcccaagtgccacccactaggcagcttcgagcagatggaggccgtgaacattgctcagacacctgctgagctctacaatgccattctggtggacacgcctcttgcggcttttttccaggactgcatttcagagcaggaccttgacgagatgaacatcgagatcatccgcaacaccctctacaaggcctacctggagtccttctacaagttctgcaccctactgggcgggactacggctgatgccatgtgccccatcctggagtttgaagcagaccgccgcgccttcatcatcaccatcaattctttcggcacagagctgtccaaagaggaccgtgccaagctctttccacactgtgggcggctctaccctgagggcctggcgcagctggctcgggctgacgactatgaacaggtcaagaacgtggccgattactacccggagtacaagctgctcttcgagggtgcaggtagcaaccctggagacaagacgctggaggaccgattctttgagcacgaggtaaagctgaacaagttggccttcctgaaccagttccactttggtgtcttctatgccttcgtgaagctcaaggagcaggagtgtcgcaacatcgtgtggatcgctgaatgtatcgcccagcgccaccgcgccaaaatcgacaactacatccctatcttctagcgtcctggcccaaggctctcaattgcactctttgtgtgtgtgtgtgtgtgtg

SEQ ID NO: 148820 - DNA, 1056 bp, Artificial Sequence
  derived and/or modified sequence
atgagcttcttccccgagctgtacttcaacgtggacaacggctacctggagggcctggtgagaggcctgaaggccggcgtgctgagccaggccgactacctgaacctggtgcagtgcgagaccctggaggacctgaagctgcacctgcagagcaccgactacggcaacttcctggccaacgaggccagccccctgaccgtgagcgtgatcgacgacagactgaaggagaagatggtggtggagttcagacacatgagaaaccacgcctacgagcccctggccagcttcctggacttcatcacctacagctacatgatcgacaacgtgatcctgctgatcaccggcaccctgcaccagagaagcatcgccgagctggtgcccaagtgccaccccctgggcagcttcgagcagatggaggccgtgaacatcgcccagacccccgccgagctgtacaacgccatcctggtggacacccccctggccgccttcttccaggactgcatcagcgagcaggacctggacgagatgaacatcgagatcatcagaaacaccctgtacaaggcctacctggagagcttctacaagttctgcaccctgctgggcggcaccaccgccgacgccatgtgccccatcctggagttcgaggccgacagaagagccttcatcatcaccatcaacagcttcggcaccgagctgagcaaggaggacagagccaagctgttcccccactgcggcagactgtaccccgagggcctggcccagctggccagagccgacgactacgagcaggtgaagaacgtggccgactactaccccgagtacaagctgctgttcgagggcgccggcagcaaccccggcgacaagaccctggaggacagattcttcgagcacgaggtgaagctgaacaagctggccttcctgaaccagttccacttcggcgtgttctacgccttcgtgaagctgaaggagcaggagtgcagaaacatcgtgtggatcgccgagtgcatcgcccagagacacagagccaagatcgacaactacatccccatcttctag

SEQ ID NO: 148821 - DNA, 1179 bp, Artificial Sequence
  derived and/or modified sequence
atgagcttcttccccgagctgtacttcaacgtggacaacggctacctggagggcctggtgagaggcctgaaggccggcgtgctgagccaggccgactacctgaacctggtgcagtgcgagaccctggaggacctgaagctgcacctgcagagcaccgactacggcaacttcctggccaacgaggccagccccctgaccgtgagcgtgatcgacgacagactgaaggagaagatggtggtggagttcagacacatgagaaaccacgcctacgagcccctggccagcttcctggacttcatcacccaggagagcgaggccggcacccccgagggccccggcaacatgcccaagctgggcagcagacccagccccggccacagaccccccttcctgagagtgagcctgctgccctggccccccagcagctacagctacatgatcgacaacgtgatcctgctgatcaccggcaccctgcaccagagaagcatcgccgagctggtgcccaagtgccaccccctgggcagcttcgagcagatggaggccgtgaacatcgcccagacccccgccgagctgtacaacgccatcctggtggacacccccctggccgccttcttccaggactgcatcagcgagcaggacctggacgagatgaacatcgagatcatcagaaacaccctgtacaaggcctacctggagagcttctacaagttctgcaccctgctgggcggcaccaccgccgacgccatgtgccccatcctggagttcgaggccgacagaagagccttcatcatcaccatcaacagcttcggcaccgagctgagcaaggaggacagagccaagctgttcccccactgcggcagactgtaccccgagggcctggcccagctggccagagccgacgactacgagcaggtgaagaacgtggccgactactaccccgagtacaagctgctgttcgagggcgccggcagcaaccccggcgacaagaccctggaggacagattcttcgagcacgaggtgaagctgaacaagctggccttcctgaaccagttccacttcggcgtgttctacgccttcgtgaagctgaaggagcaggagtgcagaaacatcgtgtggatcgccgagtgcatcgcccagagacacagagccaagatcgacaactacatccccatcttctag

SEQ ID NO: 148822 - protein, 551 aa, Artificial Sequence
  derived and/or modified sequence
MSRQSSITFQSGSRRGFSTTSAITPAAGRSRFSSVSVARSAAGSGGLGRISSAGASFGSRSLYNLGGAKRVSINGCGSSCRSGFGGRASNRFGVNSGFGYGGGVGGGFSGPSFPVCPPGGIQEVTVNQSLLTPLHLQIDPTIQRVRAEEREQIKTLNNKFASFIDKVRFLEQQNKVLETKWALLQEQGSRTVRQNLEPLFDSYTSELRRQLESITTERGRLEAELRNMQDVVEDFKVRYEDEINKRTAAENEFVALKKDVDAAYMNKVELEAKVKSLPEEINFIHSVFDAELSQLQTQVGDTSVVLSMDNNRNLDLDSIIAEVKAQYEDIANRSRAEAESWYQTKYEELQVTAGRHGDDLRNTKQEISEMNRMIQRLRAEIDSVKKQCSSLQTAIADAEQRGELALKDARAKLVDLEEALQKAKQDMARLLREYQELMNIKLALDVEIATYRKLLEGEECRLSGEGVSPVNISVVTSTLSSGYGSGSSIGGGNLGLGGGSGYSFTTSGGHSLGAGLGGSGFSATSNRGLGGSGSSVKFVSTTSSSQKSYTH

SEQ ID NO: 148823 - DNA, 1656 bp, Artificial Sequence
  derived and/or modified sequence
atgtcccggcaaagtagtattacctttcaaagtggcagccgtaggggttttagtaccacatcagcgatcacaccagcagctggaaggtctagattctcttcggtgagcgtcgcacgtagcgctgctggctcgggaggactggggagaattagttcagccggggccagcttcgggagtcgctccttgtacaacctgggaggcgccaagcgcgtgtcaatcaatggctgtggaagttcttgtcggagcggctttggtggtagggcgtctaacagatttggggtgaattctgggttcggctacggcggcggcgtaggaggcggattctccgggcccagtttccccgtgtgtccccccgggggcatccaggaggttactgttaatcagtccttgctgacacccctgcatctgcagatcgatcccacaatccagagagtacgggcagaggaacgcgaacagattaaaacgctaaataacaaatttgcatctttcatcgataaagtgaggttcctggaacagcagaataaagtcctcgagaccaagtgggcactgcttcaggagcaggggagccggacggtcagacagaatctcgaacctttattcgattcatatacctctgagctcagacggcagctggagtccatcaccactgagcgagggcggctcgaagccgaattacgaaacatgcaagatgttgttgaggacttcaaagtccgatacgaggatgagatcaacaaacgcaccgccgccgaaaatgaattcgtcgccctcaaaaaagacgtggacgccgcatatatgaacaaggtggaacttgaagctaaggtcaaatcccttcctgaagagatcaattttatacactccgtgttcgatgctgaattgagccagctgcagacccaggtcggtgatacttctgttgtactttctatggacaataacaggaatttagatctcgacagcatcatagctgaggttaaagctcagtatgaagacatcgccaaccggtctagagcagaggccgagtcatggtatcagactaaatatgaggagctgcaggtgaccgcagggcggcatggggacgacctgcggaataccaaacaggaaatcagtgaaatgaataggatgatccagcgcctgcgtgccgagattgactctgtcaagaagcagtgtagtagcctccagactgcgatagctgacgctgagcagcggggagaactcgccttaaaagacgcgcgagccaaacttgtagacctggaagaggccctgcaaaaggccaagcaggatatggctagactgcttagggaatatcaggagctgatgaacatcaagctcgcccttgacgtagaaatcgcaacttaccgcaaactgcttgaaggtgaagaatgtaggctctctggcgaaggagtttctccagtcaacatctcagtggtaacttccacgctgagtagtggttacggttctggatccagcatcggaggaggcaacctgggtctgggagggggaagtggatactcatttacaacatccggcggccacagccttggcgccggcctgggcggctccggttttagtgccacgtctaatcgaggactgggagggtccggctcctctgtgaaattcgtgagcaccaccagcagttcacagaaatcgtacacacattag

SEQ ID NO: 148824 - DNA, 2324 bp, Artificial Sequence
  derived and/or modified sequence
agccagtggcccttacaccatttcccgagggatgccgagtgtgagctcagggttggcggatgcccagggaatgccatcagaaggccctctccactagcagtgccccgcccccacaggatgctcataaaagccacgagaccagggctctccagccacctgtcttctccactgcctgtaccagcccacctcaggtgccttctcgccggccttcctcacccaccatgtctcggcagtcctccatcaccttccagtctggcagccgcaggggcttcagcaccacctcggccatcaccccggcagctggccgctcccgcttcagctctgtctctgtggcccgctctgcagcagggagtgggggcctgggaaggatcagcagtgctggggccagctttggaagccgcagcctctacaacctggggggtgccaagcgggtctccatcaatgggtgtggcagcagctgccgaagtggctttggtggcagggccagcaacaggtttggagtcaacagtggatttggctatgggggtggagttggaggaggcttcagtggccccagcttccccgtgtgtccccctggaggcatccaagaggtcactgtcaaccagagtctcctgactcctcttcacctgcaaatcgaccccaccatccagcgggtgcgggccgaggagcgcgagcagatcaagaccctcaacaataagttcgcctccttcatcgacaaggtgaggttcttggagcagcagaacaaggtcctggagaccaagtgggccctcctgcaggagcagggctccaggactgtgaggcagaacctagagcccctctttgattcctataccagtgagctccgacggcagctggaaagcatcaccaccgagaggggcaggcttgaagctgaactgaggaacatgcaggatgttgtggaagatttcaaagtcaggtacgaagatgaaattaacaagcgcacagctgctgagaatgaatttgtagccctgaaaaaggacgtagatgctgcctatatgaacaaggtggagctggaagccaaggtcaaatctctgcccgaggagatcaacttcatccactcagtctttgatgcagagctgtcccagttgcagacccaggtcggtgacacatccgtggtgctgtccatggacaacaaccgcaacctggacctggatagtatcatcgccgaggtcaaagcacaatacgaggacattgccaaccgcagccgggccgaggctgagtcctggtaccagaccaagtacgaggagctgcaggtcaccgcaggcagacatggggatgaccttcgaaacaccaaacaagagatctctgaaatgaaccgcatgatccagaggctgagagctgagattgacagcgtcaagaagcagtgttccagcttgcaaacggccattgctgatgcagagcagcggggagaactggctctcaaggatgcacgggccaagctggtggaccttgaggaggccctgcagaaggccaagcaggacatggctcggctcctgcgtgagtaccaggagctgatgaacatcaagctggccctggacgtggagatcgccacctaccgcaagctgctggaaggcgaggagtgcaggttgagtggagagggagtttctccagttaacatttctgtggtcacctctactctttccagtggctatggaagcggcagcagcattggaggtggaaacctgggcctcggtgggggcagcggctactccttcaccaccagtggtgggcatagcctgggtgcaggcctgggaggttctggattcagtgccaccagcaaccggggcttagggggcagtggttctagcgtcaagtttgtctccaccacatcctccagccagaagagctacacgcactaagagagccccatggctccctctaccctgccttgaggcctgtttgcagtcacacctggacaccagggtcctcctccttcctctctccttgtaaggtgcacctgtgctgctgggagcctggagtactggctatacccattcccaggcctaagccagcctctccctcctgacagtgcccagactgccagcagcacccgtctgttacacatgtgaaaccaaagcctgctctctcctaaggctctcattcagcctatcttgcgaggcccgggcagctggaaagtcctcctccagctccacctccctccctccctccagatgcagaggctggggagtctctcaatgccaggttgtcacccacctgtctcatagtgtttataagtggcctgctgggagtgagtgctccctctgttccctccctggaatgtgtctattaaatgcatgtgtcacctg

SEQ ID NO: 148825 - DNA, 1656 bp, Artificial Sequence
  derived and/or modified sequence
atgagccggcagagcagcatcaccttccagagcggcagccggcggggcttcagcaccaccagcgccatcaccccagctgctggccgcagccgcttcagctctgtgtctgtggcccggtctgctgctggcagcggcggcctgggccgcatcagcagcgctggggccagctttggcagccgcagcctgtacaacctgggcggggccaagagggtgtccatcaatggctgcggcagcagctgccgcagcggctttggaggccgggccagcaaccgcttcggcgtgaacagcggcttcggctacggcggcggcgtgggcggcggcttcagcggccccagcttccctgtgtgccccccaggcggcatccaggaggtgacagtgaaccagagcctgctgacccccctgcacctgcagattgaccccaccatccagagggtgcgggcagaggagcgggagcagatcaagaccctgaacaacaagtttgccagcttcatcgacaaggtgcgcttcctggagcagcagaacaaggtgctggagaccaagtgggccctgctgcaggagcagggcagcaggacagtgcggcagaacctggagcccctgtttgacagctacaccagcgagctgcggcggcagctggagagcatcaccacagagcggggccgcctggaggccgagctgaggaacatgcaggatgtggtggaggacttcaaggtgcgctatgaagatgagatcaacaagaggacagctgctgaaaatgaatttgtggccctgaagaaggatgtggatgctgcctacatgaacaaggtggagctggaggccaaggtgaagagcctgcctgaggagatcaacttcatccacagcgtgtttgatgctgagctgagccagctgcagacccaggtgggggacacctctgtggtgctgtccatggacaacaacagaaacctggacctggacagcatcatcgccgaggtgaaggcccagtatgaggacatcgccaacagaagcagagctgaggccgagagctggtaccagaccaagtatgaggagctgcaggtgacagctggaagacatggagatgacctgaggaacaccaagcaggagatcagcgagatgaacaggatgatccagaggctgcgggcagaaattgattctgtgaagaagcagtgcagcagcctgcagacagccatcgcagatgctgagcagagaggagagctggccctgaaggatgcccgggccaagctggtggacctggaggaggccctgcagaaggccaagcaggacatggcccggctgctgcgggagtaccaggagctgatgaacatcaagctggccctggatgtggagatcgccacctacaggaagctgctggagggggaggagtgccgcctgtctggagagggcgtgtcccctgtgaacatctctgtggtgaccagcaccctgagcagcggctacggcagcggcagcagcattggaggcggcaacctgggcctgggcggcggcagcggctacagcttcaccaccagcggcggccacagcctgggcgccggcctgggcggcagcggcttcagcgccaccagcaacagaggcctgggcggcagcggcagctctgtgaagtttgtgtccaccaccagcagcagccagaagagctacacccactag

SEQ ID NO: 148826 - DNA, 1656 bp, Artificial Sequence
  derived and/or modified sequence
atgagccggcagagcagcatcaccttccagagcggcagccggcggggtttttcaaccacctcagcgattacaccagcagccggacgcagccgatttagttctgtatccgtggcacgtagcgcagccgggagcggtggactggggcgtatcagcagtgccggcgcttccttcggatcccgctctttgtacaacttagggggcgcaaagagagtgtccatcaacggctgtggctcatcctgtcgatcaggttttggaggacgggcctctaatagattcggggtgaactccggcttcggatacggcggtggtgtgggcggggggttctcagggcccagctttcctgtatgtccacctggcggtattcaggaggtcaccgttaatcaatcactgctaacaccccttcacctgcagatagatcctaccattcagagggtaagagctgaagagagagaacagatcaaaactttgaataacaaatttgccagcttcattgataaagtgcgcttcctcgaacagcaaaacaaagtgttagaaacaaagtgggccttactgcaggaacaggggagtaggaccgttagacagaatctggaaccgctgttcgattcttataccagcgagttacgtaggcagctagaaagtattacaaccgagcgcgggcggcttgaggcagaactgcgcaatatgcaggatgtggtggaagattttaaagtgaggtatgaggatgagatcaataagcggacagcggcagagaatgagttcgtagcactcaaaaaggacgttgatgccgcgtatatgaataaagtcgagctcgaagccaaggtgaagtccctgccagaagagatcaattttattcacagcgttttcgatgccgaactgagtcagctccagacccaggttggcgatacgtctgttgtgctctctatggacaacaatcgaaatctggatctggattcgataatcgcagaggttaaagctcagtacgaagatattgcaaaccgcagcagggccgaagctgagtcatggtatcagactaaatacgaagaactccaggtcacggccgggaggcatggcgatgatttgagaaacaccaagcaagaaatatctgaaatgaaccgcatgatccaacgcttgcgcgccgaaatagatagtgtgaagaaacagtgctctagcctccagaccgctatcgctgacgctgagcagcggggtgagctggctctgaaggatgctcgagccaaactggtggatctcgaagaagccctgcagaaggccaagcaggacatggcgagactgctccgcgaatatcaggaattgatgaatatcaagctggctctggatgtggaaattgccacttatcgaaaactgctggaaggggaagaatgccgcctgtcaggcgagggagtttccccagtgaatatctcagtcgtgaccagtactctgtccagtggatatggttcaggaagctccataggtggtggcaatcttgggctgggcgggggaagcggctactcttttaccacatccggcgggcactctttaggcgccggcctgggggggtcaggcttttctgcgacaagtaacagaggtctcggcgggagcgggtcgtccgttaagtttgtgagcaccacctcatctagccagaagagctacactcactag

SEQ ID NO: 148827 - DNA, 1656 bp, Artificial Sequence
  derived and/or modified sequence
atgtctagacagagctcaataactttccagtccggctctaggcgagggttttcgaccacgagcgcgataacgcctgcagccggaaggtctagattctctagtgtgagtgtggccaggtcagctgccggttcagggggtctcggacgcataagcagtgcaggcgctagtttcgggtcccgctcgctgtacaacctcggcggagcaaagcgggtgagcatcaatggctgcggtagcagctgccgttctggcttcggcggtagggcttcaaacagattcggcgtgaattccggatttgggtacggaggtggagtcggcggaggatttagcggtccatccttcccagtatgcccgccaggtggtattcaagaagtgaccgtgaatcagtcccttctcacacccctgcatctccagatcgatcccacaatccaaagagttagagccgaggaaagggagcagatcaagaccctgaataataaattcgcaagtttcatcgacaaggtccgttttctggaacagcaaaacaaggtgttagaaacgaagtgggctctactccaggaacaaggcagtcggacagtaagacaaaacctggagccgctgttcgactcttatacgtcggagctgagacggcagctagagtccataactactgagagggggcgtttagaggccgagctccggaacatgcaagacgtggtggaggacttcaaagtgcggtatgaggacgagattaataaacgcacagctgcggagaacgaattcgtagccctgaaaaaggatgttgacgccgcttacatgaacaaagtggagctggaggctaaagtgaagtctctgccggaggagatcaactttatccatagcgtctttgatgctgagctgtcacagctgcagacccaagtcggagatacatcagtggtgctcagcatggataataatagaaatctggacctggactctatcatcgctgaagtgaaagcacagtacgaagacatcgccaacaggtctcgagctgaagccgagagttggtaccaaaccaagtatgaggaactccaagtgactgcgggtaggcatggcgatgatctgagaaatactaaacaggaaatttctgagatgaataggatgatccagcgcttgagagccgagattgactccgtcaagaagcagtgctcttcccttcagaccgctatcgctgacgccgagcaacggggtgaacttgcgctcaaagatgccagggcaaaattggtggacctggaagaagccctccagaaagcaaagcaggatatggcccgactcttgagggaatatcaggagctgatgaacattaaattggcgctcgacgtggagatagccacctaccgcaagctgttagagggtgaagaatgtagattaagcggtgagggtgtgagcccggtcaatatctcagttgtcacgtcaacactgtcctctgggtacggctccgggagttccattggagggggtaatctcggtctgggaggagggtcgggctactcgttcaccacatctgggggtcatagcctcggcgctgggcttggaggctcaggcttcagtgcgaccagtaaccggggactgggtggcagcggctccagcgttaaatttgtgagcaccacctctagtagtcagaaatcttatacacattag

SEQ ID NO: 148828 - DNA, 1656 bp, Artificial Sequence
  derived and/or modified sequence
atgagcagacagagcagcatcaccttccagagcggcagcagaagaggcttcagcaccaccagcgccatcacccccgccgccggcagaagcagattcagcagcgtgagcgtggccagaagcgccgccggcagcggcggcctgggcagaatcagcagcgccggcgccagcttcggcagcagaagcctgtacaacctgggcggcgccaagagagtgagcatcaacggctgcggcagcagctgcagaagcggcttcggcggcagagccagcaacagattcggcgtgaacagcggcttcggctacggcggcggcgtgggcggcggcttcagcggccccagcttccccgtgtgcccccccggcggcatccaggaggtgaccgtgaaccagagcctgctgacccccctgcacctgcagatcgaccccaccatccagagagtgagagccgaggagagagagcagatcaagaccctgaacaacaagttcgccagcttcatcgacaaggtgagattcctggagcagcagaacaaggtgctggagaccaagtgggccctgctgcaggagcagggcagcagaaccgtgagacagaacctggagcccctgttcgacagctacaccagcgagctgagaagacagctggagagcatcaccaccgagagaggcagactggaggccgagctgagaaacatgcaggacgtggtggaggacttcaaggtgagatacgaggacgagatcaacaagagaaccgccgccgagaacgagttcgtggccctgaagaaggacgtggacgccgcctacatgaacaaggtggagctggaggccaaggtgaagagcctgcccgaggagatcaacttcatccacagcgtgttcgacgccgagctgagccagctgcagacccaggtgggcgacaccagcgtggtgctgagcatggacaacaacagaaacctggacctggacagcatcatcgccgaggtgaaggcccagtacgaggacatcgccaacagaagcagagccgaggccgagagctggtaccagaccaagtacgaggagctgcaggtgaccgccggcagacacggcgacgacctgagaaacaccaagcaggagatcagcgagatgaacagaatgatccagagactgagagccgagatcgacagcgtgaagaagcagtgcagcagcctgcagaccgccatcgccgacgccgagcagagaggcgagctggccctgaaggacgccagagccaagctggtggacctggaggaggccctgcagaaggccaagcaggacatggccagactgctgagagagtaccaggagctgatgaacatcaagctggccctggacgtggagatcgccacctacagaaagctgctggagggcgaggagtgcagactgagcggcgagggcgtgagccccgtgaacatcagcgtggtgaccagcaccctgagcagcggctacggcagcggcagcagcatcggcggcggcaacctgggcctgggcggcggcagcggctacagcttcaccaccagcggcggccacagcctgggcgccggcctgggcggcagcggcttcagcgccaccagcaacagaggcctgggcggcagcggcagcagcgtgaagttcgtgagcaccaccagcagcagccagaagagctacacccactag

SEQ ID NO: 148829 - protein, 206 aa, Artificial Sequence
  derived and/or modified sequence
LGISLGIDQDSAAFLLSTMAIAEVFRRIGAGFVLNREPIRVIYIELICVILLTVSLFAFTFAREFWGLMSCSVFFGFMVGTTGGTHIPLLAEDDVVGIEKMSSAAGVYIFIQSIAGLAGPPLAGLLVDQSKIYSRAFYSCAAGMALAAVCLALVRPCKMGLCQHHHSGETKVVSHRGKTLQDIPEDFLEMDLAKNEHRVHVQMEPV

SEQ ID NO: 148830 - DNA, 1572 bp, Artificial Sequence
  derived and/or modified sequence
atgacccagaacaagctgaagctgtgcagcaaggccaacgtgtacaccgaggtgcccgacggcggctggggctgggccgtggccgtgagcttcttcttcgtggaggtgttcacctacggcatcatcaagaccttcggcgtgttcttcaacgacctgatggacagcttcaacgagagcaacagcagaatcagctggatcatcagcatctgcgtgttcgtgctgaccttcagcgcccccctggccaccgtgctgagcaacagattcggccacagactggtggtgatgctgggcggcctgctggtgagcaccggcatggtggccgccagcttcagccaggaggtgagccacatgtacgtggccatcggcatcatcagcggcctgggctactgcttcagcttcctgcccaccgtgaccatcctgagccagtacttcggcaagagaagaagcatcgtgaccgccgtggccagcaccggcgagtgcttcgccgtgttcgccttcgcccccgccatcatggccctgaaggagagaatcggctggagatacagcctgctgttcgtgggcctgctgcagctgaacatcgtgatcttcggcgccctgctgagacccatcttcatcagaggccccgccagccccaagatcgtgatccaggagaacagaaaggaggcccagtacatgctggagaacgagaagaccagaaccagcatcgacagcatcgacagcggcgtggagctgaccaccagccccaagaacgtgcccacccacaccaacctggagctggagcccaaggccgacatgcagcaggtgctggtgaagaccagccccagacccagcgagaagaaggcccccctgctggacttcagcatcctgaaggagaagagcttcatctgctacgccctgttcggcctgttcgccaccctgggcttcttcgcccccagcctgtacatcatccccctgggcatcagcctgggcatcgaccaggacagagccgccttcctgctgagcaccatggccatcgccgaggtgttcggcagaatcggcgccggcttcgtgctgaacagagagcccatcagaaagatctacatcgagctgatctgcgtgatcctgctgaccgtgagcctgttcgccttcaccttcgccaccgagttctggggcctgatgagctgcagcatcttcttcggcttcatggtgggcaccatcggcggcacccacatccccctgctggccgaggacgacgtggtgggcatcgagaagatgagcagcgccgccggcgtgtacatcttcatccagagcatcgccggcctggccggcccccccctggccggcctgctggtggaccagagcaagatctacagcagagccttctacagctgcgccgccggcatggccctggccgccgtgtgcctggccctggtgagaccctgcaagatgggcctgtgccagcaccaccacagcggcgagaccaaggtggtgagccacagaggcaagaccctgcaggacatccccgaggacttcctggagatggacctggccaagaacgagcacagagtgcacgtgcagatggagcccgtgtag

SEQ ID NO: 148831 - DNA, 1572 bp, Artificial Sequence
  derived and/or modified sequence
atgacccaaaacaaactcaagctatgcagcaaggccaacgtttacacggaagtgccagatggcggttgggggtgggccgtggctgtcagctttttcttcgttgaagtgttcacctatggtatcatcaagacctttggggttttctttaacgatttgatggattcctttaatgaatccaactccagaatctcttggatcattagcatctgtgttttcgtgttgacttttagtgcgcccctggcaaccgtcctgagtaacaggttcgggcacaggctggtcgtgatgctggggggtctgctcgtgtcaaccggaatggttgctgccagcttctcacaggaagtttctcacatgtatgtagccatcggtataataagcggactcggatactgcttctccttccttccaacggttacaatcctctcccagtatttcgggaagcgcaggagtattgtgacagccgttgcttccactggtgagtgttttgccgtttttgcctttgcacctgctatcatggcgttgaaggaaaggatcgggtggcgctatagcctcttgttcgtgggtctgctccaactcaatatcgttatttttggtgcactcctaagaccaattttcatcagaggacccgcctctccaaaaatcgtcatccaggaaaacaggaaggaggctcagtatatgctggagaacgagaagacgaggacgagcatcgattcaattgacagtggagtggaattgactactagtccgaaaaatgtgccaacccacacaaatctggagctcgaacccaaggccgacatgcagcaggttttggtgaagacctctcccagacccagcgaaaagaaagctccactgttagatttttctattttaaaagagaagtcatttatctgttatgctttgtttggtttatttgccaccctgggattctttgcccctagcctctatatcattccccttggcattagtctcgggattgaccaggatcgggcagcattccttctgtccaccatggctattgctgaggtgtttgggcggattggggctggttttgttttgaatcgagagccaattcggaaaatctatatcgaactgatatgcgtgatcctgctgactgtgagcctttttgctttcacctttgccaccgaattctggggcctgatgtcctgcagcatcttcttcgggtttatggtgggcactatagggggaactcacattccactccttgcagaagacgatgttgtcggtatcgagaagatgagcagcgctgcgggagtatatatcttcattcagtccatcgcaggtctcgctggaccgcccctcgccggactgctggtggaccaaagtaagatctacagtcgcgctttctactcttgtgccgccggaatggctctggccgcagtctgcctggccttggtgagaccttgtaagatgggtttgtgccaacaccaccacagcggagaaaccaaggtagtgagccaccggggcaaaactcttcaggacataccggaggatttcttagagatggatcttgccaaaaacgagcacagagtccacgtccaaatggaaccagtgtag

SEQ ID NO: 148832 - DNA, 1572 bp, Artificial Sequence
  derived and/or modified sequence
atgacccagaacaagctgaagctgtgcagcaaggccaacgtgtacacagaggtgcctgatggcggctggggctgggccgtggccgtgtccttcttctttgtggaggtgttcacctacggcatcatcaagacctttggagtcttcttcaatgacctgatggacagcttcaatgaaagcaacagccgcatctcctggatcatcagcatctgtgtgtttgtgctgaccttcagcgcccccctggccaccgtgctgagcaaccgcttcggccaccggctggtggtgatgctgggcggcctgctggtgtccacaggcatggtggccgccagcttcagccaggaggtgagccacatgtatgtggccatcggcatcatcagcggcctgggctactgcttctccttcctgcccaccgtgaccatcctgagccagtactttgggaagagaagaagcatcgtgacagctgtggccagcactggagaatgttttgctgtgtttgcctttgccccagccatcatggccctgaaggagagaattggctggagatacagcctgctgtttgtgggcctgctgcagctgaacatcgtcatctttggagccctgctgcggcccatcttcatccggggccctgccagccccaagatcgtcatccaggagaacaggaaggaggcccagtacatgctggagaatgagaagaccaggaccagcattgacagcattgacagcggcgtggagctgaccaccagccccaagaatgtgcccacccacaccaacctggagctggagcccaaggctgacatgcagcaggtgctggtgaagaccagcccccggcccagcgagaagaaggcccccctgctggacttcagcatcctgaaggagaagagcttcatctgctacgccctgtttggcctgtttgccaccctgggcttctttgcccccagcctgtacatcatccccctgggcatcagcctgggcatcgaccaggacagagctgccttcctgctgagcaccatggccatcgccgaggtgtttggaagaattggagctggctttgtgctgaaccgggagcccatcaggaagatctacatcgagctgatctgtgtgatcctgctgactgtgtccctgtttgccttcacctttgccacagagttctggggcctgatgagctgcagcatcttcttcggcttcatggtgggcaccatcggcggcacccacatccccctgctggctgaagatgatgtggtgggcatcgagaagatgagcagcgctgctggggtgtacatcttcatccagagcattgctggcctggccggcccccccctggccggcctgctggtggaccagagcaagatctacagccgggccttctacagctgtgccgccggcatggccctggccgctgtgtgcctggccctggtgcggccctgcaagatgggcctgtgccagcaccaccacagcggggagaccaaggtggtgagccaccggggcaagaccctgcaggacatccctgaggacttcctggagatggacctggccaagaatgagcaccgggtgcacgtgcagatggagcctgtgtag

SEQ ID NO: 148833 - DNA, 1572 bp, Artificial Sequence
  derived and/or modified sequence
atgacccagaacaagctgaagctgtgcagcaaggccaacgtgtacaccgaggtgcctgatggcggatggggctgggctgtagctgtgtcttttttcttcgttgaggttttcacttatggcatcattaagacctttggcgtcttttttaacgatctcatggatagtttcaacgagagtaacagtagaatttcatggattatatcgatttgtgtgtttgtactaacatttagcgctcctctggctaccgttttatccaatcgctttggacaccggctggtggtgatgttgggcggtctcctggtctctaccgggatggtagctgcctccttttcccaggaggtgagccatatgtatgttgccatcggtataatttcaggattggggtattgcttttcctttctgccaacagttacaatcctctcacaatacttcggtaaaagaagaagcatcgtgaccgcggtggcctctacaggtgaatgttttgcagtgttcgcctttgcccctgctattatggccctgaaagagcgaatcgggtggcgctactcgttgctgtttgtggggctactccaattgaatatcgtgattttcggagccctactgcggcccatttttattcgagggccggcttcccctaaaatcgtgattcaggagaaccgcaaggaggcacagtacatgctggagaacgagaaaaccagaacgtcaatagactcgatcgatagtggcgtagagctaacaacctctccaaagaacgttcctacacatacgaatctggagctggaacccaaagccgacatgcagcaggtgttagttaagacctcccctcggccttccgagaaaaaagcccccctgctggatttttccattctcaaagagaagtccttcatatgctacgcattatttggtttgttcgccacactgggtttcttcgccccttcactttacatcatccccttgggaatcagtctcggaattgatcaggatagggccgccttcctgctgagtacaatggctatcgccgaggtgtttgggcggattggggctggtttcgtgctcaaccgggaacccattaggaagatctacatagaactaatttgcgttatcctcctgactgtgagccttttcgcgtttaccttcgctaccgaattctggggactgatgtcatgcagcattttctttgggtttatggtgggcaccatcggcggcacacatataccgctgctggcagaggatgacgtggtggggatcgagaagatgtctagcgccgccggagtttacatttttatccagtctatcgcgggcttagccgggccccccctggcagggttgctggttgaccagtcaaaaatctattctcgggccttttatagctgcgccgccgggatggccctggccgcggtgtgtctggcactggtgaggccttgcaagatggggttatgtcagcatcatcattcaggcgagacaaaggtggtgagtcataggggaaagaccctccaagatattcctgaggatttcctggagatggaccttgccaagaatgaacacagagtgcacgtccaaatggaaccggtgtag

SEQ ID NO: 148834 - DNA, 1572 bp, Artificial Sequence
  derived and/or modified sequence
atgactcagaataaactgaagttatgttccaaggccaacgtgtataccgaggtgcccgatgggggttggggatgggccgtggctgtctccttcttcttcgtggaagtgttcacctacgggattattaagacattcggcgtctttttcaacgatctgatggattcttttaatgaaagcaattcacggatctcttggatcattagtatatgcgttttcgtgttaacattcagcgcaccactggctactgtgctgagcaatcgctttggacatagattggtggtaatgctgggcggactgttggtatctacaggaatggtcgccgcaagcttttcacaggaagtcagtcacatgtacgtcgccattgggatcatctcaggtctcggttactgtttctcgttcctgcctaccgtaaccattttatcccagtatttcggcaaacggagatctatcgttaccgccgtggcgagtacaggggagtgctttgctgtttttgcatttgctcctgcaatcatggccctcaaggagcgcatcggctggcgctactccctacttttcgtaggcctactgcaattgaacatcgtcattttcggagctttgttgcgcccaattttcatacgcggtcctgcttccccaaaaatcgtgatccaggaaaataggaaagaggcccagtacatgctggagaacgagaagactcgtacgtctattgactcgatcgattcaggtgtggagttaactacatccccaaagaatgtgccgacgcataccaatctcgagctcgagcctaaggcagatatgcagcaggtcctggtgaagacatcgcccaggccaagtgagaagaaggcccctctcctggattttagcatactgaaagaaaaaagctttatatgctacgctttgtttgggctgtttgcaactctagggttctttgctccttccctgtatatcatccctctaggaataagcttggggatcgaccaggaccgagctgccttccttctgagcaccatggcaattgccgaggtctttggcagaattggtgccggatttgtcctcaacagagagcccattcgcaagatttatattgagctcatatgcgtgatcttgctgacggtcagcctgtttgcctttaccttcgccaccgagttttggggtctgatgtcttgcagtatcttcttcggctttatggttggcacaatcggaggaacacatataccattacttgctgaagatgacgtggtgggaatcgaaaaaatgtcatccgcagccggagtgtacatcttcatccagtccattgccggactcgccggacccccactggctggtctgctcgtcgatcagtcaaagatttatagcagggccttttattcctgtgccgcaggaatggcactggcggcagtgtgtcttgctctagtgagaccctgcaaaatgggcctttgccagcaccaccactccggggaaacaaaggtggtctcacacagagggaaaactctgcaggatatccctgaggacttcctggagatggatcttgctaagaacgagcacagggttcacgtgcagatggagcccgtctag

SEQ ID NO: 148835 - DNA, 621 bp, Artificial Sequence
  derived and/or modified sequence
ctgggcatcagcctgggcatcgaccaggacagcgccgccttcctgctgagcaccatggccatcgccgaggtgttcagaagaatcggcgccggcttcgtgctgaacagagagcccatcagagtgatctacatcgagctgatctgcgtgatcctgctgaccgtgagcctgttcgccttcaccttcgccagagagttctggggcctgatgagctgcagcgtgttcttcggcttcatggtgggcaccaccggcggcacccacatccccctgctggccgaggacgacgtggtgggcatcgagaagatgagcagcgccgccggcgtgtacatcttcatccagagcatcgccggcctggccggcccccccctggccggcctgctggtggaccagagcaagatctacagcagagccttctacagctgcgccgccggcatggccctggccgccgtgtgcctggccctggtgagaccctgcaagatgggcctgtgccagcaccaccacagcggcgagaccaaggtggtgagccacagaggcaagaccctgcaggacatccccgaggacttcctggagatggacctggccaagaacgagcacagagtgcacgtgcagatggagcccgtgtag

SEQ ID NO: 148836 - DNA, 621 bp, Artificial Sequence
  derived and/or modified sequence
ctggggatcagtctaggaatcgatcaggattcagccgcctttctcttaagcactatggccatcgccgaggtgttccgccgaattggcgccggctttgtcctgaaccgtgagcccatccgtgttatctatatagaactcatttgtgtgattctcctgaccgtgtccctgttcgcattcacattcgctcgcgaattctgggggttgatgagctgctcggtatttttcggatttatggtcggcactaccggcggcactcatatacccttgctcgctgaggatgacgtggtaggaattgaaaagatgtcctctgctgctggagtatacatattcatccagtcaatagcgggattggcgggccctcctttagccggcctcctcgtggaccagagtaagatatattcccgcgcgttctatagctgtgctgcaggaatggccctcgcagccgtgtgcttggcactggtacggccgtgcaagatgggcctgtgccaacaccaccactcaggcgaaaccaaagttgtgtcacaccgggggaagacacttcaagatattcccgaggattttctcgagatggatctggctaaaaacgaacaccgagtgcacgtacagatggaaccagtatag

SEQ ID NO: 148837 - DNA, 1572 bp, Artificial Sequence
  derived and/or modified sequence
atgacccagaacaaattgaaactatgcagcaaagccaacgtgtatacagaggttcctgacggcgggtgggggtgggccgtcgccgtctctttcttcttcgtagaagtttttacgtacggcataattaagacattcggcgtgttcttcaatgatctgatggacagttttaacgagagcaatagccggatttcttggatcatatcaatttgtgtattcgtgctgacattctctgcgccgttagctaccgtgctgtctaacaggttcggacatcggttggtggtgatgctaggcggacttcttgtgtcaaccgggatggtggccgccagctttagccaagaggtgtctcacatgtatgtagcaataggtatcatttccggactgggttattgcttttcgttccttcccactgtgaccattctttcacagtatttcggcaagaggcgctcaatcgttactgcagtcgcaagcactggggagtgttttgcagtctttgcctttgcacctgccattatggccctcaaggagcggattggttggaggtatagcctcttgttcgtggggttgctgcagcttaatatcgtcatcttcggcgcacttctccgaccgatcttcattcgagggcctgcgtcccctaaaatagttatccaggaaaaccgaaaggaggctcagtacatgttagaaaatgaaaaaactagaaccagcatagacagcatagactcaggtgtagaattgacaacttcgcctaagaacgtgcctacccacaccaatctggaactcgagccaaaggctgatatgcagcaggtcctggtgaaaacaagcccccggcccagtgaaaagaaggcgcccctgctggacttctcaatcctcaaagagaagagtttcatctgttatgcgttattcggtctctttgccactctggggttctttgctccctctctttatatcatccctctgggtatttcactggggattgaccaggaccgcgccgcattcctgttgtctactatggcgatagcagaggtatttggcagaatcggagccggctttgttctaaatcgagagcctattcgaaagatttacattgagctgatctgtgtgatccttttaactgttagcctgttcgcctttactttcgccaccgagttctggggcctaatgtcttgttcaatattcttcggctttatggtggggactatcgggggcactcatatacccctactggctgaggacgacgtcgttgggatcgaaaagatgtccagcgcggccggtgtctacattttcatccaaagtatcgcgggacttgcaggccccccgctggctggactgctggtagatcaaagcaagatttatagccgcgctttttactcctgcgccgccggtatggcgcttgcggccgtctgcctcgcactggtgcgaccctgtaagatgggcctgtgtcagcaccatcattccggcgagactaaggttgtgtcccacagaggcaaaaccctgcaagacattcccgaggactttctcgagatggatttagccaaaaatgaacaccgcgtgcatgtgcaaatggaacctgtttag

SEQ ID NO: 148838 - DNA, 621 bp, Artificial Sequence
  derived and/or modified sequence
ctgggcatcagcctgggcatcgaccaggacagcgctgccttcctgctgagcaccatggccatcgccgaggtgttccgccgcatcggggccggctttgtgctgaaccgggagcccatccgggtcatctacatcgagctgatctgtgtgatcctgctgactgtgtccctgtttgccttcacctttgcccgggagttctggggcctgatgagctgcagcgtcttcttcggcttcatggtgggcaccaccggcggcacccacatccccctgctggccgaggatgatgtggtgggcatcgagaagatgagcagcgctgctggggtgtacatcttcatccagagcattgctggcctggccggcccccccctggccggcctgctggtggaccagagcaagatctacagccgggccttctacagctgtgccgccggcatggccctggccgctgtgtgcctggccctggtgcggccctgcaagatgggcctgtgccagcaccaccacagcggggagaccaaggtggtgagccaccggggcaagaccctgcaggacatccctgaggacttcctggagatggacctggccaagaatgagcaccgggtgcacgtgcagatggagcctgtgtag

SEQ ID NO: 148839 - DNA, 621 bp, Artificial Sequence
  derived and/or modified sequence
ctgggcatcagcctgggcatcgaccaggacagcgccgccttcctgctgagcacgatggccattgccgaagtattcagacgcattggggctggtttcgtgctcaacagggagcccatacgggtgatctacatagagctaatatgtgtgattctattgactgtgtcactgttcgcatttacatttgcacgcgagttttggggcttgatgagctgttcagtctttttcggatttatggtcggcacaaccgggggaacgcacattccccttctggccgaagatgacgtcgtggggatcgaaaagatgagtagtgcagctggagtgtacatctttatacagtcaatcgcagggctggcaggcccccctctggcaggactcctagtggatcagtcaaagatttactcgagagccttttattcttgtgcagctgggatggccctggcagcagtgtgtctcgctctcgtgcgaccctgcaagatggggctgtgtcagcaccaccattccggtgaaaccaaagtggtaagtcatagaggaaagaccttacaggatattcccgaggacttcctggagatggatttagcaaagaacgaacaccgagtgcatgtgcagatggaacccgtttag

SEQ ID NO: 148840 - DNA, 1572 bp, Artificial Sequence
  derived and/or modified sequence
atgacccagaacaagctgaagctgtgcagcaaggccaacgtgtacacagaagtccccgatgggggctggggatgggccgtggctgtctcattctttttcgttgaggtcttcacttacggcatcatcaaaaccttcggcgtgttttttaatgatctgatggatagctttaacgagagtaactctcgaatttcttggattattagcatatgtgtattcgtgctgacattttcagctccactggccaccgttctctccaaccgctttggccacaggctggtggttatgctcggtggcctgctagtgagtacgggaatggttgccgcctcgttcagtcaggaggtaagccacatgtatgtggccataggcatcatatcaggtttaggctactgtttttctttcctgcccaccgtgacaattctaagccagtacttcgggaaacggcgctccatcgtcaccgccgtggcatctacgggggagtgctttgctgtgttcgcgtttgctcctgctatcatggctctcaaagagaggatcggttggcgttattcgttgctcttcgttggcctgctgcaactcaacatagtcatttttggcgcactgctgcgtcctatctttattagagggccagctagccccaaaatcgtgatccaggagaatcgcaaagaggctcaatacatgctggagaacgagaaaacgagaacctcgatcgactcaatagatagcggagtggagctaaccacatcacctaaaaacgtcccgactcacactaatcttgagctggaacctaaagccgatatgcagcaggtactggtcaagacctcccccagacctagcgagaagaaagccccgcttctcgatttctctattttaaaagagaagtccttcatttgctatgccctttttggcctctttgccaccctgggcttcttcgcgccgtccctgtatattatccctctgggcatcagcctgggcattgatcaggacagagctgccttcttgttgtctaccatggccatcgctgaagtgttcgggcgcatcggggccggcttcgtgttaaacagggagccaatccggaagatttatatcgagctcatatgcgtcattctgttgaccgtctcattattcgcattcactttcgctaccgaattttgggggctcatgagttgtagtatcttcttcggttttatggtgggcactattggaggcactcatatcccgctcctggctgaagatgacgttgttggcatcgaaaaaatgtcaagcgcggctggggtttacatcttcatccagagcattgctgggctggccggccccccactggcaggcctgctcgttgatcagagcaaaatctattctcgcgccttctacagctgcgctgccggaatggccctagctgcagtatgcctggcattggtcaggccttgcaagatggggttgtgccagcaccaccattctggcgagacgaaggtggtttcccatcgtgggaaaaccctgcaagacattccagaggattttttggagatggatctagcgaagaacgaacacagagttcacgtccaaatggaacctgtgtag

SEQ ID NO: 148841 - DNA, 621 bp, Artificial Sequence
  derived and/or modified sequence
cttggcatcagcctgggaatcgaccaggacagcgccgcattcctcctgtctacaatggccatcgccgaagtttttcgcagaatcggcgctggctttgtgctcaacagggagcctattagagtgatttacatcgagttgatttgcgtcatcctgttgactgtgtcactgtttgccttcacctttgctcgagagttctggggcctaatgtcttgctcagttttctttgggttcatggttggcacaaccggcggaacacacattcccctcctggcggaggatgacgtagtgggcatcgagaagatgtcatccgctgccggagtgtatatctttatccagtctatcgccggactggccggtccccctttggccggtctgttggtggatcagtctaagatttacagcagagcgttttactcatgtgccgctggaatggccttggcggctgtatgcctcgccctggtccgaccctgtaagatgggtctatgtcagcaccatcatagcggggaaaccaaagtagtgtctcacaggggaaaaaccttgcaggatattcctgaagattttctagaaatggacctcgctaaaaacgagcacagagtccacgtccagatggagccggtatag

SEQ ID NO: 148842 - DNA, 1572 bp, Artificial Sequence
  derived and/or modified sequence
atgactcagaacaagctgaagctctgctctaaggccaatgtctacaccgaagttccggatggcggatggggctgggccgttgctgtcagtttcttttttgtagaagtgtttacatacggcattattaaaaccttcggggtgtttttcaatgacctcatggactcttttaatgaatccaattcacgaatttcctggatcatctcgatttgcgtgtttgtactgactttttcggcccctctggctacagtgctgagtaaccgtttcgggcaccggctggtcgtcatgttgggcggattgcttgtttccaccggaatggtggccgcatcgttttcacaggaggtttctcatatgtacgttgcaattgggatcatatctggactggggtactgtttctcatttctgcccacagtgactatcctgtcacagtactttggcaaaagaagatccatagtgacagcagtggctagcacaggcgagtgtttcgcagtgtttgcattcgcccctgctataatggcattgaaggaacgcattggctggaggtattccctcctgtttgtaggactgctccagctcaacattgtgattttcggagctctgctgagacctattttcatccgtggtcctgctagccctaaaatagtcatccaggaaaatagaaaagaggcccagtatatgctggagaacgaaaaaacacgcacatccatcgactctatcgactcaggtgtagaactgactacatcgccgaaaaatgtccccacacatactaacctggagctggagccaaaggctgacatgcagcaggtgctcgttaagacctcacccagaccgtctgaaaagaaggctcccctcctggactttagtattctcaaggagaagtccttcatatgctacgctctgttcggcttgtttgccacgctgggcttcttcgctccatctttgtacatcatcccactcgggatttctctcggcattgaccaggacagggccgctttccttctgagcacgatggcaattgcagaagtattcggcaggattggggcaggctttgtcctgaaccgagagcccataagaaagatctacattgagctgatatgcgtgatcttgctgacagtgagcctcttcgcctttacctttgccaccgagttctggggtcttatgagctgcagtatcttcttcggcttcatggtcgggacaattggcggaactcacataccactgctagcagaggacgacgtagtaggcatcgaaaagatgtcctctgcagcaggagtctatatttttattcagagtatagctggccttgccggacctcccctggcaggtctgttggtggaccagtccaaaatctatagccgcgctttctacagctgtgcagcagggatggccctggccgcagtttgcctcgcactggtcaggccttgcaaaatgggcctgtgccaacaccaccattccggagaaactaaagttgtgagtcatcgcggaaagacgctgcaggatatccccgaggactttctggagatggatctggctaaaaacgaacacagagtgcatgtccaaatggaaccagtatag

SEQ ID NO: 148843 - DNA, 670 bp, Artificial Sequence
  derived and/or modified sequence
ctgggcattagtctgggcattgaccaggacagcgctgcttttttattatctacaatggccattgcagaagttttcaggaggatcggagctggttttgtcctcaacagagagcccattcgtgtgatttacattgagctcatctgcgtcatcttattgactgtgtctctgtttgcctttacttttgctagggaattctggggtctaatgtcatgtagcgtattttttgggtttatggttggaacaacaggagggacccacattccactgcttgctgaggatgatgttgtgggcattgagaagatgtcttctgcagctggggtctacatcttcattcagagcatagcaggactggctggaccaccccttgcgggtttgttggtggaccaaagtaagatctacagcagggccttctactcctgcgcagctggcatggccctggctgctgtgtgcctcgccctggtgagaccgtgtaagatgggactgtgccagcatcatcactcaggtgaaacaaaggtagtgagccatcgtgggaagactttacaggacatacctgaagactttctggaaatggatcttgcaaaaaatgagcacagagttcacgtgcaaatggagccggtatgacacactttcttacaacaacagccactgtgttggctggagagggatgggg

SEQ ID NO: 148844 - protein, 522 aa, Artificial Sequence
  derived and/or modified sequence
MASSRASSTQATKTKAPDDLVAPVVKKPHIYYGSLEEKERERLAKGESGILGKDGLKAGIEAGNINITSGEVFEIEEHISERQAEVLAEFERRKRARQINVSTDDSEVKACLRALGEPITLFGEGPAERRERLRNILSVVGTDALKKTKKDDEKSKKSKEEYQQTWYHEGPNSLKVARLWIANYSLPRAMKRLEEARLHKEIPETTRTSQMQELHKSLRSLNNFCSQIGDDRPISYCHFSPNSKMLATACWSGLCKLWSVPDCNLLHTLRGHNTNVGAIVFHPKSTVSLDPKDVNLASCAADGSVKLWSLDSDEPVADIEGHTVRVARVMWHPSGRFLGTTCYDRSWRLWDLEAQEEILHQEGHSMGVYDIAFHQDGSLAGTGGLDAFGRVWDLRTGRCIMFLEGHLKEIYGINFSPNGYHIATGSGDNTCKVWDLRQRRCVYTIPAHQNLVTGVKFEPIHGNFLLTGAYDNTAKIWTHPGWSPLKTLAGHEGKVMGLDISSDGQLIATCSYDRTFKLWMAE

SEQ ID NO: 148845 - DNA, 1569 bp, Artificial Sequence
  derived and/or modified sequence
atggctagtagtagggcaagttcaacccaggcaaccaaaactaaagcacccgatgacctggtagctcccgtcgtgaagaaaccacatatttactacggaagcttggaggagaaggagagagagcggctcgcgaagggggaatctggaatcctggggaaggatggactgaaggccgggatagaggcagggaatattaacatcacgagcggcgaggtgttcgagatagaggagcacatttctgaaagacaggcggaagttcttgccgagttcgaacgtaggaaacgcgcccgccagattaatgtgtctaccgatgactctgaggtgaaggcctgtttacgcgctctgggagaaccaatcaccctcttcggcgaaggaccagccgaacgccgcgagaggctccgcaacattctgagtgtcgttggcaccgatgcacttaagaagaccaagaaagacgacgaaaagagcaagaagtccaaagaggagtaccagcagacttggtatcacgagggaccgaacagcctcaaggtggccaggctgtggattgcaaattactcactgccgcgcgccatgaagcgcctggaggaagctagattgcataaggagatcccagaaaccaccaggacatcccaaatgcaagagttacataagtccctgcgcagcctcaataatttctgctcccaaataggagatgacaggcctatcagctactgccatttcagtccaaacagtaaaatgttggcgaccgcttgctggtcagggctctgtaaattgtggtccgtcccagattgcaacttattacacactctccgaggccacaacactaacgtgggggctatcgtgttccatcctaagtctacagtctctctggatcctaaagatgtgaacctggcctcgtgtgccgcggatgggagcgtgaagctctggtcgctagacagcgacgaacctgtggccgacatcgaaggccacacagtccgagttgcccgcgtaatgtggcaccctagcggaagattcctcggaaccacgtgttacgatcgttcctggagactgtgggacctggaagctcaggaggaaatcttacaccaggagggtcacagcatgggtgtgtacgacatcgcctttcaccaagatggtagtctggccggcaccgggggcctagacgctttcggacgagtgtgggacctgcgcactgggagatgcattatgttcctcgagggccatctaaaagagatctacggaattaatttctctcccaacgggtaccacattgcaacaggatctggcgataacacatgcaaggtgtgggatctgcgacagcggaggtgtgtttacactatacccgctcatcagaacctcgtgactggggtgaaatttgagcccatccacgggaacttcctgctgactggagcttacgataatactgctaagatctggacccatccaggatggagtcctctcaaaacattggccggacatgaaggcaaggtgatggggctggatattagtagcgacggccaactaattgccacctgtagctatgatcggacatttaagctgtggatggcggaatag

SEQ ID NO: 148846 - DNA, 1569 bp, Artificial Sequence
  derived and/or modified sequence
atggccagcagccgggccagcagcacccaggccaccaagaccaaggccccagatgacctggtggcccctgtggtgaagaagccccacatctactacggcagcctggaggagaaggagcgggagcggctggccaagggggagagcggcatcctgggcaaggatggcctgaaggccggcatcgaggccggcaacatcaacatcaccagcggggaggtgtttgaaattgaggagcacatcagcgagcggcaggccgaggtgctggccgagtttgagaggaggaagagggcccggcagatcaacgtgtccacagatgacagcgaggtgaaggcctgcctgcgggccctgggggagcccatcaccctgtttggagagggccctgctgagcggcgggagcggctgaggaacatcctgtctgtggtgggcacagatgccctgaagaagaccaagaaggatgatgagaagagcaagaagagcaaggaggagtaccagcagacctggtaccacgagggccccaacagcctgaaggtggcccggctgtggatcgccaactacagcctgccccgggccatgaagaggctggaggaggcccggctgcacaaggagatccctgagaccaccaggaccagccagatgcaggagctgcacaagagcctgcggagcctgaacaacttctgcagccagattggagatgaccggcccatctcctactgccacttcagccccaacagcaagatgctggccacagcctgctggagcggcctgtgcaagctgtggagcgtgcctgactgcaacctgctgcacaccctgcggggccacaacaccaacgtgggcgccatcgtgttccaccccaagagcacagtgtccctggaccccaaggatgtgaacctggccagctgtgccgcagatggctctgtgaagctgtggagcctggacagtgatgagcctgtggccgacatcgagggccacacagtgcgggtggcccgggtgatgtggcaccccagcggccgcttcctgggcaccacctgctatgaccgctcctggaggctgtgggacctggaggcccaggaggagatcctgcaccaggagggccacagcatgggcgtgtatgacatcgccttccaccaggacggcagcctggccggcaccggcggcctggatgccttcggccgggtgtgggacctgaggacaggccgctgcatcatgttcctggagggccacctgaaggagatctacggcatcaacttcagccccaacggctaccacatcgccaccggcagcggggacaacacctgcaaggtgtgggacctgcggcagaggcgctgtgtgtacaccatcccagcccaccagaacctggtgactggagtgaagtttgagcccatccacggcaacttcctgctgactggagcctatgacaacacagccaagatctggacccaccctggctggagccccctgaagaccctggccggccacgagggcaaggtgatgggcctggacatcagcagtgatggccagctgattgccacctgcagctatgacaggaccttcaagctgtggatggccgagtag

SEQ ID NO: 148847 - DNA, 1569 bp, Artificial Sequence
  derived and/or modified sequence
atggccagcagccgggccagcagcacccaggccaccaagaccaaggcgccagacgacctcgttgcccccgtggtaaaaaagccacacatctattacggatccctcgaggagaaggagcgagaacgactagccaagggggaaagtgggatactgggtaaggatggattgaaagcgggcattgaagcaggaaacatcaacatcaccagcggggaggtttttgaaattgaagaacacattagcgagcggcaggccgaggtgctcgcagaattcgagaggcgcaaaagggcgcggcagataaacgtaagcactgacgatagcgaggtgaaggcatgtctcagagctcttggggaacctataaccctgtttggcgagggcccagcggagaggagagagcggttgcggaacattctgagtgtggtcggcactgatgccctgaagaaaaccaagaaagacgacgaaaagtccaaaaaaagcaaagaggagtaccaacagacctggtatcatgagggacccaactcattgaaggtggctcgcctttggatcgcaaattactcactgccgcgagccatgaaaaggctggaggaggctagattacacaaggaaatacctgagactacaaggacatctcagatgcaggagctccataagtccctcaggtctttaaacaacttttgcagccagatcggagatgaccgtcctatcagctactgccacttctcacctaatagcaaaatgctggccactgcttgctggtctggactttgcaagctctggtctgtacctgactgcaatctgctgcacactctcaggggccacaacactaatgttggggctatagttttccaccctaagagtactgtaagtcttgacccaaaggacgtgaacctggcatcgtgcgctgccgacggctctgtcaaactgtggtcccttgactcggatgagccggttgccgatatagaaggccacaccgtgcgcgtcgctcgggtgatgtggcaccctagtggcagattcctgggaaccacttgctacgatcggtcctggaggctttgggacctcgaggcccaagaggaaatcctccatcaggaggggcattctatgggcgtctatgacatcgcttttcaccaggacggatccctggctggaactggcggcctggatgccttcggtcgcgtctgggacctgaggactggccggtgtatcatgttcctagaagggcacctgaaggagatatacggaatcaactttagtcccaatggctatcatatcgccaccggcagcggtgacaacacttgcaaggtatgggatctgcgccagaggagatgcgtgtacacgatcccagcccatcaaaacctcgtcaccggagttaagttcgaaccaatccacggtaactttctactcaccggagcgtatgataacacagcgaaaatctggacgcatcctgggtggagccccctcaaaacactggcgggtcacgaggggaaggtgatggggctggacatatcatcggatggacaattaatagccacatgcagctacgacaggaccttcaaactgtggatggccgagtag

SEQ ID NO: 148848 - DNA, 1569 bp, Artificial Sequence
  derived and/or modified sequence
atggccagtagtagggcctcatccacccaggcgaccaagactaaggcccctgacgatctggtggcgccagtggttaagaaaccacacatctattatggcagcttggaggaaaaggagagagaacgtctggcgaaaggtgagtctggtatactgggaaaagacggtctcaaagctggaattgaagctggaaatattaatatcaccagtggcgaagtgttcgaaatagaggagcatattagtgaacgccaggcagaggtgctggcagagtttgagagacggaagagggccaggcagattaatgtgagtaccgatgacagcgaggtaaaagcatgcctaagagccttgggggaacccatcactctcttcggcgaggggccagcagaacgcagagaaaggctgaggaacatcctttccgttgttggaactgatgctcttaaaaaaacaaaaaaggatgatgaaaaaagtaaaaagtccaaagaggagtaccaacagacctggtaccacgaaggcccaaatagcttaaaggtagccaggctctggatcgctaactattctttgcccagggcgatgaaacggctcgaggaagcaaggctacacaaagagattcctgaaaccacacgaacctcacaaatgcaggaacttcataaaagtctgcggagcttgaacaatttctgtagtcaaatcggtgacgataggcccattagttattgtcatttcagtccaaactccaagatgctcgctactgcctgctggagtggcctctgtaaactctggagcgtccctgattgtaatttgctccacactctgagagggcataacaccaatgtcggggcaattgtgttccaccccaaatcaaccgtaagcctggacccaaaggacgtgaacttggcttcctgtgcagccgatggatcagtcaaactgtggagcttagattccgacgagcctgtggcagatatagagggtcacacggtgcgtgttgcacgagtcatgtggcatccttccggccgattcctcggtacaacttgctacgacaggtcctggcggctgtgggatctggaggcccaggaagaaatcctgcaccaggaaggtcactcaatgggggtgtacgatatagcctttcatcaggatggcagtctcgccggaacgggagggcttgacgcctttggtagggtgtgggacctgagaaccggacggtgtatcatgtttctcgagggccacctcaaagaaatctacggaattaacttctcccccaatggatatcacatcgcgaccggctcaggcgataatacatgtaaggtgtgggacctacgccagaggaggtgtgtgtacaccatccctgcccaccagaacctagtcacaggagtgaagttcgaaccaattcacggcaacttcttgctcacgggcgcttacgacaatacagccaaaatatggacccacccaggatggtcaccgcttaaaactttggccggacatgagggcaaggtcatgggactggatatctcatccgatggacagctgatagctacatgtagctacgaccgaacatttaagctgtggatggcagaatag

SEQ ID NO: 148849 - DNA, 3496 bp, Artificial Sequence
  derived and/or modified sequence
cagagttcagccccgagccgcgcgagtcgactcacctacctcttttcaagccggcctagccccttcccggaacctcggctcccccccaacgaaactactgctaagccaactggactacacttcccagactgcttggagcctctctctccgcagaacctcgtcttccgcgagcttttcctggaggttctaggagggatgcccctcaatgccacgacgccatttcctactacgacttccatcatgctccgcgccgctccgggggcggtgacccctcttggcccacgtcttgtcagtgacgcacttcctgtcagtgacgcacttcccctctgctgggcgcgcggtggacggtctgaaagggagtgttcgggtttcgctggggcctcgcggctccagagcccagcatggcttcctcgcgagcctcttccacgcaggcaaccaaaactaaagcacccgacgacttagttgctccggtcgtgaagaaaccacacatctattatggaagtttggaagagaaggagagggagcgtctggccaaaggagagtctgggattttggggaaagacggacttaaagcagggatcgaagctggaaatattaatataacctctggagaagtgtttgaaattgaagagcatatcagcgagcgacaggcagaagtattggctgagtttgagagaaggaagcgagcccggcagatcaatgtttccacagatgactcagaggtcaaagcttgccttagagccttgggggaacccatcacactttttggagagggtcctgctgaaagaagagaaaggttaagaaatatcctctcagttgtcggtactgatgccttgaaaaagaccaaaaaggatgatgagaagtctaaaaagtccaaagaagagtatcagcaaacctggtatcatgaaggaccaaatagcttgaaggtggcaagactatggattgctaattattcgttgcccagggcaatgaaacgcttggaagaggcccgactccataaggagattcctgagacaacaaggacctcccagatgcaagagctgcacaagtctctccggtctttgaataatttttgcagtcagattggggatgatcggcctatctcctactgtcactttagtcccaattccaagatgctggccacagcttgttggagtgggctttgcaagctctggtctgttcctgattgcaacctccttcacactcttcgagggcataacacaaatgtaggagcaattgtattccatcccaaatccactgtctccttggacccaaaagatgtcaacctggcctcttgtgcggctgatggctctgtgaagctttggagtctcgacagtgatgaaccagtggcagatattgaaggccatacagtgcgtgtggcgcgggtaatgtggcatccttcaggacgtttcctgggcaccacctgctatgaccgttcatggcgcttatgggatttggaggctcaagaggagatcctgcatcaggaaggccatagcatgggtgtgtatgacattgccttccatcaagatggctctttggctggcactgggggactggatgcatttggtcgagtttgggacctacgcacaggacgttgtatcatgttcttagaaggccacctgaaagaaatctatggaataaatttctcccccaatggctatcacattgcaaccggcagtggtgacaacacctgcaaagtgtgggacctccgacagcggcgttgcgtctacaccatccctgctcatcagaacttagtgactggtgtcaagtttgagcctatccatgggaacttcttgcttactggtgcctatgataacacagccaagatctggacgcacccaggctggtccccgctgaagactctggctggccacgaaggcaaagtgatgggcctagatatttcttccgatgggcagctcatagccacttgctcatatgacaggaccttcaagctgtggatggctgaatagatgacaatgggaaaaggacttgaacctcaagctctctctaaggagctgttttcctcaaacgagaagaattgaagtgtttagttctatcatgttttctgccaattaccatgcatagaccctcagtagaattggatttccatgtcagcccccactccaggaaggcagcccaatccctaggtgatggggaacccctctcacggttgaaaatttattacctttttacgccctgccacgaactgtgtagacattgtttttattaatcttttgtttggccgggcgtggtggctcacgcctgtaatcctagcactttgggaggccgaggtgggtagatcgcttgagctcaggagttcaagacgagcctgggcaacatggcaaatgccgtctctgcaaaaaaatactaaaattagctggtcgcggtggcttctgcctgtgattccggctacttgggaggctgaggtgggagggattgcttaagcctgggaggcagaggttgcagtgagccgagattgcgccattgcactctagcctgtgtgacagagcaagaccctgtctcaaaaaaaaaaaaaatttgttcgaatgccttatagccttcctcacagcacccaggattgtgactgactctgcatttttaattcttgaaacttggctttccataacatggtacatgcttcaggactacatatgacccagagagcaaggtggctgaactatagtctggaagccctcaggtaaagaggcacatctcaccactcattggttaaacaatgcatcatagcgagcacttttcctttccctggagaatgggatgtgaagcagtagaccgcagccacgccgatggttatacagtgaagaagacttcacctcttcctattgagtttgcttggaatgctgacagcatcaggcaactctgaactgaacatttgctttgtcagaaaatatctttttttttactttgaagtttggcaaccttcatgttaccccaaagcaaaaccattgtgtcaggagtcaaacaaatgtttagaaagcaaacatgacgtctctattgtacaacctcctttctcttggctgtttaaaggatgtacttcgtgtattaaagggtactttatgttgaagtaacgaaaaaaccctaatgggtgttcctaaacctaaaccttttctttattccacatttgctacggtaaaatcctgttacaaaactaccctataaagaattattttctatagttaagcattttctgaatcctagccattggtccatagaggtctcttttttttggtttgggatataatggatgatctcaaatatggattactctgatttatgtctccttagcaccttgttaacaattttttttaaaatagaaggctgtttgcattttgggccagactgccagtaagccaggcctggactcaattacaattcttaacttgtctgtcatgcacctcttttcacctcaactatacagcctctgaactctcaaattacacagtaaattcaaaaaaatatataggaatttggaagaaga

SEQ ID NO: 148850 - DNA, 1569 bp, Artificial Sequence
  derived and/or modified sequence
atggccagcagcagagccagcagcacccaggccaccaagaccaaggcccccgacgacctggtggcccccgtggtgaagaagccccacatctactacggcagcctggaggagaaggagagagagagactggccaagggcgagagcggcatcctgggcaaggacggcctgaaggccggcatcgaggccggcaacatcaacatcaccagcggcgaggtgttcgagatcgaggagcacatcagcgagagacaggccgaggtgctggccgagttcgagagaagaaagagagccagacagatcaacgtgagcaccgacgacagcgaggtgaaggcctgcctgagagccctgggcgagcccatcaccctgttcggcgagggccccgccgagagaagagagagactgagaaacatcctgagcgtggtgggcaccgacgccctgaagaagaccaagaaggacgacgagaagagcaagaagagcaaggaggagtaccagcagacctggtaccacgagggccccaacagcctgaaggtggccagactgtggatcgccaactacagcctgcccagagccatgaagagactggaggaggccagactgcacaaggagatccccgagaccaccagaaccagccagatgcaggagctgcacaagagcctgagaagcctgaacaacttctgcagccagatcggcgacgacagacccatcagctactgccacttcagccccaacagcaagatgctggccaccgcctgctggagcggcctgtgcaagctgtggagcgtgcccgactgcaacctgctgcacaccctgagaggccacaacaccaacgtgggcgccatcgtgttccaccccaagagcaccgtgagcctggaccccaaggacgtgaacctggccagctgcgccgccgacggcagcgtgaagctgtggagcctggacagcgacgagcccgtggccgacatcgagggccacaccgtgagagtggccagagtgatgtggcaccccagcggcagattcctgggcaccacctgctacgacagaagctggagactgtgggacctggaggcccaggaggagatcctgcaccaggagggccacagcatgggcgtgtacgacatcgccttccaccaggacggcagcctggccggcaccggcggcctggacgccttcggcagagtgtgggacctgagaaccggcagatgcatcatgttcctggagggccacctgaaggagatctacggcatcaacttcagccccaacggctaccacatcgccaccggcagcggcgacaacacctgcaaggtgtgggacctgagacagagaagatgcgtgtacaccatccccgcccaccagaacctggtgaccggcgtgaagttcgagcccatccacggcaacttcctgctgaccggcgcctacgacaacaccgccaagatctggacccaccccggctggagccccctgaagaccctggccggccacgagggcaaggtgatgggcctggacatcagcagcgacggccagctgatcgccacctgcagctacgacagaaccttcaagctgtggatggccgagtag

SEQ ID NO: 148851 - protein, 398 aa, Artificial Sequence
  derived and/or modified sequence
MALLRRPTVSSDLENIDTGVNSKVKSHVTIRRTVLEEIGNRVTTRAAQVAKKAQNTKVPVQPTKTTNVNKQLKPTASVKPVQMEKLAPKGPSPTPEDVSMKEENLCQAFSDALLCKIEDIDNEDWENPQLCSDYVKDIYQYLRQLEVLQSINPHFLDGRDINGRMRAILVDWLVQVHSKFRLLQETLYMCVGIMDRFLQVQPVSRKKLQLVGITALLLASKYEEMFSPNIEDFVYITDNAYTSSQIREMETLILKELKFELGRPLPLHFLRRASKAGEVDVEQHTLAKYLMELTLIDYDMVHYHPSKVAAAASCLSQKVLGQGKWNLKQQYYTGYTENEVLEVMQHMAKNVVKVNENLTKFIAIKNKYASSKLLKISMIPQLNSKAVKDLASPLIGRS

SEQ ID NO: 148852 - DNA, 1197 bp, Artificial Sequence
  derived and/or modified sequence
atggccctgctgagaagacccaccgtgagcagcgacctggagaacatcgacaccggcgtgaacagcaaggtgaagagccacgtgaccatcagaagaaccgtgctggaggagatcggcaacagagtgaccaccagagccgcccaggtggccaagaaggcccagaacaccaaggtgcccgtgcagcccaccaagaccaccaacgtgaacaagcagctgaagcccaccgccagcgtgaagcccgtgcagatggagaagctggcccccaagggccccagccccacccccgaggacgtgagcatgaaggaggagaacctgtgccaggccttcagcgacgccctgctgtgcaagatcgaggacatcgacaacgaggactgggagaacccccagctgtgcagcgactacgtgaaggacatctaccagtacctgagacagctggaggtgctgcagagcatcaacccccacttcctggacggcagagacatcaacggcagaatgagagccatcctggtggactggctggtgcaggtgcacagcaagttcagactgctgcaggagaccctgtacatgtgcgtgggcatcatggacagattcctgcaggtgcagcccgtgagcagaaagaagctgcagctggtgggcatcaccgccctgctgctggccagcaagtacgaggagatgttcagccccaacatcgaggacttcgtgtacatcaccgacaacgcctacaccagcagccagatcagagagatggagaccctgatcctgaaggagctgaagttcgagctgggcagacccctgcccctgcacttcctgagaagagccagcaaggccggcgaggtggacgtggagcagcacaccctggccaagtacctgatggagctgaccctgatcgactacgacatggtgcactaccaccccagcaaggtggccgccgccgccagctgcctgagccagaaggtgctgggccagggcaagtggaacctgaagcagcagtactacaccggctacaccgagaacgaggtgctggaggtgatgcagcacatggccaagaacgtggtgaaggtgaacgagaacctgaccaagttcatcgccatcaagaacaagtacgccagcagcaagctgctgaagatcagcatgatcccccagctgaacagcaaggccgtgaaggacctggccagccccctgatcggcagaagctag

SEQ ID NO: 148853 - DNA, 1556 bp, Artificial Sequence
  derived and/or modified sequence
gtgcgcagggccgcccaatggggcgcaagcgacgcggtatttgaatcctggaacaaggctacagcgtcgaagatccccagcgctgcgggctcggagagcagtcctaacggcgcctcgtacgctagtgtcctcccttttcagtccgcgtccctccctgggccgggctggcactcttgccttccccgtccctcatggcgctgctccgacgcccgacggtgtccagtgatttggagaatattgacacaggagttaattctaaagttaagagtcatgtgactattaggcgaactgttttagaagaaattggaaatagagttacaaccagagcagcacaagtagctaagaaagctcagaacaccaaagttccagttcaacccaccaaaacaacaaatgtcaacaaacaactgaaacctactgcttctgtcaaaccagtacagatggaaaagttggctccaaagggtccttctcccacacctgaggatgtctccatgaaggaagagaatctctgccaagctttttctgatgccttgctctgcaaaatcgaggacattgataacgaagattgggagaaccctcagctctgcagtgactacgttaaggatatctatcagtatctcaggcagctggaggttttgcagtccataaacccacatttcttagatggaagagatataaatggacgcatgcgtgccatcctagtggattggctggtacaagtccactccaagtttaggcttctgcaggagactctgtacatgtgcgttggcattatggatcgatttttacaggttcagccagtttcccggaagaagcttcaattagttgggattactgctctgctcttggcttccaagtatgaggagatgttttctccaaatattgaagactttgtttacatcacagacaatgcttataccagttcccaaatccgagaaatggaaactctaattttgaaagaattgaaatttgagttgggtcgacccttgccactacacttcttaaggcgagcatcaaaagccggggaggttgatgttgaacagcacactttagccaagtatttgatggagctgactctcatcgactatgatatggtgcattatcatccttctaaggtagcagcagctgcttcctgcttgtctcagaaggttctaggacaaggaaaatggaacttaaagcagcagtattacacaggatacacagagaatgaagtattggaagtcatgcagcacatggccaagaatgtggtgaaagtaaatgaaaacttaactaaattcatcgccatcaagaataagtatgcaagcagcaaactcctgaagatcagcatgatccctcagctgaactcaaaagccgtcaaagaccttgcctccccactgataggaaggtcctaggctgccgtggcccctggggatgtgtgcttcattgtgccctttttcttattggtttagaactcttgattttgtacatagtcctctggtctatctcatgaaacctcttctcagaccagttttctaaacatatattgaggaaaaataaagcgattggtttttcttaaggta

SEQ ID NO: 148854 - DNA, 1197 bp, Artificial Sequence
  derived and/or modified sequence
atggctctgctgagaaggccaacagtgtcatcagacctggagaatatcgatacgggagtcaactctaaggtgaaatctcatgtgaccattcgtaggactgtgctggaagaaataggaaaccgggtgacgactagagcagcacaggtcgccaagaaagcgcaaaacaccaaggttcccgttcagcctaccaaaaccacaaacgtcaacaagcaacttaagccgaccgcttctgtcaagcccgtacagatggagaagcttgcccccaaagggccttccccgaccccagaagatgtgtccatgaaggaggagaatctgtgccaagcgttttcggatgcgctgctgtgtaagattgaggacattgacaacgaggattgggagaatccccagctatgctccgactacgttaaagacatctaccagtatctgcgacagcttgaagtgttacagagtataaacccacactttttagatgggcgggacatcaatgggcgtatgcgggccattctggtggattggctagtccaggtccattctaaattccggttgcttcaggaaacactgtatatgtgcgttggtattatggaccgcttccttcaggtgcagccggtgtcccgcaagaagttacaattggtgggaattaccgccctcctccttgcaagcaaatacgaagagatgttttcccccaacatcgaggacttcgtctatatcacggataacgcctatacctctagccaaattagggaaatggaaacactcatcttgaaagaactgaagtttgagttaggccggcctttgccacttcattttttgcgtcgagcgagcaaggcaggcgaggttgacgttgagcagcacaccctggcaaagtatttaatggagctgacgttaattgattacgacatggttcattaccatccgtcaaaagtggccgcagctgcttcttgcttatcccagaaagtgttggggcaaggcaagtggaacttaaaacagcagtattacactggatacacagagaacgaagtcttggaggtaatgcaacacatggcgaagaatgttgtgaaggtgaacgagaacctgaccaagttcatcgccatcaagaacaagtatgctagtagtaagctgttgaagattagtatgataccacaattaaactcaaaggccgtgaaggaccttgcatcccccttgataggccgatcctag

SEQ ID NO: 148855 - DNA, 1197 bp, Artificial Sequence
  derived and/or modified sequence
atggccctgctgcggcggcccaccgtgtccagtgacctggagaacatcgacaccggggtgaacagcaaggtgaagagccacgtgaccatcagaagaacagtgctggaggagatcggcaacagagtgaccacccgggccgcccaggtggccaagaaggcccagaacaccaaggtgcctgtgcagcccaccaagaccaccaacgtgaacaagcagctgaagcccacagcctctgtgaagcctgtgcagatggagaagctggcccccaagggccccagccccaccccagaagatgtgtccatgaaggaggagaacctgtgccaggccttcagtgatgccctgctgtgcaagattgaggacatcgacaatgaagactgggagaacccccagctgtgcagcgactatgtgaaggacatctaccagtacctgcggcagctggaggtgctgcagagcatcaacccccacttcctggatggccgggacatcaatggccgcatgagggccatcctggtggactggctggtgcaggtgcacagcaagttccggctgctgcaggagaccctgtacatgtgtgtgggcatcatggaccgcttcctgcaggtgcagcctgtgtccaggaagaagctgcagctggtgggcatcacagccctgctgctggccagcaaatatgaggagatgttcagccccaacattgaagattttgtgtacatcacagacaatgcctacaccagcagccagatccgggagatggagaccctcatcctgaaggagctgaagtttgagctgggccggcccctgcccctgcacttcctgcggcgggccagcaaggccggggaggtggatgtggagcagcacaccctggccaagtacctgatggagctgaccctgattgattatgacatggtgcactaccaccccagcaaggtggccgctgctgccagctgcctgagccagaaggtgctgggccagggcaagtggaacctgaagcagcagtactacacaggctacacagaaaatgaggtgctggaggtgatgcagcacatggccaagaatgtggtgaaggtgaatgaaaacctgaccaagttcatcgccatcaagaacaagtatgccagcagcaagctgctgaagatctccatgatcccccagctgaacagcaaggctgtgaaggacctggccagccccctgattggccgctcctag

SEQ ID NO: 148856 - DNA, 1197 bp, Artificial Sequence
  derived and/or modified sequence
atggccctgctgcggcggcccaccgtgagcagcgacctggagaacattgacaccggcgttaattccaaggtcaagagtcacgtgaccatcaggcggaccgtgttggaggagattgggaacagggttacaactcgagcagctcaggtcgctaaaaaagcccagaatacaaaggtgcctgtccaaccaactaagaccacgaacgtgaacaagcaactgaaacctactgcatctgtaaaacccgtgcagatggagaagctagcgccgaaaggcccttctcccacccctgaagatgttagtatgaaagaggagaacctttgtcaagctttttctgatgctcttctgtgcaaaatcgaagatattgacaacgaggattgggaaaatccccagctttgcagcgattacgtgaaagacatctaccagtacctacgtcagctggaagtgctccagagtattaaccctcattttctggacggccgggacataaatggcaggatgcgagctattttagtggactggctggtgcaggtacattctaagttccggttgctacaggaaactctgtatatgtgcgtgggaattatggatcgctttctccaggtgcagccagtgagtcgcaagaagcttcaactggttgggattaccgcgcttctgctcgcgagcaaatacgaggagatgttcagtcctaatatcgaggattttgtctacattactgacaacgcctacacctccagccagatcagagagatggaaacactgatcctcaaagaactaaaatttgagctaggccgccccctgcctctccatttcctgcggagggcaagcaaagctggagaagtggacgtcgaacagcacacgctggccaaatatctcatggagctaacactcatcgattacgatatggtgcattaccatccatccaaggtggccgctgccgcctcatgtctgagccagaaggtgctcgggcagggaaagtggaacctgaaacagcagtactacacaggctacactgagaatgaggtcctggaggtgatgcaacacatggcaaagaacgttgtgaaggtcaatgagaatctgacaaagttcatcgctataaagaataaatatgcttcttcgaagctgcttaagatcagcatgatccctcagctgaactctaaagccgttaaggatctggcgtccccgttaatcggtcggtcatag

SEQ ID NO: 148857 - DNA, 1197 bp, Artificial Sequence
  derived and/or modified sequence
atggccctacttagacggcctaccgtgagcagtgatctcgagaatatcgacaccggtgtaaattcaaaggtgaaatcccatgtgactatccggcgaaccgtactggaagagatcggcaatagggtgactacccgggcagctcaggtggccaaaaaggcccaaaacaccaaggtgcccgtgcagcctactaagacaactaatgttaacaaacagctaaagccaaccgccagtgtgaaaccagtacagatggagaagctcgcgcctaagggcccttctcccacaccagaggatgtgtccatgaaagaggagaacctgtgccaagcctttagcgacgctctgttatgtaagatcgaagatatagataatgaagactgggagaatccacaactgtgctctgattacgtgaaggacatctaccagtatctgaggcaacttgaggttctccagagcatcaatccccacttccttgacgggagagatataaacggtcggatgcgggctatcctggttgattggttggtgcaagttcactccaaatttcgcctgttacaggagaccctgtacatgtgcgtgggtattatggaccggtttctgcaggttcagccagtgtcccggaaaaaactgcagttggtcggaataacagctttgcttctggccagtaagtacgaggaaatgttctccccaaacatcgaagactttgtctatatcactgacaatgcctacacatcttctcagatccgagagatggagaccctcatcctgaaggaattaaaatttgagctgggcaggcctctaccgctgcattttctacggcgagcttcgaaagcgggagaagtcgacgttgaacagcacacactggctaaatatttaatggaattgaccctgatcgattatgacatggtgcactaccacccctccaaagtcgccgctgccgcttcttgtctctcccaaaaagtgcttgggcagggtaagtggaatctgaaacaacaatactacactggctacactgagaatgaagttctggaagttatgcaacatatggcaaaaaacgtggtgaaagtcaacgaaaatctcaccaaatttatcgccattaagaataagtatgcttcatcgaaactcctgaagatatcgatgatcccccaactcaactctaaggcagtgaaggacttggccagtcctttgatcgggagaagctag

SEQ ID NO: 148858 - protein, 862 aa, Artificial Sequence
  derived and/or modified sequence
MAQPGPASQPDVSLQQRVAELEKINAEFLRAQQQLEQEFNQKRAKFKELYLAKEEDLKRQNAVLQAAQDDLGHLRTQLWEAQAEMENIKAIATVSENTKQEAIDEVKRQWREEVASLQAVMKETVRDYEHQFHLRLEQERTQWAQYRESAEREIADLRRRLSEGQEEENLENEMKKAQEDAEKLRSVVMPMEKEIAALKDKLTEAEDKIKELEASKVKELNHYLEAEKSCRTDLEMYVAVLNTQKSVLQEDAEKLRKELHEVCHLLEQERQQHNQLKHTWQKANDQFLESQRLLMRDMQRMEIVLTSEQLRQVEELKKKDQEDDEQQRLNKRKDHKKADVEEEIKIPVVCALTQEESSAQLSNEEEHLDSTRGSVHSLDAGLLLPSGDPFSKSDNDMFKDGLRRAQSTDSLGTSGSLQSKALGYNYKAKSAGNLDESDFGPLVGADSVSENFDTASLGSLQMPSGFMLTKDQERAIKAMTPEQEETASLLSSVTQGMESAYVSPSGYRLVSETEWNLLQKEVHNAGNKLGRRCDMCSNYEKQLQGIQIQEAETRDQVKKLQLMLRQANDQLEKTMKDKQELEDFIKQSSEDSSHQISALVLRAQASEILLEELQQGLSQAKRDVQEQMAVLMQSREQVSEELVRLQKDNDSLQGKHSLHVSLQQAEDFILPDTTEALRELVLKYREDIINVRTAADHVEEKLKAEILFLKEQIQAEQCLKENLEETLQLEIENCKEEIASISSLKAELERIKVEKGQLESTLREKSQQLESLQEIKISLEEQLKKETAAKATVEQLMFEEKNKAQRLQTELDVSEQVQRDFVKLSQTLQVQLERIRQADSLERIRAILNDTKLTDINQLPET

SEQ ID NO: 148859 - protein, 716 aa, Artificial Sequence
  derived and/or modified sequence
MAQPGPASQPDVSLQQRVAELEKINAEFLRAQQQLEQEFNQKRAKFKELYLAKEEDLKRQNAVLQAAQDDLGHLRTQLWEAQAEMENIKAIATVSENTKQEAIDEVKRQWREEVASLQAVMKETVRDYEHQFHLRLEQERTQWAQYRESAEREIADLRRRLSEGQEEENLENEMKKAQEDAEKLRSVVMPMEKEIAALKDKLTEAEDKIKELEASKVKELNHYLEAEKSCRTDLEMYVAVLNTQKSVLQEDAEKLRKELHQERQQHNQLKHTWQKANDQFLESQRLLMRDMQRMEIVLTSEQLRQVEELKKKDQEDDEQQRLNKRKDHKKADVEEEIKIPVVCALTQEESSAQLSNEEEHLDSTRGSVHSLDAGLLLPSGDPFSKSDNDMFKDGLRRAQSTDSLGTSGSLQSKALGYNYKAKSAGNLDESDFGPLVGADSVSENFDTASLGSLQMPSGFMLTKDQERAIKAMTPEQEETASLLSSVTQGMESAYVSPSGYRLVSETEWNLLQKEVHNAGNKLGRRCDMCSNYEKQLQGIQIQEAETRDQVKKLQLMLRQANDQLEKTMKDKQELEDFIKQSSEDSSHQISALVLRAQASEILLEELQQGLSQAKRDVQEQMAVLMQSREQVSEELVRLQKDNDSLQGKHSLHVSLQQAEDFILPDTTEALRELVLKYREDIINVRTAADHVEEKLKAEILFLKEQIQAEQCLKKKK

SEQ ID NO: 148860 - DNA, 2589 bp, Artificial Sequence
  derived and/or modified sequence
atggctcagcctggacccgcctcccagcctgacgtgtccttgcagcagagagtcgcggagctggagaagatcaatgctgaattcctacgcgcacaacagcaattagaacaggagttcaatcagaagcgtgccaaatttaaagagctttacctggcaaaagaagaagacctcaaacgacagaacgccgttctgcaggcggcccaagatgaccttggtcacctgcggacccaactgtgggaagcccaggccgaaatggagaacattaaggcaatagccacagtgagtgagaacaccaagcaagaagctattgacgaagtgaagcgccagtggcgcgaggaggtggcctctctgcaggccgtcatgaaagaaacagtaagggattatgagcaccaattccaccttcgcctggaacaggagaggacccaatgggcccagtaccgagaatcagccgagagggagattgccgacttaaggaggcggctctcagaagggcaggaagaagagaatcttgagaacgaaatgaagaaggcccaggaggatgccgagaaactgcgttctgtggttatgcctatggaaaaagagattgcggccctaaaagacaaactgacagaggcggaagataagatcaaggaattggaggcaagcaaggtgaaggagctgaatcattaccttgaagctgaaaaatcttgccggacagatcttgagatgtacgtggccgtcttaaatactcagaagtcggttctacaggaagatgcggagaaactgcggaaggagctgcacgaggtctgtcatctgttggaacaagagcgccagcagcacaatcagctcaagcacacatggcaaaaggctaacgaccagttcctggagtctcagcgactgctaatgagagatatgcagaggatggaaattgtcttgacctcagagcagctaagacaggtggaagagctcaagaaaaaggatcaagaggacgacgagcagcagcgattaaataaaagaaaggatcacaagaaagcagatgtcgaggaggagattaagattcccgtcgtgtgcgctctcactcaggaagaatccagcgcacagctctcaaacgaggaggaacatctggattccacccgcgggagcgtgcactctctcgacgcggggcttcttttgcctagtggagaccccttctcaaagtctgacaacgatatgtttaaagatggcctgaggcgagcgcagtcaaccgattctcttggtaccagtggttctctccagagcaaggctctcggctacaactataaggcaaaatccgcgggcaatctggacgaatccgatttcgggcccctggtgggcgctgacagtgtgtccgaaaattttgacacagccagcttgggttcactgcagatgccttcaggcttcatgctcactaaggatcaggagagggcaattaaagcaatgactcctgagcaggaggaaacagcgtccctgttgagttcagtgactcagggaatggagagtgcatatgtcagtccttcaggctacagacttgtgtccgagactgagtggaacttacttcagaaagaggttcataacgccgggaataagctcggtcgtaggtgcgacatgtgtagtaactatgagaagcagctacaaggaattcagatccaggaggcggagacacgggaccaggtgaagaagctgcagctgatgctgcgccaggccaatgatcagcttgaaaagacgatgaaggacaaacaggaactggaggactttatcaagcagagtagcgaagattctagtcatcagatctcagctcttgttctaagggcacaagcaagtgaaattctgctggaagaactgcagcaaggtctctcccaggcgaagagggacgtgcaggaacagatggccgtgcttatgcagtccagagagcaagtgtctgaggagttggtgcggctgcaaaaggataacgactctcttcaaggaaaacattctttgcacgtgtccctccagcaggctgaggacttcatcctccctgacactacggaggctctacgggagctcgtgcttaaatatagggaagacattataaacgtcagaacagccgccgaccacgtagaggagaaactgaaagccgaaatcttgttcctaaaggaacagatccaggccgaacagtgcctaaaggaaaacctggaggagacactgcagctcgaaattgagaattgcaaggaggaaatcgcctccataagcagtctgaaagctgagttagagagaatcaaggtggaaaaaggtcagcttgagagtacactaagagagaaatctcaacagctggaaagcttgcaggaaatcaaaatcagcctagaggaacagctgaagaaagaaacggcggcaaaggcgacagttgaacaactgatgtttgaagagaaaaataaggcacaaaggttgcagaccgaactcgatgtgtcagagcaggtccaaagagattttgtcaagctcagtcaaaccttgcaagttcagttggaacgcatccggcaggctgattccctggagcgaatcagagctattcttaacgacacaaaactcaccgacataaatcagttgcccgagacgtag

SEQ ID NO: 148861 - DNA, 2589 bp, Artificial Sequence
  derived and/or modified sequence
atggctcagcctggccctgcaagccaaccagacgtctccctccagcaaagagtggcagaactagagaaaatcaatgctgagttcttgcgggcgcagcaacaactagagcaggagtttaatcagaaaagggctaaattcaaagagctgtatctggcaaaggaggaggatctcaaacgacagaacgccgtgcttcaggccgcccaggacgatttagggcatcttcgtactcagctttgggaggcacaagccgagatggagaatattaaagcgatcgccacggtctcagagaacacgaagcaggaagccattgacgaggtgaagcgccaatggcgagaagaagtagccagtctgcaggctgtgatgaaggagacagtacgggactacgagcatcagttccacttgcggcttgaacaggagagaacgcagtgggcacagtacagagaatctgccgagagggaaatcgcagatctgagaagacggctcagcgagggccaggaggaagagaacttagaaaatgaaatgaagaaggcccaggaggatgccgagaagttaagaagtgtcgttatgccgatggagaaggagatcgctgccctgaaggataagctcacagaggcggaagacaaaatcaaggagctagaagctagcaaagtcaaagagctgaaccattacctggaggctgaaaaatcttgccgcaccgacttggagatgtatgtcgcagtgcttaatacccaaaaaagcgtgcttcaggaagacgccgagaagcttagaaaagaattacacgaggtttgtcacttgctggagcaagaaaggcaacaacacaatcagctcaaacatacatggcagaaggccaacgaccagtttctcgagtcccagaggttgctcatgagagacatgcaacggatggagatcgtcctgacttctgaacagctgcgccaagtggaggaattgaaaaaaaaagatcaggaggacgatgaacagcagcgcctgaataagagaaaggatcataagaaagcagacgtcgaggaggagataaagatccctgttgtctgcgctcttacgcaggaagaatcttcagctcaactaagtaacgaggaggagcatctggattcaactagaggatctgtgcactctcttgacgccggcttgctcctgcccagcggagatccgttttctaagagtgacaatgatatgttcaaggacggcctgagacgagcgcagagtacagatagtcttggcacgagtggcagcttgcagagcaaggcactcggctataactacaaagcgaagtcagcaggtaacctcgatgaatccgatttcggacccctggttggcgcagactccgtgtccgagaactttgatacggcctctttgggcagcctccaaatgccttcaggttttatgctgactaaggaccaggaacgggccattaaagccatgactcctgagcaggaagagaccgcaagccttttgtcctctgtaacccagggaatggaaagtgcatacgtcagcccgtcaggatataggcttgtctccgagaccgaatggaaccttctgcagaaggaagtgcacaatgcaggtaacaagttgggacgacgctgtgatatgtgctccaactacgaaaagcagcttcaagggatccagattcaggaagctgaaacgagagaccaggtgaagaaacttcagttgatgctccgccaagccaacgaccagttggaaaagacaatgaaggataagcaggagttggaggattttattaagcagagcagcgaagattcctcccaccagatttccgctcttgttcttcgcgcccaagcttccgaaattctgctagaagagctccagcaagggctgagtcaggcgaagagagatgtgcaggaacagatggctgtgctgatgcaaagcagggagcaagtttccgaggaactggtccggcttcagaaggataacgattcactacaaggtaagcacagcctgcatgtcagtctccagcaggccgaagattttatcttgcctgacaccaccgaggctctgcgcgaactcgtgttgaagtatcgtgaggacatcattaatgtccgaactgccgccgatcacgtcgaagagaagctcaaagctgagatactgtttctgaaggaacagatccaggcggagcagtgtctcaaagaaaacctggaggaaacacttcaactggaaattgaaaactgtaaagaagagatcgcctccatttctagcttaaaagccgaactcgagaggataaaagttgagaaagggcagctggagagcaccttaagggagaagtctcagcaattggaatctctgcaggagattaagatttcgctagaagagcagcttaaaaaggagacagccgcaaaagccaccgtggagcagctgatgtttgaggaaaaaaacaaagcgcaacggctacagactgaactcgacgtatccgagcaagtgcagagggacttcgtgaaactttcacagactcttcaagtgcagctggaacgtattcggcaggccgactcactcgaacggattcgcgcaatcctcaatgacacaaagttgaccgatatcaaccagctgcccgaaacatag

SEQ ID NO: 148862 - DNA, 2589 bp, Artificial Sequence
  derived and/or modified sequence
atggcccagcccggccctgccagccagccagatgtgtccctgcagcagagggtggccgagctggagaagatcaatgctgagttcctgcgggcccagcagcagctggagcaggagttcaaccagaagagggccaagttcaaggagctgtacctggccaaggaggaggacctgaagaggcagaatgctgtgctgcaggccgcccaggatgacctgggccacctgcggacccagctgtgggaggcccaggccgagatggagaacatcaaggccatcgccaccgtgtctgagaacaccaagcaggaggccattgatgaggtgaagaggcagtggagggaggaggtggccagcctgcaggccgtgatgaaggagaccgtgcgggactatgagcaccagttccacctgcggctggagcaggagaggacccagtgggcccagtaccgggagagcgctgagcgggagattgctgacctgcggcggcggctgtctgagggccaggaggaggagaacctggagaatgagatgaagaaggcccaggaggatgctgagaagctgcggtctgtggtgatgcccatggagaaggagattgctgccctgaaggacaagctgacagaagctgaggacaagatcaaggagctggaggccagcaaggtgaaggagctgaaccactacctggaggccgagaagagctgcaggacagacctggagatgtatgtggccgtgctgaacacccagaagtctgtgctgcaggaggatgctgagaagctgaggaaggagctgcacgaggtgtgccacctgctggagcaggagcggcagcagcacaaccagctgaagcacacctggcagaaggccaatgaccagttcctggagagccagaggctgctgatgagggacatgcagaggatggagatcgtgctgaccagcgagcagctgcggcaggtggaggagctgaagaagaaggaccaggaggatgatgagcagcagaggctgaacaagaggaaggaccacaagaaggcagatgtggaggaggagatcaagatccctgtggtgtgtgccctgacccaggaggagagcagcgcccagctgagcaatgaggaggagcacctggacagcacccggggctctgtgcacagcctggatgctggcctgctgctgcccagcggggaccccttcagcaagagtgacaatgacatgttcaaggatggcctgcggcgggcccagagcacagacagcctgggcaccagcggcagcctgcagagcaaggccctgggctacaactacaaggccaagtctgctggcaacctggatgaaagtgactttggccccctggtgggcgctgacagcgtgtctgagaactttgacacagccagcctgggcagcctgcagatgcccagcggcttcatgctgaccaaggaccaggagcgggccatcaaggccatgaccccagagcaggaggagacagccagcctgctgagctctgtgacccagggcatggagagcgcctacgtgagccccagcggctaccgcctggtgtctgaaacagagtggaacctgctgcagaaggaggtgcacaatgccggcaacaagctgggcagaagatgtgacatgtgcagcaactatgagaagcagctgcagggcatccagatccaggaggccgagacccgggaccaggtgaagaagctgcagctgatgctgcggcaggccaatgaccagctggagaagaccatgaaggacaagcaggagctggaggacttcatcaagcagagcagcgaggacagcagccaccagatcagcgccctggtgctgcgggcccaggccagcgagatcctgctggaggagctgcagcagggcctgagccaggccaagagagatgtgcaggagcagatggctgtgctgatgcagagccgggagcaggtgtctgaggagctggtgcggctgcagaaggacaatgacagcctgcagggcaagcacagcctgcacgtgtccctgcagcaggccgaggacttcatcctgcctgacaccacagaggccctgcgggagctggtgctgaagtaccgggaggacatcatcaacgtgaggacagctgctgaccacgtggaggagaagctgaaggccgagatcctcttcctgaaggagcagatccaggccgagcagtgcctgaaggagaacctggaggagaccctgcagctggagattgagaactgcaaggaggagatcgccagcatcagcagcctgaaggccgagctggagcgcatcaaggtggagaagggccagctggagagcaccctgcgggagaagagccagcagctggagagcctgcaggagatcaagatcagcctggaggagcagctgaagaaggagacagctgccaaggccaccgtggagcagctgatgtttgaggagaagaacaaggcccagaggctgcagacagagctggatgtgtctgagcaggtgcagagggactttgtgaagctgagccagaccctgcaggtgcagctggagcgcatccggcaggccgacagcctggagcgcatccgggccatcctgaatgacaccaagctgacagacatcaaccagctgcctgagacctag

SEQ ID NO: 148863 - DNA, 2589 bp, Artificial Sequence
  derived and/or modified sequence
atggcccagcccggccccgccagccagcccgacgtgagcctgcagcagcgtgtcgcagaactggagaagattaatgcggagttcctgagagctcagcaacagttggagcaggaatttaaccagaaaagggctaagtttaaagaactttatctcgctaaggaggaagacctcaaacggcagaacgctgttctccaggccgcccaggatgatctcggccacttgagaactcagctctgggaagcccaggccgagatggaaaatatcaaagccatcgccactgtctctgaaaatactaagcaggaggcaatagacgaagtcaaacggcagtggagggaggaggtcgcctcgctccaagccgtgatgaaggagacagtcagagattacgagcaccagtttcatctaaggttagaacaagagcggacacagtgggcacagtacagagaatctgctgaaagagaaatcgcagacctacgacggcgactatccgagggccaggaggaggagaacctggaaaacgaaatgaaaaaggcacaggaggatgctgaaaagctacgaagcgtcgtaatgccaatggagaaggagattgctgctctcaaggataaactgacggaagcggaggataaaatcaaggagctggaggcaagtaaggtgaaagagctgaatcactaccttgaggccgagaagtcttgccgcaccgaccttgaaatgtatgttgcggtgctgaacacccaaaagtctgttctacaggaagatgccgagaaacttcggaaggaactccacgaggtctgtcacttgctcgagcaggaaagacaacagcacaaccagcttaagcacacctggcagaaggccaacgatcagttcctagagagtcaaaggcttttgatgcgagacatgcagcggatggagatcgtgctgacgagcgagcaactcaggcaagtggaggaactaaagaagaaagatcaggaggacgacgaacagcagcgactgaataaacggaaggaccataaaaaggccgatgttgaggaagagatcaaaatcccggtggtatgcgcactgacccaggaagaatcctctgcacaactgtcaaatgaagaagagcacttggacagcacccggggctcagtgcacagcctcgatgcaggcctccttttgccatccggagatcctttttctaaaagtgataacgatatgttcaaagacggactgcggagggcacagagcactgacagcctggggaccagcgggtccctgcagagtaaggctttaggatacaactacaaagcaaaatcggctggaaatctcgatgagtcagacttcggcccactggtcggagcagattcagtctcagagaacttcgacacggcgtcgctggggtccttgcagatgccctccggtttcatgctcaccaaagatcaggaaagagctatcaaggctatgacaccagagcaggaggagactgcaagtctactatcctcagtgacccagggaatggaatcagcgtatgtctcacctagtgggtataggctggttagcgaaaccgagtggaatctgctccagaaggaggtgcacaatgcggggaacaagctgggccgcagatgcgatatgtgttctaactatgagaagcaactccagggcatccaaatccaagaggcagaaacccgcgaccaggtgaaaaaactgcagctcatgctgcgccaagccaacgaccaactggagaagacgatgaaggataagcaggagctcgaggacttcatcaaacagagcagtgaggattcctcacaccagatttctgctttagtgctgcgggcccaggcctctgagatcctgttggaggagttacagcaaggactgtcgcaagccaaacgcgacgtccaggagcaaatggcggttcttatgcagagcagagagcaggtctcagaggagctggttcggctccagaaggacaatgactcacttcaggggaagcattccttacacgtgtccctccagcaggcagaggacttcattctgcccgataccaccgaggcccttcgggaactggtgcttaagtaccgagaggacattataaacgtgagaaccgctgctgatcacgtggaggagaagctgaaagccgaaattctcttcctgaaagaacagattcaagccgagcaatgtctcaaggaaaacttagaggagactctacagcttgaaatcgaaaattgcaaggaagagattgcatctatctcgagcctcaaagccgagttagagaggattaaagtggagaagggccaactcgagagtaccctgcgggaaaagagccagcagttagaatctctgcaggaaattaaaatctccctggaggagcagcttaagaaggaaactgccgcaaaggcaacagtggaacagctgatgttcgaggaaaaaaacaaggcgcaaaggctacagacagagttagacgtttctgagcaagtccagagagacttcgtgaagctttctcagacgctgcaggttcaattggaacgaatacggcaggctgatagcctggagcgcatcagggccattctgaatgacacaaaactgactgacattaaccaactcccggaaacctag

SEQ ID NO: 148864 - DNA, 2589 bp, Artificial Sequence
  derived and/or modified sequence
atggcccagcccggccccgccagccagcccgacgtgagcctgcagcaaagggtggcggagcttgagaagatcaacgcagagtttctaagagctcagcagcagctcgagcaagagttcaatcagaagagggccaagttcaaggaactttacctcgcgaaagaggaggatctgaaaagacaaaacgctgttttgcaggccgcccaggatgacctgggacatttaagaacccaactttgggaggctcaggctgagatggagaacattaaagctattgctactgtgtccgagaacacaaagcaggaggctatcgatgaggtgaagaggcagtggagggaggaagtcgctagcttgcaggccgttatgaaggagaccgtgcgcgactatgaacatcagttccatctcagactggagcaggagagaacacagtgggcccagtatcgggaatccgcagaacgtgagattgctgacctacgccgtagactgagcgaaggccaggaagaggagaatcttgagaacgagatgaagaaggctcaggaagatgccgagaagctcagaagtgtggtaatgcccatggagaaggagatcgctgcactgaaggacaaactgaccgaagccgaagacaaaatcaaggagctggaagcctccaaagtgaaggagcttaatcactacctggaggctgagaagagctgcagaactgaccttgagatgtacgtggctgtcctgaatacacagaagagcgtcttgcaggaggacgcggaaaaattacgcaaggaacttcacgaagtttgtcacctgctggagcaggagcgccagcaacacaatcagttgaaacacacctggcagaaagccaatgatcagtttctggagtctcagcgactgttgatgcgggatatgcagagaatggaaatagtcctgacttctgagcagttacggcaggtggaggagctgaagaagaaggatcaggaagacgatgagcagcagcgccttaacaagcgcaaggaccataagaaggctgatgtggaggaggaaatcaaaattccagttgtgtgtgccctcacacaggaagaatcatcagctcagctctctaatgaggaagaacatttagactctacacgggggtcggtccactcgctggacgcagggttgctccttcctagtggcgaccctttcagcaagtccgacaatgacatgtttaaggatggactacgccgagctcagagtaccgacagcttagggactagtggctctctgcagtctaaggcactgggctacaattacaaagccaaatctgccgggaacttggacgagagcgacttcggacccttggtcggagcggactctgtcagtgagaattttgacacagccagccttggcagcttgcagatgccaagtgggtttatgttaacaaaggatcaggaacgtgcaatcaaggctatgactcctgagcaggaggagacagcatctcttctgtcatcagtgactcagggcatggaaagcgcctacgtctcaccatccggttaccggttggtctcagagacggagtggaacctgttacaaaaggaggtgcacaacgcgggaaataagctgggaagacgctgcgacatgtgtagcaattatgaaaagcagctccagggaatccagattcaggaagccgaaactcgcgaccaggtcaaaaagttacagctgatgctgaggcaggcaaacgaccagctagaaaaaactatgaaggataagcaggaactcgaagactttattaaacaatcttccgaggattcaagccaccaaattagcgccttagtcctgcgcgctcaggccagtgaaatactgctagaggaactacagcagggattgtctcaggctaaacgcgatgttcaagaacagatggcagtgctcatgcagtcccgtgagcaggtcagtgaagaactggtaagactgcagaaagataatgactctttgcaggggaaacacagcttacatgtcagcttgcagcaagccgaggacttcatcctgcccgatacaaccgaggctttgcgcgagctcgtcctaaaataccgtgaagacattattaacgtgaggactgcagcagatcatgtagaagaaaaactgaaggctgagattttattcctgaaagagcaaatccaggccgagcagtgtctgaaagaaaatcttgaagaaacattgcagcttgagatcgagaattgcaaggaggagatcgcctcaatctcttcattgaaggctgaacttgagcgtatcaaggtcgagaagggacagctggagagcacgttgagggaaaagtcacaacagctggagagcctccaggaaatcaagataagtttggaggagcaattgaagaaagagactgcagcaaaagccacagttgagcagctgatgtttgaagagaagaacaaagcgcagagactgcagacagagctggacgtgagcgagcaggtgcaaagagatttcgtcaagctttctcagaccttgcaggttcaactcgagcgcatcagacaagctgattccctcgagagaatacgggctatactgaacgacaccaaacttaccgatatcaaccagttgccagagacatag

SEQ ID NO: 148865 - DNA, 2589 bp, Artificial Sequence
  derived and/or modified sequence
atggcgcagccgggtccagcatctcagcctgacgtttcactgcaacagagagtggcagagctggaaaagataaacgcagaatttcttcgcgctcaacagcagcttgaacaagaatttaatcagaagcgagcaaagtttaaagagttatatttggcgaaggaagaggatctgaagcggcagaatgctgtcctgcaagcagctcaggatgatctgggccatctgcgaacccagctctgggaagcacaggctgaaatggaaaacatcaaagccatcgctaccgtgtctgagaacactaagcaggaggccatcgatgaggtaaagcgacagtggcgcgaggaagtcgcctccttgcaggctgtcatgaaggaaacagtccgagactacgagcaccagtttcacctccgcttggagcaagagcggacacagtgggctcagtaccgcgaatcagcagaacgagagatcgcagacctcaggaggcgtctgagcgaaggccaggaagaggagaatctggaaaacgagatgaagaaagcacaagaggacgctgagaaacttcgctctgtagtaatgcccatggagaaggaaatcgccgcactgaaggataagttgaccgaggccgaagataaaattaaggaattggaggcctcaaaggtaaaggagcttaatcattatctggaagccgaaaaaagctgtcgcaccgacttggagatgtacgtggccgtcttgaacacacagaaatcagtgctgcaggaagatgccgaaaagctgcggaaggaactgcatgaggtgtgccaccttctggagcaagaaagacagcagcacaaccagttgaagcacacatggcaaaaggccaacgatcagtttctggagagccaacgactgcttatgcgcgatatgcagagaatggaaatagtgctgacgagtgaacaactcagacaggttgaggagctgaagaagaaagaccaggaagatgacgagcagcagcggcttaataaaagaaaggatcacaaaaaagctgatgtggaggaggaaatcaagatccccgtggtttgtgcattgacccaggaggagtcgagtgctcaactgagcaatgaggaagaacatctggattctaccagagggagtgtgcattcacttgatgcagggctactgctgccgagtggcgatccctttagcaaaagcgataatgatatgttcaaagacggcctgcggagggctcagtccacagacagcctggggacctccggttctctgcagtccaaggcgcttggttacaattataaggcgaagtccgctggtaatctggacgagtcagacttcggtcctcttgtcggagcagacagcgtctccgagaatttcgacacagctagcctcggttccctgcagatgccatccggcttcatgctgaccaaggatcaggagcgggctattaaggccatgacacccgaacaggaagagactgcctctttgctgagctctgttacacaggggatggaaagcgcctatgtctcccctagcggttatcggttagtcagcgaaacagaatggaacctgctgcagaaggaggtgcacaacgccggaaacaagcttggcagacgctgcgacatgtgctctaattacgagaagcagcttcaaggcattcagatacaagaagcagagactagagatcaggtgaagaaattgcagttaatgctgcggcaagcaaacgatcagcttgaaaaaaccatgaaagacaagcaggaactggaagacttcattaaacaatcatcagaggattcctctcatcaaatctccgcccttgtcctgagggcccaggcatcagaaatcctgctcgaagaattacagcaaggtctttctcaggccaagagggacgttcaggaacagatggccgttctaatgcaatcgcgggagcaggtgtccgaggagctggtcaggttgcagaaggataatgattccctgcagggtaagcatagtctgcacgtctctctgcaacaagccgaagattttattctccctgacacaaccgaggccctgagagagttagtcctgaagtacagagaggatattatcaacgtcaggaccgccgctgatcacgtcgaagagaagttaaaggcggagatcctgttcctgaaagagcagattcaggctgaacaatgcttgaaagaaaatctcgaggaaactctgcagctggagatagagaattgtaaagaggagatagctagtatcagctcactgaaagcagaattggaacgcattaaggtggaaaaaggacagctagaatcaacattgcgggagaaaagccaacaacttgagtccctgcaggagatcaagatcagcctcgaagagcaactcaagaaggaaactgctgcaaaggcaacggttgaacaactcatgttcgaagagaaaaacaaagcccagcggcttcaaaccgaactggacgtgtctgagcaggtgcagagagacttcgttaaactctcgcagacccttcaagtccagctggagaggattcggcaggctgactcactcgaaagaatcagagccatcctgaacgacaccaaattgacggacatcaatcagctaccagagacctag

SEQ ID NO: 148866 - DNA, 2589 bp, Artificial Sequence
  derived and/or modified sequence
atggcccagccaggtcccgcaagccaaccagacgtatctttacagcagagggtggccgagctcgagaaaatcaacgctgagtttttgcgagctcagcagcaactagaacaggagtttaaccagaaaagggcaaaatttaaagaattgtatctcgcaaaagaggaagatctcaaaagacagaatgcagtcctacaggctgcccaggatgacctcggccacctgcgtactcagttatgggaggcacaagccgagatggagaacattaaggctattgccacagtctccgagaatacaaagcaagaggccatcgatgaagttaagaggcaatggagggaggaggtcgcatcactccaagcagtgatgaaggagaccgtgagagattacgaacaccagtttcacctgagattggaacaggaacgcacccagtgggcccagtaccgcgagagtgccgagagagagatcgctgatctgagaaggaggctgtccgaaggtcaggaggaagaaaacctggagaatgagatgaaaaaagcacaggaggacgctgagaagctgagatcagtcgtgatgcctatggagaaagagattgctgctctgaaggacaagcttactgaagctgaagacaagattaaggaactagaggcgtctaaggtgaaggagctcaaccattatctggaggccgagaaatcttgccgcacagacctcgaaatgtacgtggcagtgctcaatacacagaaaagcgtcctgcaggaagatgccgagaaactgagaaaagagttgcacgaagtctgccatctcctcgaacaggagagacaacagcacaaccagcttaaacacacctggcagaaggctaacgatcagttcctggagtcccagaggctcctcatgcgggacatgcaaaggatggaaatcgtcctgacctctgagcaactccgacaggtggaagagcttaagaaaaaagatcaggaagatgatgaacagcagcgactgaacaagcgaaaagatcacaaaaaggcggatgtggaggaggagattaagatcccagttgtgtgcgctctgacccaggaggagtccagtgcacagcttagtaatgaagaagaacacttggatagtactcgaggttctgtgcactctctggatgcaggactcctcctgccttcaggggatccattttcgaagagcgataacgatatgtttaaggacggactgcggagagcccagagcacggactctctcggcaccagtggttcccttcagagcaaggcattagggtacaattacaaggccaaatccgcgggaaatctagatgaatccgactttggccctctcgtcggcgctgacagtgttagtgaaaatttcgatacagccagcctcggctcattacaaatgccctcaggtttcatgttgactaaggatcaggagagggccattaaagccatgacgcccgagcaagaggagaccgcctcactgctgtccagcgtgacccagggcatggagtcagcttatgtttcccccagtggctaccgtctggtcagtgaaacggaatggaatctgctgcagaaagaggtgcacaacgctgggaataagctgggacgcaggtgcgatatgtgctctaattatgaaaaacagctgcagggaatccagattcaggaggctgaaactcgggatcaggtaaaaaagctgcaattgatgctgagacaggctaatgaccaacttgagaaaacaatgaaagacaagcaggagctggaagactttatcaagcagtctagcgaggactccagccaccagatttctgcactcgtattgcgggctcaggcctccgagatactgctggaagagctccagcaaggtctgtcacaggcaaaaagagatgtccaggaacagatggcggttttaatgcagagccgcgaacaggtgtctgaggagcttgtgaggttgcaaaaggacaacgactcactgcagggtaagcatagtctgcacgtctcactgcagcaggcggaagacttcattctgcctgacacgaccgaagccctccgtgaactcgtactcaagtaccgcgaggacattattaacgtgaggacagctgctgaccatgtagaggagaagctcaaggcagaaattctcttcctgaaggagcaaatccaggccgagcagtgcctcaaagaaaacctggaggagactctccagctggaaattgaaaattgtaaagaagaaattgcttctatttcctcacttaaagccgagcttgagcggattaaggttgaaaaaggacaacttgagagtacattgagggagaagtcacagcagctcgagagcctgcaggaaataaagattagcttggaagaacagctgaaaaaggaaacagccgcaaaggcaaccgtcgaacagctaatgttcgaggaaaaaaacaaggctcagcggcttcaaactgaactcgacgtttctgagcaggtgcagagagattttgtgaagctgtctcagacattacaagttcagctggaaagaattcggcaggccgattctctagagcgcatacgggctatcctcaacgataccaaactcactgatatcaaccaactgcctgaaacttag

SEQ ID NO: 148867 - DNA, 5387 bp, Artificial Sequence
  derived and/or modified sequence
gcgcactgcttatttcccgctgtcaggatgaggaggcggaggtcggcggtcgggtccgtctctgcccgcggctgtggcggcgccggcggatccagccttagcggtttctctctgggcggcggcggcggcggctcggttgacgcctcctccgccagctgagcccgcgggagcccaggacgccgcttccccgcccatccccgctccccgaggccggccgcctggtcatggcgcagccgggcccggcttcccagcctgacgtttctcttcagcaacgggtagcagaattggaaaaaattaatgcagaatttttacgtgcacaacagcagcttgaacaagaatttaatcaaaagagagcaaaatttaaggagttatatttggctaaagaggaggatctgaagaggcaaaatgcagtattacaagctgcacaagatgatttgggacaccttcgaacccagctgtgggaagctcaagcagagatggagaatattaaggcgattgccacagtctctgagaacaccaagcaagaagctatagatgaagtgaaaagacagtggagagaagaagttgcttcacttcaggctgttatgaaagaaacagttcgtgactatgagcaccagttccaccttaggctggagcaggagcgaacacagtgggcacagtatagagaatccgcagagagggaaatagctgatttaagaagaaggctgtctgaaggtcaagaggaggaaaatttagaaaatgaaatgaaaaaggcccaagaggatgctgagaaacttcggtccgttgtgatgccaatggaaaaggaaattgcagctttgaaggataaactgacagaggctgaagacaaaattaaagagctggaggcctcaaaggttaaagaactgaatcattatctggaagctgagaaatcttgtaggactgatctagagatgtatgtagctgttttgaatactcagaaatctgttctacaggaagatgctgagaaactgcggaaagaattgcatgaagtttgccatctcttggagcaagagcgacaacaacacaaccagttaaaacatacgtggcagaaggccaatgaccagtttctggaatctcagcgtttactgatgagagacatgcagcgaatggagattgtgctaacttcagaacagctccgacaagttgaagaactgaagaagaaagatcaggaggatgatgaacaacaaagactcaataagagaaaggatcacaaaaaagcagatgttgaggaagaaataaaaataccagtagtgtgtgctttaactcaagaagaatcttcagcccagttatcaaatgaagaggagcatttagacagcacccgtggctcagttcattccttagatgcaggcttgctgttgccatctggagatcctttcagtaaatcggacaatgacatgtttaaagatggactcaggagagcacagtctacagacagcttgggaacctcgggctcattgcaatccaaagctttaggctataactacaaagcaaaatctgctggaaacctggacgagtcagattttggaccactggtaggagcagattcagtgtctgagaactttgatactgcatcccttgggtcactccagatgccaagtgggtttatgttaaccaaagatcaggaaagagcaatcaaggcgatgacaccagaacaagaagagacagcgtccctcctctccagcgttacccagggcatggagagtgcctatgtgtcccctagtggttatcgtttagttagtgaaacagaatggaatctcttgcagaaagaggtacataatgctggaaataaacttggtagacgttgtgatatgtgttccaattacgaaaaacagttacaaggaattcagattcaggaggctgaaacgagagaccaggtgaaaaaactacagctgatgctaaggcaagctaatgaccagttagagaagacaatgaaagataagcaggagctggaagacttcataaagcaaagcagcgaagattcgagtcaccagatctctgcactcgtcctaagagcccaggcctccgagatcttacttgaagagttacagcaggggctttcccaggcaaagagggatgttcaggaacagatggcggtgctgatgcagtcacgggaacaggtttcagaagagctggtgaggttacagaaagataatgacagtctccagggaaagcacagcctgcatgtgtcattacagcaagcagaagacttcatcctcccagacactacagaggcactgcgggagttggtattaaaataccgtgaggacatcattaatgtgcggacagcagcagaccacgtagaagaaaagctgaaggctgagatacttttcctaaaagagcagatccaagcagaacagtgtttaaaagaaaatcttgaagaaactctgcaactagaaatagaaaactgcaaggaggaaatagcttctatttctagcctaaaagctgaattagaaagaataaaagtggaaaaaggacagttggagtccacattaagagagaagtctcaacagcttgagagtcttcaggaaataaagatcagtttggaagagcagttaaagaaagagactgctgctaaggctaccgttgaacaactaatgtttgaagagaagaataaagctcagagattacagacagaattagatgtcagtgagcaagtccagagggattttgtaaagctttcacagacccttcaggtgcagttagagcggatccggcaagctgactccttggagagaatccgggcaattctgaatgatactaaactgacagacattaaccagcttcctgagacatgacaccctcatggcaggattctagcctgcactttgggtttttaactcatctttagagcaacagtaattattatttaactcttaactgaagaaagagaagtcacaacaaaaggaagactggagaaatgcttacttctagagggagaagactgtgcggcacaggaaacagcaaacagtggggtgatctgcagcccagagaccttcaaatgcgaacactataaactccaggcttgattccaacaggcgtgggatcagatttggtgatggaaaaagcgctgtttccttgcctgctttctccaagacagattttcggaacacatttccctaccctaaagcgacatcccagtagtgtttggaattttctgttcatatagtgtttggaattttctgttcatagagctcatcagtaacagtattcagttagcagacagaagtgtagtatgctgtatgaatattttatattaaaatatgaaggtttgagagcaggccattggctactgactgtattttgttttccttttaccattttatcttatcttgctttggaggaccttaaatgctactgaaacttacctgagaaccataggactgtggcaaacaaaaccaattcatgaagtgaattaatgatgaggatctgaaaacttggctggggctatatatactggaagttgaaggttaaaggaaaagcacaagaaactttggaagcactttttctgcatacttagatgatcttcatgggcccacagggtaccaggataaagccgaactggtaccatctactcttttgaagtgttttagtctagttattggatcagtgaaaaacattagtatacgtttttaaataggctaatttttcaacttggatcattaggcttacgtactacttgtttcaaatgtgtcaaatacaaaaatggtaactaggttgacagatactttgtatttttcttttgaattcagacctggaatgtaagtaagtgacaatgcttatggaaagccagttagttagaattggaaatctgtcttgtcattttacaagcattagattcctttcctgtgtgaagaaagcctcagtgaaacaggtctttgccataactttatgaagtgctacagaaagcacaaagaattgattcatgttcatcaatacctgctgagagtactgtcccaggaatatccagtggatggattcatcatccaggaggttcaaaagtaagatggttttcaaatcatttttgagactggttgcataacagcagggtacctgaaagagccttctgggagttagtgaactaggtagattgttttgttcacataacgccaccatcaacttaaagtgaattgtctttgttataaatgaggtcactatggacttaccctaaagatcttctgtacttctctcttccataggacaaatgataagtactacatacctcatctcttgggttattattgtagtcttgcattcatggttatgaatttaaaaataaataccaattatggaaatagtactaaaggcttgccgcacatgaaacattattttaattggtttaaagtccctttataaagagtgctacatggtttagataaaggaaacatataactattgagttacaggggattttattaattataaaatgcaatcaatttaaattacgtaggtttaagactagtcccttggataagccccaagcgaatttgtcttcagattattaaaattagtgctgtaaatcagggtgggcaattcacagcctttctgaactgactgaactagagcttgcagtgaagtgttctgctgagactgagcaccttacagatatttttctccagaagatggtgctgggtaataaaatcatcacaattagggaatggttagtggtctctactgtggcaaatgccaactgttggaattcactttattgtagaaaaacccaaactgagactcttaagttttgtttagcaatgtgtttctggtatgaaacaaactactgtgtcactgtccaggtaggaaacaattctttcaactgggttttcagcataaatgggaactgatgtagaaggcaggatttagcccttctaggcaaaagaaaagctcagttgggtttcacgagtgttcctgtgcttatattcagtctgtgcctacatgttctcatgcatgtctaacctgatttacctcttacctgtaacctaccttatcatgtggcttttaattgacagtcactcagccatttctaagcagatatagtagtacctttcagaactcacattggcaagtgtaaaaagatgacttaaggtgaagtgaggacaaaatcacattctgcatactaacctatttttttctccctttaaggtgctaaacttgcacctcatgtccactcagtaacaagtattgggacgtagagcacagcctcactcagctctgaaaggtaatacagcttgtgaggaagtgagccagcagtggcctttgcaattgtggatcttgagctctgctctcagcagatttcaggtgtaaccatttgttaactgtactgaaggtgtgtcctcaagaagaaagtgttcaaattaaaaaagctgctgccaagt

SEQ ID NO: 148868 - DNA, 3004 bp, Artificial Sequence
  derived and/or modified sequence
atttcccgctgtcaggatgaggaggcggaggtcggcggtcgggtccgtctctgcccgcggctgtggcggcgccggcggatccagccttagcggtttctctctgggcggcggcggcggcggctcggttgacgcctcctccgccagctgagcccgcgggagcccaggacgccgcttccccgcccatccccgctccccgaggccggccgcctggtcatggcgcagccgggcccggcttcccagcctgacgtttctcttcagcaacgggtagcagaattggaaaaaattaatgcagaatttttacgtgcacaacagcagcttgaacaagaatttaatcaaaagagagcaaaatttaaggagttatatttggctaaagaggaggatctgaagaggcaaaatgcagtattacaagctgcacaagatgatttgggacaccttcgaacccagctgtgggaagctcaagcagagatggagaatattaaggcgattgccacagtctctgagaacaccaagcaagaagctatagatgaagtgaaaagacagtggagagaagaagttgcttcacttcaggctgttatgaaagaaacagttcgtgactatgagcaccagttccaccttaggctggagcaggagcgaacacagtgggcacagtatagagaatccgcagagagggaaatagctgatttaagaagaaggctgtctgaaggtcaagaggaggaaaatttagaaaatgaaatgaaaaaggcccaagaggatgctgagaaacttcggtccgttgtgatgccaatggaaaaggaaattgcagctttgaaggataaactgacagaggctgaagacaaaattaaagagctggaggcctcaaaggttaaagaactgaatcattatctggaagctgagaaatcttgtaggactgatctagagatgtatgtagctgttttgaatactcagaaatctgttctacaggaagatgctgagaaactgcggaaagaattgcatgaagtttgccatctcttggagcaagagcgacaacaacacaaccagttaaaacatacgtggcagaaggccaatgaccagtttctggaatctcagcgtttactgatgagagacatgcagcgaatggagattgtgctaacttcagaacagctccgacaagttgaagaactgaagaagaaagatcaggaggatgatgaacaacaaagactcaataagagaaaggatcacaaaaaagcagatgttgaggaagaaataaaaataccagtagtgtgtgctttaactcaagaagaatcttcagcccagttatcaaatgaagaggagcatttagacagcacccgtggctcagttcattccttagatgcaggcttgctgttgccatctggagatcctttcagtaaatcggacaatgacatgtttaaagatggactcaggagagcacagtctacagacagcttgggaacctcgggctcattgcaatccaaagctttaggctataactacaaagcaaaatctgctggaaacctggacgagtcagattttggaccactggtaggagcagattcagtgtctgagaactttgatactgcatcccttgggtcactccagatgccaagtgggtttatgttaaccaaagatcaggaaagagcaatcaaggcgatgacaccagaacaagaagagacagcgtccctcctctccagcgttacccagggcatggagagtgcctatgtgtcccctagtggttatcgtttagttagtgaaacagaatggaatctcttgcagaaagaggtacataatgctggaaataaacttggtagacgttgtgatatgtgttccaattacgaaaaacagttacaaggaattcagattcaggaggctgaaacgagagaccaggtgaaaaaactacagctgatgctaaggcaagctaatgaccagttagagaagacaatgaaagataagcaggagctggaagacttcataaagcaaagcagcgaagattcgagtcaccagatctctgcactcgtcctaagagcccaggcctccgagatcttacttgaagagttacagcaggggctttcccaggcaaagagggatgttcaggaacagatggcggtgctgatgcagtcacgggaacaggtttcagaagagctggtgaggttacagaaagataatgacagtctccagggaaagcacagcctgcatgtgtcattacagcaagcagaagacttcatcctcccagacactacagaggcactgcgggagttggtattaaaataccgtgaggacatcattaatgtgcggacagcagcagaccacgtagaagaaaagctgaaggctgagatacttttcctaaaagagcagatccaagcagaacagtgtttaaaagaaaatcttgaagaaactctgcaactagaaatagaaaactgcaaggaggaaatagcttctatttctagcctaaaagctgaattagaaagaataaaagtggaaaaaggacagttggagtccacattaagagagaagtctcaacagcttgagagtcttcaggaaataaagatcagtttggaagagcagttaaagaaagagactgctgctaaggctaccgttgaacaactaatgtttgaagagaagaataaagctcagagattacagacagaattagatgtcagtgagcaagtccagagggattttgtaaagctttcacagacccttcaggtgcagttagagcggatccggcaagctgactccttggagagaatccgggcaattctgaatgatactaaactgacagacattaaccagcttcctgagacatgacaccctcatggcaggattctagcctgcactttgggtttttaactcatctttagagcaacagtaattattatttaactcttaactgaagaaagagaagtcacaacaaaaggaagactggagaaatgcttacttctagagggagaagactgtgcggcacaggaaacagcaaacagtggggtgatctgcagcccagagaccttca

SEQ ID NO: 148869 - DNA, 2589 bp, Artificial Sequence
  derived and/or modified sequence
atggcccagcccggccccgccagccagcccgacgtgagcctgcagcagagagtggccgagctggagaagatcaacgccgagttcctgagagcccagcagcagctggagcaggagttcaaccagaagagagccaagttcaaggagctgtacctggccaaggaggaggacctgaagagacagaacgccgtgctgcaggccgcccaggacgacctgggccacctgagaacccagctgtgggaggcccaggccgagatggagaacatcaaggccatcgccaccgtgagcgagaacaccaagcaggaggccatcgacgaggtgaagagacagtggagagaggaggtggccagcctgcaggccgtgatgaaggagaccgtgagagactacgagcaccagttccacctgagactggagcaggagagaacccagtgggcccagtacagagagagcgccgagagagagatcgccgacctgagaagaagactgagcgagggccaggaggaggagaacctggagaacgagatgaagaaggcccaggaggacgccgagaagctgagaagcgtggtgatgcccatggagaaggagatcgccgccctgaaggacaagctgaccgaggccgaggacaagatcaaggagctggaggccagcaaggtgaaggagctgaaccactacctggaggccgagaagagctgcagaaccgacctggagatgtacgtggccgtgctgaacacccagaagagcgtgctgcaggaggacgccgagaagctgagaaaggagctgcacgaggtgtgccacctgctggagcaggagagacagcagcacaaccagctgaagcacacctggcagaaggccaacgaccagttcctggagagccagagactgctgatgagagacatgcagagaatggagatcgtgctgaccagcgagcagctgagacaggtggaggagctgaagaagaaggaccaggaggacgacgagcagcagagactgaacaagagaaaggaccacaagaaggccgacgtggaggaggagatcaagatccccgtggtgtgcgccctgacccaggaggagagcagcgcccagctgagcaacgaggaggagcacctggacagcaccagaggcagcgtgcacagcctggacgccggcctgctgctgcccagcggcgaccccttcagcaagagcgacaacgacatgttcaaggacggcctgagaagagcccagagcaccgacagcctgggcaccagcggcagcctgcagagcaaggccctgggctacaactacaaggccaagagcgccggcaacctggacgagagcgacttcggccccctggtgggcgccgacagcgtgagcgagaacttcgacaccgccagcctgggcagcctgcagatgcccagcggcttcatgctgaccaaggaccaggagagagccatcaaggccatgacccccgagcaggaggagaccgccagcctgctgagcagcgtgacccagggcatggagagcgcctacgtgagccccagcggctacagactggtgagcgagaccgagtggaacctgctgcagaaggaggtgcacaacgccggcaacaagctgggcagaagatgcgacatgtgcagcaactacgagaagcagctgcagggcatccagatccaggaggccgagaccagagaccaggtgaagaagctgcagctgatgctgagacaggccaacgaccagctggagaagaccatgaaggacaagcaggagctggaggacttcatcaagcagagcagcgaggacagcagccaccagatcagcgccctggtgctgagagcccaggccagcgagatcctgctggaggagctgcagcagggcctgagccaggccaagagagacgtgcaggagcagatggccgtgctgatgcagagcagagagcaggtgagcgaggagctggtgagactgcagaaggacaacgacagcctgcagggcaagcacagcctgcacgtgagcctgcagcaggccgaggacttcatcctgcccgacaccaccgaggccctgagagagctggtgctgaagtacagagaggacatcatcaacgtgagaaccgccgccgaccacgtggaggagaagctgaaggccgagatcctgttcctgaaggagcagatccaggccgagcagtgcctgaaggagaacctggaggagaccctgcagctggagatcgagaactgcaaggaggagatcgccagcatcagcagcctgaaggccgagctggagagaatcaaggtggagaagggccagctggagagcaccctgagagagaagagccagcagctggagagcctgcaggagatcaagatcagcctggaggagcagctgaagaaggagaccgccgccaaggccaccgtggagcagctgatgttcgaggagaagaacaaggcccagagactgcagaccgagctggacgtgagcgagcaggtgcagagagacttcgtgaagctgagccagaccctgcaggtgcagctggagagaatcagacaggccgacagcctggagagaatcagagccatcctgaacgacaccaagctgaccgacatcaaccagctgcccgagacctag

SEQ ID NO: 148870 - protein, 475 aa, Artificial Sequence
  derived and/or modified sequence
MSATAAARKRGKPASGAGAGAGAGKRRRKADSAGDRGKSKGGGKMNEEISSDSESESLAPRKPEEEEEEELEETAQEKKLRLAKLYLEQLRQQEEEKAEARAFEEDQVAGRLKEDVLEQRGRLQKLVAKEIQAPASADIRVLRGHQLSITCLVVTPDDSAIFSAAKDCSIIKWSVESGRKLHVIPRAKKGAEGKPPGHSSHVLCMAISSDGKYLASGDRSKLILIWEAQSCQHLYTFTGHRDAVSGLAFRRGTHQLYSTSHDRSVKVWNVAENSYVETLFGHQDAVAALDALSRECCVTAGGRDGTVRVWKIPEESQLVFYGHQGSIDCIHLINEEHMVSGADDGSVALWGLSKKRPLALQREAHGLRGEPGLEQPFWISSVAALLNTDLVATGSHSSCVRLWQCGEGFRQLDLLCDIPLVGFINSLKFSSSGDFLVAGVGQEHRLGRWWRIKEARNSVCIIPLRRVPVPPAAGS

SEQ ID NO: 148871 - DNA, 1578 bp, Artificial Sequence
  derived and/or modified sequence
aggcggctggggagctgggagggttcagctgccacgtgagttctgcggccgctgctacacgcctggtgggcagcatgtcggcaacagcggctgctcgtaagcggggaaagccggcctctggggccggggctggcgcgggggccggcaagcggcggcgaaaggccgactctgcgggggacaggggcaaatccaagggtggcggcaagatgaatgaggagatctccagcgactctgagagcgagagcctagctccaaggaagcctgaggaggaggaggaggaggagctggaggaaactgcacaggaaaagaagctgcgcttggccaagctctacctagagcagctccgtcagcaagaggaggagaaggctgaggcccgtgcatttgaggaggaccaggtggcggggcgcctgaaggaggatgtgcttgagcagaggggcaggctgcagaagttggtggcaaaagagatccaggccccagcctcagctgacattcgcgttttacgggggcaccagctctctatcacatgtttggtcgtcacccccgatgactcagccatcttctctgctgccaaagactgcagcatcattaagtggagcgtggagagtggacggaagctgcatgtgattcctcgagccaagaagggtgccgagggaaagccccctggccacagcagccacgtcctctgcatggccatctcctccgacggcaagtaccttgcctctggtgaccgcagcaagctcattctcatttgggaggcccagagctgccagcacttgtacaccttcacaggacaccgggatgcagtgtcgggtctggcattccgcagaggcacccaccagctctacagcacatcccacgatcgctccgtgaaggtgtggaatgtggcagagaactcctacgtggagacgctcttcggacaccaggacgctgtggctgcactggatgccttgagccgggagtgctgtgtgacggctgggggccgggatgggactgtacgtgtgtggaagatccccgaggagtcccagcttgtcttctatggccaccagggctccatcgactgcatccacctaatcaatgaggagcacatggtgtccggcgcggacgatggctctgtggccttgtggggtctctccaagaagcgaccacttgccctgcagcgtgaagctcacgggctgcggggagagccaggcctggagcagcccttctggatatcgtcggtggcagccctcctcaacacagaccttgtggccacaggctcccacagctcctgtgtgcggctttggcagtgtggggaaggcttccggcagcttgaccttctctgtgacatccccctggtgggttttatcaacagcctcaagttctccagctctggggacttcctggtggctggggtagggcaggagcacaggcttggccgatggtggagaatcaaagaggctcggaattctgtctgcatcatcccactccgcagggtccctgtacccccagctgctggttcctgacactcttatcctccttatttaagtccttcccaggctatgccccaccctctttgtattaaaagcctcctcttttggg

SEQ ID NO: 148872 - DNA, 1428 bp, Artificial Sequence
  derived and/or modified sequence
atgtccgctaccgccgctgcccgaaagagggggaagcctgccagtggtgcaggagctggagcgggggcaggcaaaaggaggcgcaaagccgacagcgccggggacaggggaaagtccaagggaggtggcaaaatgaatgaggagataagctcagatagtgagtccgaaagtttagccccccggaaaccggaagaggaagaagaggaggagcttgaggagactgcacaagagaaaaagctgaggctggcgaagctctatctcgagcaactgcggcaacaggaggaggaaaaggccgaagccagggcctttgaggaggatcaggtggctggcaggctgaaggaagacgtgcttgaacaacgaggcagattgcagaaactcgtcgcgaaggagattcaggcgcccgcatccgcggatatcagggtgctacggggacatcaactgtccattacgtgtcttgtcgtcacaccggatgacagcgcaatcttctcagccgcaaaggattgctctataatcaaatggagcgtggagtccggtcgcaaactgcacgttattcccagagccaaaaagggagcagaagggaaacctcctggccatagctcacacgtactttgcatggccatttcttccgatgggaagtatctcgcatcaggtgataggtccaaactgatccttatctgggaggcacagtcatgccagcatttgtataccttcacgggtcaccgggacgccgtgagtgggctggctttcagaagggggacacatcagctatactcgacgtctcatgatagatcagttaaggtatggaacgtggctgaaaactcctatgtcgagacgctctttggtcaccaggacgcagtggccgccctagatgcattaagccgggagtgctgcgtgactgcagggggtagggatggcacagtgcgggtttggaaaattccagaggagagtcagctcgtgttttacgggcatcagggatcaatagactgcattcatctgatcaacgaagaacatatggtgtccggagcggacgatggcagcgtcgccctgtggggactgtcaaagaaacgacccctcgccctgcagcgcgaagcccacgggctgcggggcgagcctggcttagaacagccgttctggataagctcagttgcggccctgttaaataccgatctggtcgccacaggatcgcacagcagctgtgtgagactgtggcagtgcggcgagggattcaggcagcttgatctgctttgtgatatcccgctggtaggttttattaactcactcaaattctctagctccggtgatttccttgtcgcaggggtcggccaggagcatagactgggacgttggtggcggattaaagaagctcgcaacagtgtttgtattattccactgcgtagagtgcctgtacctcccgcagcaggtagttag

SEQ ID NO: 148873 - DNA, 1428 bp, Artificial Sequence
  derived and/or modified sequence
atgtctgccacagctgctgccaggaagaggggcaagccagccagcggggccggggccggggccggggccggcaagagaagaaggaaggctgacagcgctggggaccggggcaagagcaagggcggcggcaagatgaatgaggagatcagcagtgacagcgagagcgagagcctggcccccaggaagccagaggaggaggaggaggaggagctggaggagacagcccaggagaagaagctgcggctggccaagctgtacctggagcagctgcggcagcaggaggaggagaaggccgaggcccgggcctttgaggaggaccaggtggccggccgcctgaaggaggatgtgctggagcagaggggccgcctgcagaagctggtggccaaggagatccaggccccagccagcgctgacatccgggtgctgcggggccaccagctgagcatcacctgcctggtggtgaccccagatgattctgccatcttctctgctgccaaggactgcagcatcatcaagtggagcgtggagagcggcaggaagctgcacgtgatcccccgggccaagaagggagctgagggcaagcccccaggccacagcagccacgtgctgtgcatggccatcagcagtgatggcaagtacctggccagcggggacaggagcaagctgatcctgatctgggaggcccagagctgccagcacctgtacaccttcaccggccacagagatgctgtgtctggcctggccttccggcggggcacccaccagctgtacagcaccagccatgacagatctgtgaaggtgtggaatgtggccgagaacagctatgtggagaccctgtttggccaccaggatgctgtggccgccctggatgccctgagccgggagtgctgcgtgacagctgggggcagagatggcaccgtgcgggtgtggaagatccctgaggagagccagctggtgttctacggccaccagggcagcattgactgcatccacctgatcaatgaggagcacatggtgtctggagcagatgatggctctgtggccctgtggggcctgagcaagaagaggcccctggccctgcagcgggaggcccacggcctgcggggggagcccggcctggagcagcccttctggatcagctctgtggccgccctgctgaacacagacctggtggccaccggcagccacagcagctgtgtgcggctgtggcagtgtggggagggcttccggcagctggacctgctgtgtgacatccccctggtgggcttcatcaacagcctgaagttcagcagcagcggggacttcctggtggccggcgtgggccaggagcaccggctgggccgctggtggaggatcaaggaggccaggaacagcgtgtgcatcatccccctgcggcgggtgcctgtgcccccagctgctggcagctag

SEQ ID NO: 148874 - DNA, 1428 bp, Artificial Sequence
  derived and/or modified sequence
atgagcgccaccgccgccgcccggaagcggggcaagcccgccagcggcgcaggggctggcgctggagccggcaagcggaggcgtaaggctgatagtgcgggagaccgcggcaaatctaaaggcggaggcaagatgaacgaggaaatttctagcgacagcgaatctgagtccctggctcccaggaagcccgaggaagaggaagaagaggagcttgaagaaaccgcacaggagaagaaactgcgcctggcaaaactgtacttagaacagctccgccaacaagaggaggagaaagccgaagctcgggcattcgaggaagatcaagttgcgggacgtttgaaagaggacgttctggagcagagagggcgtctgcagaaattagtggccaaggagattcaagccccggcaagcgccgacatacgcgtcctgaggggacaccagctgtcaatcacttgcctggttgtgacgcccgacgactccgcaattttttcggctgctaaggattgttcaatcattaagtggtccgtcgagagcggaagaaaattgcacgtgatccccagggctaagaaaggtgctgaaggtaaaccccctgggcactcaagtcatgtcctatgtatggccatcagctccgacgggaaatacctagctagcggggatcgatccaagttaatacttatatgggaagcccagtcatgccagcacctgtacacgtttaccggccaccgggacgctgtcagcgggctagcctttaggagaggtacacatcagctttacagcactagtcacgacaggtctgtgaaggtttggaatgttgcggaaaatagctatgtggagacattattcggccaccaggacgccgtcgccgccctcgacgccctgagccgagaatgttgtgtgacagccggcggcagggacggcaccgtgcgcgtttggaaaatccctgaagagtcccagctggtcttctatggccaccagggaagcattgattgcatccacctgatcaacgaagagcatatggtgagtggcgccgatgacggaagtgtcgcattgtgggggctgtccaaaaaacgacccctcgctctgcagcgagaggcgcacgggttacgcggggagcctggcctggaacagcctttttggatttccagtgtggctgccctcctgaacactgatctcgtggctactggctcacatagtagttgtgttcggctgtggcagtgcggcgaaggtttccgtcaattagatctgctgtgtgatattccccttgtggggttcatcaatagtctcaaattcagctcttctggagactttctggtcgctggcgtaggacaagagcatagacttggccgctggtggaggatcaaggaggccaggaattctgtctgtataatacccctccgacgggtccctgtgccgccagccgccggcagttag

SEQ ID NO: 148875 - DNA, 1428 bp, Artificial Sequence
  derived and/or modified sequence
atgagcgccaccgccgctgctcggaagagaggcaaaccagcatctggagcaggtgccggagccggtgctggaaagcggaggaggaaggccgatagtgctggagataggggcaagtccaaggggggtggtaagatgaatgaagagatctcatccgactcggagagcgagagcctggcgccacggaagcccgaggaagaagaggaagaagagttggaggagactgcccaggagaagaaattgagattggctaagttgtacttggaacagcttcgccagcaggaagaagagaaggccgaggcaagggccttcgaggaggaccaggtcgccggtcggctcaaggaggacgtgctcgaacagcgaggcagacttcagaaacttgttgcaaaagagatccaggcacccgcatctgcagacatcagagtcctgcgtgggcaccagctgtccattacctgcctagtcgtgacacctgacgactccgccatattttccgcagccaaggactgcagtatcatcaaatggtcggtggaaagtggtaggaaactccacgtgatccctcgggcaaaaaaaggagcggaagggaagcctcctggccatagctcacacgtcctgtgtatggctatcagttcagacggcaaatatctggcctctggcgacaggtcaaaactgattctcatttgggaggcacagtcatgtcagcacctttacacatttactggtcacagggatgctgtttctgggcttgcttttcgacgaggtacccatcaactttactccacctcacatgacagatccgtgaaagtgtggaacgtcgctgaaaactcctacgtagaaaccctgtttggacatcaagacgctgttgccgctctcgatgcattgtcaagggagtgctgtgtcaccgccggaggcagagatggcacggttagagtttggaaaataccagaagaatcccagctggtgttttacggccatcagggatctatcgactgtattcaccttatcaacgaggaacatatggtctctggagcggatgacggcagcgtggcactatgggggctctctaaaaagaggcctctcgcgctgcagcgcgaggcccacggcctgagaggagagccaggccttgaacagcctttctggatctctagtgtagccgcactgctcaacactgatctcgtggcaacaggctcccactccagttgtgtcaggctgtggcagtgtggcgaaggatttcgccagctggatctgctttgtgatataccgctggtgggattcattaacagcttaaagtttagtagctctggcgatttcttagtcgccggagtagggcaagagcatagattaggacgttggtggcggattaaggaggctagaaattctgtctgtattatccccctgcggcgagtcccagtgccaccagcagcgggttcatag

SEQ ID NO: 148876 - DNA, 1428 bp, Artificial Sequence
  derived and/or modified sequence
atgagcgccaccgccgccgccagaaagagaggcaagcccgccagcggcgccggcgccggcgccggcgccggcaagagaagaagaaaggccgacagcgccggcgacagaggcaagagcaagggcggcggcaagatgaacgaggagatcagcagcgacagcgagagcgagagcctggcccccagaaagcccgaggaggaggaggaggaggagctggaggagaccgcccaggagaagaagctgagactggccaagctgtacctggagcagctgagacagcaggaggaggagaaggccgaggccagagccttcgaggaggaccaggtggccggcagactgaaggaggacgtgctggagcagagaggcagactgcagaagctggtggccaaggagatccaggcccccgccagcgccgacatcagagtgctgagaggccaccagctgagcatcacctgcctggtggtgacccccgacgacagcgccatcttcagcgccgccaaggactgcagcatcatcaagtggagcgtggagagcggcagaaagctgcacgtgatccccagagccaagaagggcgccgagggcaagccccccggccacagcagccacgtgctgtgcatggccatcagcagcgacggcaagtacctggccagcggcgacagaagcaagctgatcctgatctgggaggcccagagctgccagcacctgtacaccttcaccggccacagagacgccgtgagcggcctggccttcagaagaggcacccaccagctgtacagcaccagccacgacagaagcgtgaaggtgtggaacgtggccgagaacagctacgtggagaccctgttcggccaccaggacgccgtggccgccctggacgccctgagcagagagtgctgcgtgaccgccggcggcagagacggcaccgtgagagtgtggaagatccccgaggagagccagctggtgttctacggccaccagggcagcatcgactgcatccacctgatcaacgaggagcacatggtgagcggcgccgacgacggcagcgtggccctgtggggcctgagcaagaagagacccctggccctgcagagagaggcccacggcctgagaggcgagcccggcctggagcagcccttctggatcagcagcgtggccgccctgctgaacaccgacctggtggccaccggcagccacagcagctgcgtgagactgtggcagtgcggcgagggcttcagacagctggacctgctgtgcgacatccccctggtgggcttcatcaacagcctgaagttcagcagcagcggcgacttcctggtggccggcgtgggccaggagcacagactgggcagatggtggagaatcaaggaggccagaaacagcgtgtgcatcatccccctgagaagagtgcccgtgccccccgccgccggcagctag

SEQ ID NO: 148877 - protein, 761 aa, Artificial Sequence
  derived and/or modified sequence
MPNFCAAPNCTRKSTQSDLAFFRFPRDPARCQKWVENCRRADLEDKTPDQLNKHYRLCAKHFETSMICRTSPYRTVLRDNAIPTIFDLTSHLNNPHSRHRKRIKELSEDEIRTLKQKKIDETSEQEQKHKETNNSNAQNPSEEEGEGQDEDILPLTLEEKENKEYLKSLFEILILMGKQNIPLDGHEADEIPEGLFTPDNFQALLECRINSGEEVLRKRFETTAVNTLFCSKTQQRQMLEICESCIREETLREVRDSHFFSIITDDVVDIAGEEHLPVLVRFVDESHNLREEFIGFLPYEADAEILAVKFHTMITEKWGLNMEYCRGQAYIVSSGFSSKMKVVASRLLEKYPQAIYTLCSSCALNMWLAKSVPVMGVSVALGTIEEVCSFFHRSPQLLLELDNVISVLFQNSKERGKELKEICHSQWTGRHDAFEILVELLQALVLCLDGINSDTNIRWNNYIAGRAFVLCSAVSDFDFIVTIVVLKNVLSFTRAFGKNLQGQTSDVFFAAGSLTAVLHSLNEVMENIEVYHEFWFEEATNLATKLDIQMKLPGKFRRAHQGNLESQLTSESYYKETLSVPTVEHIIQELKDIFSEQHLKALKCLSLVPSVMGQLKFNTSEEHHADMYRSDLPNPDTLSAELHCWRIKWKHRGKDIELPSTIYEALHLPDIKFFPNVYALLKVLCILPVMKVENERYENGRKRLKAYLRNTLTDQRSSNLALLNINFDIKHDLDLMVDTYIKLYTSKSELPTDNSETVENT
